United States Patent Application Publication US 2015/0240253 A1 - sequence listing, part 30

SEQ ID NO: 142366 - DNA, 349 bp, Zea Mays
cgttggcattatagtttcatttgcttttgcagtcaacgtcactgactatttaagtacgcagtacacttcttaacaccaagatgagcaaattaaattttctttgtgaatcttacgtcccaagtaaacttggtgtgtcgtggtttgtctgtgctcatgggggccggtccggtcttgttaaagactgcagcaaagcgccgcgtggtctaacagagctctccattgggcctttttgctgtaatgctagcgtatattatgaagaatagagcagatagtctactctgtaagctcataaatgagtcagttatgcgcctatcttcgtctttcaaagatcttatagtggatgtgtgtg

SEQ ID NO: 142367 - DNA, 531 bp, Zea Mays
gggaggaagagattaagtggtatcaacgagcaaagtcgactcatttgcttcagggtgatgccaacacaagatattttcatttgatcgcaagtggaaggcatagaaagtctagaattttccaactcaggaacgggaatgaagtggttgaaggtgatgccaaactaaagaggtataacacttcttactacaaggggttgtttggaccggcgccgacttctgagattactctagacgagagcctggttcatgatattcctcaggtctcagtggaggaaaattcttaccttacttctgagttcagtgaagatgaaattaggaaagcgattttccaaatgcagcataataagtcaccgggccttgatggcttcccggccgagtttttccaagccttttgggacctaatcaagactgaacttatgactttattcggagattttcatgcgggaaaccttccgttatatagtcttaatttcggaacgattattctactcccaaaatgcaaggatgccttaactattcagcagtataggc

SEQ ID NO: 142368 - DNA, 295 bp, Zea Mays
gcttaaacctgacttcatgtacagtagctgttgctccgggtgaaatatgcggccaatttcatccctctgatccctgtcaccacaatctttccatttaattccaaagctttttcaacagtgcaacgaacccatcatcgtcggtactatgttgataaaaacgcaccacaaaactgaagaaaatgtagatctgttattcttgagctgggattacttggccagcttcatcctgcctttctttatcaccactggctagctagtagcaagtatggttgctatgctgctgcatgcatgccgg

SEQ ID NO: 142369 - DNA, 620 bp, Zea Mays
attgggtttcctgatctttggcatgtcctccatctatgcgttcaagaaacatactcactgatttttaaagcaaaaattcatgcatatagtgttcagatttcaatggatcaaactgcagaaattcaataaaccagaacaatttattaccttactcagaggggcaaaaggaactagggcgtcgtacctgggcgttcggtgtccaggtgctcgaaggaggggggtggagcagaagatgtaggtgaagcagcttcgtcggacgctagtgcagtgagggtcgcggtgttcgtcagatttccaaaaccctagccgctgccatcctaggagacaagaagagcggaagaaaagtgcgagatggacactcaggtgcgggagggtgagatgatcgatccttttatatgatggaaaaagcgggtaaatatatgtgaacttggaggacagtttgaccgcataagcggtgagaagcgccctgctcccagcgtctgattttccactgattttacgaacgttttgttgagcgcaggtttcgaacgcgggacaagaagcagactgtttgcctgctgcaccgcttaaacttaatgagaagttggccaataagctgccccaaacaggccctatcagtc

SEQ ID NO: 142370 - DNA, 832 bp, Zea Mays
cgagcacccgcaccgcccgattcacttaaggactggcgtcctacttcggttgaaaccgaattcaagtcctatccagtgttttccccaagttaatttcaagaacgatgagctaatttggtctggccacggtaaccgcgcggatcggggaagaacacgggcgttcacggcagcccagggtggtctagctcaattaaaggagtcgtacagcttgaggaggacctaaagacgctagaacaatcgaccagagtgtatgaacgaacctagaataatctggccgcggttaggatgattctgcggcggcggagagtcggtttgggggaaattggaaattggggagctgtggggaatgatcggagctacgagcgggttctctggacgcacgattacctagcagaacgggctgaggcttcaatttataggatacttaagcggtggtggccaatttggtcgagcaacgctggcagtcggagatggagaagaacttggcgcggtgaattcgtgtccatcgccggggcgagctcaccggcgacgattggacaaccgtagcgagtcacggcgtcgcagtggaaagcaaagccacgcggcacaaggtcgaacggcggcggcgcgaatcttcgcgcaggggggagtcaccggcggcgagcaagctacgctggcattctgatccatttggtctactgtaccatggcgatgatgctgaggcactctgacagaccattttggagcgcctatttctcccaattttgtgtggtgactaagctagctctctgtacgaaaattatagcctgacaatccagctacaattctatcatagcaatcttgatcaaattct

SEQ ID NO: 142371 - DNA, 486 bp, Zea Mays
gagttctcatataataatagttatcaggccagtctgaagatgtcaccatttgaagctctatatggcaggaaatgcaggactcctttgtattgggatcagactggagaaagacagttctttgggcctgaactgattcaagaggcagaagaacaagttcgtataattcgagagaatttgagggtggctcaaaccaggcaaaagagttatgctgataatagaagaagaccactggaattcgaagaaggagattatgtgtatctcaaggtgtcaccacttcgtggaatgaggagattcaaagttaagggaaaattgtccccttgctatattggaccattcttgatctttaggagagttggagagatggcctaccaacttgagttacctgctagtctatctgatgtgcataatgtatttcatgtgtctcaacttaagaagtgtctccatgtccctgaggaacagttaccaatggaagagctcggtgttcag

SEQ ID NO: 142372 - DNA, 668 bp, Zea Mays
gataatgggattagtgacctccgactgcccatccgtctgtgggtgaaaagttgaactgggaagcaatgtcacccctgctaaacggaataattcagtccaaaaagtgctagtaaaaactgggtcccggtcactaacaatagaacatgggaaacccatatagccgaacaatctcatcaaagaaagcttttgcaacagaggtggttgaatatggatggttgagtgggatgaagtgagcatatttggaaaaccagttcaccacagtcaaaacttatttccaccaacttttggaaagccctcaacaaagtccatagcaatatcactccaaacataagagggaactggcaggtgctacaacagtccagctgggtgcaagtgctcagttttattgcactaataaactccacaacctttgacatactctgtgaccaaacgactattgtgagggttgaagaaagataatcgaagacgatagagagtcttctaaataccctcatgtcgtgttgtatgtgcattcttcagtagctatagccatatagaaaaatctagaacatatgttgttggggcgaagtcgaacacgccacccttcgctctatgacttcatcctctcatcacgctgacgaaggctacatcgacagaacacgccagaacaagccaggggcgccgcctag

SEQ ID NO: 142373 - DNA, 475 bp, Zea Mays
ctcgccagttggggcgagtgtaggtgagggggagttgcaaagtctctttgagggtgaggagctgaggataatgttgtttaactacagggagatgggtatcatcccgaaggttgaaccaatgtaaggtgcgatgccctcgttgtatgtgtgtaactttagttggtatgatgatttgtatgatgaggctgtgtgcgtttgctgatctggcggtgcccgtgggggacttgtgcacttgatctagcgtgtttattatgtcggtccggctgcacctgcttttgagggggacttcgattttgagcacctgttgtgctagtctggctacatccttagtcgacttttgcacggatagtcttttgaggaagtccttggttttgcgcacttgttgtgctaatccggctgcaccctgaggcgacttttgcacggatagtcttttggggaagaccttggttttgcgcacttgttgtgctaattctgc

SEQ ID NO: 142374 - DNA, 446 bp, Zea Mays
ggctgtaagggtagcctgccgttctgccttcgttgaatctggatcgtccatcactgttgttcaatctagatcgtccatcgccacactaacctgttagccgcgctctcaccccgcccccatccgcgcgctaggtccacgtgctcgcttcgcgcaaaaagtcgacacaagttaacaataacaagagctgattatacaagctaaatgcttcctctgtagcaggaaggtttataagttgctaccgcaacctttggctgaccgatatggtacaatatatttgtgccgcggtagcctccgtgggctgagttatttggttaacgtattaggcccatctatcaatccctacatagcaaagtgggcgcctggcgtggccaatgtagccccgcctcggcttctcctacgcgtagctgcgcaaccgcggtgtggccgggcatctcggacgccgcccg

SEQ ID NO: 142375 - DNA, 350 bp, Zea Mays
caaggacggcgatgacctccgcgtctgcgatttcaggtttgccccctacccctccgacgggccccagtacttccctcgtctcatctcatgatcccgcatgagcagcatgctttgggttttgggaatctacaagtccggaggatgcctgtgtgatggtgagtgctgtggcattgctagagcaggtttagggaccgtgtggaatgcagcaattttattggaactggaagcggttcaatttcacatggcgaaaaaccctcgcaacaggaagaaaaatcccgcattccaaacaggtagtttttttgtgctctgcaaactttgatcagcgacgctcctgttggtaccactataag

SEQ ID NO: 142376 - DNA, 540 bp, Zea Mays
ttgtatcagcttgcatcacccatctgggccatggcacgcagcatcatttcactggtgtgaaatccttggatcaagacactaatagataaaagctaaatcatttcaagttggacatctagttggaagacagtcttgccattaagaagtatggactagaagtttagcaaatgatcaccaaactgggaagggccttatagagtgacacatttaatctttggtattgcatacgtgttgtagactttgcagggtgatgagttacctaaggcattgaattcgttttctaaagcaatatcatcccagtgtttggcaagatgcttagaaaaccaatgttttcacatcgagttgataacaacgtgtacgaggtttttttgtttcgcttagcttccccgaaaggcagagtcatgtgttgagcatcatatgtggcacctagtggaacctaggaaggtcagacggtctgaccatgtgccctggatggtccataccccggatagtccacgagatagcccgagtggcccatgattagatcaaatcagacgagac

SEQ ID NO: 142377 - DNA, 548 bp, Zea Mays
acacgtagacctaggtgcatcgagacggcccatgtgccgaaactaattgaaagggcggaaactacccccaccccagttacagagactgcttctgctatgcctgttgaggtcattgcagacctggtcagagtggtggaatcagaacaggtagcagagaaggtatcggaatagcctaagatgatgatggtgacagtgctgccgaagctgtcagttgctacaggaactccgaggaaaaggaggatggctagtgttttcgaagctgttttagagtctgtgaagacgacgcctccttctgccaaagcttctggcggcaaaactaaagatgtcacaaagatgatcatcgccaacacctctgctcatgccgaggcaggaccttcggatactgcactagaaaatcttgcggaagagagccttccagagaatccctcggcgcctgctcccaaagcaccttctagtagtgatttaaatttcattgtgcgacatgctttgggaaaacaactatcaacagagcaagttgcagaaactaagcattatgctaaagagctgaa

SEQ ID NO: 142378 - DNA, 290 bp, Zea Mays
caaagcttcaaagtgaggctaggggaatgccttgtgttcaatgactactatcttccaatgcttatggaggtgtaccccattaaacttcatgtgtatcataggtaggagtcgaccagcaacaacagtgccatgttccatgaaggggttgtcatactcgatcagctagagagttttgtaggcaatgccaaaaaagggaggttcaatctaatttagccctagcccaacctaaggtagcggagggctggactagacaagtcgccttgccgcctatgacgtgacgtaaaattaga

SEQ ID NO: 142379 - DNA, 567 bp, Zea Mays
gcgcattatcacagctttacagactgaatttgctatgaaagatttaggtaaccttcatcatttcttgggtatctcggtaactcgtcaacccagctctttatttctgtctcagaagcattacattcttgatatactggatcgtgctggcatgacagattgcaaaccttgcaacacacctattgatacttcatccaaactctctagtgatggacctcgaatatcagacccgacacaatatcgcagtttggctggtgctcttcagtatctcgtgttcacaagaccagatattgcttatgctgtgcaacaggcctgtctcttcatgcatgatccccgcgagcctcatctagccttggtgaagcgtatattgcgatatcttcgtggtactttggactatggattcttaattcacaagtcttcattggacaatttaattgtttacacagatgctgattgggcaggttgtcctgacacacggaagtccacctctgggtatgccgtttttcttggagataatctattgtcgtggtcttccaaaaggcagccgactgtgtctcgctccagtgctga

SEQ ID NO: 142380 - DNA, 418 bp, Zea Mays
cggaggtgctgactgcttcctactggctcggtcccatccgatgcgatgccataagaggggttcctggtgaccaaaaacgtgtgcgaggacaccactcagaatgaatgtgctcccctaatctaccaatcgagagggcatggcagtcaggtgaagaccgatgcacatggcactccactgcacatccctgccctaatgatctgctgctaattgagccattgaggtatgtactaattaatctgggaattagtgtgtccataccactaggctagtgatcctaatgggctaatcaatttcaagttcttacagtttagtcacatagttttgggtgatttatcggctggtaatttaataaggcaattatggtagcttatagaatccaaaatgatgagaaattcaatttgtatgccttacagtctca

SEQ ID NO: 142381 - DNA, 355 bp, Zea Mays
cttccaaaggccttttggaagtttgatttattttgcttcggatagggacaatccttgatgaaatgtccagacttcccacagttgaagcagctgttagatgaactgggtagggctgggaaacgagtaccaggggcactcggctgaatattttgagtaggggcagcagttggacggatgaagaccggttgcttgaaaggataggaggatggacgaggaaaagagcgatttgggttaaagggacggaccactagccttgaccgcttttcggatccctgagaggatccctcacccccttcacatccaaaccattttgtctttccctgccccgaattatttgcctccaccgagagtgttg

SEQ ID NO: 142382 - DNA, 496 bp, Zea Mays
ttttcaagtcgatgacttatctttgaagcagcttgttggtgtgctatttgactggatgtggggttctcatggccgctttatggtcagggagagggttggacaggccatggagcatgtagcattgtttcctacttgattgggattgtatttcgtgtgtctatactctaatgtgctgaatttttgtgaaaggcacggagggatgaggagatcgaggacttggaaggctcgttcgttactctgcaaattgctggagttggggtgggtgcgaaggaggagtcctcgctggctagggctgatgatgtcgtgtatagtgctgcagagacttcacatcgagcggttgacgatgaacaacgcgatgcacatgtataaaaggggtgataatacttttctgaggggcttgatttgtggtacgcattaacacatggtttggtacctgcacaggttctgttgactgagcctatgcagggggattttgattcctcaggcaatggaaggg

SEQ ID NO: 142383 - DNA, 356 bp, Zea Mays
ccaggctatccgctagatcgtccttcgtcatggcgcaaaggccagctttgagtttcgggaaccccatgcttctagccatttcccggcagacgaataattctttattgtctgggagacagtataggaagtcatcttcatttgttccattgaacactacggcccccctcagatacttcagtgctcgagcatagtgattggcttcaaaaatctcttcttcggatagtttcttccccgaagcatgtcgcacaatataatcatgtattttggaagatgcttcgggggtggcagtgtcgatttcctcaatcaaaatcagctctgttgtttttgttttttcagcttctaaacttgcctctgac

SEQ ID NO: 142384 - DNA, 505 bp, Zea Mays
cttctaaacaaactcaattttctaaatggattttattttaatcctgtttttcttttcctaatccttgatctggactcctcggtaggggagggagtcagccggctagggatagctaccgcttcttccagacacggtgccagcctgccagggtgtggccggctctgggcctcactgggccctcattctttagccatggatcgacccatgacatcactccattttttgctggttccattggaaggatgagccatattggtaagtcctttgtgtgcacactgaggcggcctaccaccatggctgaggtggatatgcctcgtcctgccgatgatgaggtggaagatgtagtgtaaggagctgatgcagccgtggaaaaacttgtttgctgttgaggttatgacattgcagtggacgaatggagttcctggggcatcaatgatggtatgggaacacctgcttctagtggtagcatttgcatggttaggaggtgggggaaggggggtgcggt

SEQ ID NO: 142385 - DNA, 686 bp, Zea Mays
cacctcggcactacaaccgatccttcagcgctctgagcggcgggagcatcttgttttgctttggcagtggaggaggtcctttcaccaaattcgggcactacgaccggttcaatatatcgtgcccggtgggttagaaccgtcattttcttgcctttcggcacagcagtggtggccgaagcggcagttattctctgttttccttgccttcgcaatgggtagcaataatcagggtatatgaagccaattgcatcaaacaccctgttcaatcttttcttgccctgacccccgaaggccgaggataaagcatcatcttcggctctgctatatgtcccaagtagctcatcactaatagccttaatacttttcagccaatcgccatttggcttgacaaactggtccctgaacctgaagttatactttaatcgaactaatccaccttcggcggacccgacagcagtatccttcggcatctcccagttatctacaagtggccacactctataggctatgtgttcttggattaagtctcttgtgccactgaaagcacaaacattgctaaaagccttttgacatgcttcggcatcactttcaatagccacattcgatctccgaaggccgaagcgagaccagatggggcgctggataatttccttaatatcctccctttcaatcagattattcttaac

SEQ ID NO: 142386 - DNA, 902 bp, Zea Mays
gttttggagtcagggattgatctgtcctagtttgttgttggtttgtaatgttttggactttagttggttgcacgcttgatgggctaggtcttgctgcaggggcccgatccatgttctgttggtctgcagagtctcttttggatttcgatgtgactcgactttcctttggtggagctcctctgaatgggcatatttttcaaagagttgatacaattcctgaaggttggtcggaggatcccttgtgcagtgactgtataggacacctgcccgaaggccactaactgtataatggttggctatctagtcatcaaccgaggacaactatgatttcaacaggaggaactttttgtagtattcgtgaaggctttccttctcttattgcttgcaaagtgagagttcagctagtgcatttgtttccagtatgtaaccttggaacattagcaggattttgtcgcagagtgttttcgaggagtcaattgataatggtggtaaccttgagtaccatgttagagctaggcccttgagggatatgatgaatacttggatatggtggcgtcgtcccccctgatgatgtgattttgacctggtagctcatgatgtagtaggttggattctgtgttaccgttgtactttggataagtgtctgttatgtaactttgtggctaggggaggcttggagctgcggagcgagaggacttcacttgtcaaggtagttgagcccttggatggtagctggtgcgaaatggtgtaagttttggttggccacgccggccgactagtggtggcggggggtcttcgtggtgcatgtcaacagtttcttgctccatatccctagccttttgttcctcatctagtatcatttgtctgactctagccttaatattggttcactacctcttgga

SEQ ID NO: 142387 - DNA, 503 bp, Zea Mays
gaacaactttgctatagggattaagccttggtcacaaagaaaatttggagtaaaatgagcctaaagtcgagctgtcagactgccctaggtctgaattcagactaacagtgagattgggcaatctttggactgggattcgaccatgatctagtgagtgtttggctatggttgctatagcaagattgtagctggatcatcgggcaacaactttgttgcaggcagattagcaagttatcatgaaaaggtttgagatccaggccctgtaaattgggctgtcaggcgcactgaatagggattccattgtacagtgactgaaagagatcgcaggttcaccccctcgccaccggtgatcttgcgcccagatccacgtcggcgtcgcgattcacgcctggccgaacacagatagcgctcctcggtaagaaatatcgcgctgtagataaactccggccactgttctcactggccgtcatgtcccgccatggtcaatcgcgctggcatcaccg

SEQ ID NO: 142388 - DNA, 759 bp, Zea Mays
ccgacaagcgctgggagaagaggcctcgtgaagaggtccacgctgctggaccacccgtctctcacgcccaaggggcaccccatggaggcgatcggacattggacgacatcctcgatgcctagtgcccgtaccacaaagatatgtgccacaccctctagaactgcagagacttcaagcactccgtcgggaatggctgacccttccaacctctaccacatcccccaccacgagatgtgaagcttgccaattcttatcaaagcaacaacatttaccatcacagcagctgcagaccatatctataacatggccatttgcgtgctggggattggacatgattggacccttcaagaaagcttagggaggctatactcacgtgctggtcgccatcgataaattcaccaaatggatagagtacaaacccattgcttctctaacttcagccaaggcagtggaattcatacaagacataatattcaggtttgggataccgaatagcatcataactgacctgggatccaacttcactagctctaaattctttgatttctacaaacaacgaagtatccagatcaagtatgcatcagtagcacacccaagagctaatggccaggtggaaagagctaatggtatgatactggaagcactctgttcgacaaaaatgaaaagttcgcaggaaagtggatcagagagttaccttatgtggtttggagcttaagaactcaacctagtcgagctctgcatggaaacacccccttcttc

SEQ ID NO: 142389 - DNA, 411 bp, Zea Mays
ccgcgagaatataacacgattttcttaaaactttccaaacttaccctaacatgtcaggcggtcagcttcacctcactaggaatttctgctgttgccgtttgtttttcctcttttacgtcctgtccaacacgtacaagtgaacacctctaaaccctagtgccctgtaccgaactacggaatgcagctcagctgcaggcttcgttcatggaagtctagacaaaatttaatgccttccatcaaacattccggagaaattctaggatccgagcgaacgaaatctggcggcggcggagcatacggaggccaagtgatctactcctggtgcacggtggctccctctggcgaaacagacagtgctatcctaatcagcaaacagggtaaccgtactgccgagaggcccacacacctggc

SEQ ID NO: 142390 - DNA, 473 bp, Zea Mays
tttgtgttcatgcccttactttgaagtctaatggtgaatttgtcctcatttttttgacttggtgatttggcatctggttttcaaaacaacggtagagtataccctagctagcgatactacggaaggttgggtgtagcagttgaccagatgatctcgcttcctattcattcaaagcttacatctttatgtgcttttgattgattcccggtgactaattttactgctctccatatatacaaattcattcacctatcatattgattcccggtgactaatctttatggctggcgggagcgtttggtttgctcgggcgggtgctgggcctgggcggttgcgagctgggaatgtggttctgagctgagcgggacgctccttctttttttatcgagacgtttttctaggttgagttcatttctctgcttcatctgaaaacaattatcttctcatttcaccatgatctttgggagccatat

SEQ ID NO: 142391 - DNA, 544 bp, Zea Mays
ggaatagagaacttaaccttagcatatggatcattgtctatttcaggattataattacaacgtctaccattacctcccataccatgtcaattacgtgcgaggtgtcgtcgaagcgatgcatcaacatctctatcatcgtcgtcgtcgtcctccgtaggagagagaactactgcaccagcagctagggctagagcttatggtgggggacgagcctccaacacgtccatgcgtgtaacaagttcaacatcttgtcgatcaagatgctcataggatgtcgccatagagtcctggtatttttgaaagcttcagtcatcgcgcacatcatctcctccaattccagctaagagacacactcatcgtcattaagctcagggcccttctccttgtctgcttggttctttggtcctgtcattattaccacaaaatagagacaaaaatgcaacaaacaaatagtgtgaacaacacactccacacaaagttgcttcgccttgatgcattgttcgttgtgacgccacatgtcgccaccagttccctccagaaccgc

SEQ ID NO: 142392 - DNA, 362 bp, Zea Mays
gatgaatcaagtgactcgaggggggttataatggttcagaatcgcaccctacgtgcagtgtagtgctgattatagtattgctctagggaacatgttacaaagggtgcaagtgtgagaatgagaggaaggggagaactccggctgaatgctcctagctctcctgtcccatgcctattcggtcgcccccgtttaaagttcaagatggaagctcttacaaggggacctatttatctaaagtagggtgtggtctgtcatctttgagagtccttctggcgcagttctcctgatgttgtcttgtgatacatgcgtagccatatgttcggtttggtcaatcgctctgtcctacccggtatgcgagtaac

SEQ ID NO: 142393 - DNA, 385 bp, Zea Mays
catcggtgagcagttggcttctctgctctacctggagccagatagtgaacttacggtaggctatgcatttattgcctatttatcttgtttccaacgttcccattacccttctgatctcatttgcttgaagtgtctatttcctgtgtctgatatttttggatatgggttcaggctatgctaatcgcagcagaggccaaacgacaggaggaaaaagcaaaaggagtcagtgccgacgaggcagctgataatcaagatactgtgatgttcgacgataatgaagaagacgaggaagaggaaagcgaagaggaggaagaaggcgccgaccgagagcctcaagggaggggaggaagaggagggagggggatgataatgtgtttccattttg

SEQ ID NO: 142394 - DNA, 506 bp, Zea Mays
gttggttcagttgtaccttataaaactttagagtcctctttcgagtgattttgtccttctgatccagaactcaaatgggatgttctaaataagtcaagtctggttccaaagtaacatccaccacatctacagttcgatcaggaatccgaaggcatttcttcaaatgagatatatgtaacacattatgcaccgcagacaatgattctggtaattgaagtctttacgccatttgtccacatcgctcaagaatgaggaatgggccaatatatcggtgtgccaattttcctttaaccccaaaccggcgaacacccttcatcggtgatactttcaggtatacataatcgtcggcttgaaaaaccaaaggttgacatcgtttatccgcatagtttttctgtcgagcttaagcttctttcagattgtgccttatacgttggactttttcttccgtttctttaaccaagtcaggcctgaaaaaccactgttctccgggttctgaccaatttaag

SEQ ID NO: 142395 - DNA, 444 bp, Zea Mays
tggcccttcccatagtggtgacaatttgtgccgtccttcccccgttagaattcggcgaaggaccaagtctcccactacaaaggatcaatgtcgtatggccttgtcatgatagcgcctcagggtttgctggtatctagctgactgaattactatattcaatagctcttcctccaatacgtcaatgtcctctaatctggtagcctctgcttcagctatgctttcaaagaccaaccttggtgccccaaacctgagatcagcaggtagcagtgcttccaaaccatagaccatgaagagaggagtatttccatgcagagctcgactagattgagttcttaagctccaaaccacatacgacaactctctgatccattttcctgcaaacttttcattcttgtcaaagacttccttccttagtgcttccagtatcattccattagccctttc

SEQ ID NO: 142396 - DNA, 402 bp, Zea Mays
ctcttagtttggccatcggtttgaggatgatatgccgaactgaagttcaacttcgtatccatgttctcatgaaggctcttccaaaatcttgaggtaaactgtgatcctcgatcagaaacaatcttcttcggtacaccatgtaagcacacaattcgagccatatacaattctaccaactgagaacctttataagtggtcttgaccgaaatgaagtgagccactttggtcaatttgtccacgatcacccatatggaatcataaccctttgggggtgagaggcaacccgctaatgaaatccataccaatttcttcccacttccattcaggtacttttaacgggtgcaacagtccagctggtctttgatgttcaactttgactctttgacatacaacacacacagc

SEQ ID NO: 142397 - DNA, 1518 bp, Zea Mays
catatttacgggtaaaggtttgcctcagtttatcccttccccatacaccactcgtatggaagccttcggcactagattttccctttaatgatattttaataaggttttcttcattggagaaagtaacacatgtttcatttaccatgatcttgcaaatgaacacttagtcaacactaaggaagcgttaaacagtttatgtcaagctcagcattcatgcagtacagccgctctactcttatacttgaattgaattactgaaaccaaactctgacctattatattgaaatattactttgatcgttaactgtttacattttttaatatactttcctgacttcggacaggaacatagagaataatattttttctggaccggtgcctgcgagcttgcttaacataccaaacttcaagtgagataccttcttcctttcacatttaccttaatcagcttcattaaacctccacgatgttgtctgtagcattgttatttcatctattagacaaatatataatattatttagataggttgtctcgtctatatgaacttgttaagcgactaatagtatatcatcacagaaaggacgggaatccattcaataccacatctgcatctccgccttcaacaggacccgacccaactctaacaccagcacctaacacttcaaattcaacgcccccagcaccagcacccccatctccttcaagagctactcccccgcctaaaacaacctcaaattatcctgaaggatcaactacccgagacagcacttcatcatctaggaaacacaatacatcaaccctcaagattgttggttttgttcttgctggagtagtgctgtttattgttatagtcttcctagtattattttgtctatccaagtaccaagggagacagtcgagatacgatcgtaatagaagtcagctgggaggggtgcatcatagggttgaaccgcaaatcaagccacctccagtgcaacaaagcaatgatattaaagaaggtaaacctttcatcccactattatatagctttgtgtttattttttgcgttcatgtaattggtttatttgataagttcaggcgagacaccggacaggagggtccatcaactaagttcatctgcagcaggtataaagtctttatgacaaagtgcatctaagttatattcaccaactacagatgtcagaaagtttgcgtgctattgtttacagctctcccaaagaagtctcctgaaaaccaaaaggagcacataattaattttgatcaaacagattcagatctgtttcatgtttctctaccacctcctcctccaccaccgccattaaccccaattgaaagagttgctgcaaatctcattgttccactagaaaagcgatatattcctccaccaaagacaagtagctcgacttcttccgcgtcattctctgttgcatctcttcagcaatatacagatagtctcagagaggagaatgtgatcagagagagtagattaggaagggtttacctagcagagcttcctg

SEQ ID NO: 142398 - DNA, 664 bp, Zea Mays
cctagctgagcctgtgccgaatagcaaaaaggtgaaggttctgccccaccggccgcgttatattgaaccggtcgtggtgcatgaattcgacgcagggtcctcagcaaccgaagcaacagaaactgctccgattgcacagagcactgaagaggtgaccgtaatgccgaaggtacccatagccaagccagtcgaggctaaggttgataaggctgaaaagtcaaagattgaagaaataataaaaatgccaaaaattttgagccctccgacagagacaaggctgtcgaacgtgcaaaaggcttctgctgcaactcccaagagaaggagaatggccaacgtgttggatgctgtgctagaaactacgaaggttttaagccctgctgctacaaagaaagttgctgaaattacaaaaaacgcaggccgaaaccaaaactaggcaaacagaaactgaagttgcgctagctcaaactgaagccgaagctgggccttcagtgcccatcgagatggagcctactgatcctaaggaaaaaacgacagagcagattgcatctgaaaagatcgaagctcctgctcccgaagcttcgaacaaaagcattgactacattattcgtcatgcttcgggaaaagaactatcccaaaaagaaatgctagaagcatgacactacgc

SEQ ID NO: 142399 - DNA, 295 bp, Zea Mays
gcccaccttacaagagcaaatagtccgggcacagattgaagacaagggtgttcgggttatcaaagaaatgatcaagcaaagggcagagaaatataagtgctttcgtcaggacaacaagggaattctatggtttggagatcgattggttgttcccaaggaccctgagctcagaaagaagatattggatgaagctcacctttcaaaattctccatgcaccctggcagcaacaagatgtaccatgatctcagatccttatactagtggaccagaatgaagagggaaattgccaagtac

SEQ ID NO: 142400 - DNA, 446 bp, Zea Mays
aaaggagccttcacacataggaagctccaaaacttgggtgcaaacgcaacagctttcgccgcagccccaaatccacaatatttagcaacaacaacagcaacatcaacccgaagacacccatcacagctactaccaaagctaccagccgacaagaggtggtaggtccccaaggggaagggggcatggatgaggtccacctcatgaatacaagtcttactgcatatttcacgaaagctccagtcactcaaccaaagaatgtcacatatacaaagaagtgaaagagaggatggacatagagaaagggaaaagggactacctagaacaacaagcgaaggttgtagtccacaccttccaaccatagtttcaacatcagcaagaggcatacaatcactacccacaataccagccaaactaccaatagctacctacgcacccacaaaggcaac

SEQ ID NO: 142401 - DNA, 297 bp, Zea Mays
ggaaagattcatatctatatctgtttcttccttggaaaaggagaacagcaacagaatgcactggtaaagctcaacttcggtctcgcttttgcaatctagtgcaaaactaacagttgcactgaagactgaactattacaaataatatctatctatggaaacaagacttgtcattaaaatcatatagcacactcctaactatttcattcgtaatgctacagtatttatatttgagagatagtacttgtttccctgtcaaggaacacattcactggcttggtactaattcaggtattaag

SEQ ID NO: 142402 - DNA, 538 bp, Zea Mays
gatatataccataccgtgtacccatcggagatggatcacgtacgcgtagaccacacgtacaaatataatcattccgacccagtacgtgcaggcgatggatggatcgccagcatatatgcatgcatggacggcgacggcggatcggaacgacgcaaggggcagggggcatgcactgctgctacgtggtgccatgcacatcagcgagcatcgcatctgcacatacacaaaaacgagctcgcgtcccgtccgtccgtccgtcgctgacgaacgacatggccgtgtgttaggtctcacgtccattcgtgaaagctccaacgacgacatgatggccagtacacgcacactgtgcctgctttttctgtcatgctgtgtatagtattagtagtagaagcagaaggccgctgtcagcatgcgacgagcagccctcatcagctatagctgctactgtaattaagtgatgctaccacacgcacatatatacatacatatcctgagttttccgaggtctatagcgtgatcaaaatttgtggtccctcgc

SEQ ID NO: 142403 - DNA, 387 bp, Zea Mays
gagacgacagcccgggcagcgccggccaggagtcggcatccatgatggggttttcgaccaccaccgcgacgggaaccgtcgcggcctcggggagcttccatacggcggccgccgccccagccttcttcgccccgagcaggctatcggacggggtcgtcccggccatggccgcggcaacggcagcatgcgggtcggcgctgctagccatcgtacgcaccctagtccgatcgggaggtagggtctcgacggggtagcagacgaaaggcgggggtcggaggggacgggacgggatcggtcagtggtacggcatgaggcgatcggtaacaggggttccaaatattgccgcgaggcgacgcaaaggctggcgatcggcgatcggatcggggg

SEQ ID NO: 142404 - DNA, 309 bp, Zea Mays
cctcgtgcgtgtcttcatgatattcttatagatttggggcaaagtattatagttttttgctatatgtagtttgatcagccaacaccaactagcataaagcaaagttgagaatttgattacacatcaaaagcatcataatatatgatccggtaaaacttagttctactggaatgtgatatgattttgctgccctggcatatatattatggagcgaaaaatagcctcacagtcatgttgctgtatatattgataaaagattgaatagagctttactctttcctgtttgatcatggttttgtaagttggcta

SEQ ID NO: 142405 - DNA, 551 bp, Zea Mays
agaaaataaacaaaatagcacttccaaatctgcaatcattgacaaaagctccttatatgtatttatataggaggaggtatatttagtttccacaccttggcagtgtcaattagtttagaaacatgtgcaaagtaacttcaagagaatttatgccaataactaagcagatgggcacaaaatgtttcgttttacacaatagcattagtggacatgtccatggaattgaatagaacatgagtgatgggttatacatttttcaattaggaactattgaggggaaaattagaagttgtatgattttttgaagattagggagaagaagcatcgtacaatatgtttattggtataacatacctgtcttcagatagaagttgtaggctgtaaacttgagtcttgtgagtgactgcgaaaaagaagtaatgaaaaatcgagatgtgtaatatgtaggttaaggagcaacacaaatcattaagtgaccttttgataaataattataaacagatttagttatggtgtatgcaggttgagaaggagcaagaattttataaaat

SEQ ID NO: 142406 - DNA, 275 bp, Zea Mays
aattcagagtggtagcggccgaagttagcactagggatctagtgcaagaatacttagcaaatagagtatttccgacctctagtggctggggaatgcccaagaagaaggatgggggcaaaaaacacgaacttgttcgtctcccttaccattttaagtttgagaaagaattcaagaagccatgccaagagtggttagaaatgattgaaacaatgtacaatgaaatccttggcaactacaccaagaaggaggaccagttaatgactgctgccttcggc

SEQ ID NO: 142407 - DNA, 706 bp, Zea Mays
ggtagcccgagctcggccggtcgccgccgtaccgtaccagttgcagctcgctaggatccagcgcatgtttccattgtcccacttccatatatatataaataacactactgtggctagtcgtcgtcttccccggacgacccccggccggccggagagcgcgccgccgtgctttcttcctgcggtggtggcgcgcgtatacatcgtcgactcttgacgagctgagggcgtacacacagctagcatacatacacacaaagcccagcagcaggtagtctagccaatcaaacaagcgtcgtttcgtaccgggaggccggccggccgcgcgcggagaagatgctgtcctgcatcgcgtgcgtcaataaggaagaagacggcggccgggaccgcgaggagcatggcggcgacaccccgagctgcagagaccccgtgaagtcactcacctcccaggtgcgtagtacgtactacgtccagctccagagctcctcctccttggcacccaccatagctgatagctcgctctcatctctccggttgtgggttacggacttacggttacgacgtgcgctgcgctgatgcgtcctagctagctactatacgatccgtaccgtacgtcgctgcaggtagacagtaccgagtaggacattcattccatgcatggcagcaacagtgcccccgaaacaggcgacatggatccatcgtccggcgg

SEQ ID NO: 142408 - DNA, 411 bp, Zea Mays
tattataactagttaagtacatatgcattcactaccacttctaaacgtcatgtagacagacttagttaaaaaggaataatcatttaatcatgttccaacaattattcacgatttgttcttcatttgcaaatgttctagtttcttccctgtcacttctgcaaatttaacttcaacattcttccaacccactttattgagatgccctaatggcctatgcccagcattaacctcttttgtgcataggtcacaaaaaagcttcacattggctgcatcccaaatggccttctcacccatattaggcaacaaatctatcaattgatccgtttttaacaggaaaaaacaacaagattagggcgctggataggatgacataccttgcagccgacgcttgattgcaaccctgggcgcttg

SEQ ID NO: 142409 - DNA, 436 bp, Zea Mays
aggcggcgaagggtggtggggaaacatagtgtgggtgagttttcgcggagtggcaagcgccgtcgtatgggatggagcgtggccgtctccgtgtaaaccgggttgataaacaaaaattgttgtccttgctggctggggcgagcataggccagtgggatctttgaaagctttgtgagggtgaggaattgaggataatgctgtttaattacagggagatgggtatcattctgaaggttgagccgatgtaataggtgatgccctcgccgtgtgtatgtaataagcgatgccctcgccgtgtgtatgtaattgtaatttgtatggtgatgtggcctgttggccgtatttgtacgcttgtattggtccggctgcgtacgtgggcgactttgtgcggagtgtctttgtaatgagagacttcgattaacgttattccggctgc

SEQ ID NO: 142410 - DNA, 406 bp, Zea Mays
gatggttggagtgccccccaagcggggtactgtggcatcccaaatagatatggtggcatgccccacatttgatttgggacatatggtggagataaatatgtgtatggatatggcataggtggataagggggtggaggtgtccatgtaggtatgttaggtcttaattggacagtatgaccttccatttcttccgattggtggggtggtccaatcggtcttacctaacattgctcacgaatgggcgagcgaggtcactttgctagtcggtcactggggtcggccttctttttcacatatttggacaataagttatcgaaagtcgggccggatttaaccagccgaccagctgctttaaatgtatttgttttccacgtacctatctctggtcatcatggtttgaaggtac

SEQ ID NO: 142411 - DNA, 277 bp, Zea Mays
ccctcgcacattcggctatgctcgcgaaggcgttacgtacttggtcaggtgtaattgttatgctggactggtgcgcatgtagtcggtctttgcgcggacagtttggtgtagtcgtttttgttacgcttcgtccggctgcgcctttgggcgactgttgcacggaggacttcgatttttcgcacttattgcgctagcccggctgcacccgtaggcgacttctgtacggatagtctctgcggtagacttcggtgtttcgcacttgttgtgctagtccggc

SEQ ID NO: 142412 - DNA, 580 bp, Zea Mays
gctaagacatacacataagtgctttaggtccctcagtagccaatgtagtcttatggtgttttacgccatgtgtaaatgcctctatgtcagaccccaacaatatgctattttaggtgactgatgtgttaactaaattaagttgagaaatggttaagaaaagctgactaatctgctacaacccatgtttttgagttgcaatgtctaaagtggtttgctaagtcttatactacgttagccaactcatattaagtaggagtcgatttcgttaagtgtttgttatatatgtgttgtctcggattgcgataatatgcaagccgacgtgtaagatgtgtagcggcctagattgttactctggctagccgacttgttagatggctttggttaagtttgtagtcgcgatgaattgcttgttgtggtctaaatgtgtatggttatggttgcgaatgaaaagtagtagtgctcaggtgatgtctaaattaaaatgcaaactattggtgaaaagcgcttcgatattgattgttatagataatgcattgttaattgagtatggtacttttagtgcgcaaaataacttgtataa

SEQ ID NO: 142413 - DNA, 949 bp, Zea Mays
gctttcctggggcatatcttgaccgcagaagggatagaagtagacccatccaaggtagaagctgtttcaaattggaagcaaccatccaacgtcagtgaagtacgaagctttctgggaatggcagggtattaccgccgctttatcaagggattctccagcatagcaaaacccatgaccgaacttctcaaaaaggacaataggtttgtgtggacccccaagtgtgaggaaagtttccaaatcatcaaggagaagcttacaaccgcaccagttctgactctgccagacatacaccaggattttgtcatcttctgtgatgcttccaagcaaggcttagggtgtgtcttaatgcaaaatgagaaagtcattgcttatgcatcccgcttactcaagccgcacgagcagaactaccctacccacgatctggaattggcagccatagtgcacgccctaaaaatatggaggcattatctgatcgggaacaaatgccacatcttcactgatcacaagagtctaaagtacatcttcacgcaaccggacctcaacctccgtcaaagaaggtggctcgaattgatcaaagattatgacctcgcaatccactaccaccccggaaaggccaacgtggtagcagacgccctcagccgaaaacccttcggggttaaaggaacaaactttctggaagattggaagaaagaatcagctcagctgaatgcatgtctgggagacaacggtggcctggaagtcaagccaaacctagaagatctcatatgcaaggctcaacgcctggacacagagacagccaggcttatgggaagagcacgcaaggagcaacttccggaccttaggacagacgagcaaggagtcctctggttcaagaaccgcctgtgtgtgccagtgggagaggcacgaggaaccctgctcgatgaagcccacaactcagcttactctatcc

SEQ ID NO: 142414 - DNA, 399 bp, Zea Mays
gcttggcggcccgccctttcgaccgctggatttggcgagaatgagggagcgcttacccgcggggcggttgcatgcctcgtgtgcagcggttcaccatcttcacgttgtgggtcagtttgtatgacatgtgggacctagcccccgtgtcgcagggcgagaatcctggagcacgtcaggggagactttgcccgcgacttttcagggcgtaagtggggagatctgcctataaaaagggattgatctcccgagcactaaccatgccttgctcctctcgtcttcatcgcgcccctccgccttccgggcctccagatgaggtgtgccgatgttttttggcgacctcaccgccggagagctcgcgcccgtggcaatgccggtggtcttgccttcttcttgctgctg

SEQ ID NO: 142415 - DNA, 758 bp, Zea Mays
acgggccgcgacgagcttggttctacggtggcggaaagagatttgggggaaaactcaaattcgagctcactggtggatgattgctaacgattagcgggggctggctagctgatgactttgcggaactggtggggggctcaatttatagaacccagaggcggcggccgtgaattttgagcaagacgcgcagcggtcggaggtggagaagaacactggcgcacgcgaattagtgtcctacgccgtggcaacctcaccggcgttgatttgacagcagtagcgagttacggcgacgcggtggaagggttgagccacgcggcgcacggccgggaggcggtggtcgtcggtgagcttatcggcttcagccgcaaagcagaagggcggccatggtgagtcaccggagttatcccagggggtggcttttacctggcgaccattcgggttatcggcgacgcgaatcctacagcggtggcgtgaatcacgacgagggtcgccggcggtgaagatttctttgctgcggccgatcctatctgatcagttactataccatggcgacaactcatttagacagcctgtcagccaaacttggagcatcattttctcttaatttctaacgacaacactagtcaagctctgcagcaaaagtgtagagcaatactccatctacaactttgtaacatgatgatgccacaaaaacccattggatcatgcttgaatttaagcttgaagttgatggcatcaatctgttagtctgattttca

SEQ ID NO: 142416 - DNA, 599 bp, Zea Mays
ggataatacagaccaagataaggcagaccaagatctggagtactacatgagattgtttcaacgtaatttacatgacctgaatcaaaatatacagaatctagagcatgacatacataagtttgatagaatagtgaaacaaaagattacgccagtacccaaaagacatgacacataaccttcctgcgtcaccttgtttacacttgcatgaccatttcctgtaaacaaaagccatgatatcttacctagcttccactagcatgctcactggacaaggagtgaagagtagtctcatataattgtcggtcacaatcaagtctgtttggaagaatgcctaaagcctccagcctctctttgttcatatgggggatcttatacctattacctccacctcccttcattacttcaatcaagcagccttgcaatgtcaggtacactctatttagaagtgtagggtcataatcttcgaattccttgcttacattgtaaattaactcatctagattccttgagaccgtgtttagtgtaagggacagcaaggaagcgaagaagcctaaatcaagacaattcatgccaggtgagtttggaggttgattcatgag

SEQ ID NO: 142417 - DNA, 614 bp, Zea Mays
agtataaacctggcagataggtgatatggccctcggactctacatcggccgctgaatagaaagaagtgagatccaaatgccggtgagccctcagagcgatctgagcagacagttgtgccctaaagaaggaatcctgggtcctggtgctaaatagtggtgcaaccgctgggtccctctaagctggcggccacgagtccatgagcatgtgtctgaactgacgtacctcgacagctatggctctctgaagatcaagcagtcgaggatcaacagcaagtggtcacacctcagtctcgtcacgctcccggaagcaaggtggaggaataggtggagcggaagcgggaacgggagcattagaagctggagtggtggaggtggtggtcacatcaggtgtggtggaaggctcgagagcggcaagagctggagaagtgggaggtggagtggtgactggttctgagggagtggaccgagcagtggaggagcgagtccgagacgagaggcgacagactcggaaggcgatctgatcggaggaaatactcatctaacctccctgctctgtatgatatgtcgttgctgctgtggcaactgctgcattggtggctttgtccaaacatctc

SEQ ID NO: 142418 - DNA, 826 bp, Zea Mays
gtctacggcaatgtcggtggcgaggcgccaccggcgtaagtattagtgtagtgtagtaggtagtggtagcagtagtggtagtactaggtaatggaaatcatagtggagaaatgaggatattagggtcggttcataatgagccggctcttttcctttatagtgaccctcttctgatgaatgaaaccgtaattgttgtgtctgattttgagtttcttgttttcttcgacttatgattcgtctgataaatctaatcaagtgatcccaggtgatgattgtgactgacaagtcgtactgatagatccgactgataacatttacttacttcgcttggttgaagtctggtctaagtcatgtcacatgttgcaatgcgctcgacttaatgcacacagatatatccttacattcagtttcctggtggatgaactctaactctcctttttctgccacaaacgtctccctgaaattctagctcaccatcgagcttgcgcttgattctattcattagggaggtcttatggcgtctaggaagaagaaacatgggagcactttgcctgttatttcgcccatcgatcccaatagtcaactttccttctgcagtaactacacttctgttgtttctaggtctgacatgctcggtgttttgctgtcgaaagaattgtgttcttggtgggtttggtaagggatcaccgttcccacagaggataccatgagtctgtggtcttcgttcctttcctgatccgtggtctaggtttacatgtttctcctttcttccgtggtcttctcaatttttactctcttaacttgacagatctgaatcccaactatg

SEQ ID NO: 142419 - DNA, 783 bp, Zea Mays
gagaagggagtgagacccacctgcccgcacctccggagctgccactagatttagatcaagttctagccaaccaaacctgactcattgaagtcctcactagaagtctggagaatcagcgcccgaatggtggaagaccacaggacaggatgggagattttctgaggctcaagcctcccacattcactggatccagcaatcccctcgatgctgatgactggctgcacacgataaaaaggaagttagaagccatcagatgcccggagaatcagcgtgttcaattggttgctcctcaactttccgggatggccctatcatggtgggataccttcagcacggccgtcagagatgctacttgggcagaatttgaaactgctttccgagaacatcatgtgccccaagggatcgttcagctcaaggaagatgaattttgggaactaactcaaggtggaagatctgtcagtgagtacgtgcacaagttcacagaattggctcgctacgcgccagacgacgtcagcatagaagccaagaagatggcccgctttttgaaaggactaagactagaactcaagaccatccttgccagccaagatttcctcagcttctcgcacctctcaaacaaagccatacaagtggaaagggcaagggaagaagaaaaaggtcacctcaagaggaaattccaagtcctccgagctcagcagcaagaccggcaccagagaactcgatccttcggatttccacccaagggaccaagctacaacaagccagctggacccactccgtcac

SEQ ID NO: 142420 - DNA, 542 bp, Zea Mays
tcctttggggcattcgatgttatcttgggtatggattggttatctcagtatcgcgtagttatatcctgtttttggaagacagtgttattgcaggcgccatcgggaagggaggtggtattcttgggaagttccccaaagttcacgttatccttgttggcgcaatttcttctggatcgccggtcaaggaagtcgggaatctttttctccatggtggtggagggtgaggctgccttgcgggtgcaggacatccgggtggtgtgtcactttgccgacgtgtttccagcagagcttccaggcattcctctggagcgcgatgcaacttttgaaatcaatctgattccgggtatgcagcttattcataaggcaccgtatcggatggctccaaaggagaaggttgaattgaagtggcaattggatgatctgctggctaagggtttcattaggcctagtaggtcgcaatgggcttccccagtattgtttgttgagaagaaagataaaagcaagaggctatgtgtggattatcgtgctttgaatcaagtgac

SEQ ID NO: 142421 - DNA, 370 bp, Zea Mays
ggctgaaactctatccatttagtgaatttgtcaattgccaccaacacatgggtatatcctccttgagctttcttgaaaggtccaatcatatccagtccccagcatgcgaaaggccaagttactggtatggtctgcagctgctgcgctggcatgtgctgttgctttgacaggtattggcaagcttcgcatctctgaactaactcggttgcatcgtccttcgccgtcggccaatagaatcctgacctgaaaaccttcccgactagtgttctggatgcagcatgtactccacattgccctgcatggacttccttcagaagttgcttcccggtggacgggagaatgcatttcatgaggacgcctgacgcgcccc

SEQ ID NO: 142422 - DNA, 717 bp, Zea Mays
ggcatagagatagccctaagatgagtaaacgcgagcacgttacactaagtcaagtaagcgtgagcatgttgcaccgtcttaagtcattgccgacttaagccgattgctccgttagtagggtatagtggtcaccctaagtcaagtaagcgtgagcatgttgcaccatcttaagtcactgtcgacttaagccgattgctccgttagtagggtatagtggtcaccctaagtcgagtaagcgtgagcatgttgcaccgtcttaagtcactgccgacttaagccgattgctccgttagtagggtatagtggtcaccctaagtcgagaaagcgcgagcatgttgcaccgtcttaagtcagtgccgacttaagtcgattgctctgttagtagggtatagtggtcaccctaagtcgagtaagcgtgagcatgttgcaccgtcttaagtcattgccgacttaagtcgattgctccgttagtagggtatagtggtcaccctaagtcgagtaagcgtgagcatgttgcaccatcttaagtcattgccgacttaagtccattgctccgttagtagggtatagtggtcactctaagtcgagtaaacgtgagcatgttgcaccgtcttaagtcattgccgacttaagccgattgctccgttagtagggcatagtggtcaccctaagtcgagtaagcgttctgattgataataaatagttcgagtgtccttg

SEQ ID NO: 142423 - DNA, 652 bp, Zea Mays
cgaggccaaggcgtacacctccctatttgacttccaccgcggcctagacacgacatacatcctcctctacgtcaacaacattgtcctcagcctactcccccgagctcctacgtcacatcatctcctcccttcaacatagttcgcggtgaaggatttgggtgagctacaccacttcctgggtatcatcgttgaacaccatccccagggcctacttctctattagcgctagtacactatcgacatcctcgagtgaactggcatggctgattgtaagccctgctgcgactctagtggacacttagagcaaggcctcctccgacgtcggccccatgtgaccgatcccactagctatcaaagtattgtcggggccttacagtacctcgcttcaaccgacctgacatcgcctacaccgtccaataagtgtccctccatatgcacgaccctcaggaaccacacctcaccgacatgaagcgcatattgcggtacctccggggcaccctcgacttcggcctccttcgtcgctcctcgaccaccgacctcgtcgtctacaccgatgtcaactgggttggttgccctgacatgcgtcgttccacttctaattatgtcgtgttcatgggtgacggtcttgtctcctagtcctcgaagcggtagc

SEQ ID NO: 142424 - DNA, 626 bp, Zea Mays
ccgaattaggggtacccaaatcataactctaaaatgcctagacgcttgagtaagaaaaggtcataagaaaacacgctcccaaccttaccaaggcgcgtagaacctaagtcgcaactcgcacgaggccaacctcgggcggaaaacgcattcccaactcgcccgaaggtgtctcgggcggtgccccggagcatgcccacctcggccaaccactccgatcccagaacgtgtgtccgtacgttcacctgccccattgaaggtgccaaagtcaacaaaggacgatacggttacggtctaatctaccttaccgctcacgacgatggtaagggcgcgaatacggggcactgttcccccactccgatcactgtttcaaccacccagagcgtggctacatgtaatgtctaatcccgaccttggcttcgggagaaatctttgcctcgcccgagcccggcctcggctaactgccccagtaagggagcacgcacattaaatgccacctactctctcgcgaacctcgcagaagaccatgccaagcactatttcaaccactccgactcgagaaacttggaaaacatctcatccacaccctgtaccggctagggctcagacgtctgtccatgctcctgaac

SEQ ID NO: 142425 - DNA, 438 bp, Zea Mays
atggtcaataccaggcggggtggtggaattgatttacctcccaatcgacacactcggaggatatttagacaaccccagccacaaccagtagagatggatcctccaccaccgcctccaccagcaggagttgacccactggttgcagctcagatgaggatgatgcaacagatggcggacactatggcagatatgcgtgctcagatgcagcaggaacgccaggagatgcgccaagagcaggaggatatacgtcgagagctgcgccaagaacgagaagagatacgtcaggaaaggagggagcaacagcagcaacagcaacaagtaccactacctccaccaccaccaccagttccaccccgagataagcgccgggagttcatgagccataagccacctacatttgcaagctctcctgatccactggacgcggatgattggctg

SEQ ID NO: 142426 - DNA, 549 bp, Zea Mays
aaggacttcgtcttcatccacattttcccttccgcggtggttgtcgaaggcatgcgccctttcgtcgggtgttaaggcggtgcctttgctccgtggcataggcccgctcaagggtgtctttgcttgctgaagatcccttgtctgttggtgccttcgctattagtgagccccctcttgcgcgggccttcatatagtcattgttagtggagaccatcgaagggaccttcgttggtgcgggtctggcgaagttctctaacgcgtggaacactgcacttaaacatgggttactttcggcctacgcagggctgatcaaggtcgggttcggccttcgctccaataatcaccgcactccaatcgccatcgagccatatagatgctgattgccaagagtaacaagcactagacttttacttggctaagataagcctaatgtgggtggtggatgcacacaaatctctctttaggcactaatgaggttgctaataacaagatccacaattctctaatctcctcacggtgctaagcgtcttcgtttctctcaaaaggttg

SEQ ID NO: 142427 - DNA, 916 bp, Zea Mays
gtggtaagggagctggtggcatcccggtacaatttatcaagattgtttcgggagtcaagaagtttttgcatctcctcctacgggtgggagaacctttggtaataggtcgaaagcatggaataagcaacttgaagctcctggcgagttacctcgtgggttttcttctccaaaataagctttgactgaagggaagaattcatggcacgggcgccatcaagagacatggtcacccgatcaagctctacctgaccttgagcacaactcacctcagcatcagaacaccatcgagtcaaagctgaagaaataattagcaaccactggtgatatgaacataaagaaatattaacaggaaacattgtcaaccaactaaccaccgttagcagatttcagatcatctatctgcttctgaagagaaagggggttccattgcgacaaggaagaaattttctcaggcacgggagcaccacatggtttcacctgagcagccaccaagtctaggacactctgcaggtacataagtctgcgaagggaacaccagttggtaaaaacaaggtagcacaggatgaagatacatgtaagttggacaggaacaagggaaaccccaaagcctgaagtgttggtgcgctcctagaataaaggacgccaatagaagccgcattatgagaagggtcaggcaccgaaggaactggataatccaagctaagggcaacacccattgggatctcaactccagatgcacccattgggccttcagcacttggaacatccattggatcttcagtgccatggccactgacctctaaggtgcctaggctggctggaccaatgagcatataagaactcgtcaccgcgacatcatcagcctggggcattggtgaccccacatgaacatccatcgaagcagtagagggggagc

SEQ ID NO: 142428 - DNA, 478 bp, Zea Mays
ggagattataggccaatttcactactaaacaatagtatgaaaatcttaacgaagttgttggcaaaccgcctgcaaccgttcatgtctcggttaattcacaagaaccaatatggattcatcaagggaagatctattcgggactgcttggcttgggcctatgaatacattcacttatgccactcctcaaaaaaagaaatcattgtgctcaagctggacttcgaaaaggcttttgacactgttgaacatgaactgattattcaggtgctgactcacaaaggtttcagccctagatggatcaactgggttcgaagcatccttctttctggcacgtcttcggtgttgctcaatggggtccctggtaagccctttcattgcaagagaggtgttagacatggtgatcctctttcgcctctgttgtttgtcttggcagccgaccttcttcagagcattattaataaggctagactgtggaatcttc

SEQ ID NO: 142429 - DNA, 465 bp, Zea Mays
caacaagtacaaaaatatatctagaagtggatttcaatatatcaacacaatgatcaatcatcatatgaatacccaactagttcaagggaactaaatcttctatatgtaagtacaagatttgctattgcttgtaaatatctgagagtcttcttaactgctttcaagtggtctatgcatagattaatttattcagaacgaattaactctgtcgaccaaacactccataagtaagtgtcaccagctctagttgatgctccccgggggagtgggcctgactattcccgccgccctttcgagtcctccccttggaggcggcggtatccaccgcgaggtcctggaccccgcgatgatttcccggtggtcgtcgtcgtcgctgccgcttggtgtcggccggtcgatcaggtcgttgttgcacggcgctcgccggtaggacgaccctgacaccgctagcagcctcctcggaac

SEQ ID NO: 142430 - DNA, 299 bp, Zea Mays
catctgtccctataggtaagctagaatatcgcttagtaccttttatatgacaattttgcatctagtgacacgtgtaaatacgatttttttgtgccatctgatacctaatttgaggaatctaaatagcatatgggggagtgtattgtagagaatgacgtgcatctcctaacaagcaagcaagcgtagcactgctagtagtaggttggatactcattgcattgcaccatctaacccactaacattgtccactcgcgcgtccatgcctgcttgcgctagctacaccatgtaggcaacagcga

SEQ ID NO: 142431 - DNA, 516 bp, Zea Mays
tttcaagtataagccatagctaagatattgcatgatacaactctatgtctttgaatcataattacagttaaaagacaatctatacggtacagagagtcgtgtagaaacaggctcttcatgaaaagtccgtctcttggattttaattttaaacgtgagttcgaagatacaatcagacagaagcaagcaatgcaacaaaaaattaaagtgtggatctcagctcatgaacactttcctaagatctacaaagagatgctacatcgtcaaacatgggaacaaggtatactttacccgatacattcatgtacaaataagtggtacgttagggagatgcaaaggttgctgactgccaagcagaaggctaaggacgacagggcaagggaggcatcaaaatttaaaaagcaagtcatgaaggaccttgttgctgaactgcctagtgagtgtttgggctatgttattattttgtgaccctgtttttattttaatgttcgtgcacaacttattgtatttctgctttt

SEQ ID NO: 142432 - DNA, 558 bp, Zea Mays
ctttattaaaacttgactccctttgcagctctccccgcgtttcacgacttcggcgccgatcacgagctgacgcgtgtctctcctcacgaagccatcgttgggaaccagtgttgaaaccagtgcacgcgttcactcgagtcttggctcacggacgcgaactttctagccttgccctcgacggtggccacacgaacacgacgcctagtcgcccacttcgatctcttcactgccaccatccctctgctcgtctcaccgtcgactgtgtcctatctgtgccgcagcgcagggaaagtcagctcctgctcctgctacgatgcctcgaccccgcgcctctccgcctcctccatcctcctccacgtggttgtgctccctgacacagtctcctcgtcgacggcaacaagctgccatgtccttcgccaacaagaaccgtgcgccgccgcctctcactggcaccgtcgcacgcagaccggtcacactgtcgccggtggcaccgccaccttgccccgccttcttcctccacttgtcgccaccctattcttccctcgacgcagccgcaag

SEQ ID NO: 142433 - DNA, 296 bp, Zea Mays
gtcgggaggaccattttgcaatagtatactaaaagaccaggttgcaataggtctgcctccgtcacgacacgagggtagactgtatggaagcggtaggatgggacgaaaatccttcattccaccagattacaatacattacttaaggcacatcacaacatcctacatcagccagagataatggagccatttatccaacaacacatcaatgagcttcgcgagcaaaatcctgggtaaacagatgattgggtaatgaagcaacataagctgcggttcaacacatggctaattgtgaagg

SEQ ID NO: 142434 - DNA, 441 bp, Zea Mays
gaaaatttctaaggagatcatggagggtttgtccaaagattctggtgagagtgatagttatgacgtggaaagtggggatgaagactctgaggatcgaccgtggcacccaagccatactatcttcggaaaatcgactatcaagaaaagtcatgttgatgctatgagaggaagatacttccgcgacatgactattgtgagggttggaggagacagcgctgctcctactcctgaagtaaatgaggtggttatataccgaagctttttgaaaacagggcttcggttcccgttgagcagattcttggttgaagtattgaagacgtttcagatctttcttcatcaacttactcctgaagctataatcaggatgggtttgtttatttgggctgtgagaagccaaggattggaaccaagcgcaaggtgtttttgcagcatgcatgaact

SEQ ID NO: 142435 - DNA, 309 bp, Zea Mays
aacgggatgatactggaggcactcaggaaaaaggtcttcgataagaatgaaaagttcacaggaaagtggataagggaattgccctacgtcgtttggagcctaagaacccaacctagccgagctctacatggaaacactcctttcttcatggtctatgggtcggaagcagtgttacccgctgatctcaagttcggggcgccaaggctgatcttcgaaagcataacagaagccgaagccactaggatggaagacattgatgtactcgaggaagaacggctgaatgcggtaatccaatcagctcggtaccag

SEQ ID NO: 142436 - DNA, 680 bp, Zea Mays
cttctaaagcttcctgaaccccttaattgtactggaccgccatgaatccacgggaacgcgctcatcggtccgccttgtccacggtcgccgtggctagaccaaaccttgtggccattagtgaaattatgttgggggaaatggtcggggtagatccaatttcatgtcagtcgcttggggaccctagacgttgccccaatcggccggtctgtgagctcaccggagcactgctaagttcgtcgccgtcggggatcaggaggggtaaataaaaagaaatccagggaccatactgcaaactgtcaacgacacaggaaacagtgaaagaactcgttcccagttagctaaaaacccgaggacccttctgcaaagatgccagagcacacgggcgtgggcgcattttctctctggtgttgggccgcttgggctagaattggcccagcactattgaagcttttcctttttcttttacaatagagctttagaaatttgttaaaaattgtagaaaaatggtaaaattgtgaaaccaattttcctaagcttgttattttccctagaatttaataaaaatagtttcatgatttttaagtaaaataaggaattttgaggcatttaaactagcttaaaccattagttctggatttttagaaaatagataataatcccaaaattgcccaaacttttta

SEQ ID NO: 142437 - DNA, 572 bp, Zea Mays
tccgcgcgtagcaccttatgattgggagaatagtgcaccagtgggcaaaccctgcaactccggcgcgctccgccgccaggaagacgggtggcgccgcccacgtcagtcgcgtggtgaagacaaagggagaagcatcgatttttggtgaacggctcagattgaacgttgcgtaccccgggtggcgccgcccacgtcagtcgcgtggtgaagacaaagggagaagcgtcgatttttggtgaacggctcagattgaacgctgcgtacccctttccgatttgatctgagcggttggatccgatcaaatggacctggagtaatcacgattatttaaaatatgggctgttgatctggccagggacagctacgattagactgggcgcttacctctttgttggttgaatatgtgtcgttgatctaaaatctatcagttgtgatgcgcgtgggattaaggcagccgagccaactttccataagagccctcgggatttagggtaataaacccgccatccattttttcagtgtaaagaaaataaaattaaatgaagactttgcgtattagccctggagtttat

SEQ ID NO: 142438 - DNA, 849 bp, Zea Mays
ggccaagacaccaccacctctgatgatatgggatcagatattgatgcagctggatctacatgtccccttgttatgtcattgaaagagagatgaagcccttgccagcggagttcatatttgggttgaccattgctgggattatggaccagcatagggataaattctggagcttcgacccgaagtcgacttttggtggatgaatcactgtcagtagatgacaaactattttccatcgtcatagctttctcttcattagccggatgtcggggatttatttcttccaccgcttcacctctttcttcgggatttgacccactatcgtcacttgtctcaacatggaaaccatggttgcgcagcaaacacttatggcgccttcggttatcctcgctccccttttcggaggcagcttgacttacaacatgagaaattacctcattccacatccgattcttttgtttcgcaccagctgggcaagctgggcaagttttaatcctctttgtttgtggatcctcaacaaagtgcaactgtgatctttgaacttccccatcttcattgttgtccatggagttggtactgggataaggggattgagtgacgtgaaggtcacatccatactccttttgtatcatgtccccaaccatgtatggtacaacaacatcagtgcatgcatacttgatttggttttctgtcaactgtttgttatcccaatgcttgtaacgtacgttcgtacctttacctccaatggccacgcccaacaactcttgtgcgagtgttgccaggcttggcacattgttccactgtctatctgaaattatgaatggcgccatggcctgtaactccaccttgttg

SEQ ID NO: 142439 - DNA, 799 bp, Zea Mays
aaaaaacagcaacttgacaataaagctgagttggggcggagttagcgaaggtgagctctcccaaacaagacatcaatatacccacctcaacataattcacttcagcaaacgtagattaagatgaatatagcagtaattaaacaggtccgtaatcttattttccttaggagagagatcgagatcaaacacggcggcctcagtaataccttaacacatttacattgataacagagaggacctatacggacagtgcacaactcggtctagtgcacgcatgatttggaaacgggcgcagacgatgctgaccctagcctgtcgctcgatcaactcattccataccattccagaagaccaacgttttcggctttttgcgctacatctgatgatgggtgtgttgtcgaacgctgactgctgattctgactctttcgagtgttgctagctatcgactgacccatatggacaggcccgccaggccgacaagaggggacagagaattgtggtaggtgctggcttgcggttggtgagaaagtgatcggtttgaaacattcaagttttatctgaattgaatcacccgcgcgtgcgtgcgtacgcatgatgtagccggcgataccatgtcaactactgctatatacatatagtccatacatatcgacatctggaattaatattttatacaaaatattaaaaaactaaaactacttaccggtcgctggtgaaaatatagtagtcgacatcgtagcagtagtaatagtgaaccggttagacagggcggagctctgagtatagcaatatatggcg

SEQ ID NO: 142440 - DNA, 619 bp, Zea Mays
tcaagattgtctattaaaaactatatctgtccaaaacttagaaaattaagaaagacagtggaaaataataaacagaggatgaacatatttttcctagtatacttaagtgataaagaatataggaaaaatacagagcaccctagtccagagctaatccaaggttaattattttattaggcactaagaaatcaagaaaagccataattaaaagagttagaaccatttcaaaaatggtaagaaactttcactaaactcctaaatgctagaacaccactacagaaataataaacccccaacccatcacaataagtgagttaaacaattaaaacatagatttggcccatgttctaattaaatcatgaggaagcctaaaattgtgcaacagtgggcaaacaaatttttacccaattacttatgaagtagaccaccagagaaaaatatgaaacccaattaaaagggtaaggtaacacacattagcccctaccccatggaaaagatcatataatccaagaatttctaccaccctctcccctaagcaaaatgtgccaaattctagaatgattgctcttgcacaaagaagaagataggaaaattagaaatttgttgtttgacatttttc

SEQ ID NO: 142441 - DNA, 949 bp, Zea Mays
agagctattttcttctacagttgaaaattccctcgtgtgtggagccgaggtgagtggtggctcatatcgctttctgtgggtcaggcaggggacagtgctggacttctgattttgggtttgtttcggtgcagatttcttcacttggatacgaattttcacactacttcgcggaattaaatcttaaggcttttctctcctatagcaaatctttaggcttttcgattcgaaatttaaaacctcgtcagatccgtgcttgcactgctcgccataaactgaacctgacagtagcaaaaggaattgttggatattgtgatagcacagacaaaattattccatccattagtccccccttgcagtcaagataaggatgtatcagttgccagacctcaaaatcacttaactaatgcacatcatatcacctccaaaacgtggactaaacttaatgcaatgcgtaaaactttaaaattctatttttagaggtgtatctatttgggaatagcctgactgatcatcatttcccttcaaacccagctatatttacaccaattcatgtgaatagagacaagcttcctgttgctccacctacctatacatcatgctactccacccccacccacccccacgacagagtttaagttcacattcaaatagtattgtactcaactaggttatgctgtgattttatcatctgcatttacacattgttgccattcaaatagtacacatgttgctgcatctgcacctcgctactctagggaaatcctcttcacattatgcacatatagaagctcgccttttcacctttagttaaagctcaaaagacctgataacaatatgatcatcaggctcagtttcttcactatcacaaagtgctccacccacaaatcagataaggtgcatgatattcagtttgctgcccaaaacatttagtgtttttaaattcttcaca

SEQ ID NO: 142442 - DNA, 390 bp, Zea Mays
tcagatcgccattaaatgaaaaggtatgcgatcacgaccactggatctaagatcaagggtaaggatttaatgaagccgatatccatccatagccctcggattgcagatcgacagcgcggattcaaatagtcgaaggggtatggcactctaatcatcgccgaccaacacgcatccaacggttgacggccatccagctaaccggtattcccttgcctaatcctgatcgcccgcgcgcgatccgacggtggctgggcatcgcccccgcctgaacacccagcgcagcggcgcgcacggccagcgcggcggcggccatggccggaatgccaacagcggcccccggtacccgatttcctcgtaccccggatgcaaaacgaaattgggaaggtagcg

SEQ ID NO: 142443 - DNA, 1330 bp, Zea Mays
accgatccactccccgcatccttccgggcctggagaagacgtccgccgcaggaacccgtgtgtagcgagggacgtccaaaggccggcgcaagctcaaccacacacgagtaccacttcagcgcgacggcaacagcaaaggcgcaggtaaaaaaatcaatattttagctcatgaggtctgctcgggccttcggtttctgaagccttttctgcttaaggccctctcagatcgttcttgctacgcgcgaggtcggctttagctctactgtcgctgtcctaggaccttgttatctccaacctccttgttttgcgcactccggatgctgttactgcgcctgcatggaagccgtgaccgcctatatttcatgtcgcgaaaaatgcgggctttacctggatccttgcagaaacgagtgggcaacgctgtcacagttaacacagcagccttgctggcatatacacatgcatggaagtttagtcgtagtctgccttatttggtaattgacgttgcgttgttatttttacacatgtagtctgggaatggtttcgttagaggtacaggttgtattcattcattcctcccctttgttgcggtgccggccgtatggctcgtttatatatgctgtcttctattccatcaaacgaaataaggtctatattcaatcaagcatgctagttccttattcctgtgtgcgttctctatcagcgtactagctatctctttctgcagtctcgacgaaacaagatgagtcatgtaatgcttgctgtttttttttcaggtctgttcaaggtgtgtttggttcggttccaagatcactagactgaagtgacaaagttgtgttgcacgctgtgcttctaacaaatggaagcagctgctcttgctcgtagaactagagcagtggaagaactacggcgtttatctacagttgctgaatctgatgacacaccagaacagcgcctatctacagttgctaaatctgatggcatgccagcagaagagcaggaatgcgatcacttctccctgaggtaaccattttctatattcagtagatgcctgtattttttcattgactgtcattcaaacgatgcatttctatctaccagtgtagctagcactgtttagtgggtactgtttgagcatggttaattaaccatacttattatacagtcatttgttgtatgcaagcgtgatacattggcactattgtgacaacaattgatcaacgtccaggtgagcttggtttatcatcttgctgtcctatacagccatatgttgtctgcaagcatgatacatgcatgttgcatgtaagaagtgagatagtcaactagatcagga

SEQ ID NO: 142444 - DNA, 522 bp, Zea Mays
aggctgacacgagcggtggcgccatgctcgccggtggtgggcacctcctcaggtggccgcgacaaccacaccgccgcgccccaggcacttgatggaggagggcgggtccccgtgcggcctctttgcgccgacggtcgagagagagagtgcgggggcatgatccctcttcttgcggcttgcggtttcatgcgggaggtgagaggcggcttcatgcgagagagtggaggaggggtggagaacgcggtagcgaggagacggcgcgcgagggtgggggaggggcggagaacgcggaggtcgtgctgtggcgacgggagcgacgacgcgcggggggcagctgaggcgctaaccgtgcttcgacagtgagctttggtttgggccacaacaagcaaatgggcctcctagaaagcgtgtattccgtatttgcaagccaaacttagtaccacatcaggtactaaactgtgcacgcatctgtttataagtgccagtgcggatacaacattatggtcttggttgggcggcaac

SEQ ID NO: 142445 - DNA, 417 bp, Zea Mays
gtgtgagcgggctgctggcgaggagtgtgtgtcgatagctggcggggacagattcttggatcacatccattggtaagtggtaatctccatccttaacttttccatattctattgattagaactatattcactaggaaatctacttaattcggtttttatctttgatacttgtaatgatccccccattttccaccattttttcacctatattatgaagctgggaagggtacaatccatcttattatttattaaggtacaacatggataaaaggtggatgaatgaacctaggtatatttctgacaatccactataaaccattattttttggtaatcaccttgtaccaacatatcgtatttgtacctaatcttcataggcacacgaaggtctacatagatggggtggctggatttattga

SEQ ID NO: 142446 - DNA, 617 bp, Zea Mays
ccatatgcatgctcgtcctgcccagctgcgcgcggcgcatctgtagaaattaacgtcgtcgtagcctcgttgttggtttcttcttctgcggactgtactcttgtggttacactttctcttctcttctctctctctttatctacgtacgtacctaccactcagctactacacctcacaaactttcgcttatttttctatcaaaattcacagaaccttcttgacatatacttaattttgtattgcacttagactccgtgtggatgatctcgacatatacttattaatttgttagctacgaatcacattgcactctgagagatcaatgcaagtatataactgcaggggaaaaactagcgatttgttagttgctagtcatcaatcagctagccttgcaacgaaccaaccttccctgatcaagtatatatattgcatatcatcttagctagattagctagttatacactgtttactatatcaccggcaatatatctttgtaccacattgttatttccaaaattaaggagaagtgaacgtgcaaaaacaaaaaaaaaactctctcctgcatgcatcaacaggtacatccacatgacgttcatccagagagatccacttgtgtg

SEQ ID NO: 142447 - DNA, 392 bp, Zea Mays
gcaagattctttaattaagttcgttcttgattcaacaatcttcaattcttatacatgacatttgggtcaagaccgagggaatccaaagatatggcgcatcaaacttgcactcatctcattggaaccttattttatccttaggttcagtttcagttttgtaatccagttctgacagagcgactttgagtagatttttctccaatttttgtataacaacagcaggaggtgtctgcatcaaagttgctcatgtatagtagccctacaactttgttagagcaatcctaggtagattcccacgggatcttagtcgaaatggctcttaatcttggatcaaagtcactgtccaacagaagttcagtctatattggcctgacagtccaacttcaggcatg

SEQ ID NO: 142448 - DNA, 476 bp, Zea Mays
cgccgcccagccgctctatcccctgagatgtttcaagccgccgctccctgctcctatttatctatgcgcgatcttcttcttcttccccgcgcttcttcctcctccagctctggtgcccgacgctactccctggatcgcctgaccgcgcgcccctggaggcctggagcctcctctgccggcgccactctttagcttctctagcttggcgtcctgtctctctctccctggcgcggtcgtctgcccctgctccctagctcgcgaagctccctgcgcgcatggatctcccctccccaacttcttcttgtgccgcgcctcctccctttgtccggccagagctctgctcgtccccatggctgcctgcttgccctgcctctggttccggccgtagctcggcgctcggcgctccgtccctggcgtgcatcctcgcctgcttgccatggttgtgtgccgagtccctcgcgcaggacacgagctcc

SEQ ID NO: 142449 - DNA, 458 bp, Zea Mays
taacaaggcctgcccaaatgatccttttcccctcccacaaatcgaccaagtcgtagactccattgtggggtgcgagctactctccttgctggatgcttactctagacgttctgctacatctccatgccttttggcctcaagaaagttggaccaatgtaccaacgatgtatgcttcagtgcttagccgatcaaattgggcgaaacatagaagtctacgtcaatgacatcgttgtaaagaccaaaagatctgatgacttcaacaccgacctagaagagacatttgccaacctttagagaatctggatcaagttgaaccccaagaaatgtgtctggagtttcgaagggaaagctcctggacttcatggtctcggaccgcggaaccgaggccaaccaagaaaatatagaggacatccagtgcatcgactagtcgggtgtgtggctgccctcaactgttaggc

SEQ ID NO: 142450 - DNA, 305 bp, Zea Mays
tcctgcagggatattaccacccaagcgatatcagcgaggccaagcgcctcaaacaccgaagccgagacttcgctctcatcgagggacaactttacaagaagggggtcagtcaacccatgcttaaatgcgtcaccgagaccgaaggcgttcagatcctgcacgaagtccacagcggaacttgcggctctcacgcggggcctagggccctagctgccaaggtgatccatcaaggcttctactggcctgctatgatctgcgccgcgaatcgggtcacaaggtcgtgcgaagcctgccaaaagttttct

SEQ ID NO: 142451 - DNA, 463 bp, Zea Mays
gtcgctggcggagttcaaagaaagccatgattgaaatggcaatcggggctctgctgtccccccttggtcactatgaatgaccctaaaacgacgtggacaaatgaatggagggagtagttcagatgcatgaatctttccaggcatttaatgtgtctgtcaggtttgttgcaacatacttatgagttatggaacaactttctttcaataagaaccttatactctcttagagaatggaaaatgattgtcagaatgtcaaactaaggttaaaaaacattgttaccttttgtgttgcttcaattgagtgtgcatcaacctgaacatgataggagtcatctattctgttactgtccagcatttcttttacttcaatagcctgaaaatgtcctttattatttgtgccacactgccactatgatgagtggtcagttatccatgtaactctataattctaactaagttatta

SEQ ID NO: 142452 - DNA, 316 bp, Zea Mays
gtcaatagagagttgtggcttagcgaggggagaggttgtagcgaagttttagtgtggcatggcggacgagcactctggagtgtttggaggcgcgagttaaaaaataataattagtcaccttcacaggaggcccgtagaatttccagtgcatcatgcatggtagtagtgtacttgtttacggaattctttgtgttagtgggtgaatgttacagcgattaaaaaaagttctgttatcttcacccacatttttcaaccatatcgtcgtacgtgcatgcacatatgtaattccacaaaggatatatatatcaggcacgtg

SEQ ID NO: 142453 - DNA, 589 bp, Zea Mays
tgcggggaggtgggtttcactttcttctctaacgacttccccttcagctctcaggggaaaccctgctccaatcccagaggcggtaggcgtggttttatccgaagccatctgccagggaagagagtcactattatgcccatgcaaattgttttcaaccaagttattttattcattacaccatcacattacaagcataagactactacaggtggaactacacgagagcgttccccgaggcactagtgaattccttatctaaggtgtccccaaatgccttgagaagatcatcgaggcttgctagggatacatcctcgtcgtcggaccaatcatctattctggggggaggtagggctagaggggccttcttcttcttcttctctgtctggtatccttggttggtggtcttcttctggattttcttcttgggggcgagtttctttagcttcttgtcatagtccatcttcaaagtccgataggcctcacgggtgttggcttcctcgccttctgctatgtcgagactctcctggagggatgccttctcttgcttaggctctttgacttgctactctaggctttccactcgggagtt

SEQ ID NO: 142454 - DNA, 338 bp, Zea Mays
ggaagaagccgggtgcaggaggtcttgggcacacgagaatttctcgccgaagatgaacctccgccgcgagctcgcgccatcccgtggatgggaggatatctgccccgaaccaaggagtacatgtcttttcgccttactccgagcgtcacgtattgggcagtttagggccccgaaccaaggagtacggcgggtttgattagagtttagggcccctttgcgtggtattgggcagtccggccatggggctccgtgcttcgggcggcgttgccggagtttaccgggaggaggatgatggcggggtcccgttggatctccttttcatggccggatgtggtgac

SEQ ID NO: 142455 - DNA, 533 bp, Zea Mays
atcggatactccgtgtaagtcaaatcaccctaaacactgagctcttccattggtaactgttcctcagggacacggagacacttcttaagttgagacacatggaatacattatacacatcagatagattatcaggtagctcgagttgataggtcatctctccaacttgcctaaaaactcagaatggtccaataaagcgaggggacaatttgcccttgactttgaatctcctcattccacaaagtggtgacatcttgaggtacacatgatcaccttcctcaaactccggtggtctccttctattatctgcgtagctcttttgtctggtctgagctaccctcaaattctctcggattatacagacttgttcttctgcctcttgaataagttcaggtccaaagaactgtcttcctctagtctggtccaaaatggaggagtcctacatttcctgccatatagagcctcgaacagtgacatcttcagactggcctggtaactattattatatgagaactcagcacaaggtagactcttg

SEQ ID NO: 142456 - DNA, 1258 bp, Zea Mays
cgctcccctccaattcggcccattccaccttccctctcgcgccagcccacccacgcgcttgcttctgcttcggtcgcttacacgcggggccggctggtcagtcgcgtcgcgcgcacgctggctcgcgggacccgtgtgccagtcaagctaacgcagggattcgttgggtggtgtcgatgatgggtgggacccgctcgtcaggttcatcctcgacctcctaacagaagcaccgaacccgccgcgcggcacgctcgatcctcgctgggttgttgcgatccccggatataaaaccaaaacgatcccgcgacccccttcgacgatcccatcctcttctcacctcatccagtccgccgtcatcgccgttgtccgagagagagggcagtggggagctcgaatcgcgccgccgtgaagagaagctctacccgaccaccaaaatcagccggtgaacccgtcgttgtggtgcattgggtgttggggagggtgcgcgaagcctcgccttgggcgaattgtaatccgggactccggaattcctcgccgtgtccgctgcgccgccgtgaacccgcccttcgccgtgggatcgagcccctgcgtcggccggaacatcaaggtatgcaccgacctcttcgttggagtggttagaaggtagttggagtagcgccgcggggaaatctcggcgtgtgcccccggaatttcacaccggagcaccgccggccgccttaaatcgcgatgcaccgtggacctggggtctgcgttgggaaacgattgaaattgaggggtgaatcgggttcgggatgtctcgaatctcgcgtgggtcatacgaatttggggttggcgctcgggttagccggattcaaggactccggcgaagtccaccgccgcgcccctgggcgacaccgccatcgggacagcttgggttgggaacgacgccgctcggccgttggatgcgtaagggacggtcccgattagatcaagcttaccccttcgtccaatccaactgcgtccgtcgatgcgagatccagcggtgcagagtagatctttgattcattaaatccgtgccgttaatctttaatccaacggctctgatcgcgtaccgattcggcccgggatacatctaatcctagcggtcgatagtcgatcgtgcggctgagattgcaagatacctcttcggccgtgctttttgctaaagagaccctctgttttattaaaatcaacccgccatccccgttttactgtttcctgagtctgggacgacttaccc

SEQ ID NO: 142457 - DNA, 540 bp, Zea Mays
gtggattccaaagtataactattcattagggacactttactttgattcctgttactagtccccaaaattaggattttgggcgttacaaactctaccccctttaaaaataatctcgtcctcgagattagtaaggaaagggatgcaacaagtttggtttaaaatttagtttcccatatggtttagggaccaatagttttgtccaaagttcttaaatactagctagtagatgattaggaaaatatggacatagtatgcctagtcatcttattaggtcagatgagttacggttatagtaagtataggccgtggcaaggaagagtttaataagagaagactacatcctgaactatggatcttgattcctcttgaggttggatttgactcatctcctcccttgtcgaggttgagcactcttttcagaccttggtgtctttcttcccggataggaacatgtggttaagacagatttgtaggtgacaaataggtagagccgctagtttagtaggtgactaagagttaaatgggattggcctgacttag

SEQ ID NO: 142458 - DNA, 519 bp, Zea Mays
gaaaactatatttgatttctacacacataaatattttagtgtgttaccgtgctaaactgtttagatcatttaacttctattgcacgtgataatttaaatagcgtccaaacgtcctaaacacgaaacagctggtgatcgactgtttatcgtttcagaataacgcgtgtagttgctcaaattcaataaaaaaaggacaaattacatggaagaggagaagcagcccatcagccacaacatgcaatcctcagcagcagaaggcatgatgatcaagtctgcattacgagtttgtgaccaagcgcggttttggagagattttcacgaaccagccggacagatatagcaccacgcgctggctgggctctcgaatccatcatcagctccaggttccagcgctgggattgaggcggaggaaacgcatgttctccgatctaattcctggcggacgcgccggaatctgtctgccgcggtggactagctagatctctccgtgtccgccggagtccaccgaccagctgagac

SEQ ID NO: 142459 - DNA, 327 bp, Zea Mays
gatctgtctaaggagaaactggtcagagagtaccgaagatagaacgggttatgttttacttgcggagacaagttcgagctggggcatcagaacaaatgtcctaagaaggtacacatgcagttgaatgttctgtcaactgacgaactgaagatgactttgacagacaaagtgctaaaaaaattagagcaagaggacctggtagcagagtagtgcttcaagctgccgttgcatgcaatcagtggcaatatggctgaagattttatgggagtcagggcactattgcagaaccaagtgttactgatactagtggactcaggaagttcggct

SEQ ID NO: 142460 - DNA, 479 bp, Zea Mays
gagatgagaacgtcatcaacagtgaaattgcaactaaaacctaaatcacatagttgagctacggatagcaaattgaagtttagagattcaactaaaagtacattcgatatggaatggtcatttgaaatagcaattttacccaaaactttaacctttcctttgtggttatctccaaaactgatgctatcacaggttgaacaatcttcctcactcatttgggtgaacatcctcatatccccgatcatatgttgagtataaccactatccaacacccaatgatttcctcctgccttgtaatttacctacaaaaggaaatcaatctcttttaggtacccaaatttgtttgggtccttggatgttagtgaccaaggtctttggtacccaaatggctttctttttggcaccaacaattgaagtgccaacaaacttagcatgaacaccttttgcattatgtgaaagaacatagcaatgctcaaaac

SEQ ID NO: 142461 - DNA, 611 bp, Zea Mays
gcttgaagtccctacagttccgtagggtgtggcgcatattcttgtggtagaggcactaggtgtcgaggatgtcatccaatgtctgttcgcctccgtggggcgtacctcgggctcgagcaacgggtggtccattggcatgtacctgctcacgaggcctcttctcccagcgcctgtcaggttgctggttcgtgtcgcgtcgtggtgccggttgtgtaggttttgtacctccaatgaggtcctgggcctgctcgtcagtggtgatgtagaggtctgcctctcgaaatagttgctcagaggtggtcgacgcttcctgcagtatggctcggacgaaggccgagtcattggatcctcgatagaaatcttcaatcaccgctgcctcggtgacttcggggatgcggtttctcatggtctgaaacctcttgaggtatgaccgaagtgtttcatcgccctggcacctgatggatttgaggtcccatggctgcgtcggcttatcagagagagactggaagttggcgatgaaccatcgtctgaagtcgctccaatcgtcgatgcagtgtcgtggcagatgtcatagccactgtagtgcatcttgccctagaacgatgggcaaa

SEQ ID NO: 142462 - DNA, 326 bp, Zea Mays
gtcatatcccactctagctttgaagccgagtaccgcgccgtggccaacgatgtggtcgaggcgtcctgactttgtcagctgttccaggagcttcacaaccctcttgtctgtgacaacctcgtctagtgtgacaacgtcaatgtggtctgtctctccaccaatcccatgcaacattagcgcatggatcacgtggagattgacctacactttgtccgctagtgtgtcactgtcagcaatgtacacgtcctgaccttctagttcactgatatcttcactaagggcctcccctcgacggtgttcttggagtttcggtacagtctcaacat

SEQ ID NO: 142463 - DNA, 336 bp, Zea Mays
gtcgacgtgactacttgaggccgacgttgacgcttgggctggcacaacatggccctagaaggacgacagttcaaccaaaagaccaaaaacatttagaagcagtggggatttatttgggccatgcaccaactggcccagggcctggttctgtccttcggctgagcacgtgcagcgacgcgatcattctctccagcaaacgaacaccgccgcttggaccctaccttgtcagtgtagacgttactcgaatctgcacacgcctctgtagtcgactgcatgtccagttgctcacgccagcctcgacgattccatcaggtggcaattcattgtggtgcaaag

SEQ ID NO: 142464 - DNA, 327 bp, Zea Mays
aagcacattctaggccaattctcgcagggcaggcttccgttgttcttcaaagaccgtatcatacagtcacagtcgtcgtctctcagaaataatacattattggcaatggcagctgaaatgcagatggcagcttctttttgaagcgccaacctgccagcacagcaaactgcttcttcgcgttttgtttctgaataaactggagcttctttttgtagctggtatttgtggggtttcttcatctctatcttgtccttgtacagcagcactgatttgagacaacaggataaagcttcgagagctggttccatgcatgattgagatagggca

SEQ ID NO: 142465 - DNA, 986 bp, Zea Mays
ctagtgtcgtcgtcgtgctgggggtgagaagggacccgtgccgtcgttgcaagccaccatccgccagggcctccaccaggtctgctcgccgatgtggccgttcggcgcagacacggagacctcgggagccggggaacctgctgggcggaaggaagactggcgccctcgtcctccgcgcacatcgtcgaggtgcggtgtccagtggtggggtccgtcgaccgaagtcgcgcttccgccgtagggaatcacagcaccgccatacgccgtggtcagggattatggctgcgcgactcacggtaagctctccttcccccaactcgcgttcatctctatctcgtgttgcctcgtccgaatttaagttttgggggcaaaatcatctagagcgcccaggaattcttcgccgcgttgtggctctgtcgtggcgccattgcgtgtcgaggaccagctctggtgtcaactcgaccgctagtacgttgctttgattctactcattcgttcgtccgcatcgcgttgcaccgattagcacgatgaaggggtgtcggttctgccttcaccggcggggcgtcacggccaaacagtgggcgccgtcgtgtttcagggcgactggatggctggaggagggtgatgagccctgtgccatcagatctagagtaaacggtttggattagattctgggtaacgctccgcccgtaatagatcctggccatcgattccttgatgaacgattcaaattagatcggatggtgtggatcgttggatggtgatcgggccgttctgattgggatagggcgtgggtataatcctggcggccgaattctaatcggacggcttgaagagatccataccccttcggtcgcatgttttgtaaaagaaaccctggaaaaccgaggaataaacctgccgtccacatgtggggcgccctgtgtcttaagaactttcacttagagacccctgacctttcttgtaaatgaggcccagtccagaac

SEQ ID NO: 142466 - DNA, 556 bp, Zea Mays
cggcacacgagggatgacattgcaatcgtggcacatgagggatgataggtgcaccacatggacgccgagtcaatcatttttggacggcgacttgcgagaggagctctacgtgaagcagcagccggttttggcatcaccaccaaggagcacaatgtgctcacgcagtcacgctgcgaaagacgttgtacatactacatcaaacaccacgcgcctggaaggaaaaaagggtggacgacattctgatgtcgttcggcttcaggaggagcctatcgaagcacgccatctacatcaggtgaaacgatgatttgcagatgacaatatccaccaaccagtataaaagaactctgatcttatacgactgcgaaggatgatgctagctagctgcaatatattgaaaattctgggaacaaacccaggcctcccgatattaccttctgaagcacttgtttttgagcgtgtgctcatcttcttattcagtgaacgatgatatgcgatacacaaaatcttacaacttggagcatataatctttcggcgtgcacccacaattaaaattag

SEQ ID NO: 142467 - DNA, 693 bp, Zea Mays
agtcattggaagctcgatccagtttaagtcgatttgtacatctccttatgtactatattgctgttttcgcacacccgtattttctttactttatttttatttgattctgattaatgcgcgttctgtgcgatgctgatgattccttaccttgaaggatacatctcttttttcgttttgaaggattaatcttctttattacaactaaatgcacggttgtatttcttgtggtgatattgattggaagtcatgtgattttacatagttatgtggcgactggcgatatatgtggaggacatgatgcttgttttaagctatgcaacacatgtatttaaattgctatcaacttattccatggctgttccaatagcagcacctttttattcttttagggcttctgtgctatgttcagatttcatcaagtgaaagttatgcaatggtggtttagttatgtatttgctcacatatatattgtccagagatgattttggctccagaacttcaactctctttttgattgcaatcgcaaagtttacaaacaacagttgctgttgcttgtaattgctaatacatattggaaatctaatgaccagcttgttgttggaatatactaatattgtatgggatggatataaatacttttgtgtgcattagtagctgaagtttgaaagatcaactgcatggaccaggagcaaa

SEQ ID NO: 142468 - DNA, 1150 bp, Zea Mays
tccgggcgcatcggcctcttccgcggagaacaggctcctgcagtccctcgcagagcgggggtggcgcttccgtgaccccaccgacgaggccatccaagccctgctcctcgcctcccccactccgtcgccggaggccgtggagtccgagctcgtcagcatggacctgaggatgtttggcggaaagtgccttcccgatcgggccgccgccggcggcacgtcgaagcggctttcgtacctccacggccccgtcgtcttgcaggtattgcataaaaactctaaaatcacagtccccaatgctctgcaccggttaataatgtgtccgaaactaaaggaaagtgcgttatttgtatagggatagggtacctattcaatttgttatatgtggctcgatttaggtggacattgcatttgtgctctacaggtaccacgacagtggttgtactaatactaggggaaaagagcattgtcaatgcagttctctgaaccgagtctgtgaaacctagctgtatgtttcagacgatggaacagatgacaatcatgtctgctttgcgcttgtggatcaaatgtgcattctcatgctactataggagattttttttttggtcatgtcttggatgtgtttggttcctttaatcctgtacctatgtttactatttccatgatctattatttttgatacagatagtctctttaagagatatatatcacagcagcattgatgcgtcctttaagaacccgcagcagcgtcgccttctgcgctttggtctcactgatgggatatgtgaagcagtagccatagagttttctcccatcccattcatcaccgaagagatagctccaggtaccaaggtcagttgaccgtgttctgcttctacctcaattgtttttgtagacaattttagtcaaatttgatagttttcaagtgtaaactgtacatactttcctccctctgccactgcctgccatctgggtattgactattgttcatgacttcttgttcagttctgagtattaatgccatcagtgccagagaccagagagtagcttaacaacatttgattaaattctgagcatgttagaaatgaataagtaaacaagaatactcaggtagctctttgtgcgacagtatactatccttcagaatgaaaac

SEQ ID NO: 142469 - DNA, 384 bp, Zea Mays
atcttctcttcccacgagcgccgaaggcagtaatcatggcttcgtcctctgctttcgaataagcccccaacaattcatcactgctcgcctcaatgacttcaaaacatacatcatttggctcgccaaactgacttctatagcgataggtgtacttcagataaactaggccaccttcgctggaaccagcagcggtttccttcggcatctcccaatcattaacaaggggccataccttgaaagcaatgtgctcttgaaccaaatctctggtgccaatgtagctacacactatgttgaaggccaacagacatgcttgagctttgttaacacccgtgatcgaaggttttctaatgtcgaagcgcgatcgtatggagcgttgtatcacac

SEQ ID NO: 142470 - DNA, 382 bp, Zea Mays
gccctcggccaaacaccctcaccctctctctcgctctgcgcgtgcccgtggaactccgtcgtaggttcgtcgccgatccatgaccgccatcgagcgtccatcgcatccgttgcctcggtcagcatcgcccctttgcccgcaacccgggacaccctccggtttgcccccaacctctctaatttgcccagtccatgctcaccggcaatcttccccacgcagccggagcaccgtcgccgtcgacccaggccctcgttgtgtccctgtccctgtttaaaggtcccggaatctccaatcgacataagcaacctagtcctgcccctattttccccttgactgcccctggttgtgcgtgattgctcgtcggagtaggattgtgtcgcca

SEQ ID NO: 142471 - DNA, 453 bp, Zea Mays
gttttatatcctgaatcctgaaaagaattaaaggcttactcttccttcctcctttttgtagtgtcattacaacttccagtgattatactgttaaggtgctgatcttattgtctcatatttacagttcaactgttcaagttgcaattgttcaacaattcacagacattttcatcaatattcgtcaggactttacaaggacaggttatttgaattcacatcctattttttatttggcctattttttctgcctgcaaaatgcctagatcaaaatcctcagctgactaataaataaacatgccttctcatactccagaaattgttgtcaaatagaagatggccagtgactgaacaataagctgaacttctttgtgttgtaatgctcctgtgcatcattgttgggcctatcgccgggtacttaatgttttatccgtacctgatttttattcatattcg

SEQ ID NO: 142472 - DNA, 481 bp, Zea Mays
gtgcccttcaacgtggtagtagttgggataagggtctaccttatactgattctcatataataatagttaccgggccagtctgaagatgtcaccgttcgggactctgtatgacaggaaatgcatgactcctctatttcggaccagactagaggaagacagtactttggacctgacttattcaagaggcagaaggacaagtccgtataattcaggagaatttgagggtagctcagacccggcaaaagagctacgcagataatagaagaagaccactggaatttgaggaaggtgatcatgtgtacctcaagatgtcaccacttcatggaatgaggagattcaaagttaagggcaaattgtcccctcgctttattggaccattcagagtttttaggcgagttggagagatggcctatcaactcgagctacctgataatctatctgatgtgcataatgtattccatgtgtctcaacttaagaagtg

SEQ ID NO: 142473 - DNA, 371 bp, Zea Mays
attgaatgttgtgggcactggattgggaacgacccggcgatgccccgccgtggtgtgctctgcgccgccggtgggtcagccgatggggagaagaagctgggttggctatcgaatcggcgatggacggctaaaaatagaagcaggataccccttcgcgtaattgaatccaagccatttgtttgcaattgaacggatgcgggttgatctcggtcatattaaatctgatccgttgatgggggatctgatggtcgagattgcgtaccgcttcataaagaccgtggtttgatcggaggcgcaggattttgatcctacggttcatatcagccgatacctctttagcatgggcaagtttctaaaaacgtcctcagact

SEQ ID NO: 142474 - DNA, 440 bp, Zea Mays
taagaggatctagggaacaggtggggaaaatctacgcgaagctcttcttctctttcccaagttgcttcatcttcaccgtggtgactccattgcactttgcacatctttatcaccttattccttgtaactcgagtcaatgtatccaaaatcttgataggatactccgtgtaagtcaaatcaccctgaacactaagctcttccattggtaactgttcttcagggacacggagacacttgataagttgagatacgtggaacacattgtgcacatccgatagagtagcaggtagctcgagttgataggccatctctccaactcgcctaaaagctctgaatggtccaataaaacgaggggacaatttgcccttgactttgaatttcctcattccacgaagtggtgacaccttgaggtacacataatctccttcctcaaattctag

SEQ ID NO: 142475 - DNA, 322 bp, Zea Mays
cccccggcgaagtccggctgccagagttcgtggccgtcgtgtgtgcatctggcaaggaagaaaggggttgaagatggcgccgtagtcggtgcgtgtggccggggggaagaagaaataaaggaaactgttaattggtagatgaacggcccagatcagtagacatattctctctgctagaaatgatcctggccgctaagtattgatcgggcggatgcgtgtggggcgcaggtgtttaaaagatggatcgttgagattagatctaagggtagatggtggatcggacttcataaaatataggctgtagatccttgatccgatggtc

SEQ ID NO: 142476 - DNA, 722 bp, Zea Mays
gaaggaaattctccggctatggtggctaattgaaggcggaatgggtgctctggctttgtgatagtatagcgcaacagaccagaccatcaatttataggagcgcaaggcggtggtgtccaatttcgcgaagacacgctggcgaccggagagggagaaggctactggcgtgggtgaaaccgtggcactcaccggctgaggggctacggcggttatcggcgagctggtgcggctggaagcgacgtggttaaaggcctggggcgtggcacaaccgcggtgaaagatgccaactccgttgacggccgtaaagccacgtcgctggtgcaagtgactgaggaacagcgaggccacagtaacttgaacccatccgcgacgagatcttttcaccggcgaactcaatccacagaccagacgcacgaatcgcggcgagcagcactaatcccggtgaagggtcactggcggccagttcactgaatctgctgattttttggttactgtaccttcacgatcttcttcagtcagcctgacagacagatttgtgacgccaaaatcttgaattttcacgtaagaacttactaatccatttgtagcaaatctgtagccctatgatccagctataaaccgactgtggtaaccatgctcaaacatccacaggatcatcttcaaaatggcccccaaagttcatcttatgccactgaataccataattcaggttttaggcagac

SEQ ID NO: 142477 - DNA, 603 bp, Zea Mays
cacgatgttggcagagttgagtaaacgaaaatccaccccattcatgctatgaagttggtgaaaagcctcaagaacgtcctcattgatgatatcccagcatactttgaagaataaacctgtaaagccgtccgggcctggtgctttgtcgctcagcattgagaagattgtttcctttatttcttcgagggagaacggcgcttctagcgatgagaggtcatgctgcgttaaagctagagtcggccagttgagggtgatccctctctccggggttgtccctaggtgaaatttgaagtgttcctaaatgattttttctttttcctcatgggctactactaagtttccaattgggggctgcaggcaatggatgaagtttttacgtgctctggagctagcagataggtggaagaacttagtgttcgcgtcgcccaacctaatgcgagtgaggcgagcccgttgacggatcctcgatttttcaattatagcaagtcccagtgccctggctttgagtgccttcaagagatccagttcctcttgggtgaacacacactcctcttgagcagtttcgaatcggatgattaattctttggaaattgcaagttgtaa

SEQ ID NO: 142478 - DNA, 292 bp, Zea Mays
tctatctgcttcttgagttccaccaattctagttcggacactctatacgctcttttagaaataggggtggtgccagggataagctctatgtcaaattctaatttttctctcaggtggcatgcctggtaaatcctcaaggaacacatccgggaattctaatactactttgatggcttcaagcggattgactgtctcactatgggcagtgatctggtgacaatttcctttcattggtccaaacaagaccaactccaccaacacttcctctcctaacaaggacactaacttcacg

SEQ ID NO: 142479 - DNA, 614 bp, Zea Mays
gaatgatataatcaggatattcggaaggtgcttcgggagcaagggattcggtttctttggccacatttctctcaaaagctatatcagtatttggaggtacttttttggccccttgctcggctgtggcaagcttcgtctcaataggcactgtgggttcggcctcggttccagcctcaattgttgcagttttaccttttatctgcctagtatcagcttcagcctgcgcctcggcactttcggcaaccttctttatggaagaggggcgtttggagtctgttgttttcaaaatgtctaatacatttaccatccttttccttctaggggttatcgcagaactttttctatattcagcactgttgcttctgctgaaggacttagaaccttgggcatctttgttacttcttcagtttttgatctttcagccttatcttcgtcaaccttcgattcaataagcttagtcgaaggcgccttcagcattacagccgtctcttcaatcttctgcgtgggaggagcaggttctttcgcttcagtaactgaagaagtttccccgccaaactcaggcactatggccggttcaatgtagcgcggtcggtgggtaaggaccttcaactttt

SEQ ID NO: 142480 - DNA, 589 bp, Zea Mays
ctggatcattaccagcaacacccttgggggctgggtaaccgctggcgccatccttggggaccgtgttctctgcagcagccacctctaaggctgaaggattctcagtcacctccatgggaatggagcaacctagaccagcttcttgactctgaagaccgcactccaaggtcgatgaggcttgagacgctgctcgagataactctaaccccacatctagaatgttagtgcaaacgtccatcataccaccatctattggcttggacagcagatcttcaggaaccatatcctcgggagcctgatcaaaatttgctatggacaactcttgcagaccaacgagagcagacaaagttggagaaggaacatcactactctccccactaattaggtaacactgactatttttccgaattaaggggatttcctcctcttattcctcatcctcgtcaacaatatgaacaacacacccattggggtcagctctgaccggattgcacccattgggattagcatcatcaaggtcacacccattggggtcagcgtcagcagggtcacacccattgggatcagctccagtaaaaagttccactgg

SEQ ID NO: 142481 - DNA, 419 bp, Zea Mays
gttgtatttaaaagtttcttcagggtagggcttcggtttcctccatatgatataataggagaagttttgaaaaggtttgaaatataccttcagcaactgacatcgaatgccattgtcaagctgagtgtctacatatgggctctccgaagccagggcaaaagcgccaatgccgaaggtttctaccgagtgcatgagttgcgctatcaaactaaggccagagctgatggttttcacaaaaactttggatgttataattttgcataccgaaaggacaccaaggccccggtgatcggctaccgcactaagtggtcgaccgggtgggcaagcgaatggttctacgtgaaagctgatgagaagaagagggaaaaacttatgactatggttatgagtcctctgaggttgagcttcgggatgacaag

SEQ ID NO: 142482 - DNA, 455 bp, Zea Mays
cccgtgcgacggtggcctctggcgctcaggcacgtggccccgcgacgcgggcacgtcccaggcttgggtgcgccggcacggccgcttctcaggcgtggccaaagccagtgcggcttctaccacgacgcaaaccgggcatgcggcccagccagcaactaacgtgagctctctggcatggagtggcccctgccgtgagcgcgaagacaaaaaatgactgataggcatcgtacctccagtccttggaggctagagtctctcttcttccctgatgggtgggcgttgccggtgaagacctcggcgagcagactgcaggccgcgggcgcttgaagtatggccttcctgttgttgttctagagaaaaatccccttcaaacaggcagtggtccttcctcttcttcccttcaatagaaaaattttctgttctctcgaggcagtgctgataacgtgttgaagtac

SEQ ID NO: 142483 - DNA, 646 bp, Zea Mays
acatcctccagcctagtagcctcagcttttgctatgttttcgaagattaatctcggtgccccaaacttgagatcagcgagtagcaccgcctccgaaccatagaccatgaagaaaggagtgtttccatgcagagctcggctaggttgagttctcaggctctagacaacatacggcaactctctaatccactttcctgcgaacttttcattcttgtcgaagactttctttctgagtgcttccagtatcattctgttggctctttctacctgcccgttggctcttgggtgtgccactgatgcatatttgatctggatgcattttttatcgcagaaatcaaagaactccgagctagtaaaattggatcctaggtcggttatgatgttgttcggtatcccgaacttgaatattatgtcttgtatgaattccactgccttagctgaagttagagaagcaatgggcttgaactctatccacttagtgaatttgtcgatagcaaccagtacatgagtgtatcctccttgagccttcttgaagggtccaatcatattcagtccccagcatgcgaacggccaagttacaggtatggtttgcagttgctgtgctggtaaatgctgctgttttgataagtactgacaagcctcgcatc

SEQ ID NO: 142484 - DNA, 636 bp, Zea Mays
agaagatcgagagcggatcagagtccgtggcgcccggacgaacgttgcacccggatggggttttgatgggtgctggcatggcaccgccgtgaggaaaaacgcgtcgccggtatcgctgtcaggaggtgaaagaagggttggtagccgctggatggggagagaacggttgagattaaaattgagatcccccttcgatgcattgaacccgtgtcgctggatcttcggccaagggccatgattagacctcagtgtgattatgtctgcgccgttacatcgtattggacgactggggcgagatctggggctcaataaaatcatgaccgtagatctagcgttgtgcggtcgacgttgcataccggttcgggtgagatcgatttaatctgggcccttggtttagatcagatggcttagaatccacgataccccttcgcggctgtaattttgcataaaaccccctcagttattaagaaattaacccgccgtccggggtaactgtacactgtgtcctggaactcttgcgccagggcccttatgttttctgtaaatggtgcgctcgatccagagaacagaaaatcaaaggaattcatttagaaaatacatttttgtgtgaaaataattataggaacttaattaatt

SEQ ID NO: 142485 - DNA, 671 bp, Zea Mays
tctggtgtacttcttagttatgtacagcttgtttttatttatttattttaactagtaaattccaactgtacgacacagcctctgcactacaaagcaagtgacaatctttatgtatgttaaataaaaacgaaatgtcaagcaacagaggttcatatacgtcctctatgtgccagtgatgtactgatacatccgttggtaccctatcagttgtggcttcacatattttagttgtggtttatgtaataataccttcacgatttttgttttgtttccatggcaattatgcctctcacaaaaaatataacgccctcacaaaatctcagttttctggtagtggccatatggtgtgaccctagtacacaaagtgccaattagaatcacatttttttgacataaccacagcatctacattgttagacatgttcacatataactaccaaaattccaatgaccttttaattaagagaagaaaccatgttcatctcaaattttttggagaaaaaagggcacagatggatgtcatgctttgaacttttatatataattcaattcaaatattattttgaaaccattttcaactgctattaggttatgaactggtccaaacgtggtccaattcttctgtaaagaaaataacatttcaactgtatttggttaaacctgcaccaaat

SEQ ID NO: 142486 - DNA, 499 bp, Zea Mays
ggcgcagcagcgcgcggctggcgtggcggcgtgcgcgctccatttggttggtggtggtggtggtggtggtggtggctggtgggggtgggtagtgcgacgcgaggcgaggcgaggcaggcgcacaggaatgggaagtggcgagtcccgccccggggtgggagaggactcggcttccgttactgccgagaagagcggcgtgcctgggcctggggcctggctcagcgaccgatttggttggctagtaatgcatcatccggtccggcggcgagggaggcgatgaggtgcaggagcagctgtcacagcctgcctgactgcgccaagctgccagtacagtggaggtggagtcagcacgcacaaggaaaaacacgggatgggtgctttaatagtgggtgacgtggacgctgacacaactcggcaacaggacgcggatggcgtttggatggacgaggagcacgacggccctccgctccgccggctgcacaagattttcgcagagcgc

SEQ ID NO: 142487 - DNA, 347 bp, Zea Mays
atattttatgttcttgagttctagattcaatgatattcttgcttacacaagaaaaaataactagggtttactgtgcttatgctttacacaatatgcatattagattctataaactaggactggattatagacttgacaattgttcttcaaatgtaaatagaaagtaagaaagattgcagaaggatataatgttggtaaaataaaaatgccacttttatctgtaatttcgtgtcttgtctctgttagttcttgtattaagttaaatttgctttccttcgatgattacaagattgtaccttttgggagcctgtttactattgatctcatgtcctttttctcacttcttg

SEQ ID NO: 142488 - DNA, 455 bp, Zea Mays
cttttacgaaacactgtcaaatttttatcacccgtaaatggattataaagaccgatgctttcttagaacaggcatttggctaaggtgctaaaggagcgcgtctagtcccttgatgggttcaatcactatggaatgatcgctaccccatacacatgttggcacatgttcgttctccccatcaatatccgccggtgtatgctttcaaaaatagaacatattcgtgtcgttgataattcttggatacccagggaataaaatgggcatgtagatggagcctttaatgatgaattggtccatgcttgggaggaaggggtatggacgtacgaccgagctacgaagaaaaatttcaaaatgcatgtttggtaccagtactccatgcatgacttaccgatgtatgagctattttgcgcctggtgtgttcacggtaagttcccacgcccagtttgcaaggaagc

SEQ ID NO: 142489 - DNA, 533 bp, Zea Mays
caaatggatggcacagaagtggggaactcatggaacatagagcatcttagaaagttttacccttagcaaggcctcaaaagctatcaaagcaacattatactctgtaattggagaatccatcatcaataaacttttcattttcaaagtcattcaaactcttgactatcagctgacttcgattggattggacttgaaatcaacacatttactcgacttagggtgaccactataccctactaatggagcaattggcttaagtcgacgacgacctaagacggtgtaacatgctcacgcttatttggcttagggtgaccactataccctactaacggagcaatcggcttaagtcggtgacgacttaagacggtgcaacatgctcacgctcactcgacttaaggtgaccactataccctactaacggagcaatcggattaagtcgatgatgacttaagacggtgtaacatgctcacgcttactcgacttagggtgaccactataccctactaacggagcaattggcttaagtcggcgac

SEQ ID NO: 142490 - DNA, 416 bp, Zea Mays
atgtaatctacgaataaaaaacaataattaatgtacttagtcgctacatggtataatatctgtaatcttgtgaaaggacaatccgatgagcttacgaacaaaggactcttgcaacaatctttcttctcaagtagctgctacgaagtcgaataaccatgtgttatgtgcagggccttcaacctcttcgtcagcaactccgcatcgtccgattccggcagccggtcgctcatcgtctcctggacagggtagcctcgcttccgccctatgtggagtgagcctaagctcttggctagcgccgcctctgcgccgcacgcctgatccgcatccggtcggcaagtgatgtaatcttggatgaggaggcgacgattctggaggcaccgacggtggcgcatgatcgcgtcgatgtcggtcgccgc

SEQ ID NO: 142491 - DNA, 527 bp, Zea Mays
tacttgtgggtgttgatttttgtcaattgttgaaaccttagagagaaatctatacgtctagagaactgtacttgtgggtgttgattcttgtatggtgttgtgaatctgttttctatctgaactgttgcattgcttactactagcttgatttgaaaatgggttgtaattaccgctgttttctttggaatttactcctaatagataaaatttatcaagtaccttatctatatcggatagattcttcggcaacgattggtatatattttgatttcaaacagtaaagtcaagcaatagtaagatgggtactgtttgtacgaggaatctggaattgactgtcattttaaccggctgtttgttcatggtatcaatcttttcgctgtgtgatctggataccctttacctattccgctttttccttccctactccgtttgtcatggttaattgatcaggtttaggcctgttttgatccttgtggtaaacattttgtcggctaattttagcaccttaacctctaaacaggtcgact

SEQ ID NO: 142492 - DNA, 634 bp, Zea Mays
cttagccagcaaatcatccaattgccgcttcaattcaacctgctcctttggggccattcgatacagagccttatgaatgggctacgtacccggaatcagcttaatctcaaaagttgcatcgcactccggaggaatgcatggaagctctgccagaaacacgttagcaaagtcacacaccacccggatgtcctgcacccacaaggcagcctcaccctccaccaccatggagaaaaagattctcgacttccaggatcggcgatccggaagcaattgcgccaacaaggataacgtgaacttaggggaacttcccaagaataccacctccctacctgacggcgcctgcaataacactatcttccaaaaataggatataattacgttatactgggataaccaatccatacccaagataacatcgaatgcccccaaggaaatcacaactagattggccaaaaaaacctcatcagcaataatgacggaacacccctgtcaaactgaacaactactaatggagccattagcagaactaaccaaaattgggtgacccaacctctgcaccgaaagactagcccgggacacaaaatcctccgaaacaaacgaatagctagtgctaaagtcaaaaagagcatgggcc

SEQ ID NO: 142493 - DNA, 804 bp, Zea Mays
ggatgacctgcatctggttgtatccgttcggttttcattcctacccggctgatttgtacctagtacctatcaaatcaaagttattaaaacctaacaaggtttactcgcacgcccgcgtttggcggatgtgttttgcaaaaaagccctcgaactcttaggaaattaacctgccattcacacctcttctcttccgcctccgccgtctcggccttgcctcgcgcatctgcttttaggaccttctcttcgtgctccgcctcctcgccctcctccatgtcgccgagatttgccagcgtggcagcctctctgagtccaagccctagcgtccgcgacttgctcttgttcgtgccactcactcacctcgtattgcctcactagggtttgtcgttcccatcgcaggcaaagacggagcaaggtgaccccggtcgtggcaccgcacctcccgaggctaggcccctcttgtcacattcccctgtgtggcgtagtccgctgccgccatggatgagacgcctctgccacagcgacctctccttgctcggttctaggagtgacacacacccgtcatcaccgacacggtaatgttgccattaggcctgcggccctccccgtcccaacccatttcttttccacccgtcaccctttccccaccatccatgtccagcattcctccctcaaaatatctccttctcccaaagtgtacactgaacgccgaattccctccccgcgagacacgatgccgaatccctgcagcgcgatggcgaacgcgccacccgtgggcaatgcggggcacgcgatgctcacgctccc

SEQ ID NO: 142494 - DNA, 476 bp, Zea Mays
aaacggcatcgccccgcggcttctcacccccctcctcctcctttctccctctcctcgcctcctcttcaacttgaagcagcatcgtcaaccctcaacagcccttaatctggctggctggtagcttaatctagctagctaggcggtgaacctgataatgttcttggactccggcagcttcttcttcaagttcaacaccgcccccgcgcaagcgcttctcctcctccacagtaggaagagcttctatttctggatcttccacgtcttcaacagacaccccctcctcctgctccattgccattaatccaaacaatcgccgctagctagctagctctagtactgtcgtctacgcacaccagctgctcctaatcacctgcctgaaatatttacctggcagttgacattatattccaggtccgttattagtgttggcctgttgggtcgtcgtcggcggcagcattattatgtttgctgctgct

SEQ ID NO: 142495 - DNA, 372 bp, Zea Mays
ggaccacctcaccaatcggaaaggacgggaggtcataatgtccaactaagacctaacgtacatgcatggacacctccactcccatacacacctatgtcatatcattatacatacataccaccaccaccatatatcctgaatcagatgtggggtatgccaccatatccttttgggacaccacaatactccgcttggggggcaccccagtcatctgtctttgccaggttgacgcctccagtacaagaccgattgagagcccctcaatctagtccacgagcacaggcccagcaagattgccgaaccactcgtccccaaaggctgactaatccggcaggggggtatatagctacggcctccaacagtacgataaaa

SEQ ID NO: 142496 - DNA, 486 bp, Zea Mays
cccacgtagagcagcggcacaacggcggtgccaaggccacggtgagaaattcccggccaatggtagcgacaaaacccaccgcgggaggcgccagacgaggttaagatgagggcgattctcacagaggggctcataccgatgattggagccacgaggaggtctgaccacggcgagacgcaccaccgcggcggcagcctcgccctgccgagccgttattgtcaccgtagccccgattccacccggttggcgccacgatcgacttcctggggactcggagaagcgcccagactggtccccgtcgacgccggtggtccaatcccccggttgcgggttccaggcgtgattccggcaagcgcatagaagaaacgcccatgtgatcaacggtggctgcgcgtggaggggatgtgaagggaaggtaagggggaaggtggcttatatgctccaagaatcggaatctggttgggagttgcacagaagccgcgacat

SEQ ID NO: 142497 - DNA, 420 bp, Zea Mays
cgactgtgggccatcgcggtcagcggaacctcctctctccctcacaacagaaacaccgcgcatgcggaggtgcgacgtggacgcgggagtcccttgctccatcacagatcgtgctattcctataaggtgtaacgggggttccgggtctcctcctctcccatcttcgctatcttcgctgcgcaatcgcgaccgtgtggggagctgatcgggagtgagcgggccgacggcgtagggaggttgtggacgtcgacttcggtcgtacctactgagtccgcatgtggccgtggagaagtcgtcgtcaatcggggaaggcgcgagcaccgtctgcgggcggagttctgactgaattctcgggcgaattcctcgccggagtgccgtcaccgctgcgggatccgcatcgtcgtggacaccgcttccgaa

SEQ ID NO: 142498 - DNA, 731 bp, Zea Mays
cctgtggccgctgacgcgcgggcctgcctcgtcagacccttctctttccttcgccgtgcaactcgggagatcccagctgtgccacgcttctcagagtccattaaggtcgcctctcctacgagcttgtcgtggctataaatgatagctctgggctttgctttccccagttcatcgcccccaccaaccgtccgccacagaaaccgccgtgatttcatcgccacgagggatactgcgccgccgtcgtggttgtgtacctgtgccgccgtttaagggtcgtcgtcgggtccgggagctccgctacacctttgagattgcgctcgtggtttatgcgggtgtgttgtcgtgctgaggcccaacgaattgctcaccgaagcttcaatcaccgccgcgggtggacttggattctgacgccaacaacaccggtatgagacactccctggaaagcacctttgttcacgcgttgtatagcgaccaacgacgtaggatttagcgctcttttatgttgtgaattgcttgtcggtgcgtcgggccaccaccctggtcatgcgcctccgtgagccataggctctgctggaccatcgcgtatgaaacctcactgaatcgaatcaccgtgttgcgggccacgtgtagcagcttttaattcgagtttggcacggtggtgtgccgtattggccgtacgccggtgatgctacgtcgtggggcgcaagcgcaccgtcgctcgaccaccgccg

SEQ ID NO: 142499 - DNA, 318 bp, Zea Mays
ggccactaggcgccttacaggcggcccattgggggccttgtaggtggcttacgaagcataacaatgccatgatgactcaagggatatctatcctccacaccactaatgcccgaaggtggattgctttagcattctgagcactagaattagcgtgcaaagaaacaaaataatcagtgtcagcagactgaacaggacattccaaagcatccaaaatctcatcagataggatgtcaccaccatcaggagtgtctggcacaatggcattgagctaagcaggtttaggagcaactaagacaccagaacacgtgtggcctggag

SEQ ID NO: 142500 - DNA, 690 bp, Zea Mays
cactccaaagtcagatcctgctgcaccgcaattagttccatctcaatctgatggtccggatcccgcaagaactttctcaacatagagacatgaaaaaccggttgtacccctgccatggaatccggcagtagcaagcgataagctaggctgccaactcgggccaagatagagaatggtccaatgtatctcgggctgagcttcctagagacaccgaaccacacaactcctttagtaggtgataccctgagaaggacttggtcacccacagcaaattccagatcccgcctcctcacatcagcataactcttctgacggctctgagctgccaaaatattctgacgtatttcctgaacctttttagaggtctgctgaacccaatcaggaccaaccagagatctctctcccaaagtctcccagcacagaggggagatacaccgcctgccatacaaagcctcaaatggtgccatcttgatgctagcctggtagatgttgttataagcaaactctgccagtgcaagatgatcctcccagctacccttccatgacagaacacaagcacgcaacatgtcttccaagatttggattgttcgctctgactgaccatcagtttgagggtgaaaagcgacactaagcgaaagcttggtgcccaatgcactatgaagactctcccagaatttggatacaaatttg

SEQ ID NO: 142501 - DNA, 788 bp, Zea Mays
gtccaatctcacagcattacacgaaataaacacccggggtgtcacacgaagttagtccgtagaggactcatcaacattctcttgaaatcttcgcgatgctcagagtctacttctgcgtagaaccactcttttgtccaatcactatgccacttttgtaacgggaccatccaatctataaaagcacaaatatcaaaaacatctgcttgcatagttgtttaaacatacttgagcctatatagacccggtagaccgtcgagtatcccaaaggacctcggtaaatcaactcacaaccaagatcgcggattaagtaaatacacattcacatactggagttttgcagcggaaataatattacaataagtttacaaataaggagatgagtgtaagtacaaaatttgatttgaaagaaatacaacttcaacaataaagatataaccatagctttcaaatacattgctagctcaatgacaatcctccagaaaaagcagagatgagaaaactatatagaaggccgagccgccggcacttatccaccatcattagcagacctagatcttaatttgcaacatggtgggataaaccctgagtactcgaatgtactcagctagacttacccgtccaaaaccagaaaataagaaagtaaaagacaccaaggatcatgcaaggctttatttggagttggctctttcttttagaagagtgcatgaattaatgtagttattagcatcttaaggacatcatgataattagtcatattttagcagttcgcaaatctaggttggcacctg

SEQ ID NO: 142502 - DNA, 694 bp, Zea Mays
cttcggccccaccatttccctctccgtacctttcgcctctatcttcctcttccgagtcgttgtaatcacagtctttcccttcgaggtgccctctttagactgggtcttcacctttttctctcggtcgtccccagcatcagcagagtccccctccaggtaaggaccgtaccacaggctattcagttcaaaaacgcggttcaaccagacgttggaacctcgtatatcctagctccttatcaactctgtcttcgacacgtaattacaaacaattttaacagcctccaactccacttccctaacaaaggtggccgcatcctgccctcgcaaataaatggcaaaggcaaggctctgcaccatccgatcaccaaaaagggcatcgggcaaagcctgacttcgctcagatcccacctgtgagccagcggccatacaccataggcaacgaattcttcaaccaaatcctgacacctactcaaccgggctgcataccgaagagcctcttcgctcttatctcctttcttcactttaaattgtggaagcgccaaataacaatgtgagcacagggtagatagggaaaacccagtcaccccttcgatatcctcctgtgccacataaaacaagaaatctcaccagttaccccacttattcttggcacacagaacaatttcaacaactttgatcgacgcctttccagtcc

SEQ ID NO: 142503 - DNA, 496 bp, Zea Mays
ctcgtcttgctggcatcgtccgcgttatactgatcctgtggggaaatcttctctaagttgcccacttgtgtttttgataatctgaccagctgaccagggcaccggctcggcttcaatgaggtagacttgatctgcacctgtacctcccgtttccctttgcctgttgctgttagggattcgactagctcaatgagaaaaagtcttgtcctcgcgtgtgttcctactgaattagctgactacgtctttggtgaaaagtcaatttttagttggtcggtaatggcccaggggaaagatcctagctttataaacttgtagatgcatgtcatgcggccattccatttgatttgctgacgaacagctctcaacgataggatacactactgttcagttagccataggttgtttcactacaggtattttgtaacaagtcattccttgatactcatcattttgtatatttcccttgtagtgaatattcttgtagtatactcctgca

SEQ ID NO: 142504 - DNA, 470 bp, Zea Mays
ggatcaactctggtagggtcacacccattgggatcaactctggcagggtcacacccattgggttcaccatcagcaaggccacacccattgggatcagctccagtaaagagttccaccgatacttcttcagcagcaagagcagaagggccagcatcctggtccaaacacgacactcgccgaagccgtctctttttctttttcttcccctcggcaggtgcagttggatgaccggcctagcggaggcgtttcgggccagtattcacggtttttaggctctgggatagctgcagcagctattgtttcaacagggaccgagtcagaagaatcctcggctaacatgtccaacatagcacttatctctgcatcacccggactcataggcatctcaaagtgaacttgcctctcatcattgggaagatcactaagtgaagcaactagaacctcaacttcttcgagagagggtcgcactc

SEQ ID NO: 142505 - DNA, 436 bp, Zea Mays
gcctagatgattcacaatctccccctttttggtaattgatgacaacactacacattttatccaagagaggttttgattttcaaatatttctcatactctaggtataagaaggattttagagatgagtttcaaaagactttcttgatttgaagttccatccgagagatagataagtctcaacaaaacaaagagtgtaggaatatctcccctatatgtgtgcatgatatttctagttgaagatatgacacacataatcaatcggagttttgatggagatcttcctacaatcatggttatcgaggcatacaagaagtattatgtgaaataagcacggcaaatttaatcactcctcgatcaaccattcacagaataattcgaactaatagaaacataagatttaacagacatagttcgatccacaaaatatcaccaggca

SEQ ID NO: 142506 - DNA, 674 bp, Zea Mays
gatgtaaatacaatacagaaaactgataaaccatggaaatttgatatctcttttcctgtctgtaagagaacttcagcttcagcaccattgccaatcaattcgtgcatcatagcaacctgccaacataatgtagtcagaattcatgcataaggaaatcactactgcctgtggctgtggactgtggtaataatgcaaaatgcaactccagcccccattcaattggttgcagtatcatacttctatatctttgtttgtattatgctacactatcacaatacctgtaaagtgctctcaagatagcacctaaggacattccatggggtaaggaaaaaatctttagtgttgactgaactgctggaatttggccaaatctcaactattgtagggccacacacttcaagagagatgtcctgcccacagtgttgtctttccatatttccagatatgcccgaattgattttgaacttcttttttaggagctttttgcgcaaatggagggctttgtttccatatgaaaaggcctgtaagaacaaacattggatgtgtttagttacataaagaaaactacaaaatcttgagatagttcatgtgcgctgaagattttgcaccaatgttttgcagatattaaataataaagttaaattgacgaaagtgagagcggttacctggaaaag

SEQ ID NO: 142507 - DNA, 298 bp, Zea Mays
cctcaatgaccggcttcaaagaaagatggctacctgccttgatctctcctacagcagggctgtcagcacagcactggcagttgaagctaagcacacaggctcagggaagtcgaagggattcgtaggtgagaggtccagtcaggggcctgaaaaccgacaaaggttggtaatccgacctttcaatcaaaatcgttcttcacctcgtccaccctcctaccccttcaaacagcctatcttcatccgccctgccactgcccccgcttcaaccaatcagctgagtgcccctggtgctcgtttc

SEQ ID NO: 142508 - DNA, 575 bp, Zea Mays
cacgagactatgatggaaagaatggcgaaaggttgtgcgtgggtgattgcaatcgcaagattgggtagtgagtggttcaggtgccaatgtagctgcctaccttcttccctactactacaacaactactactatacattctgctgtggtggtcattcactaatcatcacgccactgctagtgattaggagtacctgtcatgcatgcatgtgttcattgcatgtgctccatcttccacttctctcatcccagatgtggaattagtatatatcttgctaccccattggccataggcctttgctctgcctaccttctactacgtacatcgccaactccaactaccaccacaaacctactagtattactcttttcatcgaaaatacaaaataattaccacagttcctaaccatgcatggcatcttcgtcggtccatcccagctgcattagctagcagccaaaaacgacccatgtgtttcggaggccacaggccaagggactaagggagacccccagaagagagcaactctggttggccttggaggccaatgattgaggccatcagagttattagccaaag

SEQ ID NO: 142509 - DNA, 309 bp, Zea Mays
actgaatgcttgtttaggagacagtggcagcatagaagttaaaccgatcctttggttcaggaatcgtctgtgtgtgccgaaaggagaggcacaaggaatcctgctcgacaaagctcacaactcagcctactctatccacccagggaccaccaagatgtatctagacctcaagaccagatactggtggagaggaatgaaaaaggagatagctcagtatgtggcccggtgtgatacttgtcagcgaactaaggcagagcatcagaggcctgcaggactactacaacccctcccagtgcccaaatggaagtg

SEQ ID NO: 142510 - DNA, 584 bp, Zea Mays
ctcacagttgcgactgaaggacctaaagcacttatgtgcatatgttatcggattgttcttcgattctaataaggactgacttacggacgctactcgcccccaataattattgggctgcgatcacgttcatattagacctctaatcgatcaacaagacatttatttatccgataggcatggaaggcaataattgataaagtgaagcatcacattgccatacaacaaaaatcatgacaacaccgatagatactatccactaactgtttgaaaaactaaacttacttctcgcttgccactacatcactcctcaatcacacaaccatcacgagcatccttcacacgattatataatagcaacctaaacgtcgtgttacacaatacatacatctttcctcgtcgtgagtataaccatattacggcatatacccatgcacctcaaataaatatctcacgccaccactactatatcacaccacggcacatacgcacatatgtgtccccactgccttctcatgcccaattttagcacaattatttatgacaacgtttatcgactagacaagtgaaacactaaccgatcattc

SEQ ID NO: 142511 - DNA, 426 bp, Zea Mays
ctgcagtaatcactgctagatcaaaagccaccagatatacatatctgcagtgctggaagcagagtagagaaagttaaggaagctaccacagcagcgtatccgtgccgaaactggcagggaggccactgacgtcatcacgtcaaggagagcagagcacgaggacgcgacgcgcgccaagatcaggcacaacaggaaggcttcatctgatgtaggcgacatggccgaacttggccgccgggatcgagcgcccgaacttggtcctgatcatctcggccacctcgctcagcaacgccttcacgccgcgcgcaaggccagcggcagcctgcgccgtcggccgccgcttccctgacgacgctgaaccggcgaggaggtcgtcaccgtcgccatcggccgcgacgagcttcactaccgctccgtcaagccaac

SEQ ID NO: 142512 - DNA, 458 bp, Zea Mays
ctgtctgaggccccgccaccccagatgtcttcactaaacccttgtttttagcctcaacacttcccctttttctcaccgccatagccacgaccttacctttagagcacccctcatccacaccaccatgtgtcgccacaccctttctcttgcaaacatcaatatacctagcatcaatagagctctccttaggatacgggtcgtaccgaagaccgtttagctcgaaggcatgattcaacctgacattcgaaccttgtatgccccaactcctcgacatctccgtcttcgtcgaatatttccccacaagttttaccgcttctgcctccacctccttgacaaagccacagtgtctcgaccccgcagctcaacgatgaaagtaggatcaacaccattcgatccttcaaaaaaaaggtaccgggcgcagcttcacctcacccacctcccagtcgtgtgcaagcagc

SEQ ID NO: 142513 - DNA, 566 bp, Zea Mays
ggcgaggtctctgggaccgggcggcggcgtgcgcccatgcggcgctcctcctcgtactcgtacgcctcctccaggagcacttccgttcccgcgccgcctcttccaggtgcacgcgctgctccttgacccacagtgctctctcccactccggccagcccatctctccctccgcggccagcagctttctcttccagtccggccagcgagcccctgcgcatccacttccaggcgtagcagcggcgtgtagggactccgctcgtggcggccggcggcggcggcattctgccattgccaactactcacataatcccaggcgctggcctctcgcatgcacgagcacaagctatgctcaggcacctaaccaacaacccattgctctcgcgccgatgccaccgcatgttccatcacaaccggctctgtaccaccgccacatcctcggcggccgccggtgagatcgcgccggatcccgccgcatacgagactaccgttggcgttgaatatgacctcgcgcaggagttgcgcagccacctcgtgcgcgacacctgcaggctgctcgagctccggga

SEQ ID NO: 142514 - DNA, 570 bp, Zea Mays
gttggcctctctctctcccgcagaccgcagtgatcggtgaggaaagaaacaggatgatcctttcaatctcctctgcgcgggagttgattattagtggcctgcaccagggccacggaatcaggcgggctgacaggtgaacgatcatccgttgatggacgccggcgtgccgcgctggtccacgaacgcaagcgaattttaatgagcaattgagcataacatggactcatcagtcatagtaaatggacttgattgagatgggaaacaacatgctagtgaccacaatcacgtcccagcacataatgtggatcacacaccagcaaggactattacgctcgaggtcacacacgacctgtgtcatacgcatcaaacaactccaggatcagtgagataggtcacaggattgattcagccgatttggtatcctactttcaccgcaaaagctcgagaacacctccttgggtgtgcagaaagttgttcagtctgtctgtctgtgcgctaacgtcggtaaggccatcataataaaaaaaatccaaatcgtacgagacacgagtagttagagaaataaaaatt

SEQ ID NO: 142515 - DNA, 1137 bp, Zea Mays
acatggcctgaaacaatcgcagacaaattggagctagcaactagcaatagcccgttccataagcaccagcgttcgcaatggagacgctcgtgcctggggtcctcgcagacctcgtctgtcgagccatatccttcaccgtggataggtgttgccaccagcggcgcaagcgctgtgcagaggacaccacacaacggctgcaccacgtgcttctacgagtccagaccgtcgtcgaggaggccgaccggcggtgcgtcaccaaccgtgcgatgctccggcagcttcagctgatgagggaaggcgtgtacagaggctactacctgctcagcgccttcaagcgccaaggcgttaacgttgtgaaggacacggcgcaagatcgcgagctcggccgtcatggccactcgtccctcgccctgtcccagttcaatccggcgaagcgcttgtgtactctctccgcctggacgacgacgaggacgaacatggcgttgcaagacacggcacgcgagggggaggcggagctgcaagaggtgctcactgtcctagagcgcatggccagcgacatgaaggagctcgtcgtgttcctgagctgctaccctcccacgcgccgcgaacctcacagcgggcacctgcggttgaagaaccgcatgttcggccgtgagtcagagcaggagaggatcataggcttcctgctggaaccagagcctgcacgcgcggaatatttgggcgtgctcccagtgataggccgagcaagaatcggcaagagcaccctcgtcgaacacgtctgcttggacgagagggtgcgcagccatttctccttgatcgtattcctcgccgaaagcgacaccaaggacggcaaacaatctcctcatctgggagacgacaacgccataatcaaacaccaggatctcggttcggcaggaaaatcactggttgtgattgagctggccggcgacgtggatgagagcacctggtggagaagaacgctgcccgcactgagagcacgacgaatcgcgccggtgagtaaagtaatcgttacaagccgatcggagaagattgcaggttttggaacgacacaggctcttgagcttaaacctttgccccgagaagcctactggtacttcttcaagacgatcgcgtttg

SEQ ID NO: 142516 - DNA, 628 bp, Zea Mays
acgcagccggcctatctgtctcgtccagccaattgtctgcctcgcctaaccctaacgaagctggcaaaaggattaaatatactcccctactgagtccagtccggcccatacaccgctctgttgggcttgtattgtcgtttggtccttctcggttctgggctcccaacaggtcttgtgacattctctcccccttttgacacggcttgaccccaagccggagcgttggggaattgatgcttgatggcgtcttcatcttcccaagtggcaagatcagccggccaggaggaccacttgatgaggagttgaggaacttgagtgcctgtacggtgaagcatcctatgctgcaacacagattctggatactgtaaagcatctgaaaatgaaggaagctcagagctgacctgttcttggggacccagcactttcttcagcaaggaaacatgaaaaacaggatggatgtgagaagaagccggcatgtcgagcttataggcgacagatcccactttggcaatcactagatacggaccaaagaacttgaaggcaagtttgtgattagctcttctgatcagagaggactgcacataaggttggagtttcaggtacactagatcacccacttcgaaagaac

SEQ ID NO: 142517 - DNA, 827 bp, Zea Mays
ccaaaatcaaccttatggcaacaatgatccctcctggatgtctgatttcaggtttgttttctttggatcgctaatgatgtcatgtcttgttggtggacaacctacagcctgtgcacagagatctctgtccaaatgagactcagttgaaggcaatcaaacaacttataatggtatccgacgaatatctaaaagtttaatattttgattttcagagttattagaaatatatagctagtgatgtagcgttgtacacttgtacctccatcagtaattgaaacatctcttcttttacccaaatgttatgatgtgtctatgctaaatttcatatggacgacatagaatcattgctattgattatgtggtaatgttaagttgtatgtctgattagtggcattgagccgtttctattggcactgcattgcttgctatagttctcacgggtgcttgtttgaatagtacttgcaatttgcttcaagttgatggaatgcttcgatactgatatgctattatgtattttcattttgtagcactatggagtcctagggtgggtacttcacttgtgtactgaaccaggaaagtgcagatgttgttggctccgttaacataatggaagttgataatgaagtgacagagttaccactagtgaatgaaatgaactcgcatctgattaagaggagtttatccaagaatttcaatgaagaggaggacacaatgttggtttcgagctatcttaatgttagcaaggatcctatttccaaaagagataaaaaaaaggtgtattttggaaaagagtatggaaatactataacaagaacgggacattcgag

SEQ ID NO: 142518 - DNA, 592 bp, Zea Mays
tcttctcgcaacagcagtttgagttcctgcttcagctcatgttcgaatatgtctaccatagcctcccaacctcttcacccttcatgtacacttcttggaagagacatggcatcctcccaacctcttcgccctccacatactctttctagaagagacggagacgtttcaagtttcagtggtacataaaagaacatttttgcatcagtttttggctatgaacatgaacaagactgaaaaagattaaatccaaaaaacaacaacactggaatggaaagcagtacaatgcaattatgtcatgcaagcttcattaccaaacactattgctatgaagttgagatgaataagaatagtttgctgttgaaaacattttggttttgaagtaaatatgacagtagagataatatgacagcaggtcacattcaataagtgtagatgtgcaaaccatgtgtagttgattccacggacctgtttgcactgtatgctgataccatgtgcacttcgggcctatttgtttgtgttccatgcagacttgtcctgcaaggatgcaagcaaacatccctttcaaaatttgtgctagaaatttctagcagtt

SEQ ID NO: 142519 - DNA, 632 bp, Zea Mays
tgttggcatgggatggggacctcgcttcccgcgagcgatatcgaaagctgctggcgcgtacccggctgcgcccttaggtggcttttgttcggccgtgtcggatagtagagacctcgcacccttaggttgatttctcgcgcttattgtgcatgtccggctgcgcccttaggcggcttttgctcggacgtgtcttgtagtaaagacttcgcacccttggggtgatgttgcgcactttttatgcgtgtccgactgcacccttgggaagcttttgctcggatttgtcttatagtaaagacttcacacccttagggtgatgtcgcgcacttattgtgcgtgtccggctgcgcccttgggtgtcttttgctcggatttgtcttatagtaaagacttcgcacccttagggtgatgtcacgcacttattgtgcatgtccggttgcacccatgggcggcttttgcttgaatttgtcttatagtaaagacttcacacccttagggtgatgtcgcgcacttattgtgcatgtccggctgcacccttaggcaacttttgctcggacgtgtcacacgcgagggtagtctaggctgcctcttgcagtgactgtttggttcgtcgaatgtcgaaggccatcgatgcg

SEQ ID NO: 142520 - DNA, 340 bp, Zea Mays
cggcttcaatctccagctgggattacgaatcttgttccacgactgggaaccttgaggattctctttctgattccaccgatcccagttagggtttcttcccttcggatccatcttttgcaacggcaccgcacgcgacagcgccggccactcctcgtccacaagcgggggacgaatcggagattcaatccacccaccgcggaagcttacacggaacgacgacggaagcgaccaaagacgcgagagcgaggaagcaaggtgcgggaaggagtgcgagccaataaagtccgaaggaaaccctaagacagaataagaagacttcacctcgccacgaagaggagac

SEQ ID NO: 142521 - DNA, 314 bp, Zea Mays
cttaggatggacaaaatcgagatcgcagtctagctgcaaaaactagtgtcctaaaacgagagtgaaaacaagcgttaggacagccgttccaccaagagctaggacgcgtgtcaccaataacacagcacttgggctttctttgatccaatcgcagcacgttctgcccgaaagcgttggattattagctagggaaacattagcctccaacgttgtaatttaatggtagaaaaaggcaaagaaaccggacaaatgtcgcataaaatatggcgactgatcagtgagtgagagagcgctctcccgtcccaggctcccag

SEQ ID NO: 142522 - DNA, 462 bp, Zea Mays
cttcttgctgagtatcacgctgtgtggcagcccttagaacttcgtcgatcatttcgccaaatgtctcagatagttcaatctgcttagcaacaagcatctgatggctctactgaagagaagcacagtacttatccacctctttgtcatgcgcatcaaacattgattcgaacatggggcgatgctgggagggcagacatttcagcttgttgccaatcaaatgctttatgcgtggcacatatatgttgaatacttcagaaaccggacgttctggtgcaatgacataacatgtctctgtgcggctacgaaactgtttaaatccaagttataactgttagcatgtattggaattttaccatctgcatgaacaggaaaaaatatgtttatggctaacctctgcatgaccaaatggttccccagtttggtgggggccacgtctgtcacccctagccaaatctcttattg

SEQ ID NO: 142523 - DNA, 394 bp, Zea Mays
ctcttatcccaactaccaccgtgcttaagggcacaagctcttaacatatcttccagcacttggttggtcttctcagtctgcccatcagtttgaggatggtaggccgaactaaaattcaacttcgtatccatattctcatgaaaacttttccaaaatcttgaggtaaactatgatcctctatccaaaatgatcttcttcggtacaccatgtaaagacacaatccgagccatatatcactctaccaattgagatcccttataagtagtcttgaccggaatgaaatgagccactttggtctgtctatccacaatcacccatatcgaatcatatcctttcggggtgcgaggcaatccagtaatgaaatccataccaatctcttcccacttccactcgg

SEQ ID NO: 142524 - DNA, 656 bp, Zea Mays
gtgcgatccgtcaaaacggggaaaactgatctgcggcaaacgcccacccctcgatctcccagtatcgcgcatgggttcatatggataatagcactctgggagaaaaccagagagatgggtagggtgaggtgggtgcgtacccttgaccgggccgtgaatcggggtaaattcatacccggactcactctcccggtggtatgaatcgacgtggtggccgtacgggccgacggcaggaggtggacctgcatatgggcgcaggggcgccgtcgtgaagttgccaaggataccgggtttgttgacagagccgcctcgacaatcccgctcaagaaatttgttgacgcgcgccacctccagcgcgatgtcctcgacccgcttgatgagatcgggtcgccagtgctcaatgtcagttcgcatctcctccagtgcgttgatgcgctcctcgccgcgaagtgcggcaacatcaacctgctcctggagcgaattgcaccgccccgtgaagtgtgattgcagatcattgcaccactcctcgacgcacttctcgacggcgtcgcagcggccgacgaatttctcggcgagacgcgcttccatcagccgcatttcctcgagcatctggcgattgctcaagtccgcgtgctccatagcagccgtggtcgaac

SEQ ID NO: 142525 - DNA, 586 bp, Zea Mays
aagattaccaggccgaagaggtatggtttattatcagccacccgatcagaattgaacgaccctgattagatcaccgtagtatgcttatatgaacccatagatccggaagcgagggtggcgattcaaagtaacctggactcgatcccgaccctagatgtgaagatcaacggtgtggaagcgatcaactcgaaacggtgtcgacgttttaatctcgaccgtccatggatggatcaccggtccgcgacccctcgcccatccattgccgatccaacggctaggaactctccttcccccgactggacccgagcagaggcagcgcgaaagtgcccagggcggcggcgccatggccgcgcaccatgatctgcgtcacgaggctctgctactgttaattcggggtgcaacacaaagggaaaggcaaaataaacctcatgaaggtaatctcaccgcagatcatcatctgtaggttcaagtcatggtggcgcagcttcatggtgattttcgaatttcagcgatcgattccggtggcttcgatcaaatcccgtgcccaatcagaggtgtttattcctccctgaaccccgtaaccacc

SEQ ID NO: 142526 - DNA, 330 bp, Zea Mays
atgttaatgctttagatggtgtccgctttttgctgttcttctagcagacttctaccttcagaacttttaattgttaatgtcttttctggtgcatattatcctacctggatggcggatgatgcagaactctcccctaaaaagtttgcgactttaggtgtgccgtggttagctgtaacccgccggggtgtgtgattctcccctgtaaaaaattcagacttagctagaagtggttatggatggtttggcgtattttccttttcatgaagcctttatgtctaggattagtttcactagcttccttctggtgacaaccttctaagtcgttgtttt

SEQ ID NO: 142527 - DNA, 499 bp, Zea Mays
ctcgtcgtcggcgaaacccatttcaagcacaaggtatgaagccgctaccggatccgtgaacctgtacttcattgcacagattgtacttcgcagtcttgttgattttattgaatagggttcgaatattgcgcagagaggtgcagcttcagtgattcgttggtgtaggtagatctaccccatgcaaaccctaggtgtgtccaaataatttggtaaagcaaaacagatcggctggtagttttatgtgtgcatacttttgatccagtactgtctaccatggatgtcgttgcatctctgttcatgtttgtacagtccatagtggtagttcaacctcttttcacattgttgtatttgaggttgaccaaaaaagtccactcgtaccaacaaaaactgaccacattctgaattggtcattttcagtttcagacaatggacaaagaccccctcgacatggttcagactgcagttcaagtgattgaggcacatgtcgacatcattcgca

SEQ ID NO: 142528 - DNA, 340 bp, Zea Mays
gtcgattaactgcttcctggtcctggtccaggcttctgctccccgggccacacggggagctagcacagagacgcagcaagcacgttttttcaaatccacataggggcagggatccgtccgcggctgggcggcgtgcatgcagcacggcctcctttgttgccccgatctctctgctccggtccggcctcccgatgtcgatgaaactgatgtgataggagtacatgcatggcgatggtaatgatgccgacaggtttcatgtatttgggacagatgggtcagtcggctggtggtgttgcatgccgtacgtcgtcccgaccagcgcatgcacacgtacgtgcgc

SEQ ID NO: 142529 - DNA, 655 bp, Zea Mays
aggatacgggccatagcgaaggccattcagctcaaacacatggttcaacctgacatttgaactctgtatatcccagcttcttgtcatctctgtccttgctgagtactttccaacaattctcattgcctccgcttctgcttccctgacgaaggtggccacatctcgcccctgcagctcaatagcgaaggcggggctcagcaccatcctgttctccaaaaagggcatcaggcgcagctttactgtacccaaatcccagtcatgcgcaagtggccataccccacacacaataaactcttccaccaagtcgcgaccgctgctcatcctagccgcgtgccaaagggcatctttgcctgaatcctcctttttcagcttaaactacgggaaagcgataaagcagtaagagcacaaaatagacgaaggcagcccaggaacacgatatagtagtaagggaaaaccctaaaccctaaaccaaaatcccaccagttaccccattattcttggtgcatggcacaatctccacaacttcacccgaagtcttaccagtcctcggcatgaaagagcaagtaccaaactgtgaaatcttgccactaatcacctttttctgccaatggaaacgataattcttggtaaagacctccatcgagggctccccgcc

SEQ ID NO: 142530 - DNA, 636 bp, Zea Mays
accggccgttgtctctcttataatactataaacgaattgtccatcttcctctatcatactaagcattaaccatgtaacttaatatgatatcaaagtcagaactcacaaattcggctcctacttagcacaattaaataaaataactattgttcgcttcttgttgagcatcatatgtgacacctggagacggccaaacggtccgaccatgtggcccggacagtccgcaggtactggatggtccgcgattaggttaactccagcgtgagtccttatctcgcgtgttcttatccaactaattgcgtgagaattagttgggaaacgcctatgaacggatctagacctacacattggcatacacacggtatggtgtactgtcccgttctttcaggtattcaggtcactgtagaggctctaatgctgaggtcccttcgaccggggttgactggtcccaccggtcagcgggggcacatctgagaacgtattgggggtcgtgtttgacagaggcccttcggcactgttcccctggtacagacgtggtttggtgatggttcattttatcgtgctgacgtggcttgatagtattgtgtcggctcttcctccttgtagatgtgctcgccaaagagtcggttgtcgtct

SEQ ID NO: 142531 - DNA, 447 bp, Zea Mays
agaatagcaagctagaggagcaccgtcattatcccacgtcatcaaccaaatccagggctagatagacattgaatcatctatagaacatcctagatccaattcgccacatgtaccatgtcgataaacctaggaacatccgccactaatactgttgatcacacacatggcatagactaggacctctaaaaaagtctaaccaatataaacaatgagactaagcatgtaaggcagagtgttagatgtgtattagaccttcgcgttgccgcgtgcacatatgcagctagcatgtcgtggaatgtagcaatcgatcaaggaatacatatgtgtcggtgtaaaattaatctactgacatgaagcataagacataagatagattgaaaatatacacgataactagaagatattgccaataataacgcttggtacaagatctaccagagtaaagag

SEQ ID NO: 142532 - DNA, 528 bp, Zea Mays
cgggtgtgttgctagctgaagtaggactgctgaaagagagaggtctgactgctgaagctgtggtcactgattttgttttcaagaatattcagccactgaaagacagggcctacccagcttatctgtatcgagggctagccgactcaactcgggttaccaacaggagaattcctcctgcagacttggtgagccgacttgaaatgatcctcagggggaaggtgtcaaatgttggtgctccagtagcgtactcggcctggaacctgcctcctcccaaagccttcaccctatttgtatcaaatccacctgttactgatggcagtttgggccttagagtgcgaccctctgctgaagaagtcagtgctttggttgcttcgcttggggagattcctactgacaaacgagaggtccatttcgaggtgcccttgaaccctagtgatgcagatataaatgtcatgcttgatctgctagctgaggattcttccgacgctgctcctgctggtacgttggcagtggtgcccctcccagagg

SEQ ID NO: 142533 - DNA, 433 bp, Zea Mays
gcaagcctctacaagtgtatactcatattctagcaaatgtttagccctctctagtgtgttccttcgcaagatcaagtgattagtgtgtgatctagtcatagagagaggcatgtgtggtggagggctacatataagagctagtggtcatcttgggcaagcgttcgggttgagttcatcatccaatggagagctaccaagttgtggttagcctcaggatagttgtaactgcaacaagtgatactagaagtctcggtttatcacaagcgtgataaacttgagtaaaaggacgaaggagttgaaatggactccaagccagttggctaaccctaacgtggatgtaggcaagcatttgaggcttggtcgaaccacagaaaaaatcattgtgtcctttctcatagctttatttcttatttgcacttctcatttatatttg

SEQ ID NO: 142534 - DNA, 815 bp, Zea Mays
gcgaaagggagtgaatccagtcgcccggcactcgatcgtgttcagcgcctagactgcttcaggtagtaggtcggcccatttacccttcttgtcgtcgagaagcattttcttgatggcaatgaaaatcttgtcgttggcgcgctccacgacgtcgttagattgtgggtgatatactgaggcgaaggcaagcttggtgccaatggagaagcagaagtccctgaagtcctggctgtcaaactgtttgccattgtcgactgtgagctcggacgggactctgaattggcaaacaatgttttgctagaagaatatttgggcaatcttagacgttattgtggatactgccctagcctcgatccacttggtaaaatactcgatggcaacgaaggtgaacttgaggttcccttgggccgtgagtagtgggccgataatgtctagcccccagcgttgaagtggccatgtgtgggcgatcagtttcgtgaattgcgaagggttgcccgtacggggggaaaacttctggcaggctttgcacgacctcgtgactcgattcgcagcgcagattatagcgggccagtagaaaccttgacggatcaccttggcagcgagggccctaggccccgagtaagaaccgcaagttccgctgtggacttcacgcaggatctggaggccttcggtctctgtgacacatttgagcatgggttgactgatccctttcttgtacagatggccctcaataagtgtgaaatcctggcttcggtgtttgaggcgcttggcctcattgacatcacctggatggtaatatccttgcaagaacaggg

SEQ ID NO: 142535 - DNA, 422 bp, Zea Mays
ctaaaatggagaggatagagtggcttgagctcctagagtcatttggttgtcccttttatcttgccaagcaatagatagacataaaaagcaccagggaggaactaactacactctcaaagaatcgagcatgacaaccagagaggaagaggtcaacgcgagtcaataaaaatattgatcatgacgatcttggtttcgatcctgttgaaccccgagagccctcaaatatccaaagatccaaaaatgcatgagctgcacacacaccaatgggtgatgaaatatgtccaaaacaaaagtagaaacacaacaaaaagtagaggggacaatgaggtagcaagaaacaccaaagtgtagcaaaaacaaacctattgccactaacaaagtgcggcttgtctggttctaaactcggcttggttggttcagcc

SEQ ID NO: 142536 - DNA, 464 bp, Zea Mays
gattgctccatttcttgatcattttctcttctccaccttgagactacacaagatcgctcaagatgcaattagtctcaaaagacgcaagttatgtgtgctccccctatacttgtgcatcaagtatttgaagaactttgcactttgcacattctagctttctcagaactagaggggatcacaacatatcttggccaaggcatactttaacaatttcaacacaaagggataccgatttgaatatcaaatgaaaggttgacttaatacaacaatgcatgcctcaagaagtataacattttacgagcaaactagacatgcttcatacttgacaatcattgcaccacatataccaattgaaaaacaacacgatcatgcatataaagcgcaatgtctaagcacatcataattaagaaggttccttagatacaccaaaagaatcaacattataaagtaaggagcacctaagc

SEQ ID NO: 142537 - DNA, 623 bp, Zea Mays
gcaaaatcgaagactttttcaaaagaccccgtgcacaagtcgcctacgggcgcggccggatcaacgaaggcacgcagcctcatcatacaaattatggttacatacacacagcgagggcatcacacattacattggctcaaccttcgggatgatccccatccccctgtagttgaacaacattatcctcaattcctcaccctcaaacagattttgcagctcttcctcacctacactcgccccagccggcgaggacaacaattcccgtttgccagccccgtccacacgaagacgaccaccctccatgtcaccacgatgacgcctatcacttcgcgacaattcactcactcttcgtttcgccaccgcccttcgccgcctacacccggtactcgcacccgaaagatcctcagcacccatcacacgcggagaagtctccgccgcagccacatccaatgctacaaaataatccaagtccttatccaaagactcctttgtccacacaatcgaactcctagaatcatcagattcaaaacacttagacacagagccaaacgaatcgtcttcagcagccatggtcgaagccaccacaaaattagcattgtcagtagcggttgcatgcgtaggcc

SEQ ID NO: 142538 - DNA, 646 bp, Zea Mays
ctccccacatttgcatctgagatgtctggaaaaaaatctatagagttactgctagagcaaattatcccaaatttgatattacaaatatatggcattataaccatctgtcattactatgaggcattataaaagcttgatcattcgtctattcaaggttggccagaactgataaaaagactgagtgactgcaacatagcaagttgaagcattaccaattcttggcatcacgtgcgatcctgaggtaggcctcaatgcgcccctccttatcatgtttcttgatcttccatcgatatcatacacaatgtgctattcgttcttgtattactctagaggcacgtctcccatggtattccttggggccacctgcaaacaacataaaaattagcttacttaaacctcaaatattcagaaaagaaaaaacacaacaacaaaagagtctgcaaattagtagcttaagcaacacaaatgattcacctcatcctccgaagagtcgctctcttttgccatcgcagcctcgtcggactcaccgttaagagctggaaccacattccttctagaacattgcaaatatttggcccagacttgaggtttgaagtctggagaatcttttgggcatattgttgattaatgataacaaaagaaacaa

SEQ ID NO: 142539 - DNA, 324 bp, Zea Mays
cgggggcgtaccccttcgtggctctgatctgtgccgttgatatgccaatgaacggtgtgtataggtcatgtactcatgaaaaccctagccgtaggattgtgatccaacggataatgagagcgtaccagttcgtttaaatcacggtctaatccgggccgtcgatagttgatcggtcggctcatccgtatccgcgcctcttaacgacgccatcttacaaaatagccccctgagtattcacaattgaacccgccgtccccgtgggagtagcctgtgtctaggttattttgcgagttaaaccctgaccttctctttattagtgcgccg

SEQ ID NO: 142540 - DNA, 305 bp, Zea Mays
gctaattggccatctggctcatgcgataagtgtgtaatcttattcacctttgccttcatcaatccatatgccacattgaggacatatggtattatgcttcaataacccaaaccattataaatctttcatgtgtagtatccatagtggtgccctatatctatcaagcctcctacctatgctccttgctctcttcctaactcaataaacttcactagtacatatgttaccctcgtgttgttaagtgatgatatttagcacactagctaggggtgatttgtgcacttgtggtgtttcgatgttatggc

SEQ ID NO: 142541 - DNA, 646 bp, Zea Mays
aagaaataattgaattaaccatctatagtgtacctgcttgcaatagaaacatggatgttcatgttaatcttttttcaatcttctgtataagaggtattaatgcatccaactttggtttggtggtccccataggcagaccagataagtgaaagggaaactccaattttgcagctaaatgttttggcaaggatgccatcttttcatctgaggcattgatgagatagacgttggatttctgatagttgacgtgcagaccagtcgatgctgcaaatgagtttagcattgccttgagaaaaaaattgtttgggacaggcttccataaccaggatggtgacttttgtgtattgaatgatagagaactcctgaccacacctatttgccaaagggagtttaaggagaccacgatctttttctttgttttagcacaaagaggagaggagataaagggtcccctgccgaactcctcttctatagtgcaaagttttacccggaattccattgaaaagaagcgatgaggtccctaactccatgatcattgtgacccatttcaactacttagggccaaaacccttacacctcaaaatgtcaagaataaccttgtgttctgatttgtcaaatgctttctcaaagtccagtttgaggatca

SEQ ID NO: 142542 - DNA, 347 bp, Zea Mays
gaggacaaaatacatcgtgattttgtctgcaaattgaggaaagccctatatggtttagaacaagctccacgtgcatggtactccagacttagtactaaactattagagctgggattcaagatatctcgagcagataattctctattctttctaaacaaagatagtgttcagatgtttattcttgtgtatgttgatgatattattgtggcaagctcatcctctcatgctatatcagttctattaaacaagcttggtaatgagtttgtactcaagatctcggagatcttcattacttctttggaattgaagtgaacaaggtaaatgatggtattgttctttctcaagat

SEQ ID NO: 142543 - DNA, 330 bp, Zea Mays
cttagattttgatggtacttatccagaaattaatgatatcaccttgcagaaggtggccattgagcattgtggtgtgccccctgaggaggcatccgtggaggtgctgcttcatccggacccaggagcggagggcaacatcatcctcgctgaaaacactcaagaaatatgaagattcacaaaacaacgtctaatgatgtgtgggtggctgtgttctgttgcgtcccaaaacttatgtggtggtttaatagtcttctctacccgtggggtactttctgatggtttttggatcttgggcgacaaacatcatctggccttggtggcaacttggcc

SEQ ID NO: 142544 - DNA, 514 bp, Zea Mays
acggtgatcggcgaggaattactcagcgcccgacacaacatcatgttggggaggtcgctagcacccacgggcaggcccacgcaatctcaattgccaaggcaggggcaccacgaaccttgaaccgcgggcggcgccgatcaccacacctcccctcaatttctggtgtgcccacgtgccaacggtggttagtgaaccacggcgggtggagaggatgcggattgcaaggaggtcagagacattgggatgaaggagagcgccacccatgggcgaggcttgagctcgaccccacgacatgattcataggcgcacgatttcccccagtcgcggagcactcagatggtggcgactcccctcggcgagttggaatacggcgagcgccgcagcgcgcccaactccccgtcatataggcacagggtaggccagctagattcccgggtcaaagacgtgagtggaagagaggcttgcatgcgcagttacgccggtgcgcgcgaagtctctagggagaagataagtc

SEQ ID NO: 142545 - DNA, 336 bp, Zea Mays
gtcagataggagtacttaattataagtaactgtgaggcagcagtactgtcctaatccatggtggctttgttgtccccttctccatcacactactagtagtattagtagctagtagctagtagcaataagtacaccgcctataggcttcggtcgcttcattccaagaggccaaaacaaaaagggcaagacaacgccggcacgtagtaggctataggcagctagctcctgcacctctgctgcagaccatgcacacacacatgtaatgtttgttcaggccgtggtcacgtctcttcgcaacatttactcacccccatttactactacgtactgcgctgc

SEQ ID NO: 142546 - DNA, 431 bp, Zea Mays
gttgtgacattctcgtattcggctgcgacggtagcttcggcatcagtagacttaataactttgtctgccgaagctgaggacagggtctgttcaatggcttccaatatattcatcatacgtcatttcttctagcccccatttttcccctcggcagtcgaagagatttcccttgtctgtaagaggctagttagttccaacctcagaggacctaacagtgcaaatgggaaagactcagtcattaccttcaatatctccaagacctcagcactagaagacaaagaatggcttacagtctgcttcggcacatctcgcatcttcctcttctcagaggacatctcggcaagcttccgttttttgggggccgatgctttcggctccgctacagtttttcacttcttcaaagcctcgtggtcttctttaaccaaccagat

SEQ ID NO: 142547 - DNA, 585 bp, Zea Mays
gccgctacagtgttgtgactgttctcggagatagggttctggaacccgaggacgacaaacttttgcatccagaattggtaggcgaagtttcgacaaaaattcaagaatatgcagaaaagagaaagaagggcgaatttaagcctcggagggagaatgacatactaaccgcagcactaggcaatcctgaacacactggacgggctcgaggaatctcttctaagatttcctagagagaggcgtttccagagtatgcggcgtcatataggaaacacgagaagtcgaaaaggacccttgaagagactattgatgaaagagtacaaaaggctattaatgacgtgatgaagaaaatgaagaaaacagaatgcatatcatgtgaactcaaggcaggccacatgagtccacctgtagtccctagcagcgtaggatctatgcaagacttcgtatcgagcaccaagtaccctgtagacgatattgttgaggacaatccttgctttcttcatattccaatcaatcgatctgggacaaaaacaaaacaagctgctactggtttggtaaaaccaggacttgttaactacaaggataatc

SEQ ID NO: 142548 - DNA, 394 bp, Zea Mays
cataagtatatgaaatgtgaataaatacatacacagagaattatgacacagaaaacgagtgatttggcgagatagaggtcaaacgacgcgaaaacggcgtttgaacgaggaatagtgccataggatgtttgaaattggaattgaggcatgaaatgacttgtaattgagctgatacttcacggataggtttatatgggtaaatatgaatgaagtgtgcgcttggtttgctttgaggtgaagaaagtgaaattttggcactcggctcggaaccaatggttataaaagggaatttgagtgaaaccggtgcctgggatatcagattggcgtgaaatttggtgaagaagttactagagatgatatgaaggtgcctaaaaatttgggatcaattagagca

SEQ ID NO: 142549 - DNA, 287 bp, Zea Mays
atagatctaacagcacgatggctgacacgcacatatacaaacgacacgatgaatgcaagtcacatctaagtggcatccatatccaccatcacacatatttcaacgtcatccatatccaccatcacattatgccatatccaccgtttaggccctagcgggccaggctcagactagggaacgagcccgcgggcttagatggcccggctcggttttctaaccgtggccgtttggccatctcgtcgccgtgctccctacgtccgctatcacgtctgtgtcccgatgacgac

SEQ ID NO: 142550 - DNA, 526 bp, Zea Mays
gaacggattagagcggaaggttaggtatagatcttctctaattaaatctaggctacgttgatctcaagtggacgcctgagatcccacagcaaccctgggcagggtctccctggctattagcctcagcctcgcccgattctttggtagagctctgtcagaggcgagggagcgggcacaccgggggccctggggcgccgggaagggcttaggtgggttcgggtgacgtggcgaacacaactgtgggcacgacaccgacgtagaagcaccggagggtggcagtccacagcgaggtggctcggcactggcgtagctcaactcctgcgagcgattgtgcacacacaagagcagaaaagggaaaattaggggcacggggaggttggttacctcgagagagggctccgggacctttggacggcggcagggactcgatgagacctcgggtcgacaacggcgggactctggctgcacggtggaggtctagtgagcacatgcagagagaaatagagggggaaggggcgaactaagg

SEQ ID NO: 142551 - DNA, 486 bp, Zea Mays
ctcaaatgggtgcagatctctgatataagcgattttctgttcctcagaaacatgaggcataggctgattggaagatagaacctcgttccacttaatgggactatgcgcttttctcgcactggtttttacatacaatgagtcaagctcaggttagaacagagcaaagccaaacatcagtctgatacgtgcaccaggcatagcagaatattacctagccatgagggcacttgcttcaggaacatcaggattaatgtaccacttacagggtgagcctccagacaagcacagtccatctaaaacaaagggcattaggtcccaactataaaaaagcactaaatgcaaaagttcaaagttagtatacccgcgtatttcttgacaagcgtgccaacaaacatcaggatctgtggagaggactgaccatcgttgtagatctgttctccagggaataagctagcttgcccaccccagagaacaacatttaccgaa

SEQ ID NO: 142552 - DNA, 372 bp, Zea Mays
cgacggttgggtgttggggatactgaccctggagtcctggacgagcaaggcagtgccttaggataggctcacgagtttaggagtgaggaattaaggatgaaaaagactctaaagggtggagccattaacttgacgccaagatgatgattaagaagatgctagattgtagatacttgtggttaatgaaattgtctcgatatgggatatgagctttaggaaaatcgttatggtaggaggcatgggcatggcctagcatggcccaaatatagctttgtcaatgcaatggctaaacccaatcttttgaccttgttttattttttgcaaggatggtggaatttgtggggacgattatgtccctcatttgcatttgtg

SEQ ID NO: 142553 - DNA, 355 bp, Zea Mays
acgactctctcattacctccgagataggagctgtctcaactgtatctagcgtctcaccctcagtggccaatctggcagttgaacgcactctagcccattgacagaatgttgaagctctatgaaaaagcttgagcacaagaaaaagaccttcgaaggtagaaatttgtggcagcaggttggtgcaaaagcaataaacggtgtaatatcttcatctcgcaaactgtttatgtagcccggtaagcggtgaaggcgagcggtcatgctgctcgcactttctgaccggtggaccgacgcaaaacatttttaccccatttttaatagcgctgaaggaaggtgttttcggaccttcgacatg

SEQ ID NO: 142554 - DNA, 747 bp, Zea Mays
ttagccaaaaccgtatattcaccccctatagccactgtcctagatcttacactcggctgagacgagtcaatcctcaaagttggggtagctccctgggaggtgctagtggcacactccaatgtagttcaccatgacttctcctagtcatgatgctgttagcatgtgtcgaaacatacggggaactatagtgtcaggccatgttatagtgcactttcctccttcactcaaggtgtaggggtgctcagtcatcgtattatcctataggaaatactctagtgcgtgagttactgttatatgagcttctaatgtgggagcctccagatcagggactccgggtataagtggctacgacgtccaaggtctatcgatgttgaccagctcctcgggctcttcttcttcctctggtttggtctcttcatcctccgtatcctggtagtctactagtatcttatcattggatatgttcatctatcctaatgagacatcctcattctagagcgggtattcagagtcattcgagtcttgcattatgaccctaaggttcacaagttcagtgagaaactctatccaagcctcctactaaagctgagtcacctagtcctagcaatgtgggccttcaggttccaagtcctccatgggctcgtcctcggtctcgaaggtcccgtcatcgaatcatttaggaatatcattagtggtgatgtgcgagggtcccgccttaggtggtgatagtggtgggaagatgttgat

SEQ ID NO: 142555 - DNA, 507 bp, Zea Mays
attggcagaataggacccgcagcctaccgccttgaattgccagaatccatgtcagatatccacaatgtgtttcacgtatcccagctccgcaaatgcctaaaagtgccagaaagtcacatcgaagaagaggcaattcagattcagaaggatctacagtaccgagaaaagccagtaaatattcttgactcagccgtccgaaagacccgaagctcagaagtaagactatgtaaagttcagtggagtagagaaggagaagaagctacctgggagagtgaggactatttgaggagggaatacccttaccttttctcaaacccagtctaaatcttgagggcgagattcctttaagtggggtaggtttgtaacatcccaaatttaatcccaaggttagaaacactaaaactcctaaccccccttaattatctcttaaggcccccacctcataagacatttcattcatcatatgcatacaccatggttgttagtagcacctcacatagaatattt

SEQ ID NO: 142556 - DNA, 336 bp, Zea Mays
caacagtagagatagcttgaggggttgaagaagaagaacctgatctccttccgaaaggagtagagaactcaccatcaaggtcatcatcaccataaatttcatcccatgccattttttcttaccagataagtgggatgatggttggtgggcgccacgcatgcatgtgtcaccaaatttggtctcatacaactgaaataccttggttagcttagtacgaacatcaaatggaagcctagagtaatcagtaccagttaaactagataacttgataaggactttgttaaaacccctcattttagctctaggatccaaaataaatgcaactgcatataaaat

SEQ ID NO: 142557 - DNA, 371 bp, Zea Mays
atccactattcgcgtgtgtgtgggcttctctcggtggcatagagagttccacctcgcactcgttgttcgtccattgctccaatcgtcttctagccgctgtttggacgcacgggccaagatcctcgtccgcttcgtcataactccgtgaacttcgttgcggcagctgaagcctccacattgtctacgctggtccgctgatgcgactagccaatctctcggcctccgcctccgaaggcaaccctagtgaccacccgcaacataggaggcgtggggcgcattgctattccatgtgggagggcagcgcacaacccaccttcatcgagatgcttgccacacgcaggcgtagcagccccgcaagacttggcgccgtc

SEQ ID NO: 142558 - DNA, 463 bp, Zea Mays
cgaggaccgtcatgctcctcgcaggggttaacagacatgctcagaccatctagctatacgcgcagactgtccgagtatgccggaccgttagacaaagagtacacagaacatagtactgcgtgtcaggcacaattctcatactccaccccacccgcagcgcactgtagtcatagcatgccaccacccgcgcatgaggccgaatatttcggtccctacgaagcaagaaagattcaccccataccacacgacaatgggatgcaatactggtatgccttaggggcctttaccgaaagccacctttgaccatcctggtgcaaaagaccgacataaggataaccggccacctgagcccatgtcccgaagaccgatgggttacatggatgaagttcgggaggaaataactgaactattccaagacaaattaggagtcagtgtgtctagcccatggcagtcccattagagg

SEQ ID NO: 142559 - DNA, 1046 bp, Zea Mays
atttggtatgcgttatgccaaaaaggacaatgaattgcacagagcttgttttgccacgcaaaccggtatatactcttggaactgagtaaattgcctcacatcagacagctttatgcatggctttctttataccaaaatgttggctgcaaaggaacatgaatggacctgtggaaatgctcctcgtcgtgtgtccgatgcattggccactccttccacataggaccacttctccaatcaattaaaacatacaatttccaccatcaaacctccaccaccaccactagctttttattatacccctgctcgacacacctcatccctctctgattccccatttgcttctatctcctcccgtgctctcctctctcctcacacctcatctcttcaagcaccaatctagtgttgtttatgccaaattcgagatgctagagatctgacctggcaggaaccaaatggcagcatacacgccccctatcaatgccaccaccactcttaacatgaagaagttgtccatcatggttgctgggctgctgaccctgtcctgttcggctgctcctgcttcctcatgggtcaaggagtaggtcaaggggaagaggaagagcatccctggaggtgattgtgtcatcatcaagttgacacaagcttaggtgccatgtgcagtaacagcagcctggccaacaggacctctactccatggagcacttgctgcggcaatgcttcgtcgcttttctcagaatgtttcaatatcttaaattatttgttgcaagggttttccgggatgtcagactcagtccttgggggatagaccaccccgggtattaaagaagagattttctcgctgcaggatcgcgaaaacaccctgaaggccccatccgcataggttatctgtccaggagcaaccaggatgtggctgcaggttacttatatctctgcagctgcgtcagtggaagaacaggccaacaagggtgaggggtgttccgtgtttttttaacccagccttggaattccgcacgagagaaacaacgatggtgcaagaggtaggcaga

SEQ ID NO: 142560 - DNA, 650 bp, Zea Mays
tagtgttttacatgaatatatgagtaaactgctggacctagtatgaggcagcaaaccaaacagccaaatctctcgtgtgttatcccctaccaaatgaatgaatgatatccttgggcacggtgaagtgtgaacgaccatttggccggggcgccgagcagctgtccaaagtgctggaggtggtgtccaacgacgtgaggagatgttagactgtctgcagcgggtgacccttcccctcccctcccctaccactgtacaccgtttaggggctacaatatcccccttctccccgcaacggcgcaccctacgggctcctctctgatgtgctccccttctctctcacgccagatgaaggggttcactgttcactccccctcgcctgcttatcgcggaagacgacgcccgcgccacactgaggaaagttcgtggtccacttctctccgtctcgaagcgtatgtggaagagggtgagatccgacgacgcggcggcggatctgccggtggaagggcgaatcggagcctgttctactcggccacgagcaggaccaagtcgagtttgtgagcaggcaatcccattcgcgtccgaagaagaagcacccacaaatccgactccgccaaagttcttcgtcaccgcaaccatcgttttcctctccg

SEQ ID NO: 142561 - DNA, 484 bp, Zea Mays
tttcgatcctcatgattgcacagtttcggtaagctctctgccaaaggactcgctatgcgtcggttcgattggcatgcatgcaggtggctgcacaggcagcggtgtccctcgcttctcatcaaggaaccctacgaggaaattaagccagccgggggtacgacgcggggagagagttgctgaccaatttgaggctgggacattgctcaaatgaataaatgcaggcggacgttcttctggcgctggataaaacgatggtacttaccgagcaccaaagtctttggttcaactcggcaaaaatggtccggtctttgcgagcgttatttttcgttgagagtgacactcgataaaatattctttgtcgagtgcccatgattttatattcggcaaagctcgagcactcgataaagagcacgtttctgacagtgccatgcattactcggtatcaccagcctacgtagccattcttcctaggcatggcgaagtt

SEQ ID NO: 142562 - DNA, 325 bp, Zea Mays
gttgctgccccacgagagcatccacccacggtacctgcagcgtctatggtcgtcccagcgtcatgcggcagctcgggcacgtcctcaaggtcgacgcgtagcgcgcagcgagcagaagcactccagaaccaaacgcaccaacaatggggcgaagtgagatatccatgtcccgcttcagaaccaaacgcaacacatgaagattggtacgcacctagtatgtgggcttcaattccctttaaactgatgccagaattgcagaacaaatatcaatttacacactgtcatacagaattctctagtcagctagctttcttgaaaaaggtac

SEQ ID NO: 142563 - DNA, 492 bp, Zea Mays
gtggcgaagtgctttatattaatggttgtgttagacattgatggaagtgttgggatgtatgtcgtgatatagttttattcgcaatagggaattagacgtagtgcgtgtaggcatgagattgaagggtggtgtagtggctatgcgagaaataggtttagtattcaataggctagctgacatgttcggttagagttgttttgttaattttgcttctatgataaagtgatgcttgctttaatagttgcatcgtgtgatatcccataggtcgaattataggttatgtgaagaatatttcggtggatgtttttgtcacgtatgtttagatgagttatatgcaagcaaaggtggtgtattggttagacgaaaagtagtgtggtagacgggtgtagtgtttctaaggagttagctaataagtcccgtaagattgcttatgatgatttttatgtatgaggtgaagtcgatatcttgccataatagccgcagaaattttac

SEQ ID NO: 142564 - DNA, 427 bp, Zea Mays
ggcgtggaggggtttaaaccctaacttagaatgggcccctagtggtctaaacaagatacaagggcctcagcccaagattgggtctaagcccaagactagaagactgaatgtcattttggcaattctgcttaactcctttggaatttcgtcttgaggttgaatccatctgaaagtagagttcaggagctttccaacaagtactcatgggcttcaaacaatatttggagctaagagttatggccttccgatgttgctccctcctttaggtccaaactggtatggtccgatcagatcatccacacttgctttcttgtcatgattgctctccctccaatctggttcgtgtcccaagtttctatgaataagaaaagcatcacaagaatttagtagtaccccattcatggatgatggtttatggacagcgagg

SEQ ID NO: 142565 - DNA, 863 bp, Zea Mays
agagaaccccgaggggagaactgtgggttgattccctagaagtacaagggcgcttatgcaagttggccacgcgaaggggtaggcacggtttctggccgctggatctcactccgaggatctcgatcagatggcgctttaagtgaactggtaatcaaccgaaaccgttggatccaaagccaacgcccaagatccaaccacgccagtgcccatcccacccctcggatgggcgacccacggtcaagatctaaagtgctaaaagggggtatcaatggtttaatcccagccgttcaaatcaaatcaacggacgcgcacatcgtcttcaacccctggctccctctctctcttctttttctccttcctcagttgatattccacggccgaacgccataagagcagtagcgagccaccccgagctcaccatacgagcactaatctctcccgccaatgtactatcctacggccataggccctcttccacctccgacacgccggtgaggatgacccgcccccaacatcttagtctacgaagctctaccgacatgacttagtaaattaaaagggttttagggattgatgggtctcaccagaagctcaagcgccggatcgaccagcccgccgtggcagccccgcacaagtcttcaacgatcggcgaggtgacctggtccgcttcacgtcgcacgcacaggcaagcaccggaatgtccagagcgcggctgtgtcgaacacccgcctggcgaccaccctcacgttctctctctgctcccttttcttctctcccgatgacgcaaacacgtgggagtcgcctggtcaaccaaaatggcgagcgccaggccccagtttataggccgcatggcgttagtgccg

SEQ ID NO: 142566 - DNA, 539 bp, Zea Mays
gatttgttggagcagagactaccctagagccgaagaaggatgaagttgtcgttttcaagagcttcttcagagcggggctgtgattcccccttaatgagatgataggggtagttttaaaaaactttgaaatatatcttcatcagctgactgccaacgctattgttaggctcggcgtctttatctgggccctccgaaaccaagggatgagcccggatactggagctttctgccgagtgcacgagctgcactatcagacgaaggctagggcagatggccttcatgagaattttggctgttacaattttgcgtatcgaaaggatacaaaagcaccagtccttagctaccgcacaaagtggtcaaccggttggaaaaaatgaatggttctatatgaaggctaacgagaaaaagagggagaagttgatgaccatggtcatgagtccactgagtttgagcttcggaatgacccgacccttatgcaatatgcaactggggtcaccctgttagatgcctgaagtagaatttagagtggtagctgagca

SEQ ID NO: 142567 - DNA, 443 bp, Zea Mays
ccgggtgtgacaaaaccccttacattccacaccaaatatttgaaggatccatggggaaacagaaaagaaaaacgaccagtggaggtggcgatagatcaggcctctagggccgacctctccccatgggaatcaggaactgaccacccaaacagagctgccaaagcagaaatctgcgaatcagacagcggcttactgaatagctttgcatattcatctatacccttggaggagaaaactgcttccgcttcaattggggaattagccatggctcttagcaccgtcatcttcgcacgcctctgagcaggaagtcggagctgtggctcgactccaattccagccattcttctgctccgacgttggatgaagcttgggacaccacttttttcttcttttcattagtctggcgcctaggcaggaccccatccaccttctttgacatcttg

SEQ ID NO: 142568 - DNA, 980 bp, Zea Mays
cagatttccaaagcctgctaggaaaagaaaaaggaaatttatgaatagtctcgggccgaaagcagcccaagtcggcccaactacagcagaaatgcgcccgcgcgcgcgcctgtggtaactttgcatggaggcccccgcggttttgcatatctagaaccaagttcagcgtactgttgtaataggtcactgacagattacaaagaaacccctgaggttctattcctttacaccgcccgatcctcgacggcgagcagcacgacagagctccggcgagcctgcgtaccggctgattcatgcgaggaacggcgtccttcttcggcctaaaccagattcgggacctagtaaatgtttcccctaagttaatttcaggaacggctaaccaaatgtttctggccacggtgagcgcgcggatgaactaacaatctacacgttcccggtgattcatgggatcttagcttaattgggcgagttggtgagcatcaccagcacacagagatgctaaaacaagaacaaggatggtatgattaaacctgtggagaactggccacggtgagctcgacccagcggtgtttaagaacataattgggggaaacttgaaattggagctcacggttgcaagattgggagcgatactagacggtgtggtgcgtgatgaggttgcggagctaacggtgggctcaatttatagattccagggggcggtggcgcttgaattgatgatggcgcggtggcggccggagaggaaaagggctctggcgcatgacacagtggtctttcaccgtggcaggtgctccggtgatcaccgggcatgcaccgcatgattcaccatgacgggagccagtgctaaggcacgtggtgcgcaacggcgacagtacgatgacggtgagggttatccgagcgaccgacgaactgggggaaagtacggcatgcttagccgcaaccgagctcgagtggatcagacgccgagatctttactgggt

SEQ ID NO: 142569 - DNA, 787 bp, Zea Mays
ggctgggcgccacgagggactgctggccgcgagccactggccgcgcactgcaggggcaagctcgattcacaggagaactcgacgtgcactggactggctgccatgggaggaaagagagaggggagggattcgcctcggcaggggttggagcgagcggcacaggggcacgccggccacggggtaggggagcatgggggagcaagggaagagggagtcggggctagccggctaggcgtgggctgccacgcgctgctgcggagtgcacgcaccatggacgcgtagggaagctctcgccgtcgccgagaacaggggaagggaagtcgcgcctggggacaccgctcgccatggcccgagatcgtgcaaagggtaagagtaggggaggaaggagatggaggggactcactgatgcctggtaaccgcggggtgccggctcctgcgcaattttggatctggggattggggaaagacgaggggttgccagaagggatgtgtgcatatatataaaggatgggtgcggcaaggtggttgcgcgcacgacgcgcgaggcgttgcgcgacggggcgaggcaaaatgaggtgactgcgactgagcgaaaaagacaattgtgcgagatagtgtaagacagactgacttaggcgggttagataaaattagacgaagacggtcagagctggtctgcgacccaaaataatgaggatagccgacgcgggcaacatgctattcgcgagaagacgcggttcagtgatctcgcgaaaaagagggtatgagatctggaacaggttcgatg

SEQ ID NO: 142570 - DNA, 860 bp, Zea Mays
tggatgcacgaacggatcgaatgcagcctccgcgcccgcgcatccaactagaccgcaccgtgctgcgtcactgccgcccaagctacgacgcgcccgcagccgcgctcgtctcactacgcctcacccctttcctattaccgcagtcgttttttgttcgttgaatgccgatattaatggccatcaacgctggccaactccgattgatttctcctctctcccctcatctataagagcagacctctgcccacacttctcacctcgcctcacccctactcggcccttcatgtctctgctcacccgttccttctctcgcccgagctgcctgcacgcactgcgtcgtcatctattctcgccgctgacgctgctgactccgaccgttgtgccaagttcgtcgaagccttctacgtctacgagtcccctcaccgatgtcgcgcaccgctcgccagagtctcccctcgtcgatgcaactccacgaagctagcgcgctgctacctcgtctctgagttctctgctcgctcatcgattgcagcgcctgcacggcgtcattgtcgtgtcgtgctgctgtgctacttctccgtcgacgccctgcagtctgcgaattttcatcgccggagcactgtcggtgaagccacgccatcatcgctattcttcatcgccacgctcgagctcacgcagcgacctcgtcgtcacccgctccctgctcatcaacgcaccgtcagcttctatgcaccaacgccgctggaatttcgcttgctagatgtcaccagagttccccactctgctcaccgtcgatccacacgtacactcgtccgaacccatcaccagtaccgtgtcgacctcgctgtcaaagcctgtttcca

SEQ ID NO: 142571 - DNA, 289 bp, Zea Mays
cggtaaccttgatcatgaagttgttgtgcttgccctttctgccctccccccagcggacccatttttggagggaaataacgatcagaacgaacagggcgcgcaaaatttgaatccgaatgctgatgatgacctcattgtgggcttcatgactcacctgaatcagccctctcaggaccctgcatacgatgattttctggccagaaagcgcttctcctcctgcgctgaactttgccccccagtgcagacctcatctccgttccaaagttatgggctgccttctttatgggcc

SEQ ID NO: 142572 - DNA, 414 bp, Zea Mays
ggttaccgaatgatgtgtacacttgtttgtctttgtcaaaatgttatcatgcatttatggtaaaaaatattatgcattaacttgatgctttgcctttttcagtataaacttgtaggctacaatttactgatctgataaatccagcagttgttgcaaacattttgagacctctttacctatctggcagttttataatgatgcaattctctttcaccaggttccatctatctaccggcagtacagaaatacaagccatgttgtagagcttacaatgggattctacaaccctacaaacagatatggatactctgtagttttcgtaatgttgaagaagcaccgtaactcttaagctcgtctgttgcggatctagaaggattaacctcgcgggtggagatgttctaagtttctttgtca

SEQ ID NO: 142573 - DNA, 337 bp, Zea Mays
agggagagggagagattatgcgagagatgtgagtgcgcaaggtgcgctgccgctggtaaatctcgcctgtgccgctagtccgacctcagtgaccaatcgagagggggctagcggggcaccttgcggaagagtgtagcggagacctcgggtgcaacggtgatcgagtcgtcgtcaattgctcatcggagcatcaccaccaccgtgaagccgtggcgcgggaacctccactacggcgttgtctcggcttgggaaggttgtcaagaagacttcatcgaacccatagaacctccgcgggtgtttgagcgcgctcggtgcgttctggaaccggagaaattac

SEQ ID NO: 142574 - DNA, 482 bp, Zea Mays
ctctaattagatttaggcgaaccggaaaactcggtctgagtagcgccgtccgatcggacatccgtggtctagatcattcaaggcgaatcgttagccccatttaatctggactacacatccgaagatccatggtcgtcacatgccctggtcgaaacgttatgcacttctaatcctagccgttcctcaatagatcaacaccctaggggccctctccccccaaagtccaagcgtggcggcgctacaccccggacgcggcggaacccgtcggcgacatccgtcccggccatccaccggtacccaaaccgaccactagcgcacgcaaaacaacgataggagaagggcgaacaacatgggggctacttactggagatgatagccgagggagcgctggccgcagcgaggagcggacccgcggtgaggcttgcccaccggtgagcaattcaccgaggagggggtcgggatttcccatggtgactcaacca

SEQ ID NO: 142575 - DNA, 474 bp, Zea Mays
cgcaacgcggcagcagacgcgttgtcgaaactaggatccagtcggacccaggtcccacctggggttttcgtccaagaagtaccacgcccgagcatttccttagatcgggcagaagagtgcaatgttctgagccagccagagtcagattctaatgactggagggagccaatcattagatatataaagaatgaagaggagccggacgaccaagctgctgcagaacacattgcaaggcagtcagctcactacactctcattggggaggcactgtacagaaggggcgcaacaggagtcctcatgaagtgcattctttcagctactggaaagcaactgctagatgagatccacgccggacagtgcaggatacaagcaacatccaggactctggttgggaaggtcttcaggtctggtttctactggccaacaacaaagagtgatgcagccgagttagtccagaggtgtgaagcttgccaa

SEQ ID NO: 142576 - DNA, 375 bp, Zea Mays
gaccaagggaagcacgtacaactgggtcgcgacaagatagcccaggaatacaataatatgaagcgcggagcatcagatggagctggtgggccaacgtcttctcctgcggtggccatggatcttctcttggtcgtcgtgcttgctccttcgaccagactcaccgtcgcctcgtcttgtcagcgtgtgggtgaaggttctgtcataggttgtggtgtaggctggcttgtcgacttgcataggagagtaggtgggtggtgttgtcctgtcccctccacctgctgctgtggtgggaacaacaagggtcatgatgtgagttacccacgtgcgcacaatgtgtcaatggtcttcacctcaataacgtgtgtgttactggca

SEQ ID NO: 142577 - DNA, 371 bp, Zea Mays
aatcaaagtgattttattaaggacagatccattcttgacaattttatgcttgttcaacagacaaccattatgctccaccagaaaaattgtgcaaggatacttcttaaattggatatcaccaaagcgtttgattctgtctcatggccgtttctcctcgaagttatgaagcatttgggctttgggcaaatttgatgtgatattatcaacactcttcttgcatctgcttcttctcaagttctccttaatggtgcgccagggcagaaaattctccatagaaggggtcttcggcagggtgatcctctctccccaatgcttttcatcctggttatggatgttttgtgctacctaacaaaaacggcagctgctgtggg

SEQ ID NO: 142578 - DNA, 468 bp, Zea Mays
ggtgtgtgatgaccttgcggggctggcgggggcttcaatttatagggatcaacggcggtggcccgggaatttcagtggggacgcgcggcggtcggaggaggaagaagagtactggcgcagtggcttggtgtctagcgccgtggcaattactccggcgagccacggagagtcgcaaaggttcacggtgacacggtggaaacactcgggtacgtggcacaaggccggaagacggcggttcaccgacgagcttatctgctcaagccgcaaagcaggggggtacgacggtgagtcaccggagtggcgtccagcgtacggggtgatgatcttttaccccgcgatgctatccagcaactccaggcacgaatccagtcgccggtgacacgaatcgcggcgaaggatcggtcgtcggcggtggtagactgtcgcgctggtgttcagatcttcatcaggcactgtaccatgggatgc

SEQ ID NO: 142579 - DNA, 387 bp, Zea Mays
atttagctcactactattagcgcttgctctaggtttggacttattgttagaattgagtattagacataaattaccattttgtgcttatgtgcaccattatattagttctactagaggtgcttttaatcttcagagatcacaccaactgcgtttgtggtgtgaccaccaccatgttttagagggaacaaggcccatagtgttttggtctaagactcaacagtgatgaccgtagagagcatatgggagaggccacgtttgagcaccacttccatgtggagaaggcccatggctatccatggtgttccctaaccaggagcttgaccctctcatgtgaatccttgcgatgggctccaataaggactatgtgtaagcatgtgtgcttctcac

SEQ ID NO: 142580 - DNA, 489 bp, Zea Mays
ccctccacagctcgttgcagtagactagtgtccaccgagcatttttagtcattcctgttagagttttaagaaagaaataagcaaaaaagaatatcgcatatacacagcacagggtaccatctggagggctatggacacacggaaatttccacaccctttcttgcaaaggtggtataactcaggggcaagtaaagaataaacgggtgcatgtggagagtaaaatgcccagcacaccacagcatatgtactcggtggcacaccctataagcaaagtgaacagatagatggtgtgggggagagagtgcaggtgcagcgctcctttctttaaagcatgcatgcatgagaccggccaaccaagggtagcagcatacgatagaactgagaggcatcttctatctttgacagctggtcaagagaggttgaataggcgcaggaacagctagtggcacagcagccagcattgcacatgaccactaaatatgccatggc

SEQ ID NO: 142581 - DNA, 344 bp, Zea Mays
atcttctgcgtaagcgtagattctttggcttcagtagccgaagaggtctcaccgccaaattcgggcactgtggccggatcaatgtagcgtggtcggtgagtaagaaccttcacatttctcctcttcggcgtgggctcactcggagcagctgaagtaacatccttctcagaagttgcactttttctcttctgcccccttggcgggtagcggtagtcaggatacaaaaatccgatagcatcaaaaactctatttagcctcttcttttttcggctcccgaaggccgcagatagtgcgttatcttcatacttggagtaggctccaagtagttcatcgctggtgttttc

SEQ ID NO: 142582 - DNA, 388 bp, Zea Mays
ggagagcagcttgtggtatggtaatagcactccataaactgctcatcagatggtggttttgggcacttggtggtcgtgtagtggcagttttctttgtgtgggggcgcgtttgtaagaatagaggtcagctcctccaatgtgtttgttcccttttcttccttaatgaaatgacacctaggtctactgcgttgtttgagaaaagagaacaaaggctaagataaaatagcatcattgttatagtaaccaaataattagcatcgagtcatattcatttgagctgaaacaataaggtgatgatgttgtaaaactaaactaagtcaacataatatcagttacaaatcatgttgagtaactactacctcctcctcattgttgtatgctgctgcac

SEQ ID NO: 142583 - DNA, 748 bp, Zea Mays
gaattttccaaaatccccaaatcagcccatgaactaaggcctatgggaaagttcagaaattcagaatctgaatttcagaaccctttcccaagttcagatgtgttccctgtcttccaaagctcgaatccataaagtccaaatatcaaagtggcgccaaaataccctaggaacactctggagaagtttgaaatcaaaccaaaatcgtttgacacgatttgacataggttttgtctcggtttggatagtgctgacagagctatcttcatgccacaatatcttctcacccaggccatatcttcactcgggactcacacacgacaggaagaccttggcacggtgaagagacgctacacaggatccttggcaatatatgcacgtttaggtcggccaacaggcgtttgaactcgggcagaatcacacttccacatgttcgatcgcgtgctcaagcgctcggccgcgcactggctgccctctgcatgcacgccgcgcacggtcggctattgtgccccgcacctgcgcccagctatgcctgagggcacctataagtacatcgggtgcgcaacggtctgctcttcactctgcctcacgccccgagcaaaaactccaacttcggcgagctctccaccgtccgccatcactgcccgagcacgaccactgtggctagcccttcccgacaaccccaagcctcgccctagccactggactgcttccccgtgaatcggtaaagctttccaaagcttgagccgag

SEQ ID NO: 142584 - DNA, 1775 bp, Zea Mays
gcttgacaccgtagatgtagggcccttagaataccaggattgtgccaagttaggccctctatgggtgtttcttctgatgatgaagtcctaaagagcattttgctagcatccaagggtatgtctagccctagacactaaaaatggccctagggcccaccgcagaccaaaggaagcctataggtgggaccattcttcctacatacacataatagaatgggtctatcgtgcatgcatagaagaatgtatgcttcaaccatctcaacctatggtcaatgcatcaaacagtagtcatgttgcatgactcccaaacggcaatggtcgtgtgacacttctggtgttgtgcctagtagttgtaagaggggagagaagggcgccttgaatcttatgtgtgtggtttcatcttctttttccttcactactccacacaatccacctcacttgctatcaatcactctccctctttcccatagatgcctccaacttatcataatcatcccatcccccagattcattatgatgtcatggcagctacctccctgagcacatgaatcctgaactaggaggggatgtacatggtgtgtcggttcctcaagtggacctcaccactagaatttacaatgtgtgagtgatatcattccaccgtgcattccatgagagagtgcaagagggtacatcttctactccttcatgatagtggggatgagcttccccttgtcatgattcttcctccatgtcctagagttatatagcctctagatcgagcacctcaccctaactccatcttcgccctatcgacctttgcatatatgtgagatgcgttcatggggatgaggctttccatggtgttgtgttaacacttgtttgtctattgggtaagggatactacttgtagttccactcaagcccaaagccccaaatgcctaacaacttgctcgacctcggcgataagtgggggcactcgagacaaggatgtacatcattatcactcttgaagcccacatggagatgctaatgagggtgccagtaagcaagaagatttggtaagagatgtcagagatggacgctgaaggatcaaatcaggcaactagaggggtgaatgagaactaataaaaatctttgatcaaaggtaatcttggcctaatcatccaagacaccaaaatagttaatagagatacttaagagtcaattggtcgctagatattcttggtgttgaccaataaacacaacgaagcactcaaaacggctaggaatgagtatgcggggaaacactccaaaatcgagaaattgagcttattactttagtgaaaataaataagatgctcaaacaagaacacctcaaccaaccagtgattggatgttttggaaaagtttttgaagcatgcacaaactcaaaaaaccaacactcgaaagtccaagtggacaaaatagtgacatggtgtaacattccaaaattccaacccaaggtttggaacccaaatctcctaacccccctttttatctctctctaaattccacctcataggacatctcatcatatgcatacactttgattgttagaagcacctcacatagatgatcatttttctttttagcacctaagattatttagctaattatttgttcaaaagaaaaggagataagagaaatagaaatagaaaatagaaaagaaaaaggaaaaaccttctcccctcgattgggccatttctggcccagctccctcccgcgcgcctcgcccccccttccctggcccacgcggcccagctccctcccgcgcg

SEQ ID NO: 142585 - DNA, 308 bp, Zea Mays
aattattagggataatcgtcaccgtttgtttcctatttttgtgttttgatggcaagcgacgaagaagaagcaaggatccctacagacttcgatgaatgtgttagccgccaagatcttgaggcaaacaacaagctcctgaaggagcaaatggaggagacagtccacaagtcagtgcatgatgccttcattgacatgaaccttagcaagacttacgattgtcccagatcgtcgacagaattgctgtgttggagacgcaacaacaagcaccgccaccaccacctcctcgtccacgtctttccgatgatgcg

SEQ ID NO: 142586 - DNA, 297 bp, Zea Mays
gccatggggcaggctagtagggctcatcagctcctagcctccctggcggctatctacgtcaccctagccatcagtatcacccagcaccatgtcgccggcaacatgaccgacgacctcgagataatgtggggcaacgcgaaggtcgtcaccgacggcagcggccagcaggccatcgcgctggctcttgaccgctcgacgagctccgcgttccgctccaagaagacgtgccagttctgcagggttgacatcgagatcaagctcgtccctgggaactcggccggcaccgttaccacgttc

SEQ ID NO: 142587 - DNA, 298 bp, Zea Mays
tcatagatttcaatggttcataggccaagtcatattctataagtgcataagcccatttaccaattctaccactcataatcgggttttgcaacatgtatttgatcacatcggtttgaccggaaacggtgcaatgactagacagcaaataacatctacacttggtgcatgcataaaacaagcataagcataacttctcgatgaaagtgtacctcgttttagcatccaccagccactgacttaggtaggctaccacatgctccttttctttggtctcttgcgtcagaatagctccaataag

SEQ ID NO: 142588 - DNA, 425 bp, Zea Mays
gtttgagtgagtgtgtcagcctaagttgggtctgccttgtaacgtcgtgtgccctccattttatagctcaaggggggcacatacaagggtgctgagccctgacatgtgggcctaggggcaaaacggagggaatacatatcgaagtatccaatgccagtgtcgcctagaagatctccgagcgccataatgtccgtagtccatatagtattaatatctcgcggctgcctcctcgataacgtgcgagtcatgatgaacatagtgtatgccgcagcacgagcgtactgcctgccaacggaatggacaggcacgccgcctgcaggatggcctggtcgtcgcctatcagcggagtggacatggcacattaaatgctgaggcggcacatcgcctgctagtggaatggacatggctcattaaatgccgaggcg

SEQ ID NO: 142589 - DNA, 621 bp, Zea Mays
cagaaattagcttgtatagaactttcaccactatgggaagtgcactaaaaaaatatgtagttctaacctttttgattccgtgcatgttgtttctattatgagcaggaagaccttctctacccaaggacgttcgtgcaaaacgtcatttggacttgtgtgaataaaatcgtggaaccattgctaaatctttggccggctaagatgttaagagatacagcactgaagaacatcatgaatcatatccattatgaagacgaaagtactaggtacctttgtgtatgcccagtaaacaaggtaatgcatgcaagaattttgtttgatttctttagatttccatcaaaattggtcaagttccaattcttcgggttaatggatgaggaagttctgtttccctttcccatttgactccaaaacttgtatttattttgagtcatgacttaggtcattcctgccacaacgaacttctatttatttggtgccagaccagagctaattccaatgcgccacaacgaactatttatgtcatgaaataattataactagcatacttttttctgtttataggcactaaatatgatttgttgttgggttgagaatccaaattcagatgcattcaagcgg

SEQ ID NO: 142590 - DNA, 351 bp, Zea Mays
acaccagcaagataataaagttatctaccccttttctatagcacatatctacagaaaatacaatttagttcatcaaacatacaacacagggaaatcactgcgtgcagtccaaaacagcaactaataatttcagctcctatttactttaagaattggcgcgttctagagacttgaaccattctaacactttgacatttgttagagttaaaataaccaagtgagaaccaacaagtcaacttaccaatttttatccgagttcttttgtacgctagaatcaccacacacaattaacaaacacctccaccacaataatcggacccggtacatatacgtgtatcggtgcgcccttca

SEQ ID NO: 142591 - DNA, 499 bp, Zea Mays
attcatttaatcgatttaacacagttctggatcgggcctcgatttccagagaagtcaggggcccaggcgtaaatgtaaccgagactcataacactgcagaggtggacggcgggttaaatcctaaatagtccaggggctctttaataaaaagtcgaggccgaaggggtattaacgattcctagccgtccgatctgattccagcgcacaggattagatttaacttattatgaaacggtacgccacgatgaccacaggatctagatcctacggtttagatctaatgaatgctggagccactccccgccactggatattcatccaacggacgctatatgccctggcagaagcgttattcggttttctaatcccgaccgtccaacagagaattgacggccgagcacgcgcgccccaatctacagtgagcacggcggcggtggcgcactgctcacggcggatagctcgccggcggcacgcaatccggctaatccctgccccaaac

SEQ ID NO: 142592 - DNA, 299 bp, Zea Mays
gcgacgaagggtggtgggaaaacatagtgtgggtgaattttcgcgaagtggcaggcgccgtcatttggggatggagcgtggccgtctccgagtagaccgggttggtaaacgagaattgttgtcttcgccgattggggcgagcataggcgaggggaatcttcggaagctttttgagggtgaggaattgaggataatgttgtttaattacagggagatgggtatcatcccgaaggttgagccgatgtagtatgtgatgccctcgccgtgtgtatgtaattgtgatttttatggtaatgtgg

SEQ ID NO: 142593 - DNA, 588 bp, Zea Mays
gtcaaacttcacaacaacttactatggtgacaaactgtcgaacgtgcacaatccaccccattgttacaatgatggcggcaatgaatcgaacctcagcatatttcgagaccaactcggaagcgcaagtggttcaaccaccaagaccctgagacatgaagagtggcgccatatcatgctatatgtattggccaaccttgaagaggtcatgccatacatggaacaatttcttcatgaattctggcgtcgatcaagggaccgaactccacaggaatatgatacctttcttaaaaagggtgctagaaatggattgcccgatttcatttcctagttcaaacataaggtacgtgattagtttgtaaaagagatctgtctatgaaatcaatttagcatcttttaacttgcgaatacttgcagggccaaagagaaccgtctatgagtgctgagttgagacaagtagccaatggctttgcttatagggtcaggaaatattctgggtatgacgtcaatggataccgttttcgcacaacaagctacgaccaaagtcggcccaatcgaaaaacaacgtgttctggagtctttacacccggc

SEQ ID NO: 142594 - DNA, 599 bp, Zea Mays
tcaaggttgatggccaaaatgcgctcctcctcttccttctctttttttcagcctccatgttcagacgttgcttatccaaagccagtctttccctctccaactctatcattgtcttgcggtgttctcgagcctcctcaaccttcactttctccaaactaacaatttcatcaagtcggacctttcgctcatcttctgtctctttgaacaattcaattttctgaacataaagatcatgcatcttggaagcgtactcgtgtgacagtgacactgaagaagccttcttcttagccgcttttgctacatccctccctatgggccttttccttgaggaacttgacggtgaagtgtcgttgggatcacgatccaccatgttggagttggagcgttcaggggtggcatccttggtaccactacttttaggtttgtccatatttctcttgagctccatccatttaggcacatccttcaagatatgccagcaatgcataagagagaaattgtgtttttcaatagaagcaaaatcagctgctgctgcgatagactacaaaaaccaaggatagaatattagtatactgaataaatattcacaaactatcaat

SEQ ID NO: 142595 - DNA, 353 bp, Zea Mays
ccggcgtcgaacacatcagcacaaacatccatcgcgtcaccatccgccggctctgacaacagatcctctggaaccatatcttcaagagtctgatcaaagttcgccagagacaattcttgtagactaatgagggcagacagagcaggagaaggaactccactacttcccccactggctacgtatcgccgactgttcttccgagttagagggatctcatcttcttcctcctcctcattttcatcagcaacacagacagcacacccattggggtcagcatcggtaaattcaggcacgggcacttcctcaacatcaggagccgaaggaccagcatcccgatccaagctagatactcg

SEQ ID NO: 142596 - DNA, 334 bp, Zea Mays
attagatcgaatcccaactacatgcctagctgcgcccacaaccactggatcccagatccacggcgcacggcgcacgatgaccttcactccctctcggccacacgatttcctttcaacgcgccagatccaaaacgacgaaggggtacccggattctaatcatgaccacacgtttgaggatcaacggtcgacacaatatcagagccgggacctaatctaacccttcgacgcggaatcaacggtcagggtgctttcttccttctctcgctcacctaggcaaatcgcgccaccgcctgtggttgcccatgacggtgcgcacaccaccggcgattcacg

SEQ ID NO: 142597 - DNA, 458 bp, Zea Mays
ctaatctagtcatatccaacctaatctagattttatctaatctatgatgatctaatctagagtaagttacttaatgctggtacaaaagataaggccatacccccatgcacttaaaactaaactagtgccttaaaccaactcaaccacatgcatgaaatctgacccaaccaataaagtcatgatggattgtataatctatctgtccccacctaacatcaaacaagttgttgaccaacatcatgtagtctatcgcacctatatctatcttaatcatattcccccaactctgataatatacactaacctcaaatcaaggagaccaagactggagaagaaaagatcaacctcgtcaagaaaggagagaagtcaaactcaaccttcagttgcatttccactcaacacggagttctttctcaccataaactttcttaccccaagctattcttgccctaacctac

SEQ ID NO: 142598 - DNA, 297 bp, Zea Mays
cccattcggatctggtgattggtgataccctaaccctaatcccattcggatctggtgattggtgatgctcgttcatcgttggtgctcctcgctggtcggctggtgctcctcgcctcctcggatcgagttgtagcttgatagctggtcagctggtgctctgtgtggtgcgggtgcgtgtgtcccttcctgattcttcactgtctccagtccagtggtccgtggctccgcgccttgtatggtcactggctcactgcctcacttgtgcggtagtgcactagtgcccctgctggctgcttg

SEQ ID NO: 142599 - DNA, 332 bp, Zea Mays
gccgcgacgtcggcagaggagggaagggggaaggccgaccgcgacgacggctgaggatgcgcgacggcaggccggagggctggccgcgatgggtggacggacggcaaggccgcgacagcggctgaggatgcgcgacggccagccagagggctggccgcgatgggcggacgacacagcaacgacgccaaaaaaatggatcggagccaggtttagacgtaaaacctaaccctaacctgctctgtttccatgtcactaacctcgattaggcgagacaataacccccttggggtactgtagcatatatataggcagacgagaatatttgggctgtt

SEQ ID NO: 142600 - DNA, 466 bp, Zea Mays
aacttgcaaccctagaactaggaggagccagcactagggtaggcggtaggcggtagcctcaccaagggcggtgacgggaaaacctagcagtataacccctgctcgcagtcgtccacactcccgctgcttcacgcagtcggcgcctccactctgctccctcgctcgccgtcttcttccatccaggcccctcagctttccctgtttcccatatattctcgcgcggctccacgctctcgctctccacactccacaccgcagacgcctggggggcgctcctactcctcctctagggaaggaggggctcgaggttccaccaattcgccgacaggtcccttgcgtgccatccccgccgcgcgcgcagctccagaggcctccatcccatccatggacgccaagaggcagggcttcttctccgcgctgcgggaggaggtggcgcgcgggctgtcgccggggcgcgcgcggcggc

SEQ ID NO: 142601 - DNA, 428 bp, Zea Mays
ggaagaagagtggtaaccgcacatccataaaccaacgtccagattagaactaggacgtactgcttcacggattgatcctaggccgtttatcacagatcaaatggggtacattagaactctttttattaaaatcctaccatcgaacttagatccgatggtcagcccttcgtaccgattcacagtatgttatgggacatcgattgttcattgggcggctcaggtgacttagcgggattagatctaatcccgattgtaggttcgtgatctaacgatcaaggatcgggaataccccttcggctgaagccttttgcataagagcccttggatttttaggaaaccaacccgcagtccttgcgccagcaatctgagtcttaggaaaacttctgagttagcccctaaggtttcctgtatttgaggcgcagtccaag

SEQ ID NO: 142602 - DNA, 415 bp, Zea Mays
gacatttggaaattaaaaatggctcctttgtgccagagaaaagcagccttcttcattgaactgaaaatgctccacttgtgagtatttggaaatcactcgtttcctttattaacaacggattccctttttgagctagtttggaaacttaaatctccttggatattgtaggggattaaggtagaaatgaactaacatctccccctcaaccttattcaatcctcgaaatgtatttccctggagagaaagaagaaacatatgaaatagaataagctttgccttgtaggaagcaacaacgctgaattggcgtcgtcggtggggctagggaaggaggttgaggggttggacttcagcctggaatatgtcaccagccggaaaggccccactggtgcatgcacattccaaatcagcatctgaa

SEQ ID NO: 142603 - DNA, 589 bp, Zea Mays
gcgctcttttccgcgccgatctgctggccgctgacatccaggcccactcatccgattcacgctcgctcttgactcacactagatcgtgggtcccagccgtaagctctacccctcccctttcttcgctgcttttgttcttctccccgtctcgcacggcgctagctcaccacacctccctggcgggcgcaattacctccctatcagaccgacgctatgggcggactggaggagactcggaccacgcatataaaacccctctcggcctctgttgagcatacctaggtcgccaccatcgagacccacttcaagctgtgagatccgccgtcgtcgttcatcaccagtgtcctctcccaacgcccgtgaagcgatccctggggtcctgaagcaagtgtggatcatgcacatgggcataattgggtgtgggaagctgcggagcggcggggatttttcgccgttgttacaccgctgccacggaccgcgctttgccgtgaattgcacgcatgtgcgctcgattcttgatatgagtcccttgcccgtatttgcctttagttccgcaacgagtagaattgtttgattcgaagttagtgcg

SEQ ID NO: 142604 - DNA, 302 bp, Zea Mays
cgaattccggcgagtaattcacaccaacaccgctacagtctgagcctgccatcgcgatgaatatgttcggtttgatctcgtgacggtcctaggccctacgccctcgcaggagtgatggttctaccagatttggcttgctgcgcccatatttgtttctctcggccaattccatggtgtcagctcaagatgggagagggtaaattcatgggagagactcgggtatatagtcgcaagagggtgggtcgaccacgcaacggctgacgagattttcgcaggcggattcggaaagatcccccaacggc

SEQ ID NO: 142605 - DNA, 320 bp, Zea Mays
gttgtcacacaagacaagtctggtgtgaaggagtctcactctagcgtctgatgtacatgggagaaaccaaactagacaagtttggtgtgtggccagccaggcacactatagacgtgtttggttcgacaagatattgagaatctagcatgagaatccaggcaagtaaccaaatggtgtgcattttaagtctcagtatcccgcaggcctatgttgtctgcatttgcactctttgaatgagtggccaaactagtccgttgcagatcctagactgcttagtgtgactgtgtgagtgaagatggcaacgagtaaagactcgtcgg

SEQ ID NO: 142606 - DNA, 564 bp, Zea Mays
ataacagaggctctgtcacgaacctgaaatctggtgaatcattctgctattgtcatggccaagtttttgtgtgttgctgatttcatctacctcagtcgtagggtgtagttaaaggtccactagataaccatgatgtgtctctagtagaataagagcatttgctccatgttttgtactccttgacaagtacttgaacatgctgcatttttaaggctcccattacatcttatcttcatgtaaattggtaccatgaccatttaaacgagatagtggtgcatgctagtttattgcaagtaattttatttccacaaagtcattaaagtggtctcatacatctaaaatttagtctacctatacataacaagaacttttcattcagagctacaaacttcattacaagaagagaacaaacattagttcagtacacctacaatatactcatcaacagaacccattcagattatatggtagctaaacttgaataaccaaaacaaatcaattaagcaagattagatgaacttcagagctggtacttagagcaagagtgttaaagtgtcactcata

SEQ ID NO: 142607 - DNA, 547 bp, Zea Mays
cttgcgtgaatttttgaagtcaattctctacaatattaaaacatcagtttcgacgatcgtcctgcgtcatctttttacagaaaggcccttacacttctttgaaatctaacccgcagtccaactttaaggttcataaccacgccccgccgtagcccttgcatacgccagcgcctcctcctcccagaaattttccctaccgttcattctggcgttatacaatcacaatcgtccgttataccgttatgcaatctcaaccgctcgatcctgcgatctagcccacgtgtgacaaccgcgtcctctgtatctgctcctcgctcagtctgttctcctccccgtttcttctgcctcctctcctgctattcagttgcagcaagttctccctccccgtatccttcgcctcctcccccactccctagctagattcattttgcctctcccgcatgtactcactcccaacgccccgtctcgcactctcgcctcacctcaccgcggggagacggaagacggtggacgcatcatcacctctcccgctagctgccgctcttcc

SEQ ID NO: 142608 - DNA, 538 bp, Zea Mays
cttcgaccgggtgtagaaagccgagagggaggagagagatcgccgttggcaatgatacatggatgcgtcgctaaagcggccttcatacttggtccagggagtaacccagatcccatggaagatgtacgcatgaagctatgggcgcacttactgttcggcgggctcggaatttttctccggtgccaaccaccctccgtggacccgcgccacgacgagagcaagcacctctatggcataatcgacggtaagcaccccaccaagcctttttgcctatgcgtccacttcaggtaccaccggtttgcgtgtggattagtgctctgagacatgagatggttgaacgccggcgagacaccatcgggagcacgcgcgcgccaccgtgaatcctggtgggttgggggagaagatgtgtgtgccgtcaatgagactcgccgtcgatcgggttctagtcgaccacgattagaacgggagcataccccttcgtagtttgatcccaaaccgtagatctcagatccttgggctctggttgtgcacacattag

SEQ ID NO: 142609 - DNA, 499 bp, Zea Mays
ggctgctgccaataacagagcgtgtgctgtgtgcggctacgccttcaagaatggcaccttcttgtgcagtggtccgggtctacagcatcagagacaacttgggaaccactagctcggttcaaggaaagctaccccaattttcagctcgaagatgagctatttcttgaggagccgagagatgttatggtaggcttccagtacaggcgccaccacaagcctgggagtcctaattagagggctgaaccagcctagaagattagtcagggctaaatgggttgttagtagggcctgttttgcagtagaataaaaggctaaaggtcttttaggttaagctgtaatagggggtatttatacctaatttggagatgaataaagattttaggctgagatcaacgtagtgttgatctaccaccgccccctcatccctctcgcctgtcttctccccctggccatgagaaccatagccacccatcaccggagatcgctcaaggagcgacta

SEQ ID NO: 142610 - DNA, 1118 bp, Zea Mays
tacgtaacaaagcaagccatgcaaaccggagtaaaaacggcgtgggaatagaagtcagttaggattttgtctttaggataaagtctcgggataagcttgagataggatataaaagcattattgtatgctgttgccgaaggaggcaaaaagataaaaaaagaaacacgttgttattgtgtccaaatctattatctactatctatttcccttttctatttctctttggtgttttgttgagtaaaacatccgattttctctgcgaaagtgggaattctttgattgttttcaagaagaaaaaacagtcattggtggtcacggcaagcacagcaaaagcaccatcactgttgttgtttctgcgagcagattgaggcaacaaatagtgctccttcccggttgccttcgtctgataggacagctcatgaatattgcagaagaatcttgcatctggctccagcccttgtctcctcacaacccagataaaaactcccactctaataagagcttcgagggtaatttgatgaaggtatatttaaaacgccttcaagacctcgaccagcatcttatggagcagaaaatgaaacccagctttcatgaagctcctaaagactaccacttcatcactttctagcaggggaacgatgtcttctcctccagccctcactatagatacatcatgaaagtatttgcctttcatcgcttcaatttgaccttgtttgattgtggatttcccaaaaacaacgtggctaggtctccacgtctgatcttcggcattctcattctcactctcaatattgaagctttcactatcgcttgaatcactagctagcccagctaatatttcgttggtgatcttctctacattggtcctttccatggcttcgtagaaaccagcgagtgtgggatcagtgcttttcttgtcttcagcaatttcggtgatggtcacgacagaaaatcgaagctcgcaaacaattgaactcagagaataagaaaactaaataacaactgcagcacgaaagctagatggcacggaaaatattacgacacaaccttctatatatatactcagagccctatagctaggtgggtcccatggtttagaatgattcgctattctagcg

SEQ ID NO: 142611 - DNA, 528 bp, Zea Mays
ttgaacatcatctgcctcaaacagactgttgtagtgtttattcagggcatgccattgcccgtgaatctctatctcatggccagtgcatgcgtgaatccggttggtacccttcagttcagaaaaacttccccacggagtgaattgaaagcagctggtcgagcgagcctttccaactccaaacaacagtgagctacttccccggccttctcctcgtcttgtctctgccagtgatctgggcagctggtaggagttttcaaaagaaagagaggatatttcgatcctaggagaggccataagttttctgaggatagcgaagcatattgctgcgtgcatctgatagcagcaaagatctctctagtgcaaaggttctttgctttcgaagccctccttcaatcctctctctctcaacaaacagaaacaaacaagaaagggacgccgtcctcatagcccatagaaaaggcatccatggcaagctcatcaaacaagcttgctcatcctatatatacatatccagttatattgggttgc

SEQ ID NO: 142612 - DNA, 535 bp, Zea Mays
cgggccggctacggaccgcgattttgactcaaaacccagcccaaaaaaacccgacccaaccagaaaaaaaaaccagagcgacacgttaaacagggagttacggaccgatccgacccaacactaggcacaggccgtgataaatggccaacgacccgaccttaacccgaccagcacgatgcttgaacatgtctaccgcaaatatagtcgtgaacggatactggttacggccatagataatccgatccattgtcatacctacccacctatcggccgacgtttgttgttgtggccaccgcagtcagtaccgaacaccggccatgccatacaagcaaccgataaggaccagcactggacctaacctaaagctctcagcttgatcgacggtcacatagcgtgtgatgattatgagacacctaagatattttatcaatcggaaagtgctgtgaacagttgcacttgtccatttacctatttcgaatcatagtgcaactcaaattacttactcactccgtcctaaaatagagttcgttttgaa

SEQ ID NO: 142613 - DNA, 385 bp, Zea Mays
ctagcatagcgaacactacaagaaatttgtccttttatgacaaagtacctaatgacaaggtcagttatcgtcatataatgtcacataatatgatggaattttttgaatcgtcataatttcatgaggccatgaagattttatgacgatagtgtttttgttgtcacataaggttacggaaattcgtcatatattgtcaggcgccaggagccggtagacggttttacttttatgacgcttagatgtgcctttatgtgatgatttggcggcgtcactttatgttttttccaaaaaaggaccatacccctttctgttgaccgcattcactttcccatctcccgcccaaaatgaccaaaatttccctcctaccttatcctctcggctgctc

SEQ ID NO: 142614 - DNA, 286 bp, Zea Mays
caggaaaccaagagagagagcgcagcgtcggggaaggagatgaggacgacgccgagcggaaaaatatcgcgctgctggagctgaagatcgagtagagcggtggcgtacgcaggatgggcggccagagacttccacagcgcgcggcggagggaaggatcaaggaagaagtctcgcgtactggagggatgaggaccagccgaccagagcgctgcgtagataggaagcagggagcggtggttggaagaaatatcagaacggctgggtacgagcacagcgacgggataag

SEQ ID NO: 142615 - DNA, 701 bp, Zea Mays
ataataaaataaagtatagctggaacatgcgctcgcaatgcgtttagccgctgctgtcgccgaccgagatgcgattgaactattgattcaattgtagtgaagggttatgaattttctgactgctaagattaaatatcggtatattcgtactatatctgtagatctaggaacatggtggcaagcataagtcagctcacattaatcgcattattgttgtgcttctcataagtcacgcgatctacaatatctacagcgtcagggaggtcatcaaggtatggttcctcaagaactactcagttatcacttgctagagaacaatcctcaggttgtggtaccaaacaataaaattagttccattgagtttctctttgccaaacatagatcgcaaattgaaaacgaaattgttgctagcagacatgaccatgtctataacagaaaataaatatgcaaagctttagcactttgttatgtaccaatcttctactaaccattttaataaaatacatcactaaattgtcttccctctaatgaaatatagtggtccaagatccatattcagtaaattttagtgagctttggcttcactactaaaatttaagtgtcatagataaacgataaattgttaatcatatctctatgtgactcttgtttgttagttagcatccaatgccctggctcccaactccatgccataaagctcg

SEQ ID NO: 142616 - DNA, 405 bp, Zea Mays
gtacgtacacattgcacgagcagaatgtgattcaggggtagggtcggagtccgtttcagcagttgggtcgtcgtgctgcgttggtctccagtcattgtcgtagtcgggtgggtggcggttgccgggatccgtccatttgaggcgtcgggggtcactgcactgggctctgggtagtctggaccgaactcaagcgtcgtcctcgtgcccttgtgcattcggatctccaattcttcatgacccatttgtgttgtatttactctcttggtcggatttgttgataaattgctgcgaagctgacgtgaacggcaggtctctcctcgtgtttgctggcgacctgaggggacccgattttctcgttgtcatgtgaaaaccaacggccccggagagacgcgaggaacagaggga

SEQ ID NO: 142617 - DNA, 399 bp, Zea Mays
attatcttctatataggtgatgacttcaccttttttgatgcacctattgtgtgaatctagctgcacccttaggagacttttgcgtggatagaactatgcgtcctggggacgacttcgcacccttgagtgttgttacgcatttgttgtgctgatccagctgcacccttaggcaacttttgcttggataaaaatattcgtctctaggacgacttcacacccttgggtgttgttacgcacttgtattgatccagctgcacccttgggtgacttttgcttggattgtgcttgtcacgcgcaacagctgttgatactggccattgtggtcactgttttagcgtcgaatgccgaagacttacttcgtggacttttccaacatctcgctgtcatggtgccgctttt

SEQ ID NO: 142618 - DNA, 566 bp, Zea Mays
gctcgaaaaattttgaagggttatgagcttatattcctttcccctttaggcacatcaacgatataggaaatgatcgaaaacaactaatgaccaaacaaatagaactaatttgcaccatatggtattttgtgtgttgcactcggtttggccaagaattatggtgggaatttgatattcaaaccaaacttatgggcaaggaaaatggcaaaaaggggaaacgccttacctgggccatggagctctgatcggctcacccaaccggcttgggccagaaaccacatggccgcgcatacacgtgacgagctgccggaattgtttaatgtattcatgggtggtgaggtcatgccgatgtcaggggtgacctcatctccatgggcacctgtaccactgacggttgggccccggtaatgctctgtatgcctaaccgtatggacctaggagcagctgcgtgctgctcaaccgccaccgtaaccaccggccgggcatgtaggatctacacaaagactgccttgggttcctggatatatagaggggaaaaccctctctcatactcctctaacccaacc

SEQ ID NO: 142619 - DNA, 452 bp, Zea Mays
cgagaacagagcagacaaaattggaaagtgaactgtgttgtctacatcatttatcggtggtcctcatgacatgagacaccggtatatggatgctatggcccttgtgcggaagtttgggaaaccagacatattccttactatgacgtgcaaccccaattgggatgaaataacaagggagcttcatcctatgcagtcgccacaggatcgtccagaccttgttgttcgcatattccgtgcgaaactagaggaattgaagaagagattgactaagcaacatattcttggaaagatccgtgcttatgtctatgtcatggagttccagaagcgaggtttgccccatgcccattttctactcatcatgcagagaaagtacaagctaacatgtcctgagcagtatgatctactgatctccgctgagatccctgataagaagaagtacccgcagctgtaca

SEQ ID NO: 142620 - DNA, 299 bp, Zea Mays
gatacccggagattggagcaaagaaaactggagtaggaaacggaacagaaatcgcaacaggaagacaactgaaaactcacctcattgttgcacggcttgcaggtttgctgcacaggtgttccacggcctgtacgacgaggtgatgagcacgtccgcgcgagggcacggcctcatgctccgggtgcagcagctggaggcagagctgccgctgctggagagagactcctgccagagagactacctgcatgtcgcttctaacaggggtgggttcattcagcaccaacaagtgcagatttctc

SEQ ID NO: 142621 - DNA, 820 bp, Zea Mays
gttgacggagggggtatggcctgctatgaactcgtagagcagcccataacacctcttgtgctgttgacatcggcctcagacctatgttcatcctgtggccagtggtggcctcgtgggccaaaaaggcccagcaaccagccccgtaaactttttcgtttcgatggaaacaggagacgaaaagggccatagtgattgctcgtcgccggtcccgagcgccagaggcaagagttgcgttggatgaaagtgaagaagcttcaggaagcagttccatccatcgtttcctgggcaggtgcaggtgcatcaagccactgtcaagagatccgtgcggcggcggcggcgtctggactggtggacgctagctgctgtacaggcacgagcttacgttgagagacggatctgaccgccgccgccgtggagctggagcgaaagcaaaacccgggcccaagcgtggagcaagagcaagatcgtcccccatggactggttcgtcgagaagaatccgcgctggggtttggttttatttacattttgcatgcacgcctaccaaaatccactctactcactctgtcactcaactcactcgatcagctagctaggtaccagtaccctgtacaacaagacgtataagctactgctacaagtaggaggcggaggaggtgggcgtggcgacggcggcgcgggcgtcggaggggaggagcacgaggagtagcaggacggcgaagatggcgacgggcacgaggaggaggagcggcggcggcggcggcaggggcggcaggaccagcggaagcagcagcagcgtggccgtgacgcacgccagcagcg

SEQ ID NO: 142622 - DNA, 505 bp, Zea Mays
atcaggagcatccaaggatactgaaacgaggactcatagggcatgaacggacctgagatgcgctggccacggcaaggtcaaaccgctcgttgttcttgagtgatttgggggaaatcccaaattggggagttctaggggatgattcgaggcacgggttgcttcactggttgcacaactacctagcggagcaggcgggtcagcaatttatagtaggcttgagcggtggcgtccaatttcacgatgatgcgctggcggccggagatagggaagaacacgggtggctgtgaccgtggcgttcaccgatgcaacggctcaaggattatactcctaagggtgccacgattactaccgcgcagtaacaagctacggcatggcgcaaccgaggtcatcggagcttccacggcaacgctggcggtctagccacgtcgcaacggctacaagcacggtgatagacttcaatccacgatcaaatccattcccccatgagattttttaccttcccgtg

SEQ ID NO: 142623 - DNA, 786 bp, Zea Mays
aaccactaaactgacaactagtcctatacgatccagaatatgctctttgattagggcattttgggtagcaaattttcataatttctatcgtcttggtttgttcctgaacttctcataatgctgctattgtttgttgttttgtgtatctgtatatttgagtggcaatctaggtttccaccatgcaatccataactcagttgaaatatatgccattgatagttaatgttcgtgcaactagtgaaacggtaatgtcattagtgtttagggattgttttaatttggccttacacatacttaattttttaaaacagagaagtcctgaaaggattatcgaatggccaggaccgatgcgtgaatgacactcttttgtgtgaagattatttgcttgtttgaagacgttttggcatgtaaatgaaaggcgtatcttcaatccttttatctgttttaagtcggattgcatgtagtaacatcataaaataaaattaatatcttttagcgccttagttgggtggttatatataaaaatctgacaatgagcctcttatttttcctgaacaaccctgagctcctgagtcctgacatagggtaaacctagcttactgtttcatgtctcctttaaggcaacttatacccatcttatctggatagttaattaattatatggcttcctgaaggtgattagtagtaatcagctcatgcaatgcatagtaactcctgtttgttgcttacagatctgggggacacctgacccaagaagagctggatgtgtaaatcgcagagtacggc

SEQ ID NO: 142624 - DNA, 355 bp, Zea Mays
gcagaggctacaccaaagctcattcttcagttcatgggccatgggcgctagggggctcaccatatctcacgtcaagagtcatctccaggttaattgtttcacttcttcatccattgcctggcatgtacctgtaggcattgactgattgttttcccgttggagccaacaaccacgtgcaaatagactcaaaagcttctaaattactaattccccgtttgcttttttcgataaacagatgtacagagctctgaggcttggcataggaagaagaggtaagagatgaaacacgccctcgtttgctggcttcttccactactaaattcttgcttcctttcttcctttctttactccttgg

SEQ ID NO: 142625 - DNA, 413 bp, Zea Mays
cgaaagtgagatccatctaatccaattatcgctgttgtttgctttgaaagatcgattcatagcaacagatttggcgactccactggggagcgatttgcaatcattgcacagagacaaactgctggcgattggcgtccttatcgccaatcatagtcagggttatggaggaaaagacagcgaagaaggcggcaccggacaaatctgaagttcatcccttgaacgtgatcaaggtcacgatggaggaccttgcagaggcagaccggaaggagattgaagaagaaatcgcacgagagatggaggagaaatggaacgagagattggcttgctttcgaaaaaccaagaatggtgtgatcaaacagattggtggggcaagcacgtccagcaagaaggtaagttcatctgtcacttgtgaa

SEQ ID NO: 142626 - DNA, 341 bp, Zea Mays
gcatgatctgaagtctatggccaagattagatcgcctaaaaccgaaccggtatgcagccatagccctcagatccacgatcaacgctctggattttaaagacttgaatgggctctcacacgacagatctagatcggacggcgcgcagctatccgcgaagggagtacgccatcaagtcgatcacaatggttcactcgaaatccagcggctgacatcccccgaaatccaagccgttcattctaatccaacggccaccacactgccctcaacctcccgacggccagggacggcggcgcccacaggtccgacggctgagaccccactggtgaaccccaaacgcgca

SEQ ID NO: 142627 - DNA, 918 bp, Zea Mays
caggaaccataattatgaaacatatttttggacagccatattgtgcccagaagttcatgaatttctcgaaaaactaggatagtccaaagcttaatgagcttcttggatttagcttgtgcccaaacgctaccaacgctgcgaagacggacgcatctcacttatccgaagcatctgtgaagactgaagagagtttggcattatgcttgaatgtaaatgacatgaaatatcattataacaaaatcgcgaaagctaatttgtaaaactgctaatgttatctagcataaatcaagcaacaggcaaagcgtacatagaacagcggttatgtaagtcgatttcttaagcaaaaccaaattggcatcagaagggatgtcatgtattcatatcaccgcgggttgggctacaagtgcccatgaactgctcatagcccttgcgcaataatcccagcatcacttgccattggaaaggggtgtgaataaatcttatatctcaggaaaaaatgccaggtagaaacggcaaattaaatgctttttttgtagaaaactgaacaatcacaagactacaaagcaaatgaagtttcctcgcaaaagggtgcagatccaggaccgaaaactgctgccatcagaagggataatacatacatatgttgtgatctcatcgcattcggcaaacacaagccacgaattgctcaaagcccttgcgcaatattcccagcatcacttggcagcaggaaaaacacacacgtagatttggggctacaaggaaatgaacgaatgaagcaggcacgcccaaagactgggaggagagacgaggtacacggggacacggctgtgtctggcaagaagcaacaaatctcccatggttgctgccttgctgattggaggcggcggcggcgttccgggcacagcggtagggttaagg

SEQ ID NO: 142628 - DNA, 589 bp, Zea Mays
gcagatgctggttgcactgacggctgcggacagatagagctgagagccggagaggtgaacgccaaagtgaccggccggagcggagaggtacaagcagggggtccagacaagatcgaaggcaccactggagcgtgaagcggaggaggcggaacagactgaaccggaggagctgagataccagaatgctgaagcatgagagccatgaatgccctattctctgccctatcctgaataagctgctgctgaagagcatcctgcctgtcctgcatgctctgaaacatcgagagcatccggtcggataaacgggcctgctcggctgccaggagagcctgctactgggtgagagtctgctgctgctgggtgagagtctgctgctgctgggtgagagtctgaagaatcgaagcaagggcagggtccaaagctggaggaggagcaggggcagcacgggaactcccagcctcatgatcatgtgagcgtggaggcataggaggcggaggcggaggaggaaccccaaaatcatcatcatcatcatcatcatcagctgtaccctgagtgtcaaactgtcgtagagctgcatcctcggcctgag

SEQ ID NO: 142629 - DNA, 406 bp, Zea Mays
ggagcatgcaaagtccatggaaaggttgaaattggtcaactcgctgctggtcggttgttctcaatggaagggggggatattgggaactatgtcattatgtcaaacatctatgcagctgatgagaaatgggatggtgttgagaatgtccgaaaactgatgaagtccatcgatatgaagaaacctgcagggtgcagctggatagaggtcgagaagaccagacacttgttcatagcgagcgatattaatcatcaagataggtcttgtatctacgatatgttaggaagtctgtatcagcaaatcaaagatacacacacacagaacatgacaatggtgaaatctatgtgaccacaagttgcaaaaaagaagaagtgaagcgctcttcatctgatatgtgcccagtggcttg

SEQ ID NO: 142630 - DNA, 500 bp, Zea Mays
ggcttatgtgtacatgtttcaatttgctttttgattttgatacacccactctgtaacaaaatcatgatgagatgtacttgagtttgttgaatcattatttctctatcccatgaacttcatggaagctctatcgtatcaagctcactttattagaggcgtgaggaagtgatggtccccatgtatgggcatggatgtatgtcctcatccataacttaattgtcataatgttatcttcttccttggcttggatgtttcatgtcgtcaactagtaaatttgtagtcatatgtattgctttagatggtttgtgctcaaagactcataactatattagttcaagttatgtgccctacatgaagtccatgggtttttattcgtgcgtcctaagcatgagtgctcacaatttgcattaagggttgcaaatgagtgagggttatggttctaaggttcgtgagtgttggaatgctttcaatcctcctatatagagccttggtcctccctt

SEQ ID NO: 142631 - DNA, 601 bp, Zea Mays
ctgacgccaaactggtgagtcagaagcctcggagacagtccattgagcggcaggacttcatccgtgaggaggttcggaagctgctaaatgccggcttcatcgaagaggttcatcacctcgtatggctggccaacccagtcatcgttccaaaggcaaacgagaagcttcggatgtgcatcgactacaccagccttaataaggcttgtcccaaggacccgtatccacttccacgtatagatcaaatcgtggattctacttccgggtgtgacctcttgtccttcttagatgcttactctgggtttcatcagatccagatgtctagggaagataggaagcataccgcttttgtaacagtggatgggctttattgttatgttgtaatgccctatggtctgaagaacgccttgccaacatttgtacgggcgatgagtaagaccttcggggacctgattagggacaggatagagatatacgtcgatgacatcatggtcaagactaagaaaaggtcgactctagtggaggacttgaccctggtatttgacaagctatgggcaactcgtacgaaggtgaaccctgacaagtgcgtctttggtgtctccgc

SEQ ID NO: 142632 - DNA, 372 bp, Zea Mays
actaatgaagcattccatggtacagtaaccacatcggatcagaccgccagcgcggcagtccatcaccgccggcgacctctctgcgccacgattcgtgccgccgccgtctcaattcgtactcgggatgactagataaacgctcggagcacgccgccgtggataagcccggccattaaagtattccggccaccgtacaaagctcgccgcggtggaacccgataagcacgtcggtgaccgccgccttccggccttgtgccgcgtgtctaagcatttccaccgcatcgccgtaacctgctctcgctctccgttgatcaccggagtgactgccacgacgtaggacacgatttcattgcgccagtaactctccccctc

SEQ ID NO: 142633 - DNA, 982 bp, Zea Mays
cgggctcagcgaccaggggccctttccttagcgcgttcactgtccggtgggtccagggaccagggatcatttccccgatagtagcctccaggggagagtgtctctctttggggtctaatatcgggtcggcatgtgtcctatctgttcgttccccgagcaactgtggtgttccctagaaaattggtgccacgacaatccacctcctaggatggagtcggacgcccttccgctccttttataaacctcgggcattcgctcccttgctggttgtccttgacacatctttcgaactcgtctccaaccgggccagcggtcgaactttgagcttttcaagatgtcgcgctccgtaggtcataggtcgaggtaggcttttctcctcgagcttgctggcctcctctctttgtttgattttgctctatcctttccccgcagcggtgcagttgcagtcgacccggagactgcatctcgaccgagttccacatccttctccaccttgggtgctcacggggggttgtgatgcctttcgcacggcacatgaggtcgccgaggtgctgcgagtgcagcttgctgaggtcgacggccgcgtcgttggtaagtcgtttgattcttgtttttatggtttttttcttcctttgtccccttttcttatcctgcccatttctcatggcagccttggaagcagagctcgatatactgcgccaccgctctagccagcttcttgattaagttggggcccatggtgcctctttgatcgagcacctggataacgcctcgtgccacgttcaggacattgtagactttgatgttcactgtggggctgtggtgacgctgctcatggcagaggtctgcttgggctacaaccttcaagatctcattggtcccccttcgtccttctcggatgaagggttggaggacctgctggaaggctacgacgacatagctagccacgtcgttcttagggtgtctgttcacgacgtcgtcc

SEQ ID NO: 142634 - DNA, 329 bp, Zea Mays
gggataatcaagggggggtttaggagattagggtttctaaccttgggattaaattttgggatgttacattaattaaccccatctagcttcactccccaactactacaatgcttcgacatgtccctacaacgaaaaggtcatgtttaaaggctttatgtatggttttggtaattgagacaactaatggatgaacctctactttaactattgtaaatgagataggtttaagtcgcattcaaagattgagtaaaattagcaatcatggaaagaatggtgatgatataaaggattattaagtgattaacatgaaaagagggagaagaaaaaat

SEQ ID NO: 142635 - DNA, 406 bp, Zea Mays
aggtacaccataccggggtgtatgcctacgcacaccagggggtgacataggcctgtgacgacaggtagaaccgcgccacaaacgaccgctccgtgggactaacccgagggacccccacacactactatggagatgtcagtgacgagctagctaaagggggcgtatgacgaacgagcgagatgatacgccataccaagagtacggctacgaatgaccctacggagaacacacacggcaactcggaggagctgatctcactcactctccctctcggagaaaacagatattctctgtaaggtccaaccttaaactataaaaggctagacctgttgtaacatgcctcaaagcaatattatgatcagtactacactggattaggatgaaagcttgaactaatataacccag

SEQ ID NO: 142636 - DNA, 588 bp, Zea Mays
cggacggtctggtgtaaggtgtcgaacgatctgcgacttggctagacagtgcatgactagatgaggattgtctggtcatgtggggtactgtttgggtgtggtgtatcaggctcattgtatctccagacaattcgatgaaaggtgttgaatggtccatgagatgcgtgaacagtccgagattgtactcgagttgtccggtcatatctagaaccagttgtgtgttgcatatcgatggtggtggtagtatactatggctttgatgtgttgcaggtgggggaaagtagtgctgagatgggtgaaaaaaaactgtgcgttgtaagaagcagcttgttttgtgttgacgtaccaggacggttaggcctgggtgatcgaatggtccgcaaagggaccggtggatccaggattatccagattgtccggtcttgtcaggcaatgcctctaagccatgtggtggcctcgctatgcctctggactatccagcatatggagttggacgatccgtgaagggactggatggtccgtaaagggatcaaacgatacgagattatatctggatggtcgagtcttgctaagcatctcctacgagac

SEQ ID NO: 142637 - DNA, 361 bp, Zea Mays
tggcaaagtagagttattaggtaaaaagtccttcagaagtgtatctagtaaatctgtgaaggacttattactccactttcccatattcttaacattaagtaactttacaagcgcagataatttagtggtattggatccatgataaagaggtttgttcaagtcactaagcaaattataaaacttcatagcttccccatttggttgctcttcaaaaaaatcactagaagatgggtctgccattgtgtcacttccggggaggttattctgagggaatagatcctccatcagctcctgcattccatcagcagattcatcgtcatcttccacttctaaatcattctcatcttctcccaaaatttcc

SEQ ID NO: 142638 - DNA, 434 bp, Zea Mays
gaaggatagagcatacccagcttacttgtacagtggtgttaccaactcgactcgggttactaataggagaatttctgttgaggatttggtgagctggctagacatgatcttgagaggcaaagtatcaaatgttggtgctcctgttgcctactctgcttggaatctgccaccttctaagtccttttttagtttcgtgtccaatcctcctgctggtgatagtggtctgggtcttagagtgcgaccctctcctaaagatattgaagtcttggttgcttctctttgtgatcttcccaatgatgagaggcaagttcattttgagatgccaacgagtccagatgatgcaaaaataaatgttgtactcgatatgttggctggagaatcttctgactcgacccctgctgaaacaatggctgttgtggttatactagagattg

SEQ ID NO: 142639 - DNA, 693 bp, Zea Mays
gcaggagagggaactccactactttcaccgctagcgatgaattgccgactgtttttccgagtcaaaggaacttcatcttctccctcctcatcatccacattagcaacacaggcagcacccccattgggatcagcaactgatttggtacacccattgggatcagcgtcagtaaattcagtcgcaggcacttcttcagcatcaggaaccgaggtaccaacgtcctgacccaaactgggtacttgccggaggcgtctccttttctttttctgttcatcagcagaaggatcggatggattggctcggcaagggcgcctcgggcgagtaccagcaggtttctgagtatctaaggtcgtaccagcctctgggaggggcgccaccaccaatgccccagcaggagcagcgtcagaagagtcctcagccagcaaatcaagcatggcatttatcttcgcatcactagggttcaggggcacctcaaaatagacctgccgttcatcatcaggaattcccccgagtgtggcaaccaaggcactaacttcttcagcagagggccgcactctaaggcccaaactgccgtcagtagcaggaggattcgacacaaaaagagtgaaggctttgggaggaggcaagttccaagctgagaatgccacgggggcaccaacatttgacactttgcctttaaggatcatctcaagt

SEQ ID NO: 142640 - DNA, 370 bp, Zea Mays
gtttggttcttgtattttgtttggttcacgtcactaacaaagtcaaatagctgaaatcggattacagagccgaaggagcggaaacaaaagtgtatgtcctgtttctgattactttgtatccgattacacgggcggcctacaccaaacaaaatcagatggaaacataccaaacaaaatcagatggaaacacttacagctgaaatgggaacacgtacaattacactgaccaaacagcactagttctttccaccaaaagtaccatgcatacatagtagtgcctgccagggatatatacaaggttacagcctcacacggcacaagttgagttgaaagcgcgtgccgtcagcatgatgtaaactgcatgctgcaa

SEQ ID NO: 142641 - DNA, 324 bp, Zea Mays
gtcgcagaccaggggcataagggccataaatgcgctgcaatccaaggggttcataggttatgagtgcgctgcagcgcaaggggttcggaggccatgagtgggaagtggacagatgcaactgccgtggctcgactccaggtgtagttaatgcgtctggtcacttatggcgggtcggtcttgggccgagcgagggatccacttgattggtttcccttcggctcacatgaccccctgtctagctctgccatgcccgaccccaggctctatgtcacgggattcatctgggggccgatacttctagggaagacgtttcctttctccacc

SEQ ID NO: 142642 - DNA, 285 bp, Zea Mays
ccatttcaatcatcaatattaaaggaactagtaaaatagaataaatgtgatatatctttgtgtcttgatcatgcccaatatttctttgttttcgaagcactctcgttagtattcagttaggttatggagctcttgtgtggccatattttctaagccttgagtttgttaggtttgactcaaaaagcacccctttgattagaatgaatgtcttcccaagtcaacttctgtaactctgaccacactcatagaagaatgcaccagcttcaaacatatcttcatatcgca

SEQ ID NO: 142643 - DNA, 460 bp, Zea Mays
ggagaggtggattcatcgtttggtctccatcgttcattttcttcttcttccttcaaggggttagtatcacaagaactaaaggaagtagaagcatcatatgaactatcatatttgaactcatcgaatttacttttgatcctagtccaaatatcatgcgcatcaggaatatgttcattataatttgtaatgaaggcatgctaatcttcttcgctaagagaattgcctaagatgtcaagagctagatggtttaagcgtatacatctttgaccttcctcggaagcatcataatcagagggtatgatactctcatctataatttgttctaatcgtggatctatagttcaaaaagcatttatcacactagtagaccaagaagcataattagaacaatcatcaaataaaatctcaagagttacctccttccgagttgtgttcttgttcttttgggatcttctttgag

SEQ ID NO: 142644 - DNA, 494 bp, Zea Mays
tcgcccacaaatcctatcctcatgcgagcaattcagcaaacaggcacccacgctctgaacggcaaagcaaaggtcccgcgtctgtgccccgtctgcggtgtgcccaaaccaatccaatccacacccacatggtcagttaaaactgactaagccaccgtcacactcataacacgccccatccatccagattccagatcataataccaagcacgaagccgagatctgcagaccagagcagagcagttactcaccctagcggcggcgcctacgtcgggcagcctggtggcgaggtcccggacgacccgggcggcggcgtcgaggccgtcgtccttgggcacgggcagccccacgacgagcaggccgtccttgtacccggcgcccccgggcacggcagcgcccacgcggacgtccgcgaagccgatgcttgccagcgtgagattcctgccggcggcgcgccccgcctcatccacgcccatggctggctgctccggccc

SEQ ID NO: 142645 - DNA, 1732 bp, Zea Mays
ctcccacttgcagcgctacgcaacacaacagtgacgcgagctcgttggtatgggtacggcctctccctctctcttctctctcctctctgtctctaacatattcacagtctatctttcactaaagaatatcctacatatgaatctacaatttgggccacctggtactttgtccctatgggtcagggacttgagctggaatttacagtctagtggtgccacgggaagctcgcttcaccgatcttgcctgctacttggggttctcctatgcaactagagctagtagcactatttaacaccccaccacctgcccatttcttctcccgtgcacttggtcttcctcctccagtagcttctctccactccagtccttgactaccatttcatcatcatctgtgtatctcaaacttgcttgcattgcttgccctcactcctaccatccaagtttctttctcggtctctggcaagacttcgttcaccaatatctccggcccagacagccacaccaaccgagatgtcgaaccggaggtcacggtccaggcagtctggttcgtcgaggatcactgaggagcagatcagcgaccttgtatcaaagctgcaggacctcctccccgaagctcgccttcagagcaatgcaagagtatgtaactgaagttcatatcgtaatatcgtacgttaccactttatcagctgaatggtatatccaaaatctctagtatgttattaggttattagctgaaaaattagcattaccatgtggcggcattcgctacacattgaggcctaagaaatgtgatctgatacggttgtactggtacctacggccgacctgttagtacgttgttacaacgatcaaattggccaaaatttccagtcaaaagttgaatggcccctactatatgaagcatgaagcatcccatgcagcaattcgatgtactcacgagcttgtcgatcaaccctttagttatttgcttcatgtgagatgagcttgagccgacggtccggtaaattgttctccctttaatttgccgtcttccccatgcaggtgccatctgcgagggtgttgcaggagacatgcaactacatcaggaacttgcaccaggaggtggacgacctgagcgagaggctgtcggagctgctggctacgtccgacatgagcagcgcgcaggcggctgtcatccggagcctgctcatgtagctcagacatctcgcagcattcgtagcctaagtagagtgatttttttttgtacttgttggagaggcagcaggtcaattacctaatacgcccgtgtacttcgcctacgttgtccgtctctcgctacctgagccagaggccagagctatcttttttttttctgtgtacttaatcccatcgttattggcgcaatgcttacttatatcatttcgtgtatctcttgcaactgtgctacccagctagtggttggcgaaggagcgccgcacctcgtcacctctttcgcctagctttctgcctcttggagtagaaagcgagacctgtcttgtagttttttagcaaatacttcttgatcttttaatagagtggtttcgttggagaatagctgaatatgtgtgaattgattttggagtgacttggtgagaaataaataatgagcagtgatgagaagcttttttagcttccaccacatcctagtttaaatgaaagttctatttctacggttctacctgatccggggattacaatctatgcgaatttttg

SEQ ID NO: 142646 - DNA, 1365 bp, Zea Mays
tagagaagaggcacatttctggtttggctcggcgcaatgttaaataggcttgtccaatgtgtaacggtacttcaacatcagtgaagatcggtgcagatcagtgttctaatttggttggttgtctagatgcaggccccatctatttgggtggtgaagtgtgaggattattttgggttatatcatgtccctgaggcgatgaaggtggtagctgcatccatgaacatggaaggcactacagcacgctggctacaggtgtacagactgaagggtggattaggagactggagaggtctggccaaagcagtgatggagaagtttggggctgatgtttatcctaaggccatgagaaagatgatgaatattaagcagacatgagaattggaggaatatatacaagagtttcaggagttgagatatgctactgctatccacaatccagaactagatgagatattttttgttactcagtttttgaaggggttgagaagtgagttgcaaggtcatattatggcacaattacctcatacagtggataggtttgaggtgctagcccaggtttaacaagagattattgacaaaggaaaaggcaaattccacaaaggggtgttgccagcaaagatgggagtcagcaacgggactgtggtaagaggagtggcagagaataggggatgtagtaaggagagaactgaaagagtgcatggcttgtgttttgcttttgggagaagtatgaaccaggacatgcattgaaatgtagcaaggtattggctcctcagttgcatgttttgactcaggaagatgtgaagctgcctttgtcccctaagatgtgggaataggtggagtaagaggaggaacaagaggagaaggaacatcaattatccatgcatcaccaagacatgcaattcagtgcagatcggttttggggagagggagtggtttggagttgagtacagtattgttctagtctatacacattcagtagcacatccagttcttaggttgtttcgttaggggcaattgatctcgcagggatgtccaacaacaatgatattgttgttaacttgattcttgtgtataattggctacctccatttaaatttatgcacgggtacaatatagaacatcatgaaacattaatgttgttgatcactaacttatattattttcttttcagtttcaaagctgcaagatttctacagaatccaaagactacttatttcaaaccggatggcgtggatcactacctccatttaaatagttttgcttatttcactacgatgaatttcagatttgtttaggatatgagtcatatgttgtttatatctttgtcccaaaaatacttgaacacgcatcaagcggtgattattt

SEQ ID NO: 142647 - DNA, 642 bp, Zea Mays
atctcacataatcttccccatggctgccttcagccagggaaaagctatagtgaggatgagtgacattattcacataggccttgctttggcccatggctcaactggagtgagcgatgcccttaaggccacacactaggcaccacctcaggcgtcaaaggatcatgaccactcgatgaatgtaattctcctatccttgcatcaagaccgtggtgaggcaaatcccaagaatgaaggttcctctataaaatggtcacctcgataagctcaacgttgtcttgactttggcattaatggtgtcattgatcaccttaatgccatggaggctcttctctgcaacccactaacacatgatgtcgaagaatcaaccattgagtagtgctggcaagacatcaccaaattcatagtcgccattagggttaaccctaacccttctcaccccatgcaaccaatcttcaaaaaggttacaataggctatgatctaccatctttgtgctcccaagtactaactatgtactacttgggttcagccaccaagtctatgatcccgcatttagagctatggtgtggggctccacatccttgaagtagccacatgcaccgtgtcatcaacttgggtgatcggatagagcccaaggtgcacct

SEQ ID NO: 142648 - DNA, 1040 bp, Zea Mays
aaaatagccaaaccatttagtctttcttgagacattttggacctcaaataattcttcagcaacttcaactttgaaaaacttctttcagctgatgcaacggtcacgggcacagtaaataaaagtcgataagcaatagcagtattaggataagaatccacttctctaacatactcaaaaatatccatggaagacattggcttatctgataaagtcaactgcaaaacactaagctctgaaattagatcatttagatcaacatctgatgagccatcaaaagagaaagtgtttgcaaatttggtgcaacattctcttagttcaatagtatccaaggacttcaaggttatggagtccatcaaaaatccaaatatgtctttgaatgattggagttcttcaaatctactttttaatgaactaattgcaatatcaaccatgaccaaaaaataattaacttcaaaagctttttcagcttcaagatttgcttcctcacaatcagtttcatcatattgtttcttcctcttagcatgacgttttactggaaatgatggctctacacccaattcagatgcaatctctttggcaatgatcaaactagaagcaaatccattatttctatagttctgaaagtaattcactgtatcttctattctcattaatgtagcatcaatgcacatggatgaggattgcaactgcttgctcactttgtttactgtaaataaaatatcataccaaataaccataccaagtataaaatcaaaggtaccaagaagatcaaataaattttttgcatcactcctatcctttggttcggtatccttatcggtactcaactgaagcaaagctgaccttatctgaggagcttgaaatcttattgctttgacacttttaatccgactctcccaacgagtattgcaccatgacttcacagttaagctttcaacatgatccttcaaaacatcccatcttttagtagaactagagaacaatgtatatactcgttgcacaatcccaaaaaatgaaatagctttgccacaagatttagc

SEQ ID NO: 142649 - DNA, 583 bp, Zea Mays
ggatgtataagcaggtgggtaagcgaatggataagcatgtggtactatccatggtgcttgtagtaccagttgtgttggtggaaccagcttgaccacctcctaggccatttgtagtcgaccatgtctctcgttctatatggctttctattgcctgcctcgttaatgttggtgattgaggtcgctttctcggcgatcgcatggagcagtcttcttgttgacatacctagagaggagatgatcgaaagtggggccagcgctaatgagccgccaagatgttctagatatattttgcttacacgtacctatctaacgtcatcgaggcctcaaattcctagggcaccgttgctgctagccatctttggactatcatgcctttgtagacagactatccgatgagtactagataagggcccttggcggggtggccgatcgtgcttgcctcctgttctattcagacctaatggtgatcttcaacgtatcttttttatcgataccctgtaaccggggtaccctctcctactgtgctaaaggtagataaccgcgtggttatttgtaaccatgtactaaggaactgataagccgg

SEQ ID NO: 142650 - DNA, 704 bp, Zea Mays
ggaagaaataactcaactctgaaagcgctagctagacatgcttaaggacatagcctcgaaccatcacaggaagaatccgttcaatccatatgtggaagtcatgactctttatccctaagactcgcgaagtagataagttcacccccgctactcaggttagctgcataaccatcagggaacatcaacatcttgattcactgaagtacttccttcctctgggccctgcttaggacgaaatcggcattaggccttctccatgtctttccaccactaggcagcttcatctcttggtttggtctatcacataacgctgccagatccactcttgcctttatgttatcctttgacttatcaggaatgtccataattgttgtccaaagtgcctcgacaacattcttttcattgtgcatcatgtcaatgttgtgtggaaggagcaggtcgtcataataggggagccgagtcaagcccgacttatgtgtccacatatgctgctcaccatatcccacagaaccaccttctgtattggccacgagcccatctatccgttgatgaatttcggcaccagtcatcgttgcaggtgggcggtctgtcactacgacacctttcgtaaagttcttgatgtctaggcggaatggatggttaggagggagaaattgtcgatgtttatcgaacgacgaatatttgccaccctttttcaaccaaat

SEQ ID NO: 142651 - DNA, 293 bp, Zea Mays
ggtttattccttaaaactacggggtctcttttgcgaaagtgcaacgacgaagggttacggtggatcccccgccgcaggattagaaatcaagggcctcgatcaacttcgtcgattcaatgaaacagtgctcatccagaaccgtcgatcgagtgatccacgaccgagattctatgtggacgaaggggtatacataatctaatctaaatcgttgcttctcggatctgcggtcaatatcctaccgccatcccgatctaatcctagacgcccctaaccgatccaacggccaggaggcc

SEQ ID NO: 142652 - DNA, 382 bp, Zea Mays
ggctcttgggtcattaggacatcctactgctcagaggaggaaggatttcctcacctcttacgaagttgcgtgcaacgcatggggatccgcaagaagccagaatatgtctggaaggaataccgcgaaaatggagtggagaagtgctctatggcggtctacctgggagaaagccgaagttacccaaaccaccctcccttccaagtcaccttcatcgggcaccgcttcctagacacttgccaaagtgttgcccgaaaagcccttaaacagctatgccaaaactacagcagagaggtctttgaaaccccccttcgttacttcccacctagcaacaaaaatacccccacctggaggaaaagacttcaggccctgtcagggagagatc

SEQ ID NO: 142653 - DNA, 424 bp, Zea Mays
catctgaagttctgattctattcatatccttccttgtcgatgttgatcttctcttctccggtcttgatgtcttcaaccaggttagggataagaggttaagatagatttgtaggcagtgacttagtaggtagtgtagctggtttagtaggtagttataagttgaatgagattagttagaatgtagtttgattgtttgcttctagattgggtggataagttatgtaacctgttatataggtcgagttgttgtgtctggctgagttgatctaagtcaccaatttaggcttaagtgaattaggagtatggcctcatattttgtaccaacattaagcaacttacattagattagctcaacttaaggttagccttcgttaggttagactaatctatcacattagatcaggtctaggttagattggtatga

SEQ ID NO: 142654 - DNA, 551 bp, Zea Mays
aaacattggttgactctttcggtctgcccgtccgattgagggtgataagctgttgtgaacctgagatccacacctgccagcttaaaaagttcttgccacagagcactagtaaagatgcggtccctgtctgagattaaagcctgaggaaaaccatgcaacttgaaaatatggtccataaacttatgtgctaccattaaagccgtgaagggatgatgcagaggaacaaaatggctatactttgacagtttatcaacgaccaccataatgcaattagaatgatctgatagtggtagaccttcgatgaaatccattgaaactactttccatgctccatcaggaactggaagaggctggagtaatcctggatatggaaccctttcagacttcgcttgttgacaggttggacagttgtgacaccactgttgaatttgtttctttagcccaatccacctgaacagtttcttaatcttgtgatatgtgactaggaaccctgaatggccacccactggtgtgttatgcaaggtctcaaacactttctgagggaactctga

SEQ ID NO: 142655 - DNA, 543 bp, Zea Mays
cgacgatcctagctgttagatctatgatcaccggccacgattataagctcaaggggggggtatgccacgccgagccttggatcagagaataacggtggtgattttaaaatactggagatcagttcctgatcgtggataaacggatcaacggctgcgatcccctggtccgaaccggtacccttctcccaatcacgcacgtctgattagcaaatcaacggtcacaagatcttcttccccaaggcgacagccaggttgcatagggccgagccccatcctcccgagcggcgtgagcacccaaggtggccgcgcccggcgatgcccaggcaccggtacagaaatccctgtgcctggttctcaatcgcccgcagacgacacacccatacctcatgaagtccggcaatccccctcgatgccccccagaacccagcgacggcagcatccccaccgaacgcaccacagcaaggcgaggcgaacaacgatggcagcggcttcaaggtcaaccccccagcccacactttgatttattcacggtgtttggccgac

SEQ ID NO: 142656 - DNA, 485 bp, Zea Mays
tccaaacatgcacatggtggcgtttcacgagcggcaaatggtcgagcgagtcgtcaaccgtccaggtgttgataggtcgatgctcacagcatattttgaggcgaatagtcttcacgaggaggctcgtggcatcctatatcgtgacttccctgagtggtacacttggcagagtggtaagggtaaagtatggcaatggaggaaacgagatacaggtggacaagtcggtaggatagtctctgctcatccggctgagggggagcgctactatcttcgtgttctactaaaccacgtgactggtgccgcctcctatgtggatctaatgacagttgatggtgtcaccctaccgacttttcgtgaggcagcagagagaaggggactgcttgagtcggacaacacactggatgagtgtctcactgaacgtgctcttttccagatgccatcggcgctgcgatggctttttgccacaatactggtgtactgtgagc

SEQ ID NO: 142657 - DNA, 624 bp, Zea Mays
cgactgtcttctgagttggaaagctgatcttatgacaagagctggtaggaaaattatggttcagcatgtgctcaccagtatgatcgtctatttggctatggccattgattttcctccttgggctttggaggcagttgataaaattagaaagggttttctatggaaaggtcgcacggaggttaggggaggacattgtctggttgcctagggaagggtttgcagacccctccatttgggaggtttgggtatttctagtttgaaggaattatgctgggccctttgtatgagatagttgtggcttcataaaactgatccaggaaaaacttgggcaaacctccctattcaagttccaaaaaaggcaagatctttcttctccactgttttggtctcaaaagtgggaaatggagcacacactttgttttggacatataaatggctcttgggccagaatgtgtgtagtgtggcgcctaggttattcaccatcattcctaaaaggattgcgaataaaagaactgttcttgaggctctttccaacagaaaatggatatctgatataaagggtgctatgtctgtgggagttatagtggaatatttgaacctttgggagcttctatcagaaatagt

SEQ ID NO: 142658 - DNA, 272 bp, Zea Mays
aaaatatacataacaacaacaacaaatctaggtagaaactctcgttgtgcatacacccatctccactcgtttctccacatcacgttcagccccaaatagacaaaatcaatggagagtgagtatagatgcatcagccttatcacaactccacgcgagccatacacaccaaggataggactgaagactcctcacacctcgacgtggagggctcgaccagcattggaggagtgaccgtctccacgacacgaggaggcagggcaagggccgccggc

SEQ ID NO: 142659 - DNA, 307 bp, Zea Mays
ccgctctgttccgctctgctccgaccaaatgcgcgattagagccgcccgcgagatcgatccccgcgcggccaaggatcatcggccgccatggcgtcctcgcaaggggagtcggtacccccgtggctcaagtctctccctctggcgcccgagttccgccccaccgtggccgagttcgccgaccccatcgcctacctcctcaagatcgagcctgccgcggcgccattcggcatctgcaagatcgtgccaccgctcccgccgccgcccaagcggaccacgctcggtaacctctcccgctccttcgccgcg

SEQ ID NO: 142660 - DNA, 418 bp, Zea Mays
cgagtgtacagaggacggtggtagctgacggtcttcaagcatgccaacatggggagtccggggtcgttgtcaccaccggtaacgcagcagcgtcgacgacgaaaagaaaaagtgacagcatacgaaaagtgcgagcaaccgtgttatggaaagcgacgaagcggtggtccaacactaggaccacaaaatccatcatttatagctaaacccctacgacaaacaatactgccataaattttcttaacggtcacgtctagcgctcccacaaggcggatcaccaaatgatcggcagtgttcgtccccttcaaatagagaatttaggattggaccatcagaacgaacaattccctcaaggggggcactgttgggccagatgccgaactagacctcgatcaacaccgcgtaggtttacccctcg

SEQ ID NO: 142661 - DNA, 302 bp, Zea Mays
gttttaaaaagtgtgtcgtcgaacctgtcctcatatttcttaggacagcaaataaaccaacttctgaagtggaagattcataaaccttgtattcatcatgatgagcataataaaattaatttcaactgacgaagagggaaaaactggagctgttatccctcatttttttggtacctaaaatagtgctggtcccaaaggggcttagtgcatttcagattttagaatggcagaatccaaatacttgcaacctaaaacatcgatccagccaaaatgttagtggaaataggtagctgtttagaacg

SEQ ID NO: 142662 - DNA, 495 bp, Zea Mays
taagatttcatttatgtttaagtgtagagtttaaaaaacaaaggcatgttggttaggtggatgtaagacatgttagctagatgaacgtaagggcttgttcgttagggttggaattggctggtatgatggcctgatccatgggtgtcatcccaacctggatcaaatatcagcccacgaagaaatagttgttcgcttagcccacacgtgtttacaaaccaggcccaatccacacgaaaaacctcaaccccggcctggaattcgtccacaaaccaacagtcgtggaactcatcccggccacactgcgctgcccacggtgcggaagcgagcagtggcgcgattcgagacgacggcgacacaaggcttcttccgccgctggccgccctcttcgtcagggctcttttctcctgtgagttcttgcttcccttctcctctcccgtgtctatgtcctagggtttgagtttcttgccgacgcttcacacttcgctgatggtcgcc

SEQ ID NO: 142663 - DNA, 677 bp, Zea Mays
gctttgtagcctcttttttcgtttcttcttcggtttccaaggatttctccttggcgagctctgaaggcccagcttcggcctcggtatggctctttgcagcttcgtcttctgatggttttgtctcaatttgtgtttttggcgcttcggcaggtttcttcggagtggtacttgaagactttattgtctccagcacatctagtacattgaccatcctttttctcttcggagtcgccgtgaggtctttttgtgccttcggcactgtcattcctgccgaagggcttgtaacttctattatctttgttttctcagcctctatttcttcaatattatcggccttcggcatcatagtcagctcttcattcttctgtgcaagagcaggtcctttggcttcagtagccgtagaggtctcaccaccaaattcgggcactgtggccggttcaatgaagcgtggtcggtgagtaaggaccttcacctttttcctctttggcgcggactcacttagagtaactgaagcatcacttttcccagaagttgcactttttctcttttgccctttcagcgggtagcggtaatcagggtacatatacccaatagcatcgaaaactctattcagcctcttcttcttccggcctccgaaggccgcagataacgcgttatcttctgcctttgaatatggc

SEQ ID NO: 142664 - DNA, 774 bp, Zea Mays
cgggctttcggttgaagaggtggagctcggggataaagcttaccctgcgactacgtctacccctcgcctccctctatccatgcgctggacccgagcatcgaagttagccaccgtcgccgcgcgccatcggctgggtgagagaaggccaccgtccgtcgttgtcgaccagcggattcaccgacgtgcgtgcctcggtgcttgatctggggtgatcgcgacgtcgtcccggtggtgtccacgggttcctcggcccctggacttgttctaccccaccggaattgctcgctgttgtctgcagaccgccgtggaccgcaaagcttcgtggacggccatctgcgcttcacggctgacgctaggtaccccctcaggcaattcaatttttctcacaccgcgttttgcaaccttcggggcagtgaatagtgggtggggtcaccggagggccaagcaccggcgagaccgccgccgcgggcactgttttcgtcgtcgccgagaccgtaaggaggaaggacataggagcgccgtccgataacgatcgtatggtcgagagagatcgcagggataccctttcggactttgatcgtggaccgttggatgtgatctgacagacccgatccgatctcgcttgcatagagttaccaccgtcagatttagatccaagggtctagattggataccggttcgtttaaacaaccttctaatcttagtcgtccacttacgatccaacggctgagatctgtgagtaccccttcgccgagcctgttttgttaaaaagcc

SEQ ID NO: 142665 - DNA, 562 bp, Zea Mays
cgatgtgctcttgaactaaatctctagtaccaatgtaggtacatatggtgttgaaagccattaggcatgcttgcacttcattcccaattgcgatcgatggccacctaatgccaaaacgtgaccatatgggacgttgaatgatgcccctcacatcctccctctaattcagatcattcttcacgtaaaaccattgcttcatccaagagcctggcgacttcttccgaaatgtaggcataggataatttgccttagaacggggcacgaagctgtaacagccaaagttgttatgatattgttctttttcagttgccttcgtctggtaagataactcgtgaatattgcagaagcacctaacatccggctctagtccctgactcctcatagcctatataaaaacccccactttaataagagctacgggggtaagttgatgaagatatatctcgaatgtcttcagaacctcaaccaacatcttgtggagcggaaagcgaagcccagctttcatgaagctcttaaagaccaccacctcattagcttcgagaaggggaacgatgcttccccc

SEQ ID NO: 142666 - DNA, 278 bp, Zea Mays
gggggatggccgctgttgtcgacgcacatggtcggcaccaaccgagcccatctgatccccgtgcgatgtttgccgcaaagcgtcgcgcgtgctcgtggctttatcggagcatggggagcccagagccaagagggatttctcaccggaggggttgccatcacctagggcaaggcatcgatccgcagccgaagaacttcctctagcgcgtgggcctgcgcagcaccgtaacccgcacttcgtcatcgaccggccctgcctccatcaacggtgagacttcc

SEQ ID NO: 142667 - DNA, 312 bp, Zea Mays
atcatctcatagagagcacttggttcttgtgatgaccaagggggagcgatacccttgcgtgggtgctccaacgaggactaggaaagagtgccgactctttaatacctcggcaagaaattggagtcttcttacccttgctttacattccgcatttactttgagcacttcacttgttcaattgcttagcaagtatttgaagtaatgacttagggttgttatttttctagtagtatttatttatttctagtagttgggtgaagttgggctctttcttagggtttaacatttgtggaattttagaaaatcccaatt

SEQ ID NO: 142668 - DNA, 521 bp, Zea Mays
cgcggctattttggagaaatcaggctgcgatcacgtgaaagctttgactcaaactgaagctgccttatctattgaagatacaaaagacccctcggccgaagcaagcttagttggcgggaaattcttcgctgatatctgggaaaatggcggccgagagatggcgcacaagataataaaaaagagtgaaaaagattctcatgatgcaaaagaagcgacgaaggcagctgagaaagctgcggaacttgaaaggcggataggtattgcttaattgcttttgactttgtgttttatttctgcgacttcgaacttatttatgttttgtatcgcagctgagctatctcctcccccggagcctttcgagccaacagccgacccagaagcaaagagagaggaagaaatcactaaaatggccgaagctattttggataaagctatttctcaactgttaaacgaagctgcggaagtagttttaaaagaagaatagctgctattgtaaaaacatttggaatgtaatatttgct

SEQ ID NO: 142669 - DNA, 277 bp, Zea Mays
cttccttctgtctcaatacattcattgcgtatactgtatggatatgacttgttcagaaaatctattgaaaattcctagccgtccccccaatgggtgtggccaagggacatattagtacgcagtgcgtttagcatactgtcctggagtagtaacttgatgtgaccgcggggtgtaatcatatcgcccgagcagttgatcttagtccaaatggtgtcgtgttacgcgaaacgatgtctgttgcctgacttattttcaggcggtttgaattgctcattga

SEQ ID NO: 142670 - DNA, 416 bp, Zea Mays
gtatcgcaaggatacgaaggctccagttctcagctaccgcaccaaatggccaaccggctagaaaggtgaatggttttatatcaaggccgatgagaagaagagggggaaactgatgacgatggtcatgtgcccgctgactttaaacttcggaatgaccaggcccctgtgcaacatgtagctagggccagcatgctagctggccgaggtagaattcagggtggtggctgaacaaatcggcaccagggacttggtgcaagaatacctagccaaccgaacgtacccaacgccaagtgactgggtgatgccgaagatgaagggaacaaagaagaaatatgaacttgttcaattaccttattgctttaaatttgaaaaacagttcaaggagccttgccaagaatggctagacatgattgaaa

SEQ ID NO: 142671 - DNA, 322 bp, Zea Mays
atggtggcacactgacgctctaattcatctttgtgggctgctggatagcgatatagccgcacagccaccggtgccgaacctggcagaaggttgatgcaatgatcgcgatggcgcggtggtggcatacctgaaggctcagcgaacaccggcgtgaattcctccaataaggctggaaaaaggtcatcagagctgcacacccgaactgatggtgcccgcgatccggctacgccggtccagcaaacacgatggtcgtgatgccagaacgacatggtgagtgcactgaaatcccagaggatgggtccaagagaggccaaccattctg

SEQ ID NO: 142672 - DNA, 723 bp, Zea Mays
aacaaggtgcacgcacgcatcaatcggcacaaaatgtacgaaagatgtggtggcactcactttccttgcaataattctcctgcatcttttattgttcattcatttcccctctttcacatgttgcgaattagacatgtgaaccatgaatgagtaattctctgcagaggaacctgaaagaaaaaataaaaaataaaaataggctacaccacacatcccagtaattctcgagtccgtcaaagatttgtgcttgagtgcagatcgtctagctaatggctcggtgggtgattgcagtttctgaaggtgcggctgcatgcatgtgcgtgaggaatgaatgattgggcagctgagagcaaccttgctttgaacaggaaggcaggcagccattgttttcagataagcatcaaggcgacatcaggcgtgcatgcgtgttaggtttcggtggtaggggacgaaacgaaaggcatgcctgccgcactgggctcaataactcgcctcgtccaatggccatgtgtgggctgaaggtcactgttctggctttctgcagacctggtggtctaggttctgctgccggtgcccaatcatttgtggcgatgagctactacagcaaggaactgcatgttctggaggttttcatttgtcgcaaaaaaagttgcgaggaattaatttattcagtttgttgctggattgtttctcatgaagaaaaacaaaaaatttctgtcgtca

SEQ ID NO: 142673 - DNA, 414 bp, Zea Mays
tctagcatttatttttgcattaaaaagtattttccaaatgaatttatttgattttcttgttatctggaccaagcgcatcattaccagagagtccaggggctaaaccataagttttacgcagacacagaactcccctgagtggactgcgggtttatttatactaaatacgggggctctttagcaaatcggcaacggcgaagaggtaccgggaattatggaccgttggatcaaccgtctgcggtggagattagatcgagccaccgccaaaccgatatacaatcctacccatccgatgataacccaacagccgagatattatttcgcgtggacgaacgccgaccgtccgattgtgaatagaggaactagattaaaatggcgaaacgctactgcgcatctaatcacagccgtcgacac

SEQ ID NO: 142674 - DNA, 571 bp, Zea Mays
cagtgagtatcaggagcaagtaagggtgctgaaacaagaaagcagagggcaagatcagacctgaatcgagctggccacgacgaggcctctttcacagtggcgaaaagcaggtttggaggaaatgagaaattagcgagctctgatgacaattgagggcacggcttggtggcttggtgcttgactaccctatggagctcatgggcgtgatcaatttatagagtcagtgagcggtgttgtttaatttgggcgaatcgtgctggcggccgagaggggaatgagtcacagcggcgatctaccgtggcaaccgcagagcgacggaactacggcagtcattggatagtcacttcggctcatactgacgcgataaacctcctaaggcgtggcgtccaccctgtgaacggcgaacacgcccgtgattgccacacggccatgtcgtcggtgtgcactgatgaaccatcacgcacacagtacattccagcccatccgcggcgagatctttcaccctgtgatcgttatccgtgtttaattcagcgtgactcacagcgatagcacgaattcgcgcgcgtggtcg

SEQ ID NO: 142675 - DNA, 683 bp, Zea Mays
ctaactcaccacaatccggtgcaaaacaaagaggggacggtagagggattaatagtggtgatcataccgagaatcaggtcaccaagagctacgacaacggtgcacgacggagaatcaacaccggcgagaatttagccgttcaattcgaacgccccgccgcctgtggtccgcccggttaggcccctgatgcccacaagtccgtactctgaccccgccttccgccaatggcacgcgacactagtgaatctgccggtcaacgacgacggactccacttcgagtttgcggcagcgatggtggcaatacggcacagcagacgtgggtgcgagtgggcgaggagaggggaaacggtcgtgggagctacgagtttatagtgccagggggaagaaatcgattccggggcaccagcaaccaccccccggaatccctagcggagatccgagcttatcggagtcgtgcgctcacgggaaggagacgagcctgacgcctggggcccacgcgccagtgaagaggtgaggggcacccacagatgagcaccggccgaccgacgaaggggacccacctgtcggcgcacggtgctgtggcaagttgggccgcgcgggcgaaaatgcgtattgggccgaatacgagttcagggcccagttaggctaggttttctttattcttttctctctttttttttctt

SEQ ID NO: 142676 - DNA, 450 bp, Zea Mays
tcaagacccgcaacaaccgcgtacctttaaaccatgatgaccagagataggtacgtggaaaacaaatacgcttaaagcagctggtcggctggtcaaatccggcccgactttcgatcaattattgtccaaatatgtgaaaaagaaggccggccccagtgaccggccagcaaagcgacctcgctcacccattcgtgagcaatgtcaggtaagaccgattggaccaccccaccaatcagaagaaatggaaggtcatactgtccaattgagacctaacatacctacatggacacctccaccccttatccacctatgccatatccatacacatatttacctccaccatatgtcccaaatcaaatgtgggacatgccaccatatccatttgggatgccacagtaccccgcttgggggcaccccaaacatctgtattcaacaggttggcacctccag

SEQ ID NO: 142677 - DNA, 592 bp, Zea Mays
gtccaatcatgtccaatccccagcacgcaaatggccatgttacgggtatggtccgcagttgctgtgctggcaaatgatgctgctttgataaaaattcgcaagctttacatctctggactaactcggctgcattaatctttgtcatcggccagtagaaaccagacctaaagaccttcccaaccagagttctagatgttgcgtgtatcccgcattgtccggcgtgaacctcatctagcagttgcttcccagtaaccgaaggaatgcacttcatgaggactcctgttgcaccccttctgtacagtgtgtcccctatgagggtgtagtgggctgactgtcttgcgatgtgtttcgctgcggctttatcatctggttcctcttcactctttatatacctgatgataggctccctccagtcattagagtctgactctggctggctcaaaacattgcactcttctgcttgatctgaggaaatgctcgggcgtggcaccttctggacaaaaacaccagatgggacctgagttcgactggatcctagtttcgacaacgcatctgttgctgcgttgcgatcttgtaacaccccggtatccac

SEQ ID NO: 142678 - DNA, 612 bp, Zea Mays
aggctcacatccactccatccgcatgcacgtcgcatgcaacccaaaagcaaaatgcgcgtcagaaaatgatcttcccccgtatgcatggccatgtgccaatatttctattagttattggttggaaaggatgctttatgactaccctctttgtggtcctcattgtggccattttccagccatagaatcatgccacgtcatcgttaatccgagattaataaatatttgattacttttgagttataaacctgatttattccgttctattcacgatatattcgtattagcgtagtctacgtgttaatactaatgtttcaccgttaagcatgttttatataattaattaaatgttagctgaattaacattgttaaattagctctctaatcaaatctaattagtagcttttaacttgccccttttaaataaatgctgatagggtcagtactaaattggatttttttaataattgtatagtataaacatggcatctatttaatgattttcgtgtatcattcgcgcgtgtcgcagtgctgttcctacgcttgtgtcacgcgccttgccacgtgttgttcgcgtgtatcgcgcgttatccgagcgtgagattaaatcgttc

SEQ ID NO: 142679 - DNA, 394 bp, Zea Mays
catggcgatggactcctgattcaaagtgttagcccgcagtgctctacgttttctgttgcactctttgttagcatctttccgtcttggtgtcttattatacaacctaaggcgtacacgtctagactccctctcgacggaagtcatgtttttgtaccgctcgctaaagtaggcggcccttttcatagtatgcttaggtatgttatcaacagtttcatgcacataacctggaataaggcatgtctacgtttaacaatttgaaacctgctattttttgcatatttagccaagcgaacaatcatgtacctggtgttagaaggtctttacttgtgacaatgttgtttgcctgaaatgtctcattcctatgcaaccaatcgctgtcatcatctggatccag

SEQ ID NO: 142680 - DNA, 1177 bp, Zea Mays
gtccggtgtagaaattcatcggctttccacaaagtggttaggactgtgagtgtccatttgcggttgctgaatcttgtgcggcagcaatgtcgtgcgatgggaaattgggaatagcagatttctcaaatacacgttcttttgagatcattttgcatactcccaactaatcgttgtaattcctcccactgctcatctacataaaacataagagtgtgaacatcgttggatttacttatattgagtgtgagggcagtaggtcgaatagatgtaggtcacattcctcatgtcggatgagcttctgcagtcggtcaaccttgaaatcagccaagaacttcgcgtcaatcttcgacatcaattgtcttctatagtcttctagtctttgtagcacttcaatcgataggttctccatatatgactccatgatgttgctaggtgagatgtcatactgattctttggaccgaccatatggggcagatctatggtaggtcacacctatttatggatttttatctaataaatctaatatcagtcgtccccaacagagtcgcaaaaacatgttgacgctgatctggcaccaatcactgtgaggtgtatcagtgacggtgctctctgcggtggcacgaatggtccgcggcctagggccggatgatccgcgaccctgctgcaggagcgggtcttcccttcactgagccagacggttcatccaacaatacctgaatcttgccccccgggagggaccccatcagggatgagagatcataggtttttgtcttgaagtcggcagaccatccaagacacatccagacaacgtagggtcaaaaagaggtgaagatggaggtaaaaagaggtaaagatggagataaaagaatgctacattacagctaatcctagggcaagaaagtaaaggaatgaaatatagattgaatcggtcgtatcccttatatatatatagtttatatatcacgagccctgggcttccaatagctaggggaagtcctggcccaacggtgccatccggttcagccgcactagatccaagatgtctataaaagcacccctaggctgctagggttcagttttggatgtcccaccccgatgcacgagcgataatgcccatctaggcgcgtgcgacgggcgacgagcgacgattacctgagagggcgcagtggcgatgga

SEQ ID NO: 142681 - DNA, 294 bp, Zea Mays
aagataagaagcatgaagaatgttgcgatgagttcatgaggagctgtgtgctaggtggatctcggtgaggcctccttccattgttgcactatgttctcctcttcgcgtagggtctcgaggtggggagtttagtacatcgtagctgtggtttggggttcactagtgatggagcgcatcgactggccgcggctcattgtggtcaggggtccattcatgataatcggctgcaagaagtagactacctagttcgggtcgattagggctttgtgcacacgcgtttggaatcgagatccg

SEQ ID NO: 142682 - DNA, 545 bp, Zea Mays
tagccattctaatggagatgaaattcgaaagaaatctgttggagcgtaaccctcttagctagcaccatatcggaatccggatatggtgttaaatgggcaagggtcggattgacaccccactagtgatgtgccatgtcatgatctgggcacgatgtcaagcgagcaaggatcaggacactacttccttagtggcacgctacatcagtgtccaggtgtagtaaaaaatgtgcaaggattttcagatcatcatcgatgggtgtgaagggtaaggaagctagtcgagccaactagaatccgtttaggtagttggaatataaggttgctcataggtaagttaacagttagttaagatagtgactaggaggcgtgtaaatatcttgtacgtccaagagactaaatgaaatggtcagaaggtaaaggaggtggacaatacatgctacaagctttggtacacaagataactacaagcctgcaaacagaaataggataggagttttgattggcaagagctttaagaatggggtggtggatgtgagaaggcaagg

SEQ ID NO: 142683 - DNA, 322 bp, Zea Mays
caatgactgtagtagcacgtggaaaaccataacgatctggaggttcaatattgcctcgaccatgaagacaatgtccctgattagaaacaataggatactcatgattgttagaataagtatctgcaataggttttgcatcaagactagccgcggggatagagttggaacgacaaatatatgttttggtggcaggtggcttagaggagtaagatgaagatgttgtggaagtatgtggtgtagtaggaataagaatattaggtgtggttataggagaacattgttgaacattcgatgtggttataggataagattgtggcacaga

SEQ ID NO: 142684 - DNA, 1954 bp, Zea Mays
  misc_feature (909)..(909): n is a, c, g, or t
agcaagtccacgagatagggcgactgaccaggtcccttccgagcaagtctgcgaggcggggcaaccgaccaggtccttgtcgagcaagtccgcgaggtggggcgaccgatctggtccctaccgagcaagtccacgaggcaggacgaccgactaggtacctaccaagcaagtctgcgaggtggaaacctaagtccagcatcgcgagtctgcgtcaactatgataagatgcgtcaacctaggccgcagccaggcatgtgaacggtaggtcgagggcacaccgaggggtcactatcgacatgactgcaccttctcaagtacgacccgtggtgcaccccactgccctgaggggtcagtcgaccctgttcattgagacctcagcaccagagcttctacagtgactcaaatacccaatagtgcgcagccgatactccataccgggtgtatgcctatgcatgatggtgagtgacataatgagtcccggtggttcaccattcagagtgagtccatgctagcttcccctacgaacacaaatattattgtcccctgcttccaaaatcacgacatttggtgcgtcaggtaggggaacttttagcgtgccaatagacattcatcactccgatgacccacacattgacattcgctaacggcgaagctttcgcgtcggggagccacatcatgttcggtaccctcgacttcctcaccaccgccaccggcgagctccgcctggccacctctgatgtgcctatcaccatgggcacacaacccgcacgctccaccaggagcaaggcggtgcctaaagaggcgtgccgccgcattgatgtggcacctcaataggcacattgatgccataaaaaagaaggcagtagaagcctcgccttcaattctagtggccgtcatcggtcaccaacncgacatccatcctcgacttgcttgaggacgatttgagccacggctcgactggggccaactctgacgccgatgaagcgctagaaagggcctgcttcgtggcaacaccaccacaaaatgacaatggcagggggacaacgagtccgcccaacaaggaggaagaatatcaacgccaaccaggcacgcatccttgcccgcgagactgctcttcggcagcagcaaggagagcttgacacccatgttcgtaagctcgatcgagtttatggcgacattgagcataaatgcctcggggccgaacgacctagggcaaagaagatttatgattagcttgccaagagtagtgacggggcacaatacttcctcaaccctggtggctacaaccatgatgcttcggtccatccccgagcctaacgaactagaggcgaaggcgatataccgaaacctctgcaacctagtggagaaggctacggtatagcaggctgagatcgatcggcaagctcccatcggcgcggatagctacaacacgcgcacgacctcgtcttagagcagggggcacaaccctcccagtccgcaaaatatagcatccccgcgaagaaccatatcggggagatccgcaacgctcgacacctcctcaacaaccaccgctggaagtaggaggaggttgagcaggcccacgagcgaagccctatccctcccgggccagggccacgtgccttcgagcgcgtgatccacaagcacagttccctgtgaaggtgagggcgtcaaagaatatttccaagtacgacgggtccatgaatccgggcgtatggttagaagattaccgcctctcctatcgcatggcgtggatcaaagatgaccacctcatcatccagttcctccccatccaccttgtggaggggcaaggacctagctcgaacatttgccagccgacaccattcacaactgggctgacctcaaaaaggccttcgtcaaaacttctagggaccctacaaacaccctgatagtttataggacctcaagaggtgcacccagaaaagtggggaaagcc

SEQ ID NO: 142685 - DNA, 725 bp, Zea Mays
gcttactgtacaggagaggtgcaggaggagtcttcatgaaatgcattcacttggccaccgggagacaattgttagatgaaattcatgcctggcagtgtggggtacatgcaacatcaaggactctggtcgggaaggctttcagatctggtttctactagccaactgcgaagagcgatgctgccgagttagtccagaagtgtgaagcgtgccaattcctgtcaaaacaacagcacttgcccgcgtagcagctgcagaccattcctgtaacatggtcatttgcatgctgggggctgaacatgatcggaccttttaagaaagctcagggaggctatactcatatactggttgtcattgacaaattcacaaaatggatagagtacaagccaatggcctctttgacctcagttaaagcagtggagtttatccaggatataatattcaggttcgagataccaaataacatcatcactgacctgggatccaacttcaccagctctgagttcttcgatttctgcgagcaaaggagtatccagatcaattacgcatcagtggcacacccaagagccaatggccagatggaaagagccatcagaatgatactggaagccctcagaaagaaggtattcgataagagtgaaaagcttgtaggaaaatggatcagagaactaccatacgtggtctggagcctgcgaactcaacccagtcgagcgttgcatggaaatacc

SEQ ID NO: 142686 - DNA, 582 bp, Zea Mays
catgaaggaagaagacaaggcaaaaacaaggtttatcacacccttcaacacatacttcttcgtgcgtatgcctgaaggcttgaaaaatgtcggttccacgttttcaagactaaccaagaccatcctagagaaacaaatgggccgcaatattttcacatacgtcgattaaatagtcgtcgcaagaagaaacaaagaagatcatcggtcagacctcacagaaacgttcgccaacatgcgcgaagccagacttcacctaaaccttgaaaaatgcatattcagcgtccgacaaagcaaaatactaggttatttagtatctcatagaggcataaaagcgaactcagccaagatacaagctttactggacatgacaccaccacaatcatcctgagatgtccaaaggctaacaagaagactcaccacattgaacagattcatctcgcgatcaactgagcggagtctccccttcctcaaaacgctgcatggagcaaaagacttcgcttggggcccaaatcaggctgcagccttcaaatcattaaagtagtatttattcgaactaacaatattgaccaacccagaccacgc

SEQ ID NO: 142687 - DNA, 313 bp, Zea Mays
ggcgcatgtgcgtcgactatacggatctcaacaaacactgtccgaaggatcccttcggacttcctagaatagactaggtggtagactcgaccgccgagtgttcagtgttgtccttcttggattgctactccgggtatcatcagatcagtctagcaaaagaggacgaggaaaaaacaacattcatcaccccgtttggagctttctgctatacctccatgttgtttggcctcaaaaacgctggagtgacttaccagagagccattcagacatgcttaaccgaccactaaggcaagcgtgtagaagcttatgtcga

SEQ ID NO: 142688 - DNA, 457 bp, Zea Mays
attcgtttccagttgattggatctcttgtctttgtcatgttgtccccatcgacaagtggcgagaacatgcatgcactttatctcctcactggtcagcattggagatcataaatactacatgatgcacaaaatgaccaggtaataaaaatctacaataatcccaggtggtcctttagcaattctcctgtcagatcaatattcagttgtgatctcactgaattacttataggaagcctcatcatgtagtttgtgcgctactatggcgagatccacctgttgtgatgatgctctatggcgcacctatttcttttttatgggagcctcttcttagtaagtgggatgaagagctttggtgaagtttagcaggtggtcatctgacgattaggcgacgataaggaggtttttgatgagttgctaactgctaggtttgggagtttctctcatttcaggatgcaga

SEQ ID NO: 142689 - DNA, 350 bp, Zea Mays
catcctcctagctccacggcctctccaggggccatgaagcagtggcgtgacaatgttgaccgtctgctcggcatggcgcattctggctcagccagacctaggcctcggtcgtcccggcgtcaacatgaggcgtcaacgtcagtgcgctccccctcggtgagggctgcaccgactgagaacctgcgggcggagctcaaccgctggcgtgcgggagaggacgctccagtctctctggagaggtctaatgaccctgcgggcagaactcaaccacaggcgtgcgggcgaggatgcccgcgtctctctagagagggctcgtgagtgccgacagaacgtcgagggtcgcaacctcg

SEQ ID NO: 142690 - DNA, 657 bp, Zea Mays
ctgctactgccgaagtaaaacaagctgctccgaatgtgcagagcgccaaagaggccattgtagtgccgaaggtgcctacagtcgggccagtcgaagctgaggatgataaggccgaagagccagaggtggaaaaatagtgaaaatgccagaaatcttaagtcctccagtagaggcaaaattgccaaaagtgcagaaagctcctgtcgcaactcccaagaggagaaggattgccaatgtgctagacgctgtcttggagaccgcataggccttgagccctggtcctattaagaaaattgctgaagctgctaaagtccaagccgaggccgaagctgagcctgcagcgcctattgagacgaaggtcgtcgtgcctgaagataaaatttatcaacaggcttcaggtgctggcatggcagaagggcaagacgcggcagaaagggcaaaatctcctgcccccgaaaccgctgtcgaggatgctgattatatttatcgtcatgcttcggggaaaaagttgttcgaagaagaagttctggaagccagacactatgcgcgaaaattgaaatatacgaagggagctttagtgtttaacggcactaacgatgacgacttcctatactgtctctcggacaacaaagaaatatctgtttgccgagagatagc

SEQ ID NO: 142691 - DNA, 507 bp, Zea Mays
aaaactaattgaggtgaaatgcaaacgtaaaaatcagagaagaatgctggcatgactgtaaatctgccaaaaaaatgctgccaactgaaatgagtacaactagctagcctatgaataaaatatgtgatggatactgaaaaataataaggatcaaagcactttaaccaaatagttgatagatcaaagattccatgcgaaaaaatgtgtggacgtgtaaagaatgaacatattttaccatgtgaacataaatatcaccttggagcaatattaaaagtctctgtaattatgcatttaaaatcagcacaattaagcactcatataagacagattaaaattttatatgtgcacatgatcatgccaggtagttaatcagcactaacttcttccagtaggtagcgatgcttattcaatgcagctcctatcacaaattcacgttgtatcctatgttatactcaatgcgagaggatgcacatgaaaagagagaattctttcaaaatactcaaagca

SEQ ID NO: 142692 - DNA, 425 bp, Zea Mays
tattagcagtgtcattgattgcggcagcgatagcctctgcaagcgtgggaggtacaggcagcgggttcagagtttcctccccaccacgggaagttccagccccatcctgagcacgagttctggacgacatctgaagaagaaaacatacttgattattacatgccacgattacacaacctctgttacattattccaaacttgttctaattatacatactcaacttatacaactcacttttccttatttagattacataaggaaaccacatactactacactaatctagttatctatgtccttggctgctccagctccactgctatcttcaggacaacgatcattcatgatgttcatggaaggaggggctccaaagagatccaactccccataaggtcctccgctagttgctcctgatgcaccagct

SEQ ID NO: 142693 - DNA, 448 bp, Zea Mays
atggtgagcacgagctccggcgaggaacagcgagctccggtgagtctccacagacggcggggcggactgcgatggcgtggtcgaactccggcgacgaaccgcggtgaactccggcgaactacactgtgagagcgagcgaggcgcgagaagagagagcgagcgagcttgtgagagaggggtcggctcggccggatttatagagggagggcaccgaggaaggggagagaaacggcggtggcttcatggctttcattgatggcggtagggagtaatggcgaggaagaaactgttgtcttgaaggtccataacgcagggagaagaatggacgtcgcgatgcttcggtttcctggcaacaaggttgcgcgggtcccactggcggctcgcggtcggcggctgaggcgtcctggcgctgcttggtcttgagcgcgggtcgcaggggcacggtcgg

SEQ ID NO: 142694 - DNA, 692 bp, Zea Mays
cagaaaagcattgtagtttgatttggaatattagctatgctagtgtagcaattggacttactgaaatcaagctcttgtatagttaggagttgttgattctccttatctgaccgagcttctctacatctatgaagtgatggcttgaaggagcacatctacatttagcataataggcattccttgtatgtgcacattgttagatgcctatgcaaatgtccttgttgtatttgctattttgctctcatatatagagttcttgttgtagacggtctgtgtatatattcggtcctagtgtcctcatattgaatatgagtgctattcataacatggtatggagagccaaaacttagggttagagttatttctatctttacctaattgttcctctctcacgccgtttgttggctctgtcccgttgccttgcggctctgcacatcttcacatttggcccttttgacttggcggcactcatcttcgcgaccgctcgttggagttcgcccatcggcttcgatgacctgtctgtcggtgcttgctcttgctttcctgccctcctcttgctcgtgtcccttcccgtcggaggctcggagcacgttgcaatctctcgctcctgtcggctggctcatctgcccgccttcatgcctcacgaccacctttgtcgactgcaatggagtgccagggcgacgccattgaac

SEQ ID NO: 142695 - DNA, 545 bp, Zea Mays
cttcgagcttacagtccaaattcgacatcagcatcctctagtaatttgtcaactgtccatatgggtggactaacatgtataactcagccgacgacagaactggggtctgaggatactgttattgcacaatttttgaggtacacatgttttgactatattttacagatgtgtcattcttttttctgttgcttgttttggactgattatattcttgcgccttccatagtaatcctgcccaagttggaccaagcgagtctcctgtcctatttagtgaacagttggtgctgcatctacattttctccattggcatctaatgaccttcctgttagtgtaacgactgtctcaaccaatgtatttttcctgttgacctcatgactatgttgccatatattatcttctaagacctttctaaccttctgccaggaaataagtgctatggtgccccctccatcaacatctactgatcgtctgggatctattttacctgaacctttgaatactggggatgctttggagagatacaaacaggttgctcagaaggtac

SEQ ID NO: 142696 - DNA, 370 bp, Zea Mays
ctgagacatttcttcacctgagatacatggaagacatcatgtacatctgcaagatgatcgggtagttctagttgatatgcaacttctcccacttgctttaagatcaagtaaggtccaatgaagcgaggggacaactttcctttaactttaaatcttctcataccccggattggtgacaccttcagatacacgtgatcaccctccttaaactccagtaaacttctccggctatcatcatagctcttctgccttgattgtgcagttctcaaattctctcttatcattcgcacttgttcttctgcctcttgtataagtttaggcccaaagaactgcctttcaccagtttgatcccaataaagtggtgtcctgc

SEQ ID NO: 142697 - DNA, 432 bp, Zea Mays
cgagacctaggctacgggtgctagggactggcgtggcacagagatagtaacgatggcgccaaggcccacgctaccatgccagccgtcataatgagcgcagatagagatgacaaggcacatgcggacaaacaaccatgccacggtaaaggcgctcggttttaccacagaatagtggctccttctcaaaggagccaccaacctctgaccccccatggcctataaaaggaggaggttgaccacgaggataaggggttagacccagacggaccaagatgaaccaaagaagacccaagacaaaagacactggcaaccgcatatgcccggaaagacctagaggccagagccaaggcttagcgagcataggactctagttctgtagtctttagggtcactccctcataagagacttggaagactttcttccctttctcg

SEQ ID NO: 142698 - DNA, 435 bp, Zea Mays
gtggataggatcacacatcagagcttatcgccgtgattctagtcactgcgacgtgggcggtctgcgtgagccgccgtggaaacgccggtgaacccggttgcgccacgtcgaagcttattgctccgcggtaacaagcgtggcacccttgggagcgttatccatgcgctgttacaccggtgaccgccacggttacagccaccgtgttcttccccgtctccggccgccagcacaacctgctcgaattgaccgccaccgcttgcgacgcctataaattgagccctcccctagctgcattagattatcgcgaacccagacacgaagaatcgttagctatcatcccccagtgagtcccaatttccaatttcccccaattcaagcttccgccaccgtgaaacgagcttcaccgtcgccagcccttttccggtcagacctcgt

SEQ ID NO: 142699 - DNA, 301 bp, Zea Mays
caacaggagtcctcatgaagtgcatttcctcggttactggaaaacagctattagacgagattcacgccggacattgtggaatacacgcagcatccagaactctggttgggaaagtcttcaggtctggtttctattggccaacagcaaagagtgatgcggtcgagttagtccagaggtgtgaagcttgccagttcttgtcaaagcaacaacatttaccagcacagcagctatagaccatacctataacatggccatttgcgtgctggggattggacatgatcggacccttcaagaaagctca

SEQ ID NO: 142700 - DNA, 306 bp, Zea Mays
cgggattctgcgacgcgtcttgaaaacaaccagatagcgacctactcggaggataactcaaaggaaaacaaccgagcaccggaagaattggcacattcgcagtgaaagatgatagacctagatggactcataatcaataggtaaggatatctctccagacggctatataagactgcagaggtacccctaccaaaaactctctctcgctcaccgttagatcgataggaactcttccattcacctccacagctacatgtaatctacaaactcaaagcaatcaagcactcaacaccgcataggtcgtag

SEQ ID NO: 142701 - DNA, 271 bp, Zea Mays
atcgccgcagcccgcatactctggcagacgtcgcagcgcctgtgtgatccttggccggagtccttgaccagcatcgtcctctcgttgtcgaagttgagcgcgatgggcttgatggcggtgttctactcccaagaccccctacgcagcgttgtggggtcagctacgccttcggggagcgggatggagagtgcgacggggacggcaaccggaaggcccctccatcgtcgttcatggccggagatctactgaccggcggcacggaaggaggggg

SEQ ID NO: 142702 - DNA, 597 bp, Zea Mays
cgtaaccgtgccgaccaatatatttggcttgcttcgtggccgggacagacgcgggaaagtgactaccatcaattgctcctatgcaatccttgaagtggggccaaaatctactctctcgcaatcgagggtgaatctctatgaaatttgggtctttgggcttgattacgtcagaagacatcttagatagtgcattaagcacttcactatacttgcgactaatagtttccaaagagtgaccaaacttattccttatctgcctaaatgactgtggacccccaacatgcccacaagaaaatacctaaagcttccattgtactgacacctcggcttggaagcagaccataactttccaccaacgtatcatgcaaacgtcggaacatacttcgccgcatgcgaaacatgtcgaaacagtcgtcactactctccaatgttcgctcaacccattggatacctgtttcaaccattgttcttctagaaaccccactgggcgagctcccccatatgtctacagcacatagggcaacaagcaattctccagccctctcatcatcagatgtgtgtgtatcaggttcacacatctgcaaacacagaaacaat

SEQ ID NO: 142703 - DNA, 1010 bp, Zea Mays
gaagaaatgtagaaaggcgcgattttatttttggatcagtgaaataatcggtcctaatagtagcactgaaataacctctaaaagtctgatgccttacccatgttagcccaaataggcctcagtcttgacataatctaaccataaacccatagaaaattagattagacatcaatgcaacaggaatcaaaatgtgttctttaagcataagataacgtacataatgacaacaaagtatctatacaacaacaaaaacaaggcataaattggaagccaacagaaagcaaaaacaataggtcgccatcatagaaaagatcttgaaatgaaagaaaacaacatagcataagctaaaatgatctacaaacaaaatggcttctactaccccaaagatgtcatcttaaataaaaaacaaagagggtggggagtacaccgctagtatgcatactggtccttatcattattcaagggtagccttttcagctgggcacttcgatctatgagttcatttctaaatctgtgtcaaccaaaaagaaaaggcaaaaaacgatcatccacaacaagtagtgtcgcaccaatgacccactatattccatggccaaattactctgtttgactgaacaaagaaaatgcatcaactcccaaagacccaacattccatttgattgtggcttgtgcttgttcatatccaatccaaccatttcagacggtcaaagaggcgcttgttctgttgttctgttgttcatctcttttgtagaacaacttttagcattttaccagtaccccctgtagttgagaaaagacaaaaaagaacgattagaaaataatgcacagtagcacaaatcaaacatgaaacaagtgcacctgaacattattccatatatgatatatcatcatgtttccagtaagatggccataaccatcatgtgataatttctctattttgttactgtttcaaggtttctggagtcactgcctctcaagcagatgagtcttctaagaagatgttatcaagc

SEQ ID NO: 142704 - DNA, 526 bp, Zea Mays
cgtggaagacttcgatttttcgcacttgttgtgctaatccggctgcactcttaggcgacttttgcgcggatttgtcgcacgcgagggcggctgctgccgggcctcgcggtgactttgtattggtcgaatgtcgaagaccgttgatgcggtcttttttcgacgtggattttgcgggggatttttctcttgtatattacatgactccgcctcgttaaaaacctcaccccccgggaggaaaagagtgcgggcctgaacaaaattgtttttacaaattacaagggcgggctggccctgatgagtcaaacaaaaaatttgcgcagattatcaatgttctaggaatgctctaagtcttcgccgtttggcgttgcaagcctgtatgcgctgggggaggccttcgacttgacaatgtaagggccctcccacatgggctccagcttgcctctggactccgttcgagctgtccggatgaggacgaggtccccttcgctgaattcccttgggatgactgcctggtcgcgccatgctt

SEQ ID NO: 142705 - DNA, 575 bp, Zea Mays
gccgtggctacggcgaaggtcttgacggctctagcatcggcagccacaactacagcacatttactaccccagctggaggtgagagcaaggaagcagcagcctgtggcaaggtgtacggttgcccagacccagagtgtaagaacagcaacactcgtcgtcacagcaggatcatggagaagaaagacaaggcgaagctagtcttgcatagtggtcgtactggtacgcacaagtgcaaagttgctgctgctgatgaccctttcaaaaccatcgaagcgacaggcatcaacggcatcggcggagctgtggatgacccttacaatctcaggggctggaggttcccagctggaagcagaagcaccgtcctcccgcgtctcgccacaaggccgccggcgcaacagccacctcaaggaacagtggctatggctgccgccaataatcctgtgactggtcgtcatttctcagctggcagcaacaccttcactggctggtcactccctccaactaccagcagcatccttccggcagtccccttgcacaatcaagaacagaatctactggaacagatagcagcagca

SEQ ID NO: 142706 - DNA, 421 bp, Zea Mays
ggggtttaatcatttgcctgagcagttgacttgggtccaaccggtgccgtgttacgtgaaacgacgagagttgtatgactcattttcaggtgtcttgaattgcttattgaattcttgcaactgttcggtgtcacacccggcgatacacccaatgggtgtgcccaaggggtgtctgccctgcatagagtgtttatcgcgttgtcctgaagtagtaacttgatgtgacggaggggtttaatcatttgcttgaacagttgacttgggtccaaccggtgccgtgttacgtgaaacgacgagagttgtctgactcattttcaggcggcttgaattgcttattgaattcttgcgactgttcggtgtcacacccggatccaaaacccgggcgtgaaataatcatcaagtgtgctgggaccaagtctca

SEQ ID NO: 142707 - DNA, 367 bp, Zea Mays
gggcggaggaaatccagtgagctcccagggtggagctctgcttcgtcgccgccctgctgattggggaagaagagagggttgggggaaattcgcgcgagccgtaggatgtagagtgtacggctgggatcgaatcgtgggcacccttcgagattgaatccagaccctcgatctagatctagaccgttaagaatcagccacgataacttttgatctgggtcatggatctctgatccaacggccaggatcgttggataccccttcggccgggtctttttgctaaagagtcctcgaggaagcttgaaaataacccgccatccctcgcttgttgaaaactattacagtttggcccagaaatcttgtgtagagc

SEQ ID NO: 142708 - DNA, 617 bp, Zea Mays
ccggagtcagtttacacatgagttcagcctaccatcctcagtccgacggtcagacggaacgagtcaaccagtgcctggaaacgtacctcagatgcttcgtccacacctgcccctccaaatggattaaatggctatccctagcagagtattggtacaacaccagttttcactcatctctgggttcttcaccgtttgaggtcctctacggtcaccagcccaaccatttcggcttatcatcggcagatgtctctgttccagctgatgtctcatcctggcttaaagagcgctctctcatgcaggctgtggcccgacaacacttgctccgcgcccaacaacgcatgaagaagcaggccgacaaatcacgctctgaacgccaattcgctgtgggcgacctcgtttatctcaagctccaaccatacattcaatcctcactgtccaaccgttcatctcagaagctgtccttcaagttcttcggaccatttaccatcacagaccgcatcggttctgttgcttacagattggcgctgccatcttcatcatctgtgcacccggtcttccacgtttcacaactgaaggcagccgctcgccaaccccctcaggtgagtcctgcgcttccg

SEQ ID NO: 142709 - DNA, 770 bp, Zea Mays
gctagtatcagaccatctggtgctagccttcaacttaagaagttctagaactgtacgcagtgtagtaaactctttgtcacaaccctttgattcatcatataaagttacttttgaggcactttccagtccctccattttaggtagccctttctgtgatcccatagaactcaacatttctggttccatatggcgcaacatctcttcgcaatcaaattctttaaaatcttgattggcatccaccgaatccactttaccatccactttatcttcaattccgacagctctctcatcattaccaggcacttcacacggatccaactcaccatgttctgaccatatcgtgtaattgtttttaaaccctctttttatcagatgtgattggataactcctgtatctctccaagctatcttattatcacaattgatgcacgaacataatatctccttactctttcgcaaattcgcgtgcttgttggccgcttcaataaagcttctcaaatttcgaatgtacgacagatgtggtcttggcacattgtacatccaaccttggtccattacctatccctatattgattaacgtcaataaaatcattaattaattgaattcatccctaaaacatgaaaaataaatgtacatgaaagtgaaacaagatcatatcgagaggtacctagcacatgaactacaaaaaatatttaaaatatccctaattaattgaatttaatccctaaatcatgaacgaaatggtgtgcatgaaaatgaaacaagattg

SEQ ID NO: 142710 - DNA, 315 bp, Zea Mays
catcggggtgaggaatatggttaagatagatatggatgaaatagattacatgatgtaggtaaaggtttgtttgatgttaggtggggacagacagattatgcaatctattaagactctattgattgggttagatctcatgcatgtggctgagttggtttaaggcactagtttagttttaagtgcatgaggggtatggccttatcttttgtatcatcattaagtaacttactctagattagatcataatagattagatagaatctagatcaggttggatatgattagattagactagttaagatctaaataaatttt

SEQ ID NO: 142711 - DNA, 572 bp, Zea Mays
ctccgacaaatataattgatgcaaaaatgagaaaagcaacacaagtagtaaattaaaccttttttaatttcccaattcatgtacattctattcctcccaatatttgggtattacaaatcctacccccttaaaaataatctcgacctcgagattatgatgaactagggaagaggtggggaaattatattcgtagctcttcttctctctcccaagtagcttcttcttcaccatgatgactccatttcactttgcacatttttatcaccttatttcttgtaacatgagtcgaagtgtccaggatcttgataggatgctcagtgtaggttaggtctccttgcacactaagttcttccattggcagttgttcttccgggacacggagacacttcttgagttgagatacgtggaacacatcatgtacatcagatagatgatctggtagctcaagctggtaggccatctccccaactcgcttaaggattttgaagggtccaataaaacgaggggataacttgcctttaacattaaacctcctcattccacgaattggtgacacctttaagtatacgtga

SEQ ID NO: 142712 - DNA, 419 bp, Zea Mays
cagcgcgcctcagctttgccttagagtccgacaggtgcactaacaacataacagagtacgaagtcgtcatcctaggacttcacaaattacaagcactcggtgtcaccacatgcataatcaggacagactccaaagtcgttgatggctagattgagaaggagtactcagcaaaggagcccgtgctcatgcaatatctcaccgctgttcgcagcctcaagaaacagttcaagggtttcacactacaacatgtcgaccgcaacaagaacgaagaggccgacgcgttggccaaagcggcggccaagggcgaaggcctgccttccgacgtgttctaccacgtcatcaacacgctagccgtccgcagcccgaaggcttgcaaataactcaggacgtcgagggccaccgaattgtcaacctcatca

SEQ ID NO: 142713 - DNA, 432 bp, Zea Mays
taccgcctctagttcctgtcagcaccccactcgagttttatggcacaaacccaaaaaatgttgtcaatggttttgagaccaaaccgccaaaattcccatgggtagcgtatttggtgtgctccctccatgatcttgatagtgtcaccatcaatcctcgacttcctaattaatcatcatgtcctacgtggacccgacttgacttgatgtcttgatcaaccatcgtcttgacttggtcaacacgttctactcctctatatacttttgcacttgtcgatgtccctatatgtcaccactacaatcagttcttcggcttcttgagtccctcagttcgagctttggcattcgtccttcatcattccaggtctattggcacaaacaatggtggaaccaggttagaactgaagcctcgcgtcggctgtcggcctatcctcc

SEQ ID NO: 142714 - DNA, 501 bp, Zea Mays
gcgaattacaagggcgagctggccctgaggagtcaaacaaaaaacttgcggagattatcaatgttccaggaatgctctaagtcctcgccggatggcgttgcgagcctatatgcgctgggggacgccttcgtcttgacgatgaaagggccctcccacttgggctccagcttgcccctggactctgtccgagctgtccggacgagtacgaggtctccttcgctgaattccctcgggatgactgcgtggtcacgtcatgcttttgtttgggcttggtatttatttagagcctgtagggcgaagacgcggtctccatcgatgagatccttcgaagtgggttcgtccacgtcggggacagctgacgggactgtccgtggggacccatgttttatttcttgcggggtcatggcctccgatccatatagaaggcggaaaggggtgaacccagtcgccctgcactcagtcgtgtttagtgcccagatcgtttcaggtaacaaatcggcc

SEQ ID NO: 142715 - DNA, 585 bp, Zea Mays
accccaccatcgtctacatggccggatatctccacaccctcgataaccactatgatgacctttcctcccactgcacccacctaaactcccaggtggaaagcttagagcaacaggtcaaggaacttaaaaaggagaaggcgtccctccaagagaatctcgaaatagcagaaggcgaagaggccaacactcgtgaagcctaccgaaccctgaagatggattacgataagaagctaaagaagcttgcccccacgaagaaaatccgaaagaatatcaagagccaaggatgacagactgagcgaaagaaggaagcccctctagcactacctccctccaggatagagaatttgtctgacgtcgagaatatgtccctagctagccttgacgaccttctcaaggaatttggggacactttagaaagggagttcggaagtaccttagaaagcgctcgcgtgtagtgcgacttgtggtaactgtatgcttgtaatgaacttgtgtgatgaataaaataacttggttgaaaaaaattggcatatgcatagtagtaattctctccccctggcagatggcttcggataaaaccacgcc

SEQ ID NO: 142716 - DNA, 354 bp, Zea Mays
gaaaaggtttagagtccggttattaggattcagctgatttccccgattgtttgttgagtcaatccttgtaataaatacctatggctttgtccatgtaaggacaaatagagatcgtttgaatgaaagtttagtttacgttctgtccagccctggcgctctactgctcaatatcgttcttctctattattgccgtttagttcagggagagagcaagaacctggtcgatcctgcggtgattaatccaacattctcttctatggtcacggctatatatatcttttccgccaaatccatctacgaaaaattctggatacattgggtgcccttcgatccggcaccatgcatgtggacgcc

SEQ ID NO: 142717 - DNA, 430 bp, Zea Mays
actggattttctattcccttggactgcgcgcattaaatcagaggagtgcagggggtattctataagaattctgggtcactgagtaaatactttatacggcatgtgtactgcgggttgattatacccaagtgtagggtctcttctgtaaaacagtcgcgctgaaggggtacgaggcactgtgatccgtccgatccaaaaccagtggcccagattagaagttatctaaatcgaaccggtatccaatccgggccgcccgatcaggaaccaacggttaacatttatcgaaagagcttatctgttgtacaccgtccgatcggggcacgatggtccggatcagacgaacgaagagctaaagcgcgatcggatcctgtccactggatcagcgatcaacgactgtcgctctcccctcacctcacccacagcgcactat

SEQ ID NO: 142718 - DNA, 445 bp, Zea Mays
aaataagaacagaaatgcatagtgcacacatacataggaatggcaagggctgaggagcatttgtgtgttgactagaatggatatgaagtagaacgggtgtgttgactagaatggatatgaagtagaacgggtactgggtgcttggggagaccaaggatgagctagagtaaacaaggggagagcaagagctgatgtttaggtgtaggaagtggttgaggcatcgagcacctgggggcatgattgaggaagggtggagaaacaagcttttctagagattaaacccccgtagggactgatgaccagcaaggggaaggacatacatagacatggttcatagagaattgcactagaaatcatagatcagcaaggggactgatgactagcgagggagagcaagagaaccaaatcgaggagctcaccaggcttgggagacctcaccgaaaag

SEQ ID NO: 142719 - DNA, 820 bp, Zea Mays
agccgcggtgaatcactgccgcgatcacggtgataaccattgctggccctagctggcgatcagcgatggcactgagcacggcactcccctagagcttgccacgttcaaccacggccgtaaggcagtcaaatccgtgatggcgtggccgaacagaggagggcggtgccggtgaccggacatggccggaaggagggatggccgcgtggcaaccggagttagtgccctccaccgcggcggtcttatccggagcaaagaggtcttcgcagggagatgctcgccgcctaatcatctcgaccccggcgcaaatcgcggcgcggataggtcgtcggcggtgagattttctgccgcggcgatcagacccttatctgtttccccaatgcactgtaccatggcgtttgttcttcagtcatctgacagccaggatttagggcagattttctcttgattttatatatcaacatgatcgacactctttagcaaagttgtagccctaggatccagctataatcttggtatagcaatcctaggcaaatacttgctcgatcatgtattaattcatgcccaaagtgcctgcagttgcgctgcttgtctgagattcagaacttaaacagcctgacagtcaagtttagagcatgattatctccaaatttctcacaagaacatggcttgctctcttcagcaaaattgttctcctttgattgctctacaactttggtgtggtgatttagggcaaaaattctatagtttgaaagttacaaggctccaaagttgagccaaaactctgaaatttcaatgtttgttctcacaagaacatgtttga

SEQ ID NO: 142720 - DNA, 718 bp, Zea Mays
aatttgctaaaacacaaatatcatacttggggcatatcattagtgctcaaggagtttctactgatcctgaaaaaaatcaaagttattgagcaatggcgaattccaagtaatgctaaagaattgaggagctttttaggcctcgctggattctatggaaaatttgtcagaaattttggcattattggtagacctcttttcaatctgctcatgaaacatgtggtgtttgtatggacagcagagcatcaaaaggcctttgaattattgaagactgctctgataacagcacctgtcctagcgttaccagatttttctattccattctgtatctacactgatgcatgtcaaacttgtgtgggtgcagttttagtgcaacaaggacaccctctcgcattcttgagtagagctttgggtcccaaaaatcaaggattgtcaacttatgaaaaagagtatatggccatcatcattgaaattgctcaatggtgatgttacttacagctggcagagtttattatatacacggaccatagtagcttggctcagcttaatgaacaacgcctccatactacatggcagcagaaagtctataccaaattggctggcttgcagtataaaatcatttacaagaaaggagtagagaatacggcagctgatgctctttctagattgcctcacgggccagccacttgtttggccctatcacagtgcactccaacttggc

SEQ ID NO: 142721 - DNA, 398 bp, Zea Mays
gcggtaatctgttggatctcacctagaaatgggtccagacctccccatatatatgaaagggtacgaccgtacgagcgattgagaatacatacaatccaatcgaactaatctatctacattatcataccttaggggtagacgtagggtagctctagttatagtttcagctttaatcttcacttctattcgactctatgtcgtctagaaacactttggctgccgatcccaagcaaccctaagatctctcctcctgatggtttccctcctaagagacgagatctaggttcaacgtgaagccctctacgccaatgcggtctaaacgtggacggtcagcgtcaccgcagaggagagcgtagtggacagtccgatgacatataacaggccatccagtaccttgc

SEQ ID NO: 142722 - DNA, 483 bp, Zea Mays
gcaagggctcatcgatcatcatgacactaatctaccaattctcggtatcaatttgtccctcatattagttcaactaggtagtatatcgtgtaggggtgtatgcaatagaaactaggggtttattagtaggcccttattagtatggtgtttgaactatttacgtaagttctcaaattaagatttatgtgccccaaattgaattcgtatgtagctagctcttgcgttgatttgcaggtgtgttgcatgcgcatgcgttgcatgcatgcggcacctgcatcaacaacttgcgctgcgtgtgctggtggacagagaaaatcaagacctagctacacaatagattcattgttctctgcactttagtgccctttttttctcccctcctttgttccttcaaaagtcgtcgtgtttttcctttcattgtactgccttgctccctagctagctttctctctctcctcactcacatgcacggtttgcttgtta

SEQ ID NO: 142723 - DNA, 529 bp, Zea Mays
agctcgctcgtgcgcccgattcatggtaaactcacccccctcgagttcgcgatgtacttctgttagtgtagcaccaatcggggtagcgaatatgtctctggtgcgccggcagggccggtctccggcgagcgcgccaccgcgggggctctgcttcggtggtctgctgctcggaggtgggtgagatgttctgggccatcggatcctcgtgtgaacggtccagattagcaggagcgcatcaattgggtcgggtaacgagtgccgtccgattttgatccggtggcgtggagtggatctgcgtgtcgttaaatctgaaccgtagaattctaatcatgtggttcctatcggatacctattcgttgctgggccgatctaatcgtggccgtagatttataatccgatggctgtgagcgcgtaatacctgttcgctctggcagttttacatatgaaaccttctagttttagaaaaccaacccgccgtccagggaccctgttccctgtgtctttggtaacttaccccgtgacccctgcg

SEQ ID NO: 142724 - DNA, 350 bp, Zea Mays
ggggtgaagattccgaagatcgaccgtggaggccaagccatacaattttcggaaagtcgacaattaaacaaagtcatcttgacaatatgaggggatggtactttcgagatatgtctattgtgagagtcggtggagacaacaacgtccctgcccctgaggaagacgaagttgtgatttaccgaagtttcttcaaggctgggcttcggtttccattgagtaggtttgtagttgaagtgttaaaaaccttccaaattttccttcatcaactgacccacgaagctatattgaggatgggagtcttcgtctgggcggcaaggagccaaggtatagacccaagcgcaaaatgcttc

SEQ ID NO: 142725 - DNA, 271 bp, Zea Mays
agaagaacggtcaacaggatcacttgcccatgtggcatcggaatatgcatgaagctgaagtgggctatcagaggcatagagtaaacatcttgatcttgtctcgcgtaagtatctaagcacacgaagcaaatgaccgtaatgaacttaggtcggtgtggatacaaattggctcaaaatatgaacaacatgagcaatatcaggtctggtgatagtgtgataaacaaggctacccacaatatggcgatatcgagttgggtctgctagtggtgta

SEQ ID NO: 142726 - DNA, 382 bp, Zea Mays
tgcagcaggaaaagcacaacaagtgcgtgaatcaaactcttttatttaaaagacgctccgcgcaaaagtcacctaagggtgcagccagaatagtacaacaagtgcgttaatcgaagtctctcattaagaagacattccgcacaaaagtcgcccaggggtgcagccggatcagcacaagcatatgaatacgaccaacaggccacatcatacaaattacagttacatacactcggcgagggcatcatatattacattggctcaaccttcaggatgatacccatctccctgtaattgaacaacattatcctcaattcctcaccctcaaaaagatttcgcaaatccccttcacctatgctcgccccaatcggcgaggatagcaatt

SEQ ID NO: 142727 - DNA, 430 bp, Zea Mays
atggaaacactcctttcttcatggtctatgggtcggaggcagtgctgcctgctgatctcaaattcggggcgccaagattgatcttcgaaagcataacagaagccgaggccaccagactggaggatattgatgtacttgaggaagaacgactgaatgcagtgatccaatctgcacggtaccagcagactctgaggcgctatcacgacaaggctgtgcggcaacgttccttttcaataggggacctcgtcctccgccgaattctaacgggggagggacggcacaagttgtcacccttatgggaagggcctttcatagtatcagaggtcactcggcccggatcgtatcgtctcactcagatggatggcacagaagttgggaactcctggaatatagaacacctcagaaagttttatcctagctgtatctcaac

SEQ ID NO: 142728 - DNA, 440 bp, Zea Mays
ggcggttgaagattggatcagtttatatagcatcatcattattagacgtcctatcggggtctatcagggggcatttactcttgtcaacatgatggccgagcgagactgaatagaggatggactgaagggcatcaaattccatagccgcagtagaggatatgcgtggcttcagacagcgttctaggccttctaagatcacttgtcgtatcgtggcttccatattattcgcatggctcaagagggaggggaaactgttagcaatcggtccaatgtccagcaattcatctagccaaaaacaggtggtcatcccatcaccaaccttgatagaggtgattgcccctgtacagagggaagagcttcttgattgtgtttgagtggtcgccggcaggcgccactccgatgttattctgaacctaggcaatctaggatgaacgtgtcgg

SEQ ID NO: 142729 - DNA, 513 bp, Zea Mays
gcaaaaaccaccgcggccaattcaagatcatgagttgggtaattcccctcatgctttcttaactgccttgagccataagcaatcactctgccttcctgcatcaacacacagccaagaccaatacgcgaagcatccgtataaactgtgaaatgcttacagctcttaggcaaagctaggataggggcatccaccaactttctctttaatgtctaataactgacatcgcaatcgctggaccaaatgaagagaacaccgttctccaagagtctagtcaagggcttagcaatgctggaaaaaattggtacgaaacgccgataatatccagcgagccccaagaaacttcgaatttcaaagacactagagggtctcttccactccaccacaaccgcaacattcttgggatcaaccgcaatgccctgctgattaatcacatgccccaggaaagccacttcggacagccaaaatgcacacttcttcaacttgccatagaactgattctcccttagggcaccc

SEQ ID NO: 142730 - DNA, 422 bp, Zea Mays
gtttgattcatttatgctttctaatggctttcagagatctcaatatgatagttgtgtttatcttaagtttgttaatggttcacctacatacttgttgttatatgttgatcatatgttgattgcttccaagagcatgaaggaaatcactgttttgaagccacaacttagtagcgaatttgatatgaaggatctgggtgctgcaaataaaatccttggcatggagatagtcagggataaaaaagtctggattaatgtacttgagctagaagaattatattgaggtccttcgtcgtttcaaaatgcaaaatgctaaacctgtgagtactccgctggctcctcattttaaactatctgctaaacagtgtgctgaaactgatgctgatcttgagtatatgtcaagagattcatactctaatgtcgtt

SEQ ID NO: 142731 - DNA, 503 bp, Zea Mays
gttccattgcgcatggtggactcagtgccttcgactgctatgatgttttctccactttcggctcttctgtcacatttgtcctagctttgactggcacaaagcgacttggttgagagataggagtggccccctcaattagcttcggcacgacggccgtttcaatgcgcctaggtcgacgcgtcaaaactttaaccttttttgacctcgacgcgctagaagtcgtcaaggtagcagctttcctcttcttcccttgcttccacgaaggataacagtagtctgggtacacaaacccgatgacatcaaacaccctattcaatctctttttgccccaagcaccgaaagcagttgtcatagcttcatcttcggccttcgagtatgctccaagtagctcgtcgctggttgcctctatagcatccagccagtcatcatttggttcatcaaattggctcctgtatctaaaggtatactttagataaaccaaaccattttggctggagccaacg

SEQ ID NO: 142732 - DNA, 674 bp, Zea Mays
tttcaaacaagcagcaatcacataaatgcatgacggagtatatcggaagcccgtgatagataatgtatatcatgatactgttgtagcacagccatcattttaattcctcgcttggattacagctctccgtggcgatacaagattattgttagcttggcatatatgattaatgcaggcaatcggagagcaggcgggcagcatggcatggacagatcaggcccatgatgtatgtctgtcgttagagacatgtccaaatccaatctccgcggcatatttgcaagggacagtcctgttgcaaactgcaggccttaacatcatagctatccattgatattctcttgcgtaggatgaagtcatgcatccacttggatgtcgtatatggagagggagatcagcggtgctgcatacctaactgaagccatctcccaagttggtgccatgtcattttctttcatgttcgtaactgcatcgcctgtccctgcttcatgtgttgcgacgaaaaattcctgataatcatgtatttggacgcgtaatacagtgtgtacttatgatggatcaggatcactgaagtgtaagttgcaacaatacagaaataatactgtgtcacaaagtggaggacatattgtcactaaaagaaataaagagatgtatcttgttactctccctcagtcccg

SEQ ID NO: 142733 - DNA, 605 bp, Zea Mays
cgggaaacgagtaccagggcactcagctaatttttttgagtagaggtaggagtgggacggatgaaaactggttgcttgaaaggataggcgggtggacgaggaaaagagcgatttgtgttaaagggacggatcaccaaccttgaccacttctcggatccttgagaggatccttcacccccttcactcccaaatctttttgtcattccctgccctgaattcttggcctccagcgacagtgttgtgctcacggccctactgtaagtgagatctagacaagtggccatattccactgtagccggtcattcagaccccctcatgaaacaattcttctttttaggtctgtgtcaacttgctctatagcatactgggagagatggttgaatttgacgaggtattgcatcaccgagtctcctccttgcttcaagcgaacaaactcttccagtttcatctgtagaacaccatctggaatgtaatgttttctgaacgcatgcatgaactatgcccacatgacaagatgtcctttaggttgaacagctacaaagtttgcccactaggtactggcaggacctctcagttgctaagcagcaaacaagggcttctcggt

SEQ ID NO: 142734 - DNA, 377 bp, Zea Mays
ccgccgatgcaatcccgcgacggttctccgccgtgggtccggttctgtggcgggggagcggtggcgaggcacgggcggggttagggcatcacaggggtggggtcaatttgacaggcagggacctagggtggccggtccacggcgcggcgggtgctcgcggcggtgaggtcgccggcgaggcagccgagcgcaataggaggtggggaggggtgccttgcgatcgtgagtgagtggcagagctcaagcaccaagttaattcgaccgaaagctactagagaggggagaacaaagctcaccggagtgaagggggaacgcggcggcgctagctcaattgggctcggggaggtgtggaggagatggccggggctggtgtggaa

SEQ ID NO: 142735 - DNA, 613 bp, Zea Mays
cgcagcagaggatgattcaaatacaagggaaggacttacagggggaggaacatgcacaagatacctgaccacggtgaggcgcgcgtctgcggcggcggagaagtacggcaagccactacttgaccacggtggtgtccaacttgaattgggggcgcggacaggtttacgcaggcgacgacgaacccccccgacctaaccctgagggcaggcgacacggtatgacgagatccaccggcggcggcggaatcctcgacacccagcaatggcgtgcgatggctacggtgtccgggtccgcgtgaaaggatggaagagaggaggaacgggtcgcggggagggtacttgtagacccgcgatgccgagtccgcagctggccaaatacaccggtcgtccgagatctccgcccgcgccaccgctggacgcggtgtggttgttcgtggggaagccgcatccgacaggtgggcccggaccgcagtgtcccagacatccgcccgcgagagggaaacgtggaatggggactgactcaggggccccagttgtcggcgcatgcgggcgcaggcaggtttgggctgcgcggatccaaaaggaaagctgggccgaatgggtggttgtcggc

SEQ ID NO: 142736 - DNA, 531 bp, Zea Mays
caaaacttcacttgggtggtttgggcatagaaggctagctcgtgtttgactgggtacgctcaagaaactatttaagaaagaaacggttagaggtctgaaggatgttctgtctgagaaagacaagctttgaatttcatgccaagtcgacaaaaaagttgcaaatatgcatcctataaaagcattcatgtcagcatctagcccgctagagcttctgcacgcggaattgtttgatccaacatcatattcaagtgtaggtggcaacctatattgtttggtgattgtggttgattattgaaggtattacccttttgcagtaaagaaataatgtagaaacctttccttttgtagtttacaactaacttttagaaggaaagcacagggaaaaaggggaaagaatcggctctaaactctttgtttctctcttactatgtaagatcgagttagttttgtatgtttttcctgtatttcatccaaataacatactccaatacaatatgataatatctatcactatcgaaatctggctctttg

SEQ ID NO: 142737 - DNA, 461 bp, Zea Mays
ctgaggcaggtgctttgctggctgaagttgggttgctgaaggagaggggtctgactgctgaagccgttgttgctgactttgtcttcaagaatattcagtcgctgaaagacatggcgcacctggcttatttgtatcgaggcctagccgactcaactcgggttaccaacagaagaattccctctgcggacttggtgagccgacttgagatgatccttagaggcaaggtgtcaaatgttggtgccccagtggcatactcggcctggaacctgcctcctcccaaagccttcaccctttttgtgtcgaatccacctgttactgatggcagtttgggtcttagagtgcgaccctctgctgaagaagttagtgccttggttgcctcgctcggggagattcctgatgatgaacggcaggtccactttgaggtgctcctgaatcctagcgatgcggagataagtgctatg

SEQ ID NO: 142738 - DNA, 1565 bp, Zea Mays
tttgttcccaaacagggcctaattggccacacacatactgttagagtatagtgaaatagaaggctcagggaaaaacatgtacaatgtactagaaaggacaagaaaaattaagagaagataaggacgcattagtgtatactagccttcaataaaaatggaacatttgcttaccgatcatttaaaatagagtgcgggaccatacaggcatccatctgaatctgatcacgaaacattagaaacatgagtgcaggatcgtaaacacattctgcggaaatgacaggaaggacaagatatagcttgcagacagacgacgcacctgaatacaagtgcttagatagtgcagatgcctgttgccaaacgttacagacatctgaatatatctcaagttttcagttcttcataaaactactatgtaaaagctaaatcagtatgcccatgtcaaagattcgatgtttacgtgtaatcctaactcgataaatcccccaatcctcaaagatcgttcttttcatggtattctatagttacttgttactcaacttgtttgagattaaaaatgctttgctgctgtgttattctagttattgaaggtagaccagttattcacagacaccattaaccccgttagttaattacttaagtgtacaggtcccttcaatggaaaatcatttatcaagttgcaagaaagttagcatacattactcaaaagagctaagagcggtgttgcaaacaagagttgtctctgccctaacatatactctctccgtcccaaaatatagttctttttagcccattttttctgtcaaaacattcattcaaatgataatgaatataaaaaactcgacctagggaggatgagacaaccccaagtattgtattaagaagaagaccttctcagttctcagttctcacacaggtcgaacaacatatctttcagattgaataacacatatcttaacaaagtttggagtgtggatatatctacaagggttgaataataaaattgtgcatctccactgcaaggtcaatcccagtagccccaccactaattcacacaaagtaggatataccttcttttttttctcatcagcataagcaatcttttctgaagcagcatatcactctcttttaagatattgtatgcactctcttattcctatgttttacaagttggcaatgtaaatagagaaaatagataggtaaagtacttttccaacaaatctgttctatgattgcaaactacacaatagcaaagattaatgaaaaaactggcattgagaaagaaatcacaatagattaatggtttccatccagtatttaaaagatttacttactccattccaaactataagacgttttagttttttaaatagattacttttagtatgtacctagatataatgtatatctaagtacgtagaaaaaattatatatctagaaaaataaaaaagtcttataatttggaggaatggaggaagtagtaaaaatgcttactggttactgaacacagcttgctgcaaaggtatacttcaagtgtgcatttctattgatattaaaacaagtctaaa

SEQ ID NO: 142739 - DNA, 711 bp, Zea Mays
acagagggctggttaagttgtcacataaaaatggaagaaataagtcctctaattacctatgtcagacgcactaatcaaaaactcttatggtacagtactgaagatctcaggtgcactgaatctcgccgccggtgatctccgtgcccagattcgcgcctgcgctgcgattcctgctctttgggtgcggattacgatcgatagtgaaaagatattaccgcagatgaggttgtgtgctggccgccgtacccacttgctttgcggccggccgaaatgatcctcgctagagtcggtcgcttgccgcccgtgtgccatgtaatcagtagtgttaccacgtcgccgtaggtcgcaatagatggtctgtctgtcctctgagctgttgctccagcaaatgccacggtaactcacgccagtgacctccccctctctccggtcgcccacgtgtcttccccaaattggacgccaccgctgatggactctataaattgatgccccagtgaactctgttaggttgttacacgcctagtgcaccagtcctcgcctccgattagccaccgtagctcgtgaattttaaacttcccccaattcggttcttcgcgccgccgtgaaccatcgtgtcgtggaccgccgtctccaggtccgttcacatcctccttaccctcgtttcagcacctttgcatgctaaggatgcttatcgggccaaccaattgaact

SEQ ID NO: 142740 - DNA, 330 bp, Zea Mays
cttggccacccggactaaaacctgcgggtcccgagcatgtatcaaaggacgactaatgtcagacggagaaccctatgaggtgtactactaatgcttcctagctaaaagttgtgtacagatccaaatcccggcgagtttgcctcccgaggattgttgacaacctttttagaaacgctggtatccaacctcaacacatcaagcctgcatcccaggcgggaggccaggtactaaggaggagtcaacaatatcgcacacaacaggaacaggcgatacacagataagtgttaaatgctgcttagaagacaatatttattactttacaaaaacaag

SEQ ID NO: 142741 - DNA, 372 bp, Zea Mays
tgtttgagacgtacaggcgagagtacgagaacttcacacagttggctggagagaccattgattctatgttctccaggttccagtcaattgtgaacaagatgcgtgccaacaaggcacagcaaccatatagtgatcatgagagagcgctgaaattactacatgctctagatcggagggtttgggaggtgaaggtctcggcgatcatcgagtcgcccaactacgagactctcaccgtggatgagctcttcagcaagctcaagtccacagagattgaccaccagactcgggccaagattgagaaccctggtgcacccaccatggccctggtctctggaggtggttctgcttctaactcctcacctgctatgtttg

SEQ ID NO: 142742 - DNA, 328 bp, Zea Mays
cctttaccgggctgatgttgcggcatgatgatgtgaaagaatccagcccccacaacgctcatactactagcgaactccaaggcggctggtgcctggtggggtacctcatgtgatgtactactgcttgctgcacggtgaaaggcgcggggcgggcagggcaccaaagttgaagctgcaatccacctcggattttgggccgggcacagaggaaaggacccatcacattcacatgctccccctccctattccctcgtctgcgctgcatattcagcatctatctacctatcacctctagaaccttcacatcattcacctcagcgtacccggt

SEQ ID NO: 142743 - DNA, 423 bp, Zea Mays
ttaacatgcacaaaagaatagaaagctaaaatgtacttagtaagatcttatgaattctgtcgtggtttcggaaaccggagagacaatagaatttgtgttatgtgggggctagcgcggactcactctgaatggtaaatcacgggtgactcaagcaaagggtttatattgattcacgcgggagccctagtccagtgtgtgttgatcatagtgttcaccttgtattgtgttacaacatgtgcaagtgtgagaaatgagggagtggaaaactctagttgaatgctcctgccctttggctgttttgacccttccctttttatagctcaagtgggttcttacatgaggacagcttatcgtccaaaaagagagtgtgacctattgtctatagtggtcttgctgacgcaactctcttgatgtcgtctcctg

SEQ ID NO: 142744 - DNA, 593 bp, Zea Mays
taaaatttagttctttagtcactaaaacagtgagtaaagtagcacttttactggatttgccctttcttcaccctctctctccttacattttgcttcttgccttgaagtaggggtaatacagtctttgtgcatagtaattaatgattttagtcacttttacgtgtgtacttgaaatgaaaccacattatgtcatattgatcgatgttcgtcaatattaataaaataaagcaagtactggtcgcgcgggctagccctaccacgccaatcacctagccgctaataaggatttaaatcttgattattggcttcacattcatattcacctaaccaataaccacctaaccaataaccaatagaacacacatttttgtcttattaaaataaagtcgacttatatagtagaaactgcagcaatgcatggctgactagtaaaaatttaaaatagagcgcttgagtaagaaaagggcaatgttaaacaaaacttctatatattaataggatatttggtttgagcaatgcatggctgactagtaaaaatttaaaatagagcgcttgagtaagaaaagggcaatgttaaacaaaacttctatata

SEQ ID NO: 142745 - DNA, 277 bp, Zea Mays
gggtggtgtttgtcttggaagctgtgcgtgtgtatagtgtgctggcggcttcttcgtccgacttaaacgctactcgttttatttcaagttgaaggtgtggtccgatcactctggattaccacgcagctttaggccccatcgattactttggattggtccctgcgttctttttccttcatttctgcaagatacctcgcgtaccccggtggctagatccaatacgacagtgtggagctccgaatatatatgtttccttctcgaataaattctccaaaag

SEQ ID NO: 142746 - DNA, 555 bp, Zea Mays
tgggtcccaagtgattcttgcaattgctcccagaaacatgctacaaatggtgctcctctgtcagacacaatagtccttggtattccatgtaaacgaactatctggtcaatataaatttctacatacttttctgccatgtgggtggtatgtactggcaagaaatgcgttgttttggtcaacctatccacaatgacccaaatagaatcgtagtgccgggaggtattgggcaatcccacaatgaaatccatgcaaatatcctcccatttccaagatggtatgggaaggggctgtaaggtgcctgctaccttcaaatgactggccttgactctctggcaagtgtcgcattcagatatatacttagcaatttcccttttcattctggtccaccagtacaaggatctgagatcatggtacatcttgttactgctggggtgcatggaaaattttgaaaggtgagcctcatccattattttctttctgagctcggggttcttggaaacaaccaattggtctccaaaccagagaatccctttgctatcctaacggaaacatttg

SEQ ID NO: 142747 - DNA, 378 bp, Zea Mays
gttttgaataattatgaaatttatcttcatcagctgactcctaacgctatggttaggctcagcatcttcatttgggcccttcgaagccagggaatggatccaaatgctgaagccttctgccgagtacatgagctacattatcagacgaaggccagagaagatgggcttcatgagaattttggctgttacaacttcgcttaccgcaaggatatgaaggccccggtgctaagataccgcaccaagtggccaactagctggaaaagtgagtggttctatgttaaagctgatgagaagaaaagggagaagctgaagacattagtactgagcccactgagtttgagctacgggttgactaggcccttgtgtcgtatgtcgtcg

SEQ ID NO: 142748 - DNA, 482 bp, Zea Mays
tcctcagccaacatgtctagcatagcacttatctctgcatcacttgggtttataggcatctcaaagtgaacttgcctttcatcattgggaagatcaccaagtgaagcaaccagagcctcgacttcttcgggagagggtcgcactctaagacccaggccactgtcgctagcaggaggattggacacaaaactgaaaaaaatcttggaaggtggcagattccaggcagaatatgcaacaggagcactagtatttgacactttgcctctaagaatcatctccagtcggctcaccaaatccacagcaggaatcctcttattggtaacccaggtagaatcagtgacaccactatacaaataagccgggtatgctctatccttcagtggctgaatattcttgaaaacaaagtccgcaactgccgcctcagcagtcagacctctctccttcaacaagcagaaccctggcttcggttatctccaagtctg

SEQ ID NO: 142749 - DNA, 289 bp, Zea Mays
aaaagattgaacatggtgtttgatgcaattggcttcgtatacctgattatcactacccactgcgaaggcaaggaaagaagagaaaaattgccgcttcggccaccactactgtgccgaagggtaagaaaataaaggttctgacccaccggccgcgatatattgaaccggccatagtgtctgaatttggcgaagggaccacttcaactgccgaagcaaaacaagctgctcccatcgtgtagagcgctgaagaatcgattgtagtgccgaaggtttctacagttgggccagc

SEQ ID NO: 142750 - DNA, 458 bp, Zea Mays
gagtacccatgtgccatgaggaagttgttgaatctaaggtagtaagggggtttggaggaatacatgcaggagtttgaggaggctctatatactacagttgtgcacaaccttgaactcgatgaaattttctttgtatctcagtttatcacttggttaaagggtgatatataggggccagtcttgacacagttggcttacactatgacaaaactgctttgttggctcaaattcaacatgcgattatggaaaggggaaaagaaaattttggtaaatctttttcatcaagcaacgttgttgtggtcaataagcctaaagtcaaggaagttcatgagtctagagggttgagtaaggagaggcaattgagagagtttagagggatgaatgggttgtgttatacatgtggggaaagtttgagccaatatattaggccaaatatccaaaagggctacaactcagtt

SEQ ID NO: 142751 - DNA, 603 bp, Zea Mays
gaggtaccggggatccagagccgttcgatcataagctgagggcctagattagatgtactaccccagtgaaccggtacgtgatgtgagtcattggatcctcatcacgcggctacatttaattggagcgaagggggatacggtgatcaaatcccacacgtcggattcaaatcgggcaaacgacattatccaaggccgaaccgcaacatgagatttgatcccaaccgtccacatccgaacgaacggccaggagatcgcctccgaccttcagcagccaagctcggtcgcgcacaccacgcccgcggcggcgccattgccggcaagccaccaccccacgccccagtgctccaaactacaaccgagcgcgtgcaacacgtagaggaggtcaaggcgaagtcaagatgaggaaattttaccagagaaaacggtgggcacaaggctgtccgcggaccaggcggatttgcgatggagatgagtgctccggtgagaaatcgcccaactgttcgggcctcccgcgctcagctgtgacccaagaacgaaccacgcgcaaacgcgatgctccccgaccacttgcacactccgattgatgacgaccacgaggaaatc

SEQ ID NO: 142752 - DNA, 510 bp, Zea Mays
gagaggaacatggcgaagctaggggagaaggtctcaccgggagcgaaggtggggacgaggtcggacacggtgttgggcgaatcgctggcgttgaagtccctccggtgagaaactgtgtagcctccggtccacaatcccaccaggcaaggccatgacagacatcctggtggccttatttatccgcacggcccatccccgagggatctacatcgacgagccagagtcttccccatggcgaacatcattctcacacttccacccatggcggtcgggtatgggatgactcgaattcgggtgccagctcgatggaaggaggggagggggtacagagacggcttttaatagggcagaggagcgcccaggttgttgcgaggcgtgcaccacccgcggaatccgcgcggccggtccggtgtccagaggttgaagggagcactgacgcggcggacccacacgtcagcgcgaaaagatgtggatggggttcgcgttgtaagaggctgacaaaggtggccc

SEQ ID NO: 142753 - DNA, 593 bp, Zea Mays
ttttgtttggtttacatttccatgagtctatgttcaggttgcaggttctcctttgcataggtttatattgaggctgcagataaacttgtgctaggagaaataggaagagataagctacgatgatttgtcttttttttctctccttggtcaagtttttgttgggtttatagttgaaattttggatgctggtggacagctgtgtattatagccatctatgttgtgaacaacatttttggtgccatgatttacccacggtttatcttgttttggttaataggaagaaaggtgtcactatgttctgtcttttttctctccttccacaagtttttgtttggtttacatttccatgagtctatgttcaggttgcaggttctcctttgcataggtttatattgaggctgcagataaacttgtgctaggagaaataggaagagataagccacgatgatttgtcttttttctctccttggtcaagtttttgttgggtttatagttgaaattttggatgctggtggacagttgtgtattatagccatctatgttgtgtacaacatttttggtgccatgatttacccatggtttatattgtttt

SEQ ID NO: 142754 - DNA, 801 bp, Zea Mays
gtgcacaaaaccattctccgcgcaaaagttgcctacgggtgcagccggactagcacaataagtgtgcaacatcgaagccttttccaaaagtctccgcgaaaaagtcacctacgggtgcagccggcataataggtacacaaaatcgaagtctcttccaaaacgctccgtacagaagtcgcctacaggtgcggcctgatcaacgaaagcgcgcatcttcatcacacaaaattatggttacatacacacagcaagggcatcacatgttacattggctcaaccttcgggatggtacccatctccctgtagttgaacagcattatcctcagttcctcaccctcaaacagatttcgtagctccccctcacccacactcaccccaatcggcgaggacaacaattctcgcttaccagtcccacccacacgaagacgacccctctccacctcgcttcggtaacgcttaccacttcgtgatacttcactcactctccgcttcaccaccgccctccgccgcctatacccagtactcacgcccggaagttccttggaaccctccgcgcgcggcgaaggctccgttgcagccacatccaacgccgcaaaataatccaagtcttcatctgaagactcctccatccacgcaatcgaactcccagaatcatcagactcaaaacacttagacacatagccaaacgaatcctcatcagtagccatgatcgaagccaccacaaaaatatcattatcagtagcggttgcgtgcgcaggcccagaccctagaacctgcgcagcaacagaggttcagtatcac

SEQ ID NO: 142755 - DNA, 658 bp, Zea Mays
gagtcttcagatgaggacttggattattttgcggcgttggacgtggctacggcggagactttgccgcgtgtggtgggtgttgaggatcttccgggtgcgagtactgggtgtaggcggcgaagggcggtggcgaaacggagagtgagtgaattgtcgcgaagtggcaagcgtcattgtggtgagatggagagtggtcgtctttgcgtggacgggactggtaaacgggaattgttgtcctcaccggctggggcgagtgtgggtgaaggggagctgtgaaatctttttgagggtgaggaattgaggataatgttgttcaactacagggagatgggtatcatcccaaaggttgagccaatgtaatatgtgatgccctcgctgtgtgtatgtaaccataatttgtatgataaggctgcgtgccttcgttgatacagccgcgcccataggcgacttctgcacggagagtcttttgggaacgacttcgattgtgcgcacctattattccggctgcacccttagacgactttggcacagagagtcttttgaaaaagagttcaattttgcgcacttgttgtgctattccggctgcacccttaggcgacttttgcacggagagtccggctgcacccttaggcgacttttgcacggagagtcttttgac

SEQ ID NO: 142756 - DNA, 351 bp, Zea Mays
gaatacaagaggaaggaggaagaagacgaggtagtcggctggggaaatttccattagcatcatcgtaagttcttcctttggctgttctccagttataagccaattacaaggactcaattggtccacacatcagatggaaagcgcccactgggcctgcggactcgacggccacggcccatcagcgaatcgttgtcttgaaccacttcttccttctcacgctccacatttacttggacatgccgcttctgctcctgcgacctgggcttcctgacatacccccgttcttgagaagccgcttgcccccaagcggcggctttgggaaaccgttgttggagcgcctcttcatcttcc

SEQ ID NO: 142757 - DNA, 452 bp, Zea Mays
gcacgatttatccgcgcaactcccattctctacttgagccgctactcctttcttctacttgtttgcccagatggcctctgcccaatggatccgtgatgcggagtggtgtggccgttttataggaaacgagtccgcggcgggggaggaaaattccgcgaacggatcggagattgttccgctaggctcgcactccgttggagacggaggcactgcagagggggcccatgcgtcggtggcgggcgaccagagcgcgcgcgcgtgaaggctgccaggtggttgaggggttaaagccaagatccacccgcatcccacgcaggttgttgggatccaaatccgagcggacagcatctacgggtgtggcgaatagcagctggaggatagggatgacgaggtggtcccacacgtcagcgagctgagcacacaaccgaggcaacggagacaccgacagagat

SEQ ID NO: 142758 - DNA, 541 bp, Zea Mays
ctagcgattaagtagatccgtgttggggtccagcgagtgcgcaaggctaatgcacaacaacttcgtcagcgcgtgcgcaagaccaacacacatcaacttcggtatgagttcaaagccttagtatggaggagatagagaacacttaagatttcgtgaaccagatcactatcctgaccgctgatccgtgtctcctcagtaacaacgccactgacgtcgaggtagtgtaatgatatgttcttaagaagaagagaagttcttgtttccttgtacgttagtagaagttttaggtttatatttgaaagaccttgaaaaaccttagtcataatgcaaaaacgaggatagtttgctatcaagaaggggagaatgatgagaacattaccagctcagatatgaccatgttaatggctcttattacaaaggtgaaactctttcacattgtaactaactttgatgtatttgaatatatgatattgcgtcgtaaagtgtgtatgtttttatttgtagaacttcttacatggattaagcgatgtgttgagtgtac

SEQ ID NO: 142759 - DNA, 463 bp, Zea Mays
agcagtttggttggctaattagagacggtttccatgatatggttacctctatctgggagcatgaaacaaggggcaacaattccatggaaaagtggcagaagaaaattcgggctgtacgccagcaccttagaggatgggcaaaaaatacggttggaacaatgaagaaagaaaaagtccaacttactaaattaatcgatgacctagataaaaagacggaggttactcgtctctcgcctaatgaactagccatgaaggcatttattaatgaacggttggctggaattctaagagaggaggaaattcgactcttccaaagagccaaagtcaagcatctgctggaaggtgacgataatacgaaatatttccagttagtggctaatggtaaacaccgtaaacagagaatctatagcctagaagatgataacgggtcaagtatagtggacgaggaggaactcaaaaaaca

SEQ ID NO: 142760 - DNA, 394 bp, Zea Mays
cggtatgcgggccaaggcggacgaggagagtagcgaaacggcggtcggatctcactgtcactcagctgcctcgtcttcctccctcaagctctcgattcactgatgctactcgatgagcagggcagggcggttgacaaggaggttattttgccggccatcagaccccacaaatcaccgaccactaccgcagtaaacaaggcacagaatacgcgagtataaaactcccagggagatacgcaccggagatccaagtgatgactggaatgatggccgccggagacgccagatgcggacgacccttcccccggcaagcgctactccaccggcgagcctcacagcggcaatcggcacgagctctctctcacgggtaacagcgcgtttcactctccctccc

SEQ ID NO: 142761 - DNA, 288 bp, Zea Mays
ggtgaataggtctcgttgaaggagaaccatagatctcacgctttacggtataaattagatctcgggttcattgtatctaggatccaaagtccacccagcgcgctggccgtgtaaactgtaagatctaatccagaccgtagatgctagatcagatggctcacatggctagatacccctgcggccgtgctactttgtaaaagagtccgtgggaaatcctggaatcaacccgccgtcctagcacagttagagaacatttaatttaggtcctgtttttagcagttgaatccc

SEQ ID NO: 142762 - DNA, 565 bp, Zea Mays
ggcgcggcggaccgatttgggggaaatcggtgattcaccgactatggtggctaatcgagggtgggagcgggtgcttcggcttcgcaatttagaggcgaagagctgtgctcggttgatttgaatggagggcatgaggatgcggtgaatttataggcgcagtgagccgctgccatggccatggtgataaccatcgtcggccttagctggcgatcaacggcggcgtgactccgagcgtcatttgatcaacccgagcacgaatcgagatggcgacggcatgaatcacggtggagatcgtcggcggtgagctgagctggtgacctgatctatttcagagcactgtaccacggcgaatcccatttagtgcacctgacagtcaaagtttagggccaaatttctctcaaatttctatggcaactcgtacaaagttctgcagcaaagttgtagaccaataattcagctacaatcttgccataatgactatagccaaattcctactaaatcatgtttgaatttgtccccaaagttcctgcagttgcactgttagtctgaaatttagacctcaaac

SEQ ID NO: 142763 - DNA, 354 bp, Zea Mays
ctacattggaccacattaggggggtctagcattttcttccatataatgcttcgaacggtgacattttgatgctggcctgatggctgttgttgtatgagaattcggcgtacggcaaactggactcccaatccctgtcgaacgttaacccataggctcttagtaaatcttcgaggatcttgttgactctttccatttgaccatctgactgcgggtgataagcggtgctgaaatctaacttggtgcccatcgcttgctgaaggcctttccaaaattttgaggtgaaatgcgtccctctgtctgacactatcttccgtggaatgccatggagcctgactatctcctttagatatatca

SEQ ID NO: 142764 - DNA, 499 bp, Zea Mays
tggaaatccaaggatgcgtaacacatgttcgaaacgaacacagtgcaagggtgggatgaaacttaaaaaaatctacgatgatgctaaagagaatgttatttccgtttgaattgatctgctaaactatgagcataatcatgaattcttgaagaaagatacagaaaaagggcaattgcaatgcaacaaaactcatgatcgtgattatatggagttccttagtgcgatgcaagaaagcaggatttcacaacattgcattatgaattttgtttccgaaatgcatggtggtctggaaaacgttccaataaccgtgcaggacatgagtaacctataagtgtattattcattgacaataatggttattatatattaccgaaacaatcgacatgtgttaaaaatatgtagtgcataatcattatgtttttacaggaagaaagcatggcaaagggaaagaaatgcaaatgatgtgtcgaagctattatctttttttcattatgcaaga

SEQ ID NO: 142765 - DNA, 355 bp, Zea Mays
gaagggtccaataaagcgaggggacaacttccctttaactttaaacttcctcataccccggatcggtgacacctttagatacacgtgatcaccctccataaattccaattgtcttctccgggtatctgcataacttttttgccttgactgcacagttctcaagttctcccgtatcaatcgtacttgttcttcttcctcatgtataatttctggcccaaagaactgcctttcaccagtttgatcccaatacagaggagtcctgcattttctgccatataaagcctcaaacggggacatcttcaaactgacctggtaactgttattgtaagagaactccacatagggtaaactctta

SEQ ID NO: 142766 - DNA, 708 bp, Zea Mays
cgacctagaaaattccgcggtcgaagtcctcgctcgcccggtcgaagatttcgaagtgccaacatccttggtgggacaaggcattcgctgcaccctcgcaggtgacaagagatgcataggacatgaggctcgtcacgatgtgacgggagtgactccagctcctcgtgcagccactcgagaaagcaaagacccacctcctccccagatctatcaaaaggagcggtctgtgcgccgagctcgcgatacgcttcgatgaacagtgtgtgcgcccgctcaacaccggcacaggtggaggcctccattttctcggaatagttgcgcaggcttttcagctccgactccttgtcggtgatgcgcctgagggcaagatcagcctcatcgtgcacaacatcagcttctgcgtaggcagcctgggcctccgcgcgagctctttccgtgccctccttttcctcggcaagtcggcggccgaggtcttccctttctttttctgccgccaaaagcttctcaagcaaattgcggcttttattctccaccgccgacttgtccctcaccgcctccatatgttgcgtgcggaggcgctcaatccttccttcaagccacccccttttggtggcaaactccgaggtcagcgcccgaaagcaatacgttccgcgaaggcggtcgcctgacaccaaaacatctttaaaaaacagaaccataaaaacgaca

SEQ ID NO: 142767 - DNA, 372 bp, Zea Mays
gcgaggttggtggctccaagccacctacatccactgctcccgtcgggcgctcttcacatcagccacctcaccgccctccctcccaacattccgagggcgattctgatcatggctcctccttcggacaacacggagagcgaggcaagtgcggtggtagaacctccggcaacaacagcagcgacatcattggccctacaccatcctccaactacaactactacaacccttggacggggccatctacatgtggcctggccaacgtccaccttcgactcctcgcccacctgctgccttgcccccaccactgcacgccctcgtcgccggagctcctggctagtgggcagttcctgctgcggcatatggggcgccccc

SEQ ID NO: 142768 - DNA, 337 bp, Zea Mays
ccggttttgacatcggttgaaccggttttgaccagtttgtttgtagtttttgttgaaaatattttcgcttgcctattcacccccctctaggcaactttcaatacctctttaggtcacaggaacttctaggtcgcttgtaggtgccttgaaagttttcgacgaaagccttccagaggtcggcccagtcgcggacgattttgaccggcaagtgtctgagccaagctcttgctccctctgcaaggtgtatggagatgaacaggatgatgaggtaatcatacttgaccctcacaatgcagcatgcaaggcggtagtcttccgaccacacatcggggttcat

SEQ ID NO: 142769 - DNA, 279 bp, Zea Mays
acaccctggtggcgagaaaatgtaccaagacctgaagaagagattctagtggtacggtatgaaaagagagatagcaaaatatgtggccagatgcgacagttgcgagaggatcaaggcagaatatcaaagacccgcaggtttgttgtagccattgtagattccttagtggaaatgggatgagattgtgatggactttatagtcggtctgccccacgcttgagctggttatgactccatctgggtagtagtggaccgtttaacaaaggcgacccatttcat

SEQ ID NO: 142770 - DNA, 798 bp, Zea Mays
cttaaaatttgacctcaagattttaaatgaaaagcataaagaataatagaaaatgagaaagaaagttttatggaagtcatttattccatccataaatacataataggaaaaagaataaataataatattgtatacaacaaagtttatattcacactaggatttatttagacatttggaaatttgggagttcaaaaaatgagttgaatgtgaattgaatttaaagttagaaatcagaaaaaaaaatcatgaaaagaaaatataaaagaataacctggcgcttgggccgaatctccttcatagcggcccactcacctcctcaccttgggccaaatttgcctagccatggcccagatcagaacacccgcacagcccaactcaccgttgtgcaccctagacatgcgtgttcggtcaatgtcacacgggcctcacccgtcatccagattacgcgtgcgctgggcgattctctctgcctggtgacccggtccatcatttcgcgccctgcctcatgcttcgcttacctgtgggacccacaccgtcagccttatccccttcttcacgtccgggttgttgcaacagactcaccgcggacgtcgggctgttgggatcgggtcaacccccctcctcatggggcaggactccattggtgggtgcttaaaactcgagcctcgccgcccttggtggatatgcaggtcggagtctgctgcctccgtgccgtgcgcgcgttcagagcgggagtagagagagaaagagacgaccccgctgttaccgttcttcgctttcagctatttatgactttc

SEQ ID NO: 142771 - DNA, 1012 bp, Zea Mays
taatattattttatcgtgacaagtgttttaactaattaattgtttgtttgtttatctgatggatgttaaagtagagatctaattaaaactaatgtatagttttaatttgcgcacgtgtaaatggacgttaacatgatttaagccaaattaaatgtttatatttgtttaatatgtgttcattctaagcacgatatctgttaatgatttcccgcttgtcgtgttgttcgcgcacgtcgtcgcatctttgtagcgtttgcgagttcgcgtcttgcgctgttgcccgtgcactgcccgcgagttgtcgcacggactgcttgtgctatccgcatgtgtcattgttactgttcacgtgcggtttgcgcgcgctgttgcgtgccacatcgtttagattccgcgaaccattaaatatccaatatatttgtgttgtaaatccgtttcgacttatttcttttgtgttagcttcgtagagctatattaacgatgtattaggtaacattactttatcatcatgcactttctaatgttaattaattggtcatctatttatctgacaattattaaagtagcaattaattgaactcatttatagtttagattcactttataaatacatgttaatataattacgtctaatagaatgttttcgaaataatacttctttagtataaacacactctctatttagtatttctcgtatgtttcgctcgtgccgtctttcacgcaaatcgctagttgcgcgttttagtaaaatcatttcgccacttcatgcatgttaaattattaattagtaattagttgtttagtggtcggttattaaaataacaattcaaccgaaaacaaatttgtaattttaattctacgcttcgttaatatctattaaggtagttgtatcaatccgaagcgttttcattcatgtttggttagtctaccatttatgtttggttagtgtagacatgatatcgattcgctgcggcataacgtgtttgttctaaattaattgttcagtcgcgtc

SEQ ID NO: 142772 - DNA, 611 bp, Zea Mays
gtgagtgcggacctgagagcggctagccccgacggggtgattcacggcggcgcatatgatcaatttgggggaaaacccaaattctacggctatggtggctaattggagatgagagttagtgtcctgggttcgtaataacttggcgaactagagtggggcatcaatttatagaagctttaggcgacggctccaaatttgggaggagagtggtgcttatctccctggtgaggcaatcaccgaggctaccatggagcgcctgtgttcaccttgcgcctgtcactatctcggggatgccacaatcacggcaatgtggtgaatcaggcgactacgtgtcccttgctgcgatcacggcgagcaccggcggagatattctaccgaccgcgcgggcaagtgggtacgacggtgactcagccccggcgaagaccttcttccccgagatctttttaaccctcacggttatctactccttattagcatgaatcgtggcatcagcgtgaatcgcagtgtggaggtcaccagcgacgaggtacccagaacttggcgatctgatccaatcactgtaccatcgcgctagtcattagtggttctgacagagcgatttgtagtgcttc

SEQ ID NO: 142773 - DNA, 300 bp, Zea Mays
tggagcattagaaagaaaacaatgggcttttacctgcacatatgtcgcgaacgtaatgaatccaacatgagaattatctggcaatagctgacttcttcaatcatgcaagtatctacaacaaaaatgaataccggtggaactgtaggaccagtttcagttaaagatatgtactcgatggtggtgtactgaggaaagaattatgcagagagattattttctgagatcgatggttagggttgagggaattggttgcattgaaaatagaatgaacagacccagatcttagcaacaaagtctgca

SEQ ID NO: 142774 - DNA, 449 bp, Zea Mays
gatcgaatagcagcggatcgactcggagattgacgcgcggaacacgtagcacgaggacgattgagggcaacatgacaccaaccttgacgtcgatctcggaccggttctgcttgaggaggtagagaagcccgagcaagtcgtcggtgtccatgtccgtgtccaccaggagccgccgcggagtagccgcagcaccgccggcggccgatactactgtgaggaacaacacggccacagtcgcggccgccgccgcggcactcctgctgctgctccctttcctcgccgccgtcgccatggaggacactctcgtgtgtcgtaggcttgtagctatagcagcgaccggggactcttcttctcggtgcctttctgcatggaggcctggactggagggggatgatgggtgatcgcattttatagctccatctcctctccacgccggcgtcgatgtggac

SEQ ID NO: 142775 - DNA, 417 bp, Zea Mays
gaggtgcggcaggagtcctcatgaagtgcattcactcggctattgggaagcaactgttagatgaaattcatgtcgggcagtgcggagtacatgcagcgtccacaactctggccgggaaggctttcagatctggtttctattggccaacagtgaagagtgatgctgctgagttagtctagagatgtgaagcttgccaattcttatcaaagcaacaacatttacctgcacagcagctgcagacccttcctgtaacatggccatttgcatgctgggggctggacatgatcggacctttcaagaaagctcagggaggctatactcacgtactcgttgccattgacaaattcacaaaaatggatagagtacaagcccattgtctctttgacctcggccaaggcagtggaattcatacaagac

SEQ ID NO: 142776 - DNA, 397 bp, Zea Mays
gtttgacatataatatagtggttacgtaataaatactttgttacgatattaataaagcattgtgttttaaaataatccattgtatgacatcgctatacatgtgattctcgatccgattacatgtatagtggacattcgtttttgtccttaaattcgattgtgacagaaatggtatcaaagccatgttgattgtcggacgcaagcctaaagtagaactggtcgaccttaaccctatcttgcttaacactccatctttccttcaaaatgaaaacctcttatgctattcttacccaatggaaattaatataatgcactctttcttgtttctagatggcacatacccgttcgaccgctagaaaaagcattgaatgccacattcacattagcactgtagtct

SEQ ID NO: 142777 - DNA, 386 bp, Zea Mays
acgccatcaatagacagtaacgtcgctggatctgtgtataaccttcccagcatcgccttggctcccctcgctcggttataaaacgtgccacactatgagctctccctcatttccctgctcgctcacctcgcggcttgttgctgctcatggtagcacacgtcgtgcactgctgcttcttgccatcgtcaccaggctctagtgccgcagctcaccggagtagtcgccctgctcgcgccgtcgccgacgttgtgcctgatctctgtcccagcgccagcccctgctctgcaactgcttcgccatggttatgcgcctcatcagaacccgttgtgcctcatcgtcaaaacctcgctactcgtggccgcgccatcgcaccagcagctgcgccg

SEQ ID NO: 142778 - DNA, 399 bp, Zea Mays
tccagtttaatactttaatgtcatgtagaggtattgctgatttaagtcttaggataaccacagttggtgaaggaatcaaaccaagaccagtgtggccattgaaagagacctcccaaccaaagtgaggtttggtcttgtacattccaacgccaatgacaagtacgaatacagaattctccttactgagctggacaaaatgtcacgtagaggtttgttctttattgtgctcttgggcaatgggggcagtagtggaacgcctgacaatcatagctcgattctcttttggcatactgttcgggtggatcatacaatatgttcaaggaagaaacagacatgctggtttcattgactaatgggtgatgctagcaggtgaccatttatgatcagtgccaagcctgc

SEQ ID NO: 142779 - DNA, 508 bp, Zea Mays
cacgtatcaaggttaaacaccaccttaataatgccccaacttagtttagccagtaaacacccaaagaaggtgattcatcgattctggccccccacgaacacaacatctgtcactaactttccacccattttgatgatcccagccagcctactcataacccccatcagatataaacctataaagagatttattagagaagtggcttttattttccaagccccaaaacataatacctatagaatccatctccaaataaaccacattcaaatcctctagcatctccttccataactcaaactctctcaaggagagggctcttcaaagtctacatgccattctccttgtccccaaaaaaattatccagtgtacaatcaatgcctctgactaacatgtacaactcttaatcagatatccttaggggaagattgtgaaagcatcgatctttccaaaactgatagctaaaaccaacttcaactttgaaaatagcaccccacttgaaaagttgttt

SEQ ID NO: 142780 - DNA, 530 bp, Zea Mays
cttttatagtttaagggaggcacgtacaagggtgctgagccccgacatgcgagcctaggtgcataatggaaggaatacattatgtgagtaattaatgctaataacacctgagtaatcaccgggcgccatgatgaccgcagtccacacagtattgatgggcagttaccgtatgagtaatacaggagtaatggtgagtaactatgcggcccatgtatcgaggactaagcacgctgtcagtggaatggacaggcgtatgtcttatctgtcatgaaggcgcgcgtagcccagaggcatcacgccgggttccgcccgttggcttatgccgcgcgcagtacgccacgtggcaccatcggggctccgcctgagtatggagaaagagtgtatgtgaataggtccagagcacaccagagtaggtctggacacgtgtcagctccgtacccccgcctgggccttaagtaaggtcttgggaccctactgtgggggtccggtccgtacacgtgggggtcctggaccaacttggaggtccgcac

SEQ ID NO: 142781 - DNA, 515 bp, Zea Mays
tggtccgggcgaatggaaacagtggaagcaggccgatcccggagcgcgaaaggcccacatccgaactagtcacggcttagacatgatcgtgataaggttgttcgtttttccctcacccgacatcctaaaacggcggagatagctcagcgcagaggcgccgggttttccttaggatagtgaaagttgtttgctactaattagaagataagcaggaaaagtatgatcaacatgtatgcaggaaacaccccacggtcgtgtatataaggccaagggggatcccctccattttcatcccattagcatcccatagctcggtagacaccacctgtaataccactcacatacaaagccaccctaggaagtagggtattacgctcttcaaagcggcccgaacctgctgaaatccgcttgtctctctctcgtgcccaagcgcgaaccatcgagttacgaccatcgacaccgtcctacccaaaagcacctcaagggtaccaccgggtgtgcggtcagacacaaaa

SEQ ID NO: 142782 - DNA, 310 bp, Zea Mays
attgtgcttttgttgggctgtttctgtacgcgttggacatcggcatgcatgatgacatgggccaggtcgccacggaaaaaacgagatttgggcggagagtttggtgcgccgagtagggttggtatatgcaggtgattggtcgttgtgcagcgtaggtacagggtcgttggttgtttgaatcgtacttcgtgagcagttagtgctgttgatcggttcaggatctcgtatctggtagaaggcacggatgaggcatgcagactcttcgaggcctcatgcatggtagactggtagacgtctgtagctaaagaca

SEQ ID NO: 142783 - DNA, 399 bp, Zea Mays
attttccaaaactcgaatccataaagtccaaatatcaaagtggcgccaaaataccataggaacaatctggagaagtttgaaatcaaaccaaaatcgtttgacacgacttggcataggttttgtctcggtttggatagtgctgacagagctatcttcacgccaccatatcttctcacccaggccatatcttcacttgagactcacacatgacaggaagaccttggcacggtgaagagacgctacacaggatccttggcaagatatgcacgtttaggtcggccaacaggcgtttgaactcgggcagaattacacttccacgtgttcgatcgcgtgctcaagcgctcgaccgcgcactggctgccctctgcgcgctcgccgcgcacggtcggctcctgtccc

SEQ ID NO: 142784 - DNA, 378 bp, Zea Mays
attcaatttatatttatttgatatatttaatttaaatttatctttaaatattgcacttcctaacatggatgaattccccgcatggatacatttcccaacggggacatggatgggtaaaaccttcctcgtgagcattcgtagggatggtgacaggatgtggagccattcttcgacggggaatttctctttgccattcttaagcacagcccatgagcccatagttttgcgatagccgacactctcaactagtaagagaggcctcgaatctgtacatggcctcgaattttgccggcacaaccctgggcgaaacccaccaaatggtatagcccctagcaaggtggtaattcgtactactaggctaccaaataccgaaccgtt

SEQ ID NO: 142785 - DNA, 443 bp, Zea Mays
gatttaagaaacgacacagcataacctgatatctaatcgtggccacacacttgggatcaacggttaggggctcatccacttcatcattctatagccaccgctgatcaccagatcaatggactccatgcgtcttcctgctcccgaccgcatgacagggcggcggaaggagagctccgccccgcgacgaccggacacggtgccacagcgccatcaaagcgcaaccccgacgagcaccgcccatgcagccacagcgaagcacggatcgaattgcctaatcgtgaaggtgacgtcgctctacacggttgggaacataccggtgcccaggttcgaacaggttatccctgggtggagcgactgatgccttgtggttcagtggtgacgacggtgcgccggcccgccgttcttgcgaagcaccggatgaatcccccccgggcagagcggcg

SEQ ID NO: 142786 - DNA, 655 bp, Zea Mays
agtgtactataacttttataattagcccaagtcatgaaaatgtggtttacatagcccttttgctataatcccatctagggctccgtttgcctaaagggatttgaattagggtttgagcccttctctcctctttaggtgcatgatatggccaaggcatgacctctaagatgggttacacctacttaggatcttgacccccatgtttggtgtcttttgctcaaactaaaccacatgtgatgatgggttcaatagtgtaggcttcggtgaattccctaagtaacacctggggtgttacagcctcggccgtttgacatgatttggcatggttttgcctcgggacgcagcagttagacactaacaacttgaggacacgacaactcactgtacacgaccaaaaaccccataactcccacacataaacgacaaagcttacatcagggaacaaatcttacacaacgatcttgcccaaattcgcaaagatatgaagcctatcggtgttagaacaggagcagaaacgatgtgccacatgctcgaccacggatgacgcgccggtgcacgccagcctgcgcgcccgcaccggtccacgcccaaccgtgcaccgcgcccgcgcctataagagtagtgcggcctcagtcatactccctccgcacctcgc

SEQ ID NO: 142787 - DNA, 333 bp, Zea Mays
atagcatcagaaatgtacccacgaaacattacaggcatgagcctttccataattatgtggaagtcatggctcttgagtccattcatcttcattgtcttcaagttcacagatcttctaaaaccagcagcataaccatcggggaatttaatatcattcatccacttcatcacttctttccgttgcttaggtttcataccatagtcagcttttggtttgcctccgttttctctaagcaattgggttggacaatcacaaatcacggctaagtccatgtgtgccttgtcattgtctttcgttttatcagggaaatccatgcatgtatttatgagggct

SEQ ID NO: 142788 - DNA, 366 bp, Zea Mays
tttgccattggcagttcttttatatgtttaacctgttgaaattaaccattgctgtttgtgtttttttttcttgttcttgagctgtacaatccatttcgtctcctctagacttggtctcaagatggctgattgagcattcgcactgaagagtacagtatctgaaggttctgaactggcatttgcacccgcatactctttttccccttcatttggtgagactgcataggctccatatgtgaagtgatctgttttgtaaggaaaccagttactttaaccagtaaccggcagaagggatgtaaaaactggaacgtttcatgagcagtgttaccctgtgtgatggttgtatggtacttcgattggggcgcg

SEQ ID NO: 142789 - DNA, 439 bp, Zea Mays
tatctcatttaactcatagctacttactaaacctcttatccctaacccggatgaagacaccaaggtctggaaagaagagctcaacctcgaccaggaagaagatgagtcaaatccaacttcaacatgaagcaagatccacagttcaggataaagtctttccttattaaactcttccttgccatgacctatactgactataagggaatctcatagatgcctagacatactttgtccatattttcctaaccatctcctaacccgtattctattattttaggaataataataaggtccaatcgaccatatgttttgctaaataaaattatgcatcatgctgagatttttgttcgtgcatatgtgttgagacaatatgggtatacatctttttcttacaaatctcgaggacgagatttctgttaaggggggtagaatttgtaac

SEQ ID NO: 142790 - DNA, 337 bp, Zea Mays
gcaagatgcatatggatgaatatggtgaaaaatatcacaagatatacaatacatggtagcgaactaaacaccaattagtaagatattgcaacgactatacgcaagcgctagctattcgtacgttatcaacgttcatcattaacaccattaacaagacggccacattttgtatatttacacaacacaactacgacaatcacaagtacacgcatttatttaacttgctatggcttttccttatttcttctatttatcacacaaaagcatcaccgaccacacaagtccaaccaagacaacgtaagtttgaatacaacatagacattaataactacggaac

SEQ ID NO: 142791 - DNA, 466 bp, Zea Mays
ctgacgtcatgcctaatagagaccccttgataccgcttccacaatccgagcatggctcaggctcggtgatgtcccatcgtgtcgacgtggattgatagtactaggtcgactcttcctgagagtcagctgtcgtcttgctaggtggctcggcagaccggttggttggtactcagtagctttgctttgctgggttgctcgatgggctgattggtcgtagcctcgcctcgctaggttggtcggtagccccgcctcattaggttgatcggtgggcccacctcgctgggttgctcagcaacctcgcctcgctgtgttgctcgacgaatatttgtttggtgggcgagctggtcggcctggcgggccgtccccaggaggccttttggacctttacgccgagctgcttggcaggtgggcccgctcggtttatgggtcatctctaggaggcctttgggccctctttggatgcctt

SEQ ID NO: 142792 - DNA, 645 bp, Zea Mays
gtcgagacctaccgccgtctcgctggcaatggcgtgtcgtatggctccccctcgtccgctcgtcacagcgccgacaccttcgagcccgcgcccgccccagcctcaactcttcacgctcaggcggcggccctcaccatcaccagcatccaggcaactgtcaccgatgttctcgcgccggactccactcagtaccctcggtggcgcgaccaggtcctgtagaccctccgccgctacgcccttgccgaccacgtcctctccatggtcgctgactcgatggaggattagctcctgatggatgaggtggtgctttcttggatccatggcaccctcacggccgagcttcaggacatcgttcgagtgtcggacgatactgctcaccggatctagggggtgcccttgaggctcagttcctcggcaaccgccagtctcggattctgtaccttgagatcgctttccgccagcttgctcagcgtgatctctctgtggacaagtattgccgtcagatgaagacgatggcggacactctccgcaccctcggggcccccatcactgatgagagcctcgtgcttaaccttcttctacagcgcgcctcgggctgctccctctgacttcgggggggggggggggggttcctcttcacagcac

SEQ ID NO: 142793 - DNA, 405 bp, Zea Mays
aagagctataggttgctaaggtgccatgaaaaatctggttggctagagctatcaccagaagtagctttctcctcgttcgcttctgtcagttctgtgatttcatgcgaaacccgtacgggacttgtttctcctggactgaccagaccagcagagtaaagctgggagatgcgtttttgtcgcggagaatctgcagcagcaggttgagaatatgtggctacactgttgactgcaggttcggaggtgatctctgacgagcgggcccgctcgcccgatcgatgcacgggccagcctcccgtttccggcccagctgtgcccaaaccggcctacctgtcagcccaaggaggacggacgacgttgttatctcccctcttccgtttttaaaatttaatgcaaatgcacgacagc

SEQ ID NO: 142794 - DNA, 613 bp, Zea Mays
acaacgtttagaagatctcgaagctggtccttcgccaccattatctgaatgtttcgataaccaatttgctgaagatgaagatatgggtggcggggaatgggcactggatgatgtgaattctgaagagattgtggatcgtcagatgaagtagagtagtatgtgtggtgtggaatggttatctgtgtaagagttagctgtgttcaagttatctgtgtaaggttagcttgtgtaagagttatctgagtatggttagcttgtgtaaggttatatgtgtaatagttagcttgtgaacctgggttatgactgatgctgaacttgtcctttcagtttgccattgagtattgaagttgccattcagtttggcattgtgaagctgtccattctgttttcttttgtaggttatttgttcagaatgttcagtttgccagttcagctgttaggccctgcagcagctgtccattgtaggttattttcacaatgcagaaaacagaaaatagctgttaggccctgcagcagctgccctgcagcagctgtttgccagttcagtttgccagttcagctggcattctgatgttcacaatgcaggttcaagaaaatgttcagtttgccattg

SEQ ID NO: 142795 - DNA, 363 bp, Zea Mays
gccactgctcactctctcacccacccactctcctactgcgcgttgacgaacgctgtcgctggctagctgcaggcggagttcgctttcgtcttccaggttagtgcttttcccgttgcctgttccaccctgatggcagatctagctttaccctactggccggtccgagctcaatctgtgggagccctcagctctgttggtcgtctattgcattggtagagaggtcaacgcggtgaaggaagagctgaactgaatcggtctttagtttctgtatgtcccagtatacttaatgcagatccgttttacattagaagagtaatgcacatcatggtatgatgaatacataccagatccagttctacataa

SEQ ID NO: 142796 - DNA, 302 bp, Zea Mays
tcatttcaagccggttcaccaagtctacagcgggaattcttctgttggtgacccgggttgagtcagctagacctcggtacaaataagccgggtatgccctgtccttcaacggctgaatgttcttgaagacaaaatcagcaaccacagcctctgcagtcagacccctctccttcagcagtccaacttcagccagcaaagcccctgcctcagccacctcctggtccgtgggggacttggtccaactcggagtacgaacatctggctgtctccctgaccgtggggggagagaattttcgtggttc

SEQ ID NO: 142797 - DNA, 384 bp, Zea Mays
ctcagcatgcttgcaaaatgaatcagtaaggaaaaagaacacggctgcatcatctatatgatacctccaagtgaacgtaaaggacaacatcatcgaccattttaatataaatccaaagcaaaccacatgaaaatcaaaatagcagcaggtataacatgaaaacacactgtaccaaaccctaactcatgaagcatgaaccagaaaatagaacgattgggggttgatttcaccttggggtcaaggacgtagcaacggagatggagcagatctagaagtatatgaagcagatcgaccagagacgaagcagatgcccaaaaccacggagtcccggcaccaggcggagctggacgcagccgcgacgcacagctgctcgccgccggtctc

SEQ ID NO: 142798 - DNA, 410 bp, Zea Mays
gtgatgtactccatcgttaagtcacctctgatgctcgggttcactttcatctatgcaagtgcctaagccccactaggccttttcattgaacgccacatcacatgttatatgaatgcattttgtgatagggtcgtaggtgcgataggccttggatttgctctcatagccaattaagatcatcttgcgcccatgatcctcaagattcaactagtgcaacatcatgttgcacttgtagatgatgaaatcaaatgtgtagaagtgatgtacatccatcttcttcccatgccacgccttaaaaagggtcataccatccacacacttcattgggaaccatttcaatagctacacagaagtgcatacaatctcaccattgagtcatacaagaaatccttttgcctttagtatgctcc

SEQ ID NO: 142799 - DNA, 447 bp, Zea Mays
gcagcggatgaactcgaggcctttcttttgggcgccatctcaactctactggcaaacagagcgggagccaaattgcagagaggatctagaggcaggaaagcaagaactagggcacggaaagcagaggcgactgaaagcgcagtatatgcgggatattcccgagtcagataccgtttccaaaagcgcccagtcagcacccgacagttacttctaaaacaccggcgtgccacgttgtcacccggcagctacttctaaaaccccggtgtgccacatcgtcactcggctattatcctcaaagtggtcgacacggcccgttctaactcggccgttatttctaaaacgctgacgttatcaccagtcgctcggcatattatctctaaagtgccgacgatatcttcagtcgctcgacggctgtctctaaagcatcgacgatgtcttcagtcgctc

SEQ ID NO: 142800 - DNA, 475 bp, Zea Mays
ctactctagggaaaattgccaaagcttcgaaaacacaaatcgaagctaaaataaaactgaccgaagtcaaagctgcaaagagccaggctagtgccgaagctgggccttcagagtctgctaagaaaaaaccctcggaaattgaagagaaggcagcggaggaagaggctatagaacagacttttcctgaaaaagctgccgctcctgctcccgaagcaccttctgaagaccttgattatgtcattcgacatgctttgggaaaaagtttatctgaggaagaaatttttgaagctaaacactatgcccgagagctgaagtacccgaagggggccttagtgtttaatggtacagatgaagatgatttcttgtattgtctcccggacaacaaagaattatccgtctgtcgggagatggccagaagtatgggttttccgaagctcgaagctggcctttgtgccatgacgaaggacgatcttgc

SEQ ID NO: 142801 - DNA, 329 bp, Zea Mays
tgagtgttttttttggataaatgttctcctacatgtaacatattcatgtgtttattttgattttcccatcatagcataaactaaaagttgatatgtgttgttcattgaaactattaccatttgttgctttttgactttggggtataacgttctctcccttttatgaaaaagaagttgccattatctggtgtacctgatttaattctcattagtgcttggattttgaatagtcaattatggtgccaacagccctgttatattctgcccaccaggtgattcatgcaagtgctcacctcccaaagatctgaagaaagtaagaaaacaaattg

SEQ ID NO: 142802 - DNA, 583 bp, Zea Mays
ttcagagagcacaggggtgaaaatataaaatttttatagactcagacggtcaccagaatggactgcgggttgattcattaaaaatgggggggctcttatgtaaaattgtctacacaaagggatatcctaggatctcagccgttggatcaaattctaacgactcagattagatcgagcgcgcactgaaccggtacgccttaatagctgcacgatcccggatctgcggtcacagttgcgtttagcctccgatctcaccacgaccgtccatctagatctacggttctcaacacctctctcagctctatccgcccatggccgttcaaatccggatcaacggcccatgctacttcttcttccccaggcggcagaacacgaccgtgcctacgtagccgcggcggtgcacagggtcccaacggcggagccatggcggagcgattctccggcgagaaatgaacagcccagccaccgtctaatctccacggctcaccacacatcaacggcgcagggcgcgtcttcaacccttgacccgaactaggcgacccgcagcagcgctagagcgccacccggcggtactgcgatggcg

SEQ ID NO: 142803 - DNA, 925 bp, Zea Mays
gtttatttctgtctaccaccacatgagatgtttttattgctggacccacttcagtccttgaatatatgtacatcagtgtttcctttcttagatatcgttgtctgttattttccttactgtagttgatcagggcatggataggtgctgactgctgaccaaaagaacaagtcgggatggagtagtaaaatatctgttatacaaaagcagaggaggaaaagaaaagataggcgtaggataagctggcaaggcacatagcatttcctcgatttgaggggatcaagatccatcaatggacgatctgaagataggcctgaaaactgacgacaacacctagtcctgaatgataagacctgaattattggaggggactttgcttgtgctttctccacatgcatagatgcatgaatgtatcagatgcctgtccacaccagtcttcaaagttatgtcacatcacgaataaaataggtagggaaaagcaatcctgtacctccatcaagtgatacaataatgttagataccataactagcttatcctcttacacagtttactgtagagtgatttgtgtgcaatggaaaacataagattaaaatgccagggcagatgactagtactagcagtacaccgtgatgcatgctttctttttctaggccaaagatgtacgtactttaagactttatcaagtccagcatttcagattaaaatttagccccaccttttcatttttgcattgtacttgctgcatgctgggccctgaacttattttagtattgttgagtataatatgcgatttatattatgactaatagtttaatgtttgtttcctgatgggctaacaaaggttacactttaagaattgaagtcaacatgatgacgctaacatgtaatcaaaagtaggtaaaatatattcacgattgagattttttt

SEQ ID NO: 142804 - DNA, 684 bp, Zea Mays
tccatttcctatgaactctggattgggcgcattaatactgagaaaggcaggggcctcggggtaacttctccaagacacaatgcacaatacccgcaggacggcgggtactattctctaaaatcgtaaggtccctattgtaaaacttacccgcgaaggggtacgcgctgatcctggtcgcacgatctaaattcgaaggtgcagtttagatccccactactcttaaccgcaatcaccaaccggccaccggatttagatccaacggcgaggacctagtgaggcgcacagggtcgccagacctaatccgtgccgaccagtggccgatcgacgcaccagattacactaacgcgaggagatgcacgagttcagatctggttcgttcatcaacctgccaatggtttatagccagcccctgagcgatctaatcttgacccttgttttgtaaatgaacggtaaccgtgtgtcttctccaaaccgcgcccagacacggtggctcgagcgcccacgacggcggacgcctaaacctatcttcacccgccattaccggctaccctgcgcttgcccaggacctagcacgagtgccgcaggggaggttggccggccacaggagtgctcccaactatgctaccgtcatccccaacccaacgcgtcgtctacctccagccggttctctctcttctctctttt

SEQ ID NO: 142805 - DNA, 596 bp, Zea Mays
ggaagccccagccaggtatagccacgtcccgtaccagcgtgcgtcccatcgggcacggttcttactcggacagattttagtgtaaaacatgaaccaaaacagcgtaagtgattacaaattttagcgtaaatcgtagatctgtttcgaaacggcaaatgcggcccgaaaattacggcgtaaaaatctggtgcgtcccatcatgatcgggttttgactcggacagaatttagcgtaaaacatagaccaaaacagcgtaaatgattacaaattttagcgtaaatcgtagatctgtattgaaacggcgaatgcggcccgaaaattacggcgtaaaaatctggtgcgtcccatcgtgatcgggttttgactcggacagaatttagcgtaaaacatagaccaaaacagcgtaaatgattacaaattttagcgtaaatcgtagatctgtattgaaacggcgaatgcggcccgaaaattacggcgtaaaaatctcgtgcgtcccatcgtgatcgggttctgactcagacagattttagcgtaaaacatgaaccaaaacagcgtaaatgattacgaattttagcgtaaatcgtatatctatttcg

SEQ ID NO: 142806 - DNA, 739 bp, Zea Mays
ggatagtagagcaacaaaaatttacacagaaatatgtgtagaagaggtcaatgcacggaacaggccacaacaattcctaaacgtcgaagggtatgctaacctgataagaaagtttaaggaacgcactggtcgcacatacacaagggatcaaatgaagaataggtgggatacgttgaagagaatgttcacccagtggaaaactcttaatgaaagggctactggtcttggtcgagaccctcatactggttcaatcagtgcaccagatgagtggtgggccaagcaaaataaagtaagtagatctttttttccctagactaacattagtattggccatctaaaactaggaactaccatgttggtgcaggcaatgccaggttgtattatgttcaaaacagtccccctagagaatgaggacgagctaaaggttatgtttggacccatcgtctgcataaatgaaagaacccttgttcctggcgtcgaggatgctaattcatcatctgatgatcatttcgaagccactttaggtgggggtgaaaacagcacacctgacccatgctcaaatgcgactgggaagcgtaaggtgcgtcatgattctcctaaaccaaagaggaaaaaagattcgagggaagagtacatgaaacgccttgtggaggcttttgagtcgcgttcaaggaccactaacaagtccatcacctctactgagaccgaccctgtgcgtgttgaggttagtgcgcagttg

SEQ ID NO: 142807 - DNA, 1166 bp, Zea Mays
atctactgatggtgatggttgtgctgaataaatgtatatcccttcatccttagtatgcatctgatatctgagcttcaaccactgatggcgctatcctagtccaatttttcttcaatggtcaagattattcctcctttcccatctaaatttgacaaatgaccagagcagcatctgagttggagggatagaaaaatctcagcgaaggaaggcttaacagccatggcttacccccctccctcttcattcattttgtcgttctagtcggttctctgattcaactgttgtatattatttatctttaattggctttatttatttatttatcctactggcgcaaaggcctgcctgcttgctttgggccgttcagtgggtgagatattgttctttgttttggactcttttcagatgcggatatatgttggcgggttcagggtgtgggttttccagctggggtccgagatttcagttcccggggggtcgcccgaaaggtgatacaccatacagaacctgtgctcaccgcgacctgaccacgtcaattagggatcgagcggcggtctccaactccggcccacaattcgtcgcacaccgaccacccttctcgctcagctatgctccgagaacgtgcagctacgaagatcgcactcccccacttttcgtggactaagtgccgatgaacagcaccacctcaatctcaatttatttcctttgttccttaggcattaatttgtacgagagatttcttgttctgtgacagtttagagagaattgacttcctgatctaatgttgtttgggccattctgaagcgatgggaaatgctagatgtgaaggctcaatcagggatcttgttccctacctataacctgaaacacaacatgcaatgaacaaactttatttctgaaaacaattaagttacaacatgcaacgcggggccggatccatccgccagtttccaatcggacggtcacgatccaatgccacgaaacggtattccgccaccgatcccagccgttggctacgcatccaacgaccctgattcaataggcagcacttaacctaatctcagccgtgcgctaggaaatcgacggcgcccgccaactcactcccagctcgaccccgggcggtggcgcacacgcccggtgcggcggtggccagtcctaatcctagc

SEQ ID NO: 142808 - DNA, 359 bp, Zea Mays
gagttttctatgcttcagtatggatagaccctgatcaccagtggatgaggttccgctttgagcgagaggatgttaccattcatgccaatcagattcaccagttgtttggattcaacgagtcatcgacttgtcttcacagcttgtgctatggcacctctgatcctcctcgtcgccctcacgacggagttgctcctggtacagctcacatcacggctttattctgaccgcccttctcagatgggtcgcgatattctccagcagatttcaccacagcggccaagtttctatatcagctcatgagacggacgcttctgccacggatgggttacagggaggctgccactcatattcagctttgg

SEQ ID NO: 142809 - DNA, 401 bp, Zea Mays
tggactgcggatactatatatgtgtgagtcaggggtctaggtgtcaaattcaggggcttaatttatactcctctctatatgatctggacggcgggttaattataacaaaactgggggctctttagcaaaaacgacacgacgaaggggtaagtttgaatatgggccgcacgttccgattcagacggccaggattagattcccatataaacgcatcggtacagcgctggtgaccgcgagatccgagatctacggtccgaactgagccacgtcttggattagatcctgagcgctatttccgcgatcagtggctccgaatgaatcgatctccataatctaatcgtcaccacccaaccccagatcgacggctctggtgtcttcgtctttcctccgcccgatcagcg

SEQ ID NO: 142810 - DNA, 320 bp, Zea Mays
caaggacatgccaagtcatgatctagaagcaaaaagaaatagctgaagtcgaagcgcggcagaatcaaccgaagcaggtcctgcataccgctttgtgctattctctgtatattccagagtatgtgcacaaccagcagcccacgacatcagttgcttcaacaagtcattctcaagctgcacgggctccgctgccaccaccagcacctatggcaacaaccttgacccacaatcagcaactagaagggcaccgtcaggcacagcaacagcgcgacgcacgtgaataatctaaagctcgcacagtcaacaacattatgctcgag

SEQ ID NO: 142811 - DNA, 658 bp, Zea Mays
gtttgggttggtgttggatgtgatgtaccagagatgctgtgtagttgtctgaaactctgaatcatgctgagatttcagcattggtccagtgtgcattcttagacagtatagttaatcagttatgcctttcacacaaccaatgtatgaaactcaatgacaagtttcatgcatcatgcaacctgagaacaatcacaatgtaatgggagcaacaaatggacacctcaaagtaaacactatgtatagaagctgcaacttccaggttcagtatgtttatctaactcccaagcacaaagcacaatccccatttatgcaatggtgacttgagttgcctttgtaaattgcaaaattgggagttatggacagatacaaagcaatacagattcttaaagaagaaacagaacaaattttatcagtgcttaccttagtggctgctagctcattcatgtgaggatgacataaaaaaagtgccataaacctataaaagtggatgtagtgtcagctgggaaatgtaattgtcttggcaggaattcgatcaatgctctatatggttgatgaagcgcaaaccttgtacagtggtgagtgctgtctatgtcttactgagtcaccaggtcatgggtttaaagcagtctctccatttttgtaggagaagactttctcg

SEQ ID NO: 142812 - DNA, 924 bp, Zea Mays
ttcaaaaggtgccatcttcagactagactgatagctgttattgtaagaaaactctgccaaggaaagacacttctcccaatcctttccgtagtgtagtgcacatgctcgcaacatgtcttccaaaatctgattcaccctttctgtctggccatcggtttggggatgataggctgagcttcgtatgacctgggtcccaagtgattcctgcaattgttcccaaaatcgtgccacgaatggtgctcctctgtccgagactatagtccttggtatcccatgcagacgaactatctggtcaatgtagatctctgcatacttctctgtcctgtgggtggtgtgtactggcaagaaatgagcagccttagttaatctgtccacaataacccaaatagaatcatggtgcgtggatgtattgggcaatcccactataaagtccatgcaaatgtcctcccatttccaagatggtatgggaaggggttgcaaagggcctgctgtcttcaagtgactagcttttatcctctggcaagtgtcacactcagatacgtacttggcaatttccctcttcattctggtccacaaataaaaaattctgagatcatggtacatcttgttgctaccagggtgcatggagaatttggaaaggtgagcttcatccagtatcttctttcttagctcagggtccttgggaacaaccaatcgatccccaaaccataaaattcccttgctgtcctgacggaaacacttgtatttttctgccttttgcttgatcatttccttaatcatttgaacacccttatcctcgatctgtgccctggctatttgctcttgcaatgtgggctccaccgagatataacttaagtcacctgaagaaacaacttccaggttcagcttgcacagctcatcacacagggtggtaactctcgcatc

SEQ ID NO: 142813 - DNA, 500 bp, Zea Mays
gagggtggagaagagaacgcaaaggccaagcgccaaatgcacagggactgtggcgctaagaccgactcaaccaatgaggatggggatgatgatgacgcaagcacgggctccaagctttgggctatccttgatgcctccctttacacatcaattactggctctgccctggcctttccttgtgagacgccgagtacttttcccatcatggaggaggctgacttcctagagcttcctgaccttttccctaggccaatggcctagtagtgcttgcacctccacccgtcgagccttcatccagctgaccgacgggggcaacttgtgggggtagctccttcatctcgggctcatcagaggtctcgggcgacgctcctctagggatgctcgtgcttgcctccaaagtgggtgacgggaccggtgccccgactgggcgccacgtgggtgaggccctatccggaggataaaggtttgtcaaggtgtggacaatgggtggtgtgcctcgc

SEQ ID NO: 142814 - DNA, 469 bp, Zea Mays
gccatagttgattgattgtgagcttgaggtatgactagataaaaaacattatctagtcattaattgctcatagctgattgattgtgagcttgaggtatgcatagttaaaaacattatgatatcaaagtatgtaactcactctcgtctcatgctaaagatgtttcacaaggctgctaaggtatgctgaagggcctatttcttggaagcagaagacttccgttgctgaagttcaatatttatccattgctttatcaccaatatatttgcattagttccagaaatcaataagggctaatcaatctggggaagatattttataggtcacttggagcagtttagagcttgttcggttattcctacgcaatatagattggatgggatagaataatttcagtgtggtgcactaatatgttatgcttagctttttttaggaaatattattattttcttactgtttgcttcattctgc

SEQ ID NO: 142815 - DNA, 692 bp, Zea Mays
gctagatctgctaggtacatgggcaattcctcgttagatgagcgtgcatatgttcagcaagtaacccaggcagttttctttccaaacggtaggatcttccccatccaaacgagaagacatttttggcggtgcgtgatgaggaatgtgttgagagcgtttagacttttgggctcatcagcaaggacggtgctgttgttcgacagaaggcaccggtgacagtgaggacaagctggaagtgtactgccacccccttcagttcggtgcagattgtcaatggtgagttgagcccacagtctgcccggccagtttctcccacctgagaatttccaatttgctgatcctgggcatactgattcacaaactcagtgggttgtgcaggttgctccttcagaaatgttgctgagcagccccagtgtcactgactctggcagacaatgttgttccagggaatccaggctatgcatcagcctagaccaacgatcaagaccatgctgctcttgttcactcatggtagcgagaaagaactaggcttcggaggcgccgtgatgtgaatccccaaatcagcacgcataacaacctggattggagcaatgtcatgagaaggacagcaactagcaaccaatcgttccccaacacgcggatcgaccaaggaattttatgtgaaagcatgcgagtgtttgcgggtgtttgaa

SEQ ID NO: 142816 - DNA, 322 bp, Zea Mays
gcttcgaggcgggagcaggggagtctgcctttaaagaggggttcatccctcgagtagcagccatgccttgcttctctcccactcgcggcgtcctttcgcctctgagctctctacgcccctttgccttcaaggtctctgcttcgtgttgccgtagtttgccatggccttatgacttcatctcgagcgtgcccagactgagtgagtgctcgaaatggtatactgcctgcttggatggaatgcgccggcgctcggcggaaggatttccgccggcatcatccacccgatgagcttgccgctagagagttcatgccttttgtcctcc

SEQ ID NO: 142817 - DNA, 461 bp, Zea Mays
ggacgacgtcgccgccgccgccgggcagcattgcgcaggcaaggtggatgccggagagctccagtacctggcccaggccatgatgaggagccccaactactccctgtagccgtagctgtagctgcctaggaaggatgatgagaatcagacaccatgcgttttggagccatgccatgctgtgccatctctcatctcgatctccactccgctaatgcaagtgttgagagatgagctagaaattcctgcaaaaggaagttaacaacttgtaccagctagtgatgaagtactctccttgtctctctctctctttctttcgttactatatatatcatcagtgttgtgtgatcctatataatcatgatgattagtactgctagtataaatcatacatagtggttggcaagcatgcattttccctctctctctctctttctttttggttaatcactacttctatcaag

SEQ ID NO: 142818 - DNA, 574 bp, Zea Mays
ctagttatcacagagtaaaaaggctgttttggtggaagggtttgaagactgatgtggagtgttttattaagcagtgttcaatatgtcagcaggccaaggcagagagaattcatccactaggtcttcttcaacctttgccaattccttaaggtgtttggcaggatctcactatggatttcattgaaggtttgcccaaatcagaagggtatgattctattatggttgtggtggataggttttctaaatttgcacatttctttcccctcaaacatccttttactacaaccaaggtggctcaagtgtttttggataatgtggttaaattgcatggtacacctagatctattgtttctgatagagataaggtgtttactagcaatttttggaagactctcttttctgccctcaatactaagttggcccttactacaacttatcatcctcagtctgatggtcagagtgagagagtcaatcaatgtttggaaatgtatttgaggtgtgcaatttctgattccccaactcagtggaaaaagtggcttcctttggctgaattttggtacaattcctcttgtca

SEQ ID NO: 142819 - DNA, 1058 bp, Zea Mays
gtttgaggatggctacgatatgagcagtcaaccggttattattgtaagtagtatgcttatcagacttgatattccttgaactctacaccaaccaattaagatctcaaaactgtaacaacttgcagtttctggagatattgcgagagtttggaagagaggagcagcgggctttcacacaattcagcactggagcccctcatctcccacttggcggcctagcttcgcttgatcccaagctcactgtcgtacgcaaggtttgttagcatagcaaattatacataccactagggcacagacctattcatttgttgaatacttatctgccatgcatcttgcccgacaggaatgcaatggcaatgtagacgacgaattgccaagcgtcgctacctgctggcactgtatcaggctccctccttactcctcgaaggtaccacatacctgtttgttaatctgtttttatttttgtgaagatgtaaaactgacacctatttacctttgctatctgttttgattgcaggagataatgagaaagaagctcaaatatgccattacagagggtctaggcgctttccacttattatgataacaagactgaggtccacaagatgatggaagagtagtgtacattattgtaggaggaggtagataacaactgtgtaataccaaaattataagagagaaccacttattatgataacaagactgtggtccacaagatgatggaagagtagtgtacattattgtaggaggagatagatagcaactgtgtaatacccaaattgtaagagagaaccacttattatgataacaagactgaggtccacaagatggtggaagagtagtgtacattattgtaggaggaggtagatagcaactgtgtaatacccaaattgtaagagagaaccacttattatgataacaagactgaggtccacaagatggtggaaaagtagtatacattattgtaggaggaggtagatagcaactgtgtaatacccaaattgtaagagagaaccacttattatgataacaagactgaggtccacaaaatggtggaa

SEQ ID NO: 142820 - DNA, 542 bp, Zea Mays
tttggtgccctcaatttttttgaagccacggctcgcacatgcccagacacagctctgtatatactctcgttctctcaccattaattttggaatctatgctacagtaagctcttagtgactagtaattagataataagaggttataaactgactaaatgttaggattgaggaaagagaagataagagagaggagaagcgagttgtaaacttagaaccaacttagacataagaacaaaaaaagtttgagagaaatcaacagtgtcttagtgactgataattagaacaagtataataagaggttataaactagctaaatattagataaaggagagaggagaaatgagtcgtaaacttaaaaccaacttagacataagaaaaaactttgtgagagaaatcaacaggtcatgttaatattaacagtgaaaagctaactactatacaaataaactaaattataggatgtaaagatccttatagccaaaagtcaactatattactccctctgtctcaaaataatagtcattttagctcttgatttttat

SEQ ID NO: 142821 - DNA, 629 bp, Zea Mays
gccggagaccgcgccaagcctccctgagctccgccccgaggtgagacacctttgaccgtgctcaatttccctagtttcgctctgtgcttggccaattttggcatcgtcggtgctcggccggcggtccgccgtgctcgcatggtggccgatcgatttagcctggtctagttccccagagtaggtccctgtgtcatccctgcctctgttgaagctagcccaggccttagcgcgccttaagtcccctccctgtggccggaatggctcaccggagttactctggcccgcccgatgctttctcaccgccgttctctcctccctgctcgtggattcatgaccccttccccgccattgagttcgccgtggcgccctcttcctctctgcccaactccggcgaccctggaaccccctagctcacgcttgcctcaactccggtgacctcaccgccgcgaagaggagcagcgccgcccgcagccgttcacccctccttggtctggtcccctccgtccgattcagatcgcaaggctcggaccacaggataccgcttcgcacacgggcgccctgacgccgtggcccgcctgtcaacgcccaagccccctggcgctaggcccgctcggtcagcttgctctccc

SEQ ID NO: 142822 - DNA, 443 bp, Zea Mays
gttgtcttcctcctcacaggtgcatacattcatcgtccatggcatcccactacgcatgcatgatccatggagacgtggcaggtgcacgatctttctcgatggacgggcggccggttctcgcctggcctgatgctagacttctggcctgatgctagacgtgtcgtcaggcgctctctagagtgagtgattgggcccttttgccctttctactgctagcactagccagtgccaacggcgtacatgtcccaatcaagatgccaccaccagtaggaagccacgtacgccacacgcacacggcaagtggagagcaccaacacccgtatagattttctggtactccctcccaaagttaagtgacgaaaaagccatccattcataacagctttgatttgatgtgtgcctgctgccatggagactggggaacggtcgagacagaatttcag

SEQ ID NO: 142823 - DNA, 489 bp, Zea Mays
tgggaatgtgatgtatgatctcctccacctccacaaggttgtaattctcgtcgccaacatcggagatctctattcctattctaacaatatcccaaattctttggttgggtgagcatagatgactctttattttataactccaccaaaataatcctcacaatcaaaatgatgtggtttaccaagtggaatagaaagtaattgggcatgggaattatgaggaatgcaagaatatttaaatggagtgtgattataactagaagtggatggtgatgtagatgagtccatcatgtagtagacaaccttcttcattcttttctttttaccatccttcttgtggttcgagctagaggatttctcagtattgtcttgtggctcctctatttccttttatttgttgttgttgtccaactcctcccccttcaacttttgggattcgtctcctaacatcgcttcttgttgttagactcttaaataaagtgccaggctccg

SEQ ID NO: 142824 - DNA, 428 bp, Zea Mays
gccggctaaagagggcgtgcctaaggaaggaggagcagggcgccgaacaagaacgagcgagagggaggctgaaggtagaagaatgacgtgtgagagaagggagagaggtgggctgccatttatggaggataagctctagagcacggcggccacgtttctcatttgcagcaattcgtcgaacacgtggcgagtgctacagtacctacattgggcggccgcttttggttgtttctgtttggaatcagacattggtcattgtagcaaatatgtttcctgcgtaatacactacaagtttgattaagggttctcagccatttgccaactagattgagagataattaagtccaaagttgctactatcgtagggtcaatttcacccaaagaatggatgtcaaaccttgtcaaaatgggtcagatgaatgccacca

SEQ ID NO: 142825 - DNA, 428 bp, Zea Mays
ccaaaatctagaggtaaactatgatcctctatccgaaacgatcttctttggtactccatgtaaacacacaatctgagccatgtataactctgctagctgagagcctttataagtagtcttgaccggaatgaagtgagccacattggtcagtctatccacaatcacccatatggaatcatatcctttcggggtgcgaggcatcctgacaatgaaatccataccaatctcttcccacttccattcgggtatctttaacgggtgcaatagtccagctggtctttgatgttcagccttgactctttgacacacatcacacatagccacatgtgcaaccacatctctcttcagcccataccaccagtacttctgcttcaaatcctgatacatcttagtgctatcaggatggatagagtaattagaatcatggg

SEQ ID NO: 142826 - DNA, 320 bp, Zea Mays
cccaatcaagaagaacacctacgccagtgccaagctctgaaaaaacactgacgagtcagctcttaaaaaacaaacttgatttcgtttcttggaagccaggcgacagggtgcgttaagcaccgtggatagggccaagaagtcatccagaagcaccgtggcatggatagctctgattcaagcaaacaaataggccctccgtgtgtaggatcctgggtccagcccttgttcagtcgcgtgtcggctagctcctgtgactgggacgagcaacacgctcggtcacggccattctcgcctcctagagtcctagtagggtcttcgtt

SEQ ID NO: 142827 - DNA, 361 bp, Zea Mays
acgacccagcccctgagggtgtccgagtgggctccccttctcatacctccatggatgtccacgtcaggtcttctcctccacattctgattgcatggcagcaacacgtgcttcaaatcaggaagtcgccttagagaccgacacacccaacgctagagttttgattcctgctggtgatgttgagttgatccccaatgatgctcttcagattgcctcggctgatattccctcatcgagtcaccaactggtttctcatgatttggggcttccttcattcttctccaatcttcaggtaacttggtttttcctgatctggctaaacatcgggcaaaatattatctttgcactcacttgttttcaata

SEQ ID NO: 142828 - DNA, 396 bp, Zea Mays
cttgtcgactatgtcgccttcatcgtcgttgtcatacccgtcgtcctgctccgagtcatcgaggccgacgtgctcgagatcatgaaggtaggccctcttctgcagggacaacccccattaagtcatccgtacagacgaacgatgtgtgccaaggcaaggtagattccccgatccgccgaaatccttcaatggtggagtcgaaggacgctttcacttcttgcccttggctttctttcggcccttgcctcctccctttcccgccatcagggtttttctggagaagaagagaaaggaccaaagaaggaaaacaatagacaagtgaagaagttcatagcgcataagtggcttatttaaaggaactaaagtgtgccccttcgtattctgatcgtacaatga

SEQ ID NO: 142829 - DNA, 452 bp, Zea Mays
tacggtgattcagtcagcccggtatcagcaaactctgaggcgctatcatgataaggccatacggcgtcgatccttcgcagtgggagatctcgtcctccgccgaattctaacgggggagggacgacacaaattgttgccgctatgggaagggccattcatagtaacagaagtcactcggcctggatcatatcgtcttactcaaatggacggcacagaaattgggaactcatggaatatagaacatctcaggaagttttacccctagctagatttcaaaaagctattgggacggccttgtattctgtaaattgggaaatacatcatcaataaaaagacttcattctcaaaggcactcaaactgtttactgtcaacctgcatgcttactcgactcagggtgaccactataccctactaacggagcaatcgacttaagtcggcgacgacttaaggc

SEQ ID NO: 142830 - DNA, 624 bp, Zea Mays
cagtgtccggatcagaacgccagactcagatgcctcaccaacgatgaccgtgcgcccggatttgtgcctgccgcggtgattcgtgcccagcgcagatggataacaacgaagggtaaaaatcttggcgctcggattagctcgggctcgctcaccgttgcgcccgtcgtacccacttgaaccgcagctggtcgggatcatcctcgccggcgttagccgctcaacgattgtgcgccacgtaccttggtgtcttaccgcgtcgcaatagctcgggttacacatatccggtgatcgccgatgaactcgccacggtgaaagcaaccaatctcttgcgacagtgcccttttcattctccgaccgccaccgcgccatctcaaattcccgagccaccgctcagggatcctataaattgagcatgccatcagttccgcaaggtagtcaagcacccaatccatcaactcgtgcctccaattactcacctgagcccccgaattgctcacttctcccaaattggttttccgccaccgtgaaaaagctctcaccgtggccagcgtgctacaggtccgatcatgtcctctgctctcccgtttcagtacccttatgttctcctgatgctcctcgacccgt

SEQ ID NO: 142831 - DNA, 498 bp, Zea Mays
ggctctaattgtcgcctggctccgccactgatagtcaggaagggcccccatcaaataaattgtgcaaatgcataactacatggttttgaagacaataatcacaataatggcacaattgatgccacaatatgcagagcaatgatatgttagttccaactattcaagagcgtagctagtttctaaagaaaaataaaaggcacaaactgatgggacataagaaacttgacagtttctaaatcaaataattatcggctgctacacatcacacaaatgaacttcgaaatgaactaatttgttgcacgcataatgtagcaccaaactaattaagaagtagcaggttgttctctaactactgcacgcatgggaattgcagaggatagctactgcacgagcagacatcaaatttgctctcccacgaaattgctctgcatacgagattgctttgcatacgagtcagatagctactgcatacgagattgctttgcacacgaaattgct

SEQ ID NO: 142832 - DNA, 333 bp, Zea Mays
ccatctcgtcgcgatccagcttcacgaggctcccgaacgccacaaaaaccaccgatcgcggaggctgagcatcgagccacgccgtgcattcgtcgtcggcatcgtcggcggcgcttattttctccatgtcgaggagcggaccgactggtaatggtagaactggcaggtgcgggcgaagcgcttcgatggctgcgtgctccagctcgtcggcggtgttgacaagaacccacgacaccgtctcgcggaggctgcgaaagtccgacaagagcgcttggcgccatatgttctcctcaggctcatggattaacgcggggagatccccggccgccagcg

SEQ ID NO: 142833 - DNA, 529 bp, Zea Mays
gaggtttttgggatgccattgatcctttatcctcaacacttaggtgccaatgtggggaggttgataccaagttttgagacttgattttgtggtctaaagacttattgaaggataagaaagtggaggttgacaatctaaataataagaatgacttggtacatgaactataaaaggtgaatgacagaatgagaatggagcatgtgacatcaatgaagaatcgataggagctcaacgtagttatgtcctataatatagatatgaagaccaagttacatgaagccaaacatgcccatattgtggctgaaggtgtacaatgttgtggcttgggcacgtgctagcaccactcaggtcatggaggcattgttggagtagtgggactacatgaggtgaaggcggctctagattccatgctggtcgtggttagttaaatggagggcgacatgatgtaggaggctaacccgaatgcattttctgagtggggaattacgaatgagattatttagatagtgaggaattactatacgtatgg

SEQ ID NO: 142834 - DNA, 541 bp, Zea Mays
cgggtgcgattagatctatcacatcatgaagcggtacgcgatccggtccctcggatcaaagaccaaacgttaggattcaaaacgcgcccgatccaatctgtccccacatcaacgatgcggcggctgagacaaacccaagccaaagcggtacgctaactctaatctacgccatacatccaaaatccgacggctcacattcacgccctttcgggaaaccagcgcacggcggcaccgcccgcctatacggcggcgaccatggccgaagatgacccgtacgacaccccgggacactacctctgacctattacgcgccaaagcagacaaaatcgagtgcggctaactgattctcaccgatggtgatgatgtgacgcgctcggaccacgaaggaggggcgattccgcccagctttggcctccggcgaggaattccttgagcctgagcggtgcgcagttcgaattggggacacagtcggctaccctggcccctggcgcacaccctcgaccgcgcgtagaggctggtatgcacggcgtggacgagttct

SEQ ID NO: 142835 - DNA, 373 bp, Zea Mays
ccggaacagtgttttttgcggcacgcatcaaagtctcgatgacacttgacaaacgctttatcgattataatactcggcaaacagggcgcattgaacagtttatcggcaacgacctatttaccaagtactttatgtcggacaatgggcagaaaaaaatcgtcgtgacggcgggtgatcgatgtggctgtgctcaacacaacgtgtatatgaccgtacaaaatattgtttcgtaccatagatcgactctactgtttacatagtgaagattgaaatagaatgagatagcaggtgacatagggaagctgctagctagcgatagccggaacgggggagagtaaaatatatatatctagcaaaaaaagatcgacaaagg

SEQ ID NO: 142836 - DNA, 468 bp, Zea Mays
cgtcagcttaatttcttcagatcgctcgatcgtcaatcaacggcttccattctccccgaggcagagacaagcaggttccagaaccctcctcgcggctcacgccacacctcagtccgccgagaccgccccttgcgctcccggccattcccagacttcgccctcctccgcctccaatgccggcactgcgtcccctcctccctcgcgcttcttcaacgccacccaccactccgtggaccttccaccgcaccctactcctccatgaccagtcccgccgcctactcctgcctcgcgcttcttcgacgccaagcaccaatagaagaagcaataggtgcccttccctccgtcacccacgacgtcgacgccgacgatgtcggcgaccccccccccccccccaacgtcctcatcgagatacagagatctatcggctgcttgagcattctagacgccacatgacgacaccgattggcg

SEQ ID NO: 142837 - DNA, 679 bp, Zea Mays
gacgacgacgacgatccatggagcagaatcagcagatcgacgagcatcttatcgggctgccggcaagtcacaagtgaggtgacatgtgtcctagcgcactgagccactgctaatgcgtgtagcgagatcagggggacaataatagggttggaattggggtcctgagtagtttccgagcaagggaagctaaatatagagattaactagtcggttgtccatccaagaaactataatagaacaacatagttaaaacaatagcacattttcctcttgccaatacatgtaaggagataagaggagaaggacgaagacaatgtaataggcaaatgaatgattaaattacatagaactggttaaataataacatcacaatcgttcatttatcttatcacacaagttagattacaaagtacttttgaagcaaacttggggatgcccaaagatgagtatagagaaagcgctttgaaggctaagcccttcaaagttaggaggtgtgagtgaattgtttcgtggggttgtatgcatgggcactatttaactatttatagggacctgatgctatacatcttagtgtgaaattacatcgattacatgaattctctacacaagaactatgcgattgtagaagtctatttttgtcttctcactcataagacgtgttgcacacgaatctcctgag

SEQ ID NO: 142838 - DNA, 592 bp, Zea Mays
tctctatttagccaggtaatgacttcagggtcagaatgcaaaatgggcccaatatgtctatcaaattcagcttgtctatatgctcttgcagcaggatacattcctctgtaactatttccatggaatcttttgatgaaattttgcatcagctgtctgaaacattctctcttatcagcttgtgggaaaactagttccacaacagtcatcaaacccttgccggcatcaatacaaatatctagtttctccatattccctatggcccttcgaagctgtcataaaccaaacccaattatccttgctctcagaatccatgaacccaaacgcaaccgggtacatccaattgtgtccatctaacgctgttgcagctgctaggtgaccattccatctaccattgagtgcagttgaatccacacttaggtaaggcctacacgcagcacgaaacccttccgtacaaggctcaagtgcacagaaaaatctatggaagtacaccttttcatctacaacttgggtgtctatctccaccacactattaggggcttttatcaaaatttcttccttccacctatacaacatactgaaactatcatcccaa

SEQ ID NO: 142839 - DNA, 300 bp, Zea Mays
ctataatcaaacgttaacctgatcagacactcgtgcacatactgcaaaggaatatgtatataaacatactctgttaacgaactttgtggaggagcatatcatgtcataccggatttatgttgtaaactccatcgggcctaaacccacacgaacgctgtcttggaaaaaaacatcatctagcaatctgttgcttgtaaaactctcagaaccgccgcaacgcgcaactacgatcgaaacgtgttctaatagccgccatcctgctgctgggcacacttggcacttggcagcgacgacgacggg

SEQ ID NO: 142840 - DNA, 324 bp, Zea Mays
ggcggatcgagagggagaggcgagaggaccacaagaggaggaggcaacgacggattgcgcggcggaggcagtggcgcgggtcgtctttggcgtcgagtcacgtagagtcgtggtggcgcgacggctgtggcttcgggatctcgctgcatcgtaggagaggtatgagatgctgtgggtcggagccgactcccaccgtgatcggttgcgggccgttcgaaccaaacaaaagcaatggtgttggagtgcggcgggaatggttacatgtcgaaataggttgaagcaaacaactcctacaatgaaacgaagactagaatggtttttttt

SEQ ID NO: 142841 - DNA, 345 bp, Zea Mays
ggggggaagaagacagctcttgtgctgtctgattccattcggatggtgtagattagatcaccgaataaccctccgcttgaacaaatcgtaaccattgattctgggtgtgcggtcaggattagaaggtcgcgataccccttcgcaaatgaaattcgagccacaggttttagatctgacggcagtcgtagcttaccgattcatacgcatcgggatctaatctaaaccacagaatgtagatccaacggccctgtgatcacgataccccttcgcgggtacgttttataaaagagaccctgtcttttacatatatcaacccgccgtccattagtcactatgcgctgtgtc

SEQ ID NO: 142842 - DNA, 279 bp, Zea Mays
cgtactgcaatcaagactcaagcactagttgacttcgtatcagaatggaccgagcaacaagtgccagataacccggagactgcagaagtatggtggatgtatctcgatggctcgttgaagctgcagggggcaggcgcagggatcctcttcattgcacctggaggtgaacaactcaaatatgctcttcagttattattctcagcgtccaataatgcagcagaatatgaagctttgattcatcgactgaacattgccatatcactaggcatcaagagactg

SEQ ID NO: 142843 - DNA, 311 bp, Zea Mays
atttggtgcagtatagatggttaataagctcgtggtttgcgaggcctgcattaattaagctcgttatttggtccaaactctagtacggcccgacacatctctatacgagtctggatctagcccatcacaaaaggcatatcgtgtccagagacgaagctagcaacgaagtcaaggtggggtaccacctaagctatatgtaaatgtttcatatcatatatggtaaatattaataaattcactaataaaagttataagtaccatggtgagtctaatgtggcgtcacccctgttgtgcccgtttttaggttttag

SEQ ID NO: 142844 - DNA, 534 bp, Zea Mays
tggcattggaactgacgaagttttttcagagggacaaggcagcttcggcagcaaaaagtcccgtgaaggcaaaaaagcggagaattattcaagtgacggatgtgatccatcagacgccgccaccagcaacggtgtcaaaaattgtctttgctgaaactgctgaagccgaagctactggaatgaaaactagtgaagctgaaaccggcgaagccgaaggtaccggggccgaagccggggccaccgaagagtcgaacctggaaaccacacttgaggttattgacgatatactcctgaaaatggctgaagaagaaactactgcagctgcggtgagcacggcaacttaaaaggggaaagagcaaattgatgaaatttcggaagaagattttaactttcaagatttgcttggagaagagttaacagacgctgagaaagaggagttgaaaaaatatgccatatcttgcggatataaatcaggggctatgctatttggtggggtgaacgaaggaaaactaaggtgccttcagaaccgcaccg

SEQ ID NO: 142845 - DNA, 498 bp, Zea Mays
aaaaagttgaaggtgcttacccactggccgcgttacattgaaccggccgtggttcctgagtttggcgtagggacatcttctgctgctgaagcaaagcgcgctgcctcgactgtgcagagtactgaagagtcgattgtagcgctgaagacgtctgcagtcgggctagccgaagctagagatgacaaggctgaagagctacaagtggaaaaggtgataaaaacgccggaaatcttgagcccaccgacagagacagttttgtcaaagatgcaaaaaattcctgccgccactcctaggaggaggagaatggtcagcgtattagatgctgttatagaaactacgaagaatttgagccctgctcctaagaaaattgtcgaagcttcgaaagttcagatcgaagctgaagctaggccttcaatgcccaccgagacagagcctaccgtatctaagaacaaaacagcagggcagaatgtaccagaaaaaactgaaactcctgctccc

SEQ ID NO: 142846 - DNA, 729 bp, Zea Mays
cgcgcctcacctcaccctgtgctcaccttcaccggccagacgcgcctccttagctccagcgagctctcttccactggccattgccacccgagcctcggccaccgtggctagcccaccccagttgcttccaagccatgccagccgctcggttagcttcgctaatagcttgtgtagctttcctagccctcggacccggtagaacttcacaggaaagccaagatcatcctcgccggacttcgaccgcccgcctgcgcgcgtagaccgagcaatctggtgagccgttcttcaattcctcgcacacacaccttccttgatccctagtgaagctctctgacccgtttgattggtcaattgtgccctggataggccagactcctcgccgtcgacgagcccccctgcctgcgcacgtggaccggtcgactccgaccatccccgacggcgacccgcacatcgccgtgaccctcaggacctcccctacaccctcgaccacctcaccggagcagtctcgccgccggtaagcccctccgccctttcttccaccgcgggtactgtttgatttgggggaaggacctcgggttaggattagaagaatccagaggggttttctgaattgtcagcgactcaattgaatagtagcccaaggactagtctgtaaggaaacttgaaaacacccgccagggaccccgttgcaaagtaggtttccttttaaccatttctgtttaatctttt

SEQ ID NO: 142847 - DNA, 375 bp, Zea Mays
ggtgctttcagtgatactgcctactttttaagttttgaatgggttttcattttcttttcctggcttacctgcttttctaccatattttctccaggctaaaatttacttttcattagcttagcggctccagcctccagtgtcataaacagagtagcagaccattgcagaagacttccttttctgagctataacaccacgcacactttatagttgttttctcccatcctaatcctacttagttgtctgggtttcataaatagacctgtcatgtttatctggttttcactcacatacggtgttgatgaactagtctttttcagtcttatggaagcgccgcacttcctggacttctgcaccctgtaaaaagaattatga

SEQ ID NO: 142848 - DNA, 290 bp, Zea Mays
gaatcaactaatgccgttgcaaatcgctagatttcagcgtggttgttgtgatctgggttgggcagcctcgattgggactccgtttctagtgtatataagtacccatacaaccaaagcgccaatgcaccgagcaccaaattcacgccgagcttcatcgaagagagagaaagacgctccgcttgggtggaggcttcgctagttgctgccatcgaagatgctccagtcgcccccgcctccaatggcggcaccgaggatgcgacctgcagcaacatcgcccagcacccgaggtg

SEQ ID NO: 142849 - DNA, 563 bp, Zea Mays
aggcgcataactgatgcagattgcagagtaacactgacacacgtcgtttgttattactcatgattccaagctggatatcaggatgccgacgcagtcttatcggaaggataatgggagctggcggagcttcttgctggaatttgaaatagccaggccgtaccgcttgggtgcggccagaaggcggaagaagaaacagctcacagatgggagtagagatgggagtagagcacgatcattgggcacatgactgatacatgagcggacgcgaacacgggaatcaacaacgcaatcatatcgagctatctagagaaacagccatatggttctgaaaccaaaactgttcgtcgcctctgttccgggcccgagaccgaaactgtggggtctctcccgtcacctcggcagcgtttctcgactgcaccgaaacaaccgtctcaacaacctcccagctcagatgggtccaaggaccgagcttgcgaaagagaagtgccaactgccagtgagtgccaagacagtggaactaaaagggcacgatccagtgcgtcatcagcattggttacatgatc

SEQ ID NO: 142850 - DNA, 507 bp, Zea Mays
tttcactagctcagaattctttgatttctgcgaacaaagaagcatctagatcaaatatgcatcagtagcacacccaagagccaacggtcaggtagaaagggctaatggaatgatattggaagcactcaggaagaaagtcttcgacaagaatgaaaagttcacatggaagtggatcagagagttgccgtatgtggtctggagcttaagaactcaacctagccgagctttgcatggtaatactcccttcttcatggtctatggttcagaggcactactacctgctgatctcatgtttggggcaccaaggctgatcttcgaaaacatagctaaagctgaagctactagactggaggatattgatatactggaagaagaatgattgaatacagtaattcagtcagccaggtaccagcaaactctaaggcactatcatgataagaccatacgacattgatccttcgcagtgggagatctggtcctccaccgaattctaacgggggaaggacg

SEQ ID NO: 142851 - DNA, 846 bp, Zea Mays
ggtaaactcaatccttcaaaggttgaatgttcttgaagacaaagtcggaaatcacgacctcagcagtcagacctctgtccttcagtgagcaaatttaagcaagcaacaccttggcttcatctgcctctgaataagtagggtactccacctagttgggcgtgcgaacgtcgggctgcctttttgatcgaggggggagggatttgttgttattttccatggtgaaccactcgagacgccatcccttgatgctatccttgatgggaatgtcaaggtattccactttcctccccaagcgaagttccaaactggcaccgccgacgagctaatgctgcactccagccatgccgggctgacagtggtaaaggtacctctagagtccaaagtgggggaggattccaagaaaggcctcgcataggtgtatgaaaatggcaacttgaagaatggagttagggtttaaatgcataagatttaaatcgtagaagtcgaggagaccgcggaaaaagggagaaactggaagagcaagtccgcggataaggaacgacacgtaaataacggattcgtgggtgtcctctatcagaacagtgaccccacgccagatccgccaagaacacagttctttcggcggcaaaaccccagtctccacgagatgcaaaagatctgactcagaaattatggacatgtgattaccagcaaatggaaactggatgttgggatcgatgggtggaatgatcggagcaatggtgctctgtctcttccgctttggagccattgcaatctctcgggcggaatgagcgggctcaagaatctagaaagcggagaagtggtagaggaaaaagtgagagttag

SEQ ID NO: 142852 - DNA, 349 bp, Zea Mays
gttggagtaggcgggtcctggcggcttcagctggggacagttgttcttgaaatgactgggatctccgcagtgccaacatgcattcgccgggggttggttgcttgcaattgagggggtatggaaaaagctctgactctgctgactaaaccatgacggggtgggtccagctggtctactgaagcttggtcccttgggtggaaattcaaaggatcgagtcttctggtgccggtcttactgctgagctcggaggacttggaatttccttttaagatgccctttttcttcctcctttgccctttcaacttgcatggccttgttggagaggtgagagaaactgaggaagtcttgg

SEQ ID NO: 142853 - DNA, 379 bp, Zea Mays
ctgtcggtgtttagtgtccgaccgcacacccgaggtatcctcgtggtgcttttgggtaggacggtgtcgtagatcgtaactcggtggtttgtgccgggggcacgagaaaaagagagtcgggcgattttctgcaggttcaggccgcttgaggagcgtaataccctatttgctggggtgactttgtatgtgtgggtgtttacaagtggtgtctcacgagtggagaggtgccaatgagatgaaaattatatcccttggccttatatacatgaccatagggcactccctgcacacatgctgatcacactcttccagcttatctcctagctaatagcgaacagactttgcttatcccgaggaaaacccggcaccttcgttctga

SEQ ID NO: 142854 - DNA, 290 bp, Zea Mays
gccgtgtttcttggtgacaacccggtttcctggttccaaatgttagaacactatctcacattccagtgtcgaggctgagtaccgagctattgccaacaccgtcatagaggccatctggttacaccaactgttgtctgagctgcacactcccttgcgtaatacaaccttgatataatgtgataacataagtgttgtcaacatgtctttgaaccccgtttagcaccatcacaccaagcatgtagagattgatctacactttgtccggagtcacgttgcacttagtgatgtcc

SEQ ID NO: 142855 - DNA, 497 bp, Zea Mays
gtttatgaccctacgttggtccaagggttgtgtcggtggaactctaagggaccgccgaaacctacaaaattgtaaattgtgcactggtaataatatcaatccaacaaaaaatagaactccccgtcaaaataaaattacttgaagttcgttgcctgtgtcgttgtaacaacctcgtcatcagcctctccatcggcctctccatcgtagtcctccccatagtcatcatcacgcatcgatgaaccttggcgtgccagctcgtcctcctgcctaggtgcattgtggtctgccgcctcgcgcgcttgctcaaatgcattgtggtcctgctgtagcataggtccacttgagcctatcgcctcatgctctggctcaagtgcattgtggcctgccacctcgcgctcttgctcaggtgcactatggcctgccacctcgcactcttgcccaggtgcactatggcttgccacttcgcgcccctgctcctccatgcaaccaaggagctg

SEQ ID NO: 142856 - DNA, 305 bp, Zea Mays
cgggtgctggatagtgacgcaaggggtatgatgaaagaggaagttgtactggacacaaccctgaacctcgtcgtaagcccactttgcgggacccaccaggtaccacaacattgatactaagcaagccatagtaacccatatggagagcacacgggacagaacgacgtactaggagtacgatagcacacgcccccatagacgacgccaggagggctagagcggcccaggggcaacatgttgaggatccccgagtagaatacaagtcccaactgtaaagtccacccttgagctataaaagggcgaga

SEQ ID NO: 142857 - DNA, 906 bp, Zea Mays
agtcgctgacactttgcacaggggtcccccaacttctgtttcctcacacgggaaggtccccgacggcgttcacgcccagccgagctccggcgagcacctacgctggccgattggggcaacggctagggttcccgagcgacttacacctaattgaatccatcccgagcctttcccccaacccaatttcacaaatggtgacaaggattgctctggccacggtggtcgtgaccatcgcggcaagttagtcgtgttcccagcgaccagagggcccctagtccaattggacggtccagcaagcatcgcagataggtgagagagcttaaacaagggagagggagggttggactggccggaaaaaggctggcaacggtgaagcacgtttcacggtggcggagaatggatttggggggttagaaattcgtgcgtgctggtggacgatcgagggtgggagcgggtgctacagcttcacaactacatggcacagctacgggcgaggtcaatttatagtgctagcgggcgatggccgcgaatttcgagcaggacgcgcggcggccggagaggaagaacactggcgcagcggcttggtgtctactgccgtggcagttactccggtgagccacgaagagcgagggtaaatcacggcggtgcggtggaaagcgagagccacgcggcgcatggccgggaggcggcagtcgccagcgtgttaatccactcagccgcaaagaggataagagagccacggtgatgtcaccggagtgacctctagctcaccgtcggcgaggattcttaccactcaaccttatcaatccaccccgcacacgaatcttaaggccggcgatgcgaatcacggcggaggggtcaccggcggtggacattttgcgctggcggtctgatctgcacgagcac

SEQ ID NO: 142858 - DNA, 453 bp, Zea Mays
ttcatgccaccagtgaagcacccatttccaccctttgtgcccaattccaaatcttgtgaatcctagtgaatccatgttgtacaatgtgttcctttgtggcccttgaacattcttgcaggttcctagctccttcgggagggttttcccacctcaaatggcaatttccccgaaaccctaaaactccgccctccacgtgttcggtgaaatgcccaaaccagctaaaaatgctccaattgaacccaaatttttcaggcgccttcacaacatctccagtaacatattcgccaaatttcacgcccatctgatattccaggctttaatttcacccaattccccgtttcgagcgatcgtttccgagccgagtgcccaaatctctttttcttcgcctaaattcaaaccaagcacacacttcactcatattcacccatataaacctattcgtgaagtatcggc

SEQ ID NO: 142859 - DNA, 503 bp, Zea Mays
gtaatataatgtaatgtagtaaccagggtgggaaaaggttgactcataatgagtcggctttgagtttgtgtaaccccctccgatatgaatgaaggaattagttgcctcaagtgatcaatgttttgccatttttctatttgcgcatttgaaagtttgtccatatgtccgatactgctagcattttagaggtaactgccgagtgatgcttgatgcttttgcttttccgagtagtgatctggcactttagagatagtgcccgacccaagaaaccccatttatactcgcgtcgacgtgcctttttgatttatgaaccctagcttcactttttctcttcatctgctcctctgcttcccctgaatttccgagcctgctcgtcctgccagaaagatagcgatggcccccaagcggaagaggcagagcaccactgttgcaatcatcccgcccatcgaccccaacagaaagcttccatccgctggtaaccacatgtctatcatctctgaatc

SEQ ID NO: 142860 - DNA, 837 bp, Zea Mays
cgttctaccgaattttctaatagtcactgacatcttacactgaggtccctgaaacttcgtttcttctccaaataagtccccgacgtcgagcggcgttgcgcagagctccggcgagcccatacaccggtcgactcacgcggcgactggcgccatacttcgactgataccgaattcaaggtccaatgagtgtttccccccacttaattttactaatggcttcctggtttgctctggccgcagtgaccgaggattttgcggatggatgaatgtgttcccggtgattaagggggttctagttcaattggacgggtcgatgagcatcaagggtaagcatgggtgctgaaacaagaatataaatggcaaaatcggacctgaattgagcggaccgcggcgacgtcaagacacgcaatgttcttgagcagcttggggaaatccgaaattggtgaattctaggggaggattcaaggtgcagattgcttcaccggctgcgcagttacctagcgaagcgggcggaggtggcaatttatagtttccatcgtcggtggtgtccaatttcccgaggttgtgctggcgaccggagggaaacatggatactggtgctcgggataggtggctttcaccatggcgcttcctccggcgatcaccaaatcccttaacataactaattgtgacgtggtacagaacctagacacgcggcgcacgacagtgatcaaccaacggcggtgagctcttatccgatcgaccgatgagcaagtgggtacggcgggcttagccgcaaccgagctcgagtcgaccctatgccaatatttttacctcaccgtagttatcccctgaccg

SEQ ID NO: 142861 - DNA, 580 bp, Zea Mays
ggatagcatcaagggatggcatctggaatggttcatcgtggagaatcatgggaattctctcccccccatggtcagaaagacagccggatgttctcactccaagctggaccgaatcccccacagacaaggaagtaactgaagcaggggctttgctagctgaagttggattgttgaaagaaaggggtctaactacaaaagctgtggtcgctaactttgttttcaagaacattcaaccgctaaaagacagagcatatccaacctatctgtatcgaggctttgctgattcgactcgggtaaccaacagaagaattcctgccgtggacttggtgggccggctcgagatgatactcagaggcaaggtgtcgaacgtcggcgctcctgttgcatactcggtttggaatctgcctccttccaaggcctttaccagttttgtgtcaaatcctcctgctggtgatagcagtttgggccttagagtgcgaccctctcccgaagaggttagtgctttggttgcctcacttgaagaaattcctgacgacgagaggcaggttcattttgaggtgcctttaaatccaagtgatgc

SEQ ID NO: 142862 - DNA, 798 bp, Zea Mays
cgccgctacgctattttcaatcattgttcaacagacaaaatgccattttatcccttcagcacattataaccttcggccatttaacgccgttaactgtacaaataagaggagcgttcgaaaactggcacataggctgttccaacccaggttcaaaaaaaaacgtccagaccaggttcaaaaactactccacccttggttcaaataagagtagcgttcagaccaataaattgctccaacccaggttcagataaagcgtccagaccaagctgactagtgctgttctgatggaagttggcgcaaaaaaaattctgtgctttctagcgcacagtacagagaagcacaccaatctgcaacaaaatccaatacagtacagttttcagcacggtgcaattttcagcacagaaatttcagcacaccaatcgataaagttcaaataaaatttcagagatgttcacaattcaaatgaccacataggtgttcatagtttagactcactggtttcatagatgttcagacagaaagatattaaaatttacacacattggactcataaaaagagtcacacaattcatatacattgatttcaaacaagtccaaacagactttgcttggtggcatacacttgctgtcaggttcattcacttgctgtcaggttcttcttcttcttccttggtgtcatttttttgcaggctttgcattctttgttgttgtaagctttgttggcgacacatccaaatctttgttgctgccaaggttgaagtcagcctgctcacttgtgctctccccaagcaacatagc

SEQ ID NO: 142863 - DNA, 395 bp, Zea Mays
tatctttgaaaacacgctggctcctctcaattggtcgaacagatcttctattctgggcaaggggtacttgttcttgattgtgacctcattcagagctcgataatcgatgtacatcctcctagtgccatctttcttctccacgaataggacaggggtggcccaaggcgaggtgcttggccggatgtaacctttctctgacagctcattgatctgtttcttgagttcaactaactctagtctagatactctgtaagctctcttaaaaatgggggcggttccaggaagaagctctatggcaaactcaacttttcgctcaggtggcatacctggtaggtcctttgggaacacatctgggaactcagacacaaccttgataatctccagtggatctgctt

SEQ ID NO: 142864 - DNA, 595 bp, Zea Mays
ccggactattccctgaaccacttgccgcgcgattgactgaggtgtcctcgccggagctcgccgtcttttgtagccacgccacgtacttagaagagttaccatgtcacagtagataaccgtaagtagccagtccatcgcatgagacgttgccccggtgaacgacacggtagttcgcgccgatgactcacccctatcttcgatcgccgatcttcccctttcaaaattcggagccaccacctccagacactataaattgatggtgctactagcttcgcaaggttgtcaagaagccaggacatccacccctgccctcgattagccaccatagtcggagaattttgttattcccccaaatcagtcggaatctcgctgtgaaggtctctcaccgtggtcagcctgcctcaggttgattcatacccctctgttgaatgttttagcatctctaggatctcctgttgcttgtaggctcgattaattgaactagattgtactgaattgcccagaacaccgtagcttcttctcggtttccacggttgtcatgagcaggcatgctccggcctgaattagtgcaattgaatgagggattagtgtcgcc

SEQ ID NO: 142865 - DNA, 622 bp, Zea Mays
gtcacctggctcctatggacatggctgagggatcttcagccttagaggtggctgccacggaggacccagcccccgagggtggtgctgggagcgacccaacccccgagggtgttgggtaggctccccttctgctgcttccatggacgtccacgttggattgccgccagtccaattcgaggaggccgtggtgacacatctatctacagctctcgctggtctggtcactttagaggccagtgatccagacgtcaggagtctaccgcctgctgacgaggctgaggtccctccgagtcgtgcctttgatatcgttgccgttgacatcccctcatcaagcaacgtatcaattctccctggcttgggtcttcctttgttcctcaccaatctttaggtaaatcaacttccgttttttaccattcacgctggcaagctagcttttttgcttatcttttcataattaccggatgttcttggttctgtatctgcccaactgaagttctgtggggctcctatccccgaccaagtttcatctttgatgcagtggaaccctctacttctttaaaaacagatagatgaactcatagtttccttttttgctttcattgctctgctcattctatatcct

SEQ ID NO: 142866 - DNA, 325 bp, Zea Mays
caggagtcctcatgaaatgcattctctcagctactggaaagcaacttctggatgaggtccatgctgggcaatgtggagtacacgcagcatccaggaccttggttgggaaggtcttcaggtcgggtttctactggccaacagcaaagagtgatgcagccgagttagtccagaggtgcgaagcctgccagtacttatcaaaacaacagcatctaccagcacaatagctgcagactatacccgtaacttggtcgttcgcgtgctggggattgaatatgattggacctttcaagaaagctcaagtaggatacactcatgtactggttgc

SEQ ID NO: 142867 - DNA, 1056 bp, Zea Mays
ttaaaaaatagatagtctaaaaattagtccctagagaccaaacatctctttaattaatgcttattattagtacttgtacataacaaggacagttcgtttttttaaccctccgttctcttccttctccctcccaatgccattcccccacaacacaaccatgacctaggtccacgcggccaccaaccagctctgccgccacaaagcttcacgtgcgcaggttggaaccagatcgaaaactgctccgtgccgtcgtcgacactgtccgctagcaatgccgtgccgcgtcgtctgcccgccacacggcagtattttagtgagtagggatctctagctgatctgtggctagcacgagccgaccctaacctaggaagttggtaataatcttttttatgacgtatagttgctgcaagcctgcaagtcgtgcctctctggatctctagctagctagtttgtgttccttactccatctgaaatttatttccttcggaaaccgtatctcataggtcactccgtccaaaggccaccatcgtcagcgtcaggcgttaatacgttaacagcaacctatttagacgggcatctcgctcttaaaacctagctgggagaggaaaaaggcccgcccttataagaacatcacacccctccttttggctagacgagatggtactaacacagcgcgtatataccggtccctcacatcccacctctaagagacccagagcttttctagccagcagcggcaatttggactcggatactaactgtaacacaccactcggccagtccgtccaaagcccaccatcactagcatctgacgttcatgcgctcgcgtcagcctatttagatgaataccgcgctctcaaaatctaagctgaaagaggagggagacccgcccttataaggacaccatgaccccttactaagctagaacgtgtataccggtctctcacactatccttttttatgcaattattaccggtgatctgcagttactagtgatggatggatgcatggaagctaaagaccataggaacaaaggtattaacagtcttcttttcg

SEQ ID NO: 142868 - DNA, 540 bp, Zea Mays
gggatcttcctggtgcgagtactgggtgtatgctgcgaagggtggtggaaaaacataatgtgggtgaattttcgcgaagtggcaggcgtcgtcgtatgggaatggagcgtggccgtttccgagtagaccgggttggtaaacgagaattgttgtcctcgccgattggggcgagcataggcgaggggatcttctgaagctttttgagggtgaggaattgaggataatgctgtttgattacagggagatgggtatcatcccgaaggttgagccgatgtaatatgtgatgccctcgccgtgtgtatgtaattgtaatttgtatggtgatgtggcctattggtcgtattcgtacgcctgtgttggtccagttgcgcccgtgggcgactctgtgcggagtgtctttttaatgagagacttcgattaacgctattccggctgctcccttaggcgactgctgcgtggagtgtcttgtaaatgaaagacttcgattaacgcacttgttatgctgttccggctgcacccttaggagacttttgtgtggag

SEQ ID NO: 142869 - DNA, 478 bp, Zea Mays
ggtagatatagtcaataggtctagaaccagatcaaaggggcttgggtgcctgtttggttcgcttccaagcaaagttgtcaaacggtggaaacttctatacgtgtctgattttggatgtttgtcgggtgacaaatcctaatctacatgttagaatgatccaatacagcggctatgtaacaccatgtatgtcatgtacatctcttagggcatgtacaacatgaatagctacaatgttccttaaagtgtttctaggaggtaaactagaaaaacaaatacatgactcttggttaaggaccgatcctggctcagcactccgagcgatagaaacgacaatgtatctccggtgtatgatggggcagcatgtccaccgattcattgccacaagcgatggttttcctcgtcaaatcctctcaccgatttatcaactataattcaatgcaaacaatcaggatgcattcgaatgcaagcatcatcgtgg

SEQ ID NO: 142870 - DNA, 376 bp, Zea Mays
gatggtgagtctgggagttcattttcctggacggaggagtcatcggatgaaggcttggattattttgctgcgttagatgtggccacagcgaagtcttcgccgcgtgtggagggtgtcggggctgctgatcttcctagtgcgagtactgagtacaggcggtgaagggtggtgtcaaaacatagtgtgggtgagttttcgcgaagtggtaggcgccgtcgtatggggatggagcgtgtccgtcttcaattagaccgggttggtaaacgagaattgttgtcctcgccgattggggtgagcataggtgagggggatctacaaaatctttttgagggtgaggaattgaggataatgttgttcaattatagggagttgggta

SEQ ID NO: 142871 - DNA, 370 bp, Zea Mays
gcggaacatcaaagacctgctggtttactgcacctgcttaagatacctgagtggaaatgggaagagattggcatggacttcattgtgggatttattcgcacatctactgggtatgactctatatgggtgattgtggacatgctaacaaaagtagcccactttattccagtgaagaccacgtattcaggagccaagctagcagagttgtatattgcacggattgtctgcttacatggtgtgcctaagaagattgtgtcagaccggggatcacagtttacttctcggtattggaataagttgcacgagtgcttggatacaagattgaattttagttcagcctaccatcctcaaactgatgggcagaccgaga

SEQ ID NO: 142872 - DNA, 408 bp, Zea Mays
cttgaccagaaacaatgcaatgactagacagtaaataacatctacacttggtgcatgcataaaacaagcataagcataacctctcaataaaagtgtacctcgtttcagcatccaccaacctacgacttagatatgtcaccacatgctcctttctttcagtttcttgtgtcagaacagccctaatgaccttatcttcagctgcaatgtataatcggaatggtactcctgcttgtggtgcttttaatacgggagccgaagataggtatttttaatgagatcaaatgcttcctgctgctctgccccccaagcgaattcgacatcattcttaagctgaaggataggggtgaaggcatcaatcttcccagctaggttagaaataaaccttcataaataattcaccttaccgag

SEQ ID NO: 142873 - DNA, 547 bp, Zea Mays
tcctgtatgtattttgttccatattctatattttatcccatattccatattttatttcatatctctaaaaccggacacgaatcattcggatactgatatctatctcatatacatatcaaagcctgattttgagtattcagattcggatacggtcggatattaaattttcagattcagatatgaactatgtatatagggttttgaccctctgggaatgaacggaaattagaaaatatccacccttgttcatcatccctagtgaaaaaccctatagctaaagcgcatgaatgcacgattatgtactggaattctgatcagaaaacagtaacaaaacacctccacgataagtaaaacctgtacaactgaagcgcattaaaaagtggccaggcagacccagtggtcacaactagtattgtcaagacagttctcccagaagttaaatgctctcaatatgtgcaacagaacagaaattcaaactcatcacgcagatactcattccgtcattatgtctctctaactttcttggaaagttaaaaacagcttaagt

SEQ ID NO: 142874 - DNA, 469 bp, Zea Mays
cacgacactgctcgacatgttcgtctaaatcaagacggtttctgctgcatctgcgcgaagacatgaaggacatcagcaacatacgacactgctcgacgcgttcgtctacatcaagatggtttttgctgcatctaagtgtctactggtaatcctgtgatctgtaactgcaatagttcttgttctttatggagtccataaattttgttttgcgctagtgtaacctccccataatcctacaatggtattatggccatagttgtcaagttttaggttcggggtgtgttcgtatagtgatatacgacttttctggatgatctatgaacatgttttgttgttcttgctgcaatggtcatttgacgaaatactcctaccggtcggaattctgccatcggagttaagtgatacaggtaataccagttgcagtaagaaaagatcaatatgattgttcaaaacaaaacatagttttata

SEQ ID NO: 142875 - DNA, 289 bp, Zea Mays
ggagggcacttatggtcacgagaccacttctcggtgcagcgttggcataagccacgcgcacaacggaatgttcgtaaggcagacatcttgtcatcaaatacgcaaggtcacgtattgtcaacaggtttatcagactcctccggtaatggttgtttatctcctcgtgggggttgcggaagaggaaatggccctttacttggaggcttgccagaccacccaagttgtagcctacaaccatccaatcgtcgagttgatgtagtgacctcctcctgcaacaaggccaacacag

SEQ ID NO: 142876 - DNA, 339 bp, Zea Mays
ggagacgataaggaccctccatgcctcttcaggcaggtcaagggcaagacagtgtacctagagcatcaggaaggctggaagaagcggcgtatggacagagccacccgtgcagcacttgcagcggcagcagtagcagagcaggcagagcggggtggctagttgcagatctcctcaggctagattgcctacagggttcgtcgcctcgcgtctcaacctcgctcatccgctccctctacacccgccacagctactactccacctcccactgcactaacttctatcgctctagagccatccaccacttccgccatacccaccacctccaccactccaggtccc

SEQ ID NO: 142877 - DNA, 615 bp, Zea Mays
gcaaagagcatgcatttcgaaggtgcccaatgtttctagataagcgccttgaagtgtattccagagtgtcccatgaactgtgctctataggttgatgttgttgagtaggattccgcttaagtgaaggcccatgttatcgcatcttccttgttgtgcataaggtccactgattgtatgattgtccataactcgacgaattaacttaagtggttgactatggagatctcttgcaagtttatacttctcacccacatccatggtaaactagcgcttccttgatcgacagttttagtttgccggatgccgtgaagacgttgggcactatgtctttcgggcgtcgaccgtgggcccatgcgatctaccgtaacgaagtttttgctccatcaccattttttattattttttattctgcaaagagtagtcgatcagtctcggtgcaaggtgtttgtagcccagcccatgaagtgtctggctttgcccattctagccaaaaccaacgtaaccacaatgctctagcaaagcttttagaatcttgcactcctgggacaccaaggttaattggatgtgtcactgttggctagttgactctgcatttccctcccgttaagttttctc

SEQ ID NO: 142878 - DNA, 1363 bp, Zea Mays
cgcgaggaggtacctcgtgctgctcatggaggtatcgcggcccgcggctttcgattctgttctcgctagtccttggagtccatcgcactagtgcagtgcagtagtgctggactaccctggtgctaatccaaatgattcctgtaccagttggttacgcttgcaagccgtgtggggttttcagttaattgttcggaattagccccaaactttgtgggctcgccatatacaggcttagaaaattaaacaaatttgcggtgaaccattatttacgaattacgatgatagatagtattttttgttatttattatgtacgttgtataaatagcaccacgccaatttacctggtttagaaatcttcagtgtcgtctcactgtccttaagatttaaccacattttttaggccgtataatttactttacgttccaaattcagaatgtggattactgttggtcatattattcatatatagtaaagaaacgagtgaagtataatacaagtatttgtcacaagttccagaaaacatttgctaacgtgagtatcaaattaatacgttacctgctgccttggttgtttcatgtcgcagatgaaggagatgaatgcaagaacggaaaacacagagccaaactcaaacgtgccaaatgaccaacacgttcactatacgacaatcgaaatggaatcttctaataccagccaagcaagaaaaaattccaaagagaaggtcagcgcaagagacatctcgcttcttgcaggtacgttgggcttgggttcaggttttcatgctatggtctatggaaggtggattatttaatttcgttaaaaaagaagtgtgaaatgtttaatctgtttctgtgcccaataaagtgccctgttcgggtttatacatgagaaattagtaaattaattcgtcctcaaatatcgttttaaagtaaatccaggatatgatattattactcatagtagtactgaagtgctgaaaaacctaatgataatacttccaatagacgagccaaatgttgttatgaatatgtaagatggagcgaattggctggtgatgtcaaatgtagttccttttctatcttatcttaccataccagttccttaccattaggatataaatctgtcgtccctttttgtcacaggagaaggagatattacaaggaagttagtcgaacctataaaggttttctctgagaaggacctactaagggagataggaaaagtagtatctactttgcagccagataatgagtggtcaatccggataactgcaatgcaaagagtggagggtttagtgcttggaggttcctgaatgcttctttttttatgttggctttattgtacgcataaatatttatatttctc

SEQ ID NO: 142879 - DNA, 420 bp, Zea Mays
ggcccgtgaaccagcacctttctcgtgtcctggtcctttatcaagaaaaaattgggatggaattcaataattgtgttgttatccaaggtaaatttatgaatagaaataagattcttatgtgtaagaggaacatgaaggacttgacgaagatgtaaccgacgagtggaggagggtatgacagatgagccaatgcaattaaaattcatacctgcgccgttggctgcccggatttgatcagttccagtgtagccttcatgagtggtgagtttctcgagctcacctatgatatgattagtggcaccaaagtccagtaatcattgtggatcattaccttgagagtatgttgcagacgccgcgaggcgtgaatcaggaacatagtcctcatcaaatcggtaccagcatatgtttgctatgtctccg

SEQ ID NO: 142880 - DNA, 428 bp, Zea Mays
gtagtagtgggccgtttgggccgtatggttgtaaagggtggtggagtgggcctgtatgagtgaagtctttaaaaggattgtaatcagcagacttggaggtcacgaaaagaaataatacagaaactcatatccagccacttacttgcgtcttcccggttctcaccgacgatctctgcggctactcacgtcgacggcggcgcaccgttcggccacgggtgtcacactcccatatcctggaaacccttttgcacgatcctcacaacccagcgatgctcccaaaccaccccacctgttttgaatggccccataggcgagattccacggtggcggtcatcttctctgtgttctctctctccctcggtccctccctcacgactttactccggtgactttgaggtggcacatatatggctcgagggtggcaaggc

SEQ ID NO: 142881 - DNA, 1145 bp, Zea Mays
aaaacacgaaggtgttcgtacgaggggtgtttgccaagtaaggcgaagtggggtgtgccggaagcaagtgtatttgtgggaaggatattgagaagatatgtggcagtacgagagcagcagcccagaaagtgggagggatgctggcttggaagagaagcgtgcagacgacattattgatggagcgaattatgcattcggccttgctgttttggggggaagtgtaaggacaagacatgcgtaaaagaactccatgggaggagaaaaacttgcgagcgttgaggttgtcgaattcgcgaccattgtcacattggacaccctggatggtgacaccaaattgggtgcgaacataagcgaaaaaatttgtaagggtggaaaaggtgttaatacttaaggcgcaagggaaacgtccacaagtagtgtgaacagtcgtccaaaatgtccagataatatttatgaccggaaacactagtgattggtgaagtccaaagatcacaatgtattaattgaaaattgcgagtggcatgtgatgaagaagaatggaaaggtagacgaacgtgacgtcctagctggcatgcatggcatatgggggtgtttttattcgggggtacaagggatgacagaagactgagctagctgagtgaggaccgcagatcctggatgtccaagtcgttgatgccacaacgaagaggtggtagcatggagagaagatgtcgtgctcctaagtgggtagagtgggtcggagctatcacaccgaaggatcacgcgccgagtgggaagatccttcacagagcagccaagagggtcaaattccatagaacaattattgtcagtggtgaactggcgaacagaaattaaatctttaatgagagaaggtgaaacaaggacattgttaagacaaaagttatgagaaagttgagtggtgccagtggaagtgacaggaagaaggttgccattgccaacaacaatgttagagggtagatgatgagaagaagagaggtgggaaagtataccagcgtcgaaagtcatgtgactggaggcacctgtgtcgaagaaccactcttgctgctggggatgttgaagagtggtggtttggaaattggtggcgagttgttggatatcccaaccaggagggggtggagcagcgc

SEQ ID NO: 142882 - DNA, 502 bp, Zea Mays
agttgaggtttatttgcgcgtggaaagtaacagtgtgtttaatacttagaactcttagtcaatggtagaaattgtctcggcttaaatagagaggtggtgacatgccgaagtagtcatcgcttcctctatgtttataagtcgagtcgagtcgagtcgatgcacattatgtgttcgttaaattatgctttgcatatagtgtatgattgtgctcgcgatttcgagtagtcacatcgggtggttaagtaggatcgtaatacaagttgtgtaatggagttagttattttgggataattattgaaatgctctgttcacatgataaatatatatgtttagaaaaacgttgtagtgtatgttgtgtctcggagtgcgataataatgggttagtagacgtgttagatggttttgggttaagctcgtggtcacgatgaattgcttgtggtcgtctaaatgcgtatggttatggtcgcggatgaaaagtattagtgctcatgtgatgtctaag

SEQ ID NO: 142883 - DNA, 405 bp, Zea Mays
gatttttgtgcatacgtaggggctcgggggctgtatcactgcttgaaaacgttggctgtgaacatgctaaggctgtaattcaactagacttctcagtttcagcgactgatatcaaagagcctttagccgaagctactgcccttagtgggaaattctattctgaagtatggatgaacggcggccgagaaataatagacaaagccataaggcgaaataaagaagagtctcatcttgcctcagaagaagcaagaaaagttgaagaggccactgagcgtgaaagacgtataggtacgtttgtcatattttagcttcgtaagtatattagcttcgtaagtattttagcttcgtaagtattttagctttgtatctgacaaaatcttatattttggtgtagctgaactgtct

SEQ ID NO: 142884 - DNA, 762 bp, Zea Mays
gctgttcgtctgcatgaacgactccacggggctatcggtgggggagagggcctacctccgcaacatcgagcacgccgacctcaatgacttggacgagtccgaggaggaggatttcgaggtgaaggacgaggatgaggacaacaggtacgacgacggggatgaaggcgacgcgaccatcaaggtcgacaacggtggcaacaaggacggggcggtgacggcggcaaaggcggaggcgacgacaacatcagcggggcagcaacaacggcgacaacaagggcagtggtgatagcaaaggcgccaacggcggtggcaagggcaagggcggcgacgccggtggtgaggcaccaccggcttaagtagtagtagtaggtgtagtttaggggtagcaataggggtaggagtagggctgtaggagtacgagtcttttgtgaggatcagttcacaatgaactgattctactcgtgaaatgacacccctcttatataataaagttctcgtcttctatcctttgagtactgagttcttttttgatctcattctgcgtttgaggtccgatcgatggtattgagttcttcatttcgttcagttgaccgcatccctgtgccttagccttgatgactgacttctcctaaccgacttatacgccgaaacgagttctctgtccgacttaacttgtctgactcatcatcttttctttcgatctaaacaaatatttccctggtgctggtacttaaatatgcgcttatgcctgacggtttccgc

SEQ ID NO: 142885 - DNA, 327 bp, Zea Mays
aaattgtttacgaaggttccacataatgtgacttcaggaccttgaacaacccaccacaatccacgcgagtacaagctctagcgtatctggcgtcaacgcgtgtgcagccatcagggctacgacagtatagcaagccttcgtaataagcgcaacaggcacaattatggctcgataattggggtacacgataaatccacgcaacgtgcgcaacaggcgcaattgtggctcgcggcagacagacagtgcctacagggcatgcaaaaaatacgcgactcagcgatggcggtctgactcaacgggagcgatccgattaatggagagcgcgac

SEQ ID NO: 142886 - DNA, 375 bp, Zea Mays
gcccactataccatcatagggggtctactatatagaagatgtgcagggagagtcctcatgaagtgtattcactcggctactggaaagcagctgttggacgaaatctatgctgggcaatgtggcatgcatgcagcgtcacggaccttagtagggaaagccttcaggtctaggttctactggccaacagtgaagaatgatgcagcagagttagtctagaagtgcgagcatgctagttcttatcaaaacagcaatatctacccgcacaacaattgcagactattcctataacttggtcgcttgcatgctgggggctagacacgattgggcccttccagaaggctcaagggggatatactcacagacgggttgtcattg

SEQ ID NO: 142887 - DNA, 342 bp, Zea Mays
attccgtgggggcactcttcgatcggatgtggggtcctcatggccgggaggcggttagggagcggtctgatcgggcgagagagcaggtaaggcttgtctgttgtttcgtgtgattgaatgtgggtttgctgaatgagtgtgctgttgctgcagatggcgcgtgccgaggatgtcgaagaccttggggctctgaacggcgtgcggcccgaggccgaggtcaacctggtgctgcccgaggctgaggtcaaccctgaagctattgagggctcctccgccggacctgtgcccactgtgtctggtgaaggctccttgccagcccctgcgccgacggcggagggcccc

SEQ ID NO: 142888 - DNA, 690 bp, Zea Mays
gttagatgtgaggttagaacgcctcttaccatttggtgcttgcacacaccattgcactagctagttgtaccagaggggcttgcagtcttatgaaatcgcataagctatgtttatggtgtggccgtcaccatgtaattgagcaaacgaggtccagggtattttggctagaaacatgatagtgaatatgacgatgaacattcgagagagaccacatcgaggcactgcttttggataaggcttagaggttatccatagagtacccaaccggaagcttggccctcccttcgacatccttgcaaggggatcttacaagaattaggtcgaaacatatgtgcttctcgacatctcgctaaaaatgcaaaacccaccaacaaaagtttatatccctatcatctttaagcttctatatttatattgagtactttggtcttgtattttaccttttatattagctgttaatctagcagatagatgtggaacataggttgtataactcttaatagtacaaatagcaacacttagccaaatcgtagttgaacatagatagtttatttattttccctatgctttgactagacaaataatagaaggcttagtttgatgggaattatattacctattttaccaccctcgtacggtcgcaccattaaaaacaagcttatttgaggcggtctgatccatgcaggcggt

SEQ ID NO: 142889 - DNA, 477 bp, Zea Mays
cctcgccgagtggctgtccatgctcagcctctaccgctcctggaaacgcgccgccgcctgtttcgccgcgaattcctagtcgccggcggcatgagctgatgccgccgtttggatttgtgcggtgacacataattcactgtaaattactcaaactactagcaatagctagctagtgcagtacagtatacttatatgattccatttgatgcgtacggtctacaacgtgtaagtactagtatttagcgttgccaataattagcgacagggcacgctccggcagcgagtggtgctgttgttgttggcggtgtgctttagtgagcattcatcattaagtattgggtttacgttcaaagtaacttcgctgggaactttaagcttgtggttgaattcagctgggtgaccactaccgctgacatcaaaagtccaagcctgtaatcgtgaaaagctgatgacgacgaaaagatgaaagcgtgtaca

SEQ ID NO: 142890 - DNA, 309 bp, Zea Mays
gttgaggtcccggttgtcctggaggtctatgatgtcttctagaggcattctggatgggtgaagctggtggcatgccgcagtgtcgaagcctgggggagtcgggggtagattcctcatcaagtctggccataatttagcttggtagggcagaatttttgggtttgacggagggtcttgtgagtcctctaagctggtggtgtggacttcaccttctgctcggtggagacttccttctgcttttgctttgcgatgaggccttcaccctgtggatcgacagaggcctttagtttaggtgctggggagtggtca

SEQ ID NO: 142891 - DNA, 731 bp, Zea Mays
cgagggaagaaccgagctcgggcaaggcggaggtccgttcgaggttgagaccgagccttgttttgagatttgatgacacgtgccaaagtcgatggagtggccttccacgggattcgctggggagcaagtagccgaggctgggtttgggcgaggcggagccaaagcgaggaggaacttgcacccgaggtcttggtccacgtcctgtcatattacgcatcccgtcaggggctgtcaggcggcttccgcatgtgtaatgatgttggtgtgcgcattcaatgcggttgtctcccaacggccctcgagcaagctttgtctttgtcgcctaaggcaggctcggacgaggtggacatggctgccctagggtgagggagccttggccgggacggagattctcccgagcttacgtcccgcccgagacaggcctcgggcgaggcggagttttaggaagacccctgagggggacctcgagcgaggcagagttttggttccttgttctcggaggaagtaccttgatggagtccttaggatttcaggcgcattttaggggcataatctgggtacccgtaattatcatacccgacaggagcccccgagccttccaaagaaatgttttgacacttgtttcaaggttcttctgttctttgtgcgggtacgctatcttttcctaaggagtggaagattttgtttccgacgggtgcgcgcgagcgcgcccgtcgggtgtatccctcgag

SEQ ID NO: 142892 - DNA, 347 bp, Zea Mays
cggtaagggtgctgaatcctgacaggggcgggagaaccaccatccaaatagtggcgtgctgcgcaactcagcacgcaattccgcaacgtccgcccgaaccttgcccaacttgtcaagggtgtggtccagctcggtgttgagcacggcggccaggttgaccatgttgttcagcctgagattgccctcaccaactggcaaaacaatcacacccctagcactgccggtcaaacggcgagggtagtacatcaggtcgaggcccttagctaccccgctaatcaacgagcaatactgagaaagtgcatgttctgctacatcttgcatggctgccttggtagtatccctctcag

SEQ ID NO: 142893 - DNA, 434 bp, Zea Mays
caccggaaaaacttttctttggaatgcaatcgtaacacatttgagagcgcagagaagaatagtcttaacagttgcatcttcaggtgttgcttccctactccttccaggtggccgcacagcacattcaaggttcaaaataccttgtgagctagatgaaacatcaatatgcgatattaaaagaggttcaaagcttgccgagctaattgaggcaacttctttaataatatgggatgaggcattcatgacacataggcatgctttcgaagctctagatcgttcacttcgtgatttactttctttgaaatctgcccaagctgctcaatttccctttggtggtaaaaccattgtgttaggaggcgatcctagacaaatactacctgtgatagaaggtggcactcgggcacaaattattaatgctgctataactaactcac

SEQ ID NO: 142894 - DNA, 367 bp, Zea Mays
gtggatttggtcgcgggcgggagcttatcggctgcactcgatggccgtgcgacatggccaagcggccgatgtcgtcatgggatgccgatgatctcaattgcgccacgtcgtggtcctttcaccatgtaaccataaccgtggcgagcctagagttactatccttgagttattatgccgacgagcgccacgacgaactcaccagtacaacctttgtcaccgccgtgatccgaacctcattcaaattcgggataattgtggccagcctctataaattgagtgcttcccttactccgcccccttatcacgaacccagcgcaactctaaccacggcctgccatccaccgtagcccgagaaattgcaatttct

SEQ ID NO: 142895 - DNA, 442 bp, Zea Mays
gaatgaggaatggccatggtacagtactgaagaagatcgactgccagccgttcaccgtcgacgacctctccgccgcgattcatgccgccgccgtctcgattcgtgctcagggaggaatggataataccggggatgggtaaaaagatcgggcgcgggatggattgcgattgctagctggtccggccatcctgtccacttgccgcgtggtcgaccgagtttatcctcaccggagctcgccgtttcactcaaccgtgccacgccgcaaagcattctccacgtcgtagggatcgtggaggatagccagttacccctcctgcaccgttttctccacgcacgccacaatacgcagagcacggtgaaatatccaagtcgccgtgagctgatctccaacccaaattcactggccgccgctcacgatcactataaattgagtgcacccatg

SEQ ID NO: 142896 - DNA, 624 bp, Zea Mays
gtctaatcctaaccgcttgctacggaatcaacggccaatggcccgtctcccacctcccggttgcgacaaacagagggcaaccggagcatcgccggcgagcaatgtgccccgaccacatagctcaatccccagtaccgatcaaacaatcgcgtagtgtacgacaacgcgacagagtttttcttaccggaagtcgaggcgtggagatcaccggccacagcggtagcggccgagcgcaccaccacggactccagcgagcgattccgtctgagccagtggccccaaccgcccgacgacgccatgggagcatccacaaggtttaggcgagtctccttgacccgacagagagcccgcgacgatggtgaaagcactcgaccaccatggcggctcccgactctccccctacgacctcacctctctgcgcggcaaggagcacatggcaatggcggcgcccagggttctcattcctaggacgagaggcgctggccgagtcttataggacgcgagattgtagctgggactggtgagaggcacatacagattgcggcaacgttgttgcttccgcgcgggttccgtgccattggtgatcgcaaggttgaaggcacgtccacccgggcccagagggaa

SEQ ID NO: 142897 - DNA, 307 bp, Zea Mays
ccatgaaaacgaactatctggtcaatgtagatttctgcatacttctccgtcctatgggtggtgtgtactggcaagaaatgaggtgacttggtcaatctgtccacaatgacccaaatggaatcatggtgcctggaggtattgggcaatcccacgataaagtccatgcaaatgtcctcccatttccaagatggtatgggaaggggttgcaaagggcctgctgccttcaaatgactggctttgatcctctggcaggtgtcacacttggatatgtacttggcaatctccctcttcattctggtccaccagt

SEQ ID NO: 142898 - DNA, 728 bp, Zea Mays
cgacaaatggctatgtggagaacccagaccatggcaagggagcggcttggcggcgatgaagtgctccggtgagcaattaacaccagtccgtggatgcaactggttaaccgacttcacgcttggatcccacacgaaccggtgagtgccccgagcccaatcacagggccacgccaacggtgattacgcggaacatcgacggcggcgaggatggctgtggaccgcgcttgacacacaggtgtggcacccgggcgcccgtcggcgatgtccaccgcagtcccacagtacaggcacgacgaagtaaatagagtctggctaaccaaagatcactggtgttgggatgagttgaccgacgccgggcgtacaaaggtcacacggatgggaagattctaatgccgacggcgcgacacggcttcggggaggatgtaggcgcggggaataagaagcaggggagggatagatgcgagggcagttttatacagctgaggaggtgtggctgcggcagaacgtgcgcggtccatggctgatttcaccggccggatttctgccgaacaacacggagaggttgttgaaaggaaagggatagagctgacgagggtggcccaccagtcattggattcgcgaggtgatcacggtgcgcgtggatgataggtagggacccagtgtcagcactctaatgcgtgcggtggtgcggcagcgtgggggagatgagttggttgggccgccgtggt

SEQ ID NO: 142899 - DNA, 509 bp, Zea Mays
gctaaagtgtcctccagggccaggagtggattggcggcaaggcttactaacacagaacccctaggggactagcaggcttacttcaggcttacccctgggggctggaacaccctcggtcagcaaaccagcagaacgtgcttcatccgagcgagctatgtggacatcgataacttcaattttaggcaactcaaggagcagctcctcatgaatggactcttcaagtatgccatcgacaaccgacatagacagaccttggatgtccaccatccttgttggggcaacaagacttgaagtatcaatccaagccttggagcaccattcgcgctgaaccaaaggaagcacctcttcctcctcctcatcttcctccacctcctccactacatacctagtcgttttcaccacacttccaccttccacatcatcctccaaaccagcatccaccacatcatcaacaacgttcggcttagcatgggcagtcactagctgcgggaccgacaaacgttgaagtt

SEQ ID NO: 142900 - DNA, 481 bp, Zea Mays
gttccaaactgtgtgttcaattttttgaatctttgttgcaatcttttatatatatatagctcaatgagttctgtaaacaaggaccaagagttaatgcccgaccacatgaacaagggtgtttctcaagaacattcaagtgatgaaggatatgaaacgcctaccgacccttgtcctagcatagatcgggtcgctcggcgtcaattgcatcatgacccaaattatgatccacaagagtgtgaggtaaagtacacatctttagtttcgtatgtctatacctaattagttgatttcacaatgtctattacacaggaataggaggtcttgtctcaatatcgtgcgatacttgatgaagccgtggcacattaccaacacgcaccgggctgaaccaagacgaagacgcaccgataccgaccgatacaaccaccgagaggtcaaggaaaaggacacagagcgaccggaaaagaggtgataggggactgaa

SEQ ID NO: 142901 - DNA, 525 bp, Zea Mays
caaagttttggttgggactttagcaggccatgagcatcaagctagatttcagcaccgcctaacaccccagtcagatggacaaacataaagagtcaataaagtccttgaagatttgttgagagcctgtgtgctgacctttgacagagattgggagtccagtttgtcatatgcagagttctattataacaacagttaccaggccagcatcaagatgtcaccttttgaagctttgtatggaagaagatgtcaaacccctctgatgtggtcaaacgtaggagaaaagaccctagaagggcctgccttcatcaaagaggcagaagagaaagttgccctgatccacaagaggctactcgaagcccagagtcggcaaaatagttatgcagacaacaggaggagagaactcagtttcaaggaaggtgattttgtctatctcaaagtctacccaatgcgtggagtcaaaagatttcaagcaaaaggaaagctagctccgtgattcgtcggcccctatcctatcatcggcaaaat

SEQ ID NO: 142902 - DNA, 450 bp, Zea Mays
cttcccctctcctgccttgcttgtaaacccctactataggcaccacggtgcgagtaatataagcctcatcctctctactagaagtagggccttgagtagcccgaatcaggataatcgcttgtgtctcctcgcacaccatctagagtcggccacgcagcacatttactagttggttaaggacccacggtccaaacactgtcactcactataaaatttaatttcatctctacatttaccaccctcattgggactcctaaagtccatcacaaaagcctactccaaccactatttcgtgttgtcccaccgccccgcaaccacaaatccatcttcacctccccagataccttgatgccaccaccactagacaacctcttgtgtcgagacgtcgcagagcaccttctgttctgcctccatgacgtcgcagcgaggacctcgatggatggcgtgtgc

SEQ ID NO: 142903 - DNA, 461 bp, Zea Mays
tgattccccgtgtacaaccaatttggagagtgggagaggagacacggcgaattttggattgcgatgggtttgctggtgaagaggaagacacctcgccgtggaccaccgtgctatttatagccacggcgacccaacagtcgacctgcggccacggacagtaacacacgcgcatgcttaccacgtcggtagaagacacagtgagggagatcgctgcatgggtgacaccgcggcaaagtcactgggtcacggtggccgccggtgaggtctccggctggactcagggaacggtgccacgtatgcgtcgtttaactccgactctatccatttccgatcgcgcacgaacccgaacggcagcggcaaggattttggcgcaaagaggtcgccggcggtgagcaagtcgcgctggcgttctaatcctatcaggctactgtaccatggcgaagttcagttcagatgcctga

SEQ ID NO: 142904 - DNA, 311 bp, Zea Mays
cgacaggagggccagaggggacaggaggacgcggcgatgaggccccaccggttgaagtgaagggtgcaggacgcggagacgacccgctaggaccgaggttgtagagagcctgctgtggggtagggggaatcgaggcccccttagtgagctatgcaaggaggaggtcgtttcaaaccttttggaaggaggggaacgaaacatatcgcacaatccaagtttgcaggtggtcgtagcactcgttgaggccacgaaggaggttgaggacgatggtacggtcgggacaagctcatcgaagtcacggagagcatcgg

SEQ ID NO: 142905 - DNA, 426 bp, Zea Mays
tttgatgtcgattctgtgcattttggtcgctcaaacaaatactcatttgttcacaaagagaagaaagtgatccttgtcccactaactcctaaagatatacatgcttctgatgttgctcgcatgaaaagagaagatagtgagaaaagaaaaatgagtgagacacacaacaatagtaagggagagaatcctaaaccaccccacttcataaagcccactgaaaataaaagattgccacaaaataccaaatgtttattagtgaccaagggagatttgcaagaaatacaaaacaccacagccccattctttgtgcttttgcacaaggacactttgatttcaactgacaccttaccctcgacattgccaactgctgttcttgatttattgcaggaatttgaggatgtgtttcctgatgaggtgcccgatggt

SEQ ID NO: 142906 - DNA, 861 bp, Zea Mays
cgcaagtggtgcacggttctgccgcttccacatcctgcccgctcgtcgcgctcctttccacccatgtcgtcttccccacgccctgcgcgcctgccatcgctagcgcgctccatccgccccagaaaccgcgtcgcccacttccatccatggcagaatcttccatctgtaaaccgcgtctcccccaggtggcccttccatccgtaagcccgcaatcctcgccccagagggatcgcgccctgccatcctcgccgccgagcccgcaatcccctccatctgcgcccttcaatcagctgcacgccatgcccccgcgacgccccagcctccaaacctcgtccgctcctcgcgagatgcccaccccttccattctctccccacgccgccatctgcacgggtctagcatcctatgcaggtctcctccagcctcgcgggctcctctaccccggccctcaccacggcgccgcacgatgacctcgaaggggcacgctgcgtcgctcctgcatcctcttcggagccgacccgaacgccgccgtcgcccgtcccgtctccctctctccgggaggatacctcggtggccaacacgagctgcccttcttctccagctctgcccccactacgcgcctccctcactccctccccaccaccaccaccccgtgttcgcgtcgtcgatgcacacgcccgacctgctccagcatccacgccctgctccggatcgactaacttcggcacgctccctctcggtccgccgcagcgtcgccagcgggggtcatccatggtgccgcgggatccactggatccgctgtgggggatccatggcgcccaccggagacgacgcccttgcccccttcccaccgcatcccccgc

SEQ ID NO: 142907 - DNA, 627 bp, Zea Mays
ggttagagactacaatcttggtgtaggagctgaagagagattcttgatagggcttgggctaaggcttgacatgccatccattggcattcctggtaaaaatgtggacaacccttactttagggcggccattattgagagtaaaaaacgtggcaaataaaaaatttgttccatgcatttattctattactatactttatatgattaaaggtaaataatatagttgtattaaatgtaggaccaatgttacattacctaaaggtagagagatatatagcaaatatttggatgaaaatatgaaggagtttcaggatgaaattaataaatggaagagtgagtagaaagactttggtgtaagtctcatgtgagattcttggaccggtactacacaaaaagcatcattaacttcttagtatattgcaatggcatgatgtttttgagagtacatagagggggtgaataggtgatcctacaaaaatgacttagaacaacacaaacatggtccaaaaaaaaagttagtgcaatctaaaaccaagtttgagtggagaagtggagagaaaagtttccttcacttgatagctcttccaagatgtgagttataccaagagcaatattacaggtgaagttgag

SEQ ID NO: 142908 - DNA, 707 bp, Zea Mays
caaatctttatgtgaagaacttctcaataaattgatgagctggacagggattagtggtacgtgcaggtactgtggaggtcaaagaagccattagacgatcaaaagtagaataatactcataaatagacatgtcattttactcaataacatgaatttgctgcgtaagagtgaagaagagcaccagtgtcctgagcaaaatgctccttcagatgagaccaaatttgcttagtagttgtgaacttagacaagatcataaccatgcattgtttggtgctattgtccataacaaccatcaccttgccaccattgatctgccatgttttgatatctgtgatcagttagcaaagcaggtggatcgtcggtcaaatgaaagagcaagccattaccctgtaatgcagtctgaacatagaaggcccactcagaatagttatgaccgtcaagaacgatacgacaatggcagtgactgacatgatgtagtgaaccgtgaaagagtagtatggctgggaatagttgattgataaattggaggagcccaaggctcatacatataggcaaggatatccctaataaaggaaagatctaatctatcaataggaaaggtctaatctaggggatccttgccaaacacagccaactaaccaaatacagagggggggaggcagccgccgcaccctgttagggcaggtgagccgcctgggccctatttc

SEQ ID NO: 142909 - DNA, 941 bp, Zea Mays
gtgcaagctcaagtcactatgaaaagttaccaggatcagcgtcgcagagaagtggaattcagtgtgggagattgggtctggctacggctacaacagtgaacggctgtaggggtcactacggcttctccctccaagttgggaccaaaattttatggtccatatcagatcacacaaaagataggggaggtgtcttacaagttgcaactaccaccaaatgcacgcattcatgacgttttccatgttgctctcttgaagaagttcgaaggcaccgtgccaacacagctggtccccttaccacccttgttacatgggcgggttattccatctcctgagaagctcctccgagcaaggctgaatagaggagtctgggagctgctggtaaaatgggtagggcgctcagaagcagatacatcatgggaagaagttgaggcatttaaacgccaatatccacatgtggcgctcgcggatgagctgtttgttggggaggggggaagtgttgtagattcttttgtgggccgacattatgctaggcgccagatttagtttgttaagaagtgctaaaagttaggcaataattaaggaggcttatcctcccgggagagttatcttatcccctagaaaatctgtaatatggttaggcacctaagctataaaggtggccttagattgtactaggagaccatcaaagaagttgtacctgtgggtgtggctgcttgatcaccctagcaagtcctacgccatctggtgatctcagctcccagccgccacacagagtaccctattccctgtgttcttctactcaatccaccttgatatcccacccttcgtggtgcactcctccccgccctgcgcatcgcagctgggttcacaacataaggctaaggttgagttgagctcttctcactctttcttctctctctctctctcttaggtttatttct

SEQ ID NO: 142910 - DNA, 697 bp, Zea Mays
gctagccgcagcacgcggcggaagtctgcgggtctatgacgacggtgagcaattcgttgctcggtgatcccaatcaacgcaccaactgtggcgggaaacgcgtgtcgagtcaaccacggcgaccggtcaccattgccctcaatgcccgcgacgaagggccagagggtggggtggttggcggcgcacgcgaaattgaggaggagagagaagagaggagattcttatagtgcctagggacgaggccgaggtgaggatttcggtcaatggctccgaggttcgcggcaagctccgccacggccgggattccgttgagggcgaatacaccgagcggatgggcagctgacctacgcggctgacaggtgggtccctgatgtcggtgctcctctcttagtggctgctagtggggccagcggatcagtaacaggcagccacgcgcgggcggagtgggtgaagggccgcgcggcgtggtttgctgatgggccaaattcgtagctgccggcccaaacagggtttcttcttctttttatattatttccttttctctctcttttcaaattcaagttgtatccaatttaattcaaactcttgtgaccaaatattctcagatgatattgcgccataaacattactattttgaagatatattatttttatatattttctcttttttgttttaattctagaatttcttttcttt

SEQ ID NO: 142911 - DNA, 776 bp, Zea Mays
gtcgtagatggcttcataatcttagtcgatgtaacttcaatgatgtaacttttacctctttctcgttgaagacccgaaggaaagctttatcgtcgcatccaccatagtttgatgcagaatattgagtacttcattttcagtcatctcaacatctgagttcaagaaagacatgacgataatgtttagtggagtgaaagcgagagtgagaggggtggaataaggagtggtaggagcaaattaaagagcgatggatgtgaatgaacccaaataccccctaagactatatccaacgggtagtgtaaaatagggggcacagaactgtagataacaatgtttgacactgtttgcaaagtgaagtttgaaataggggattaggggatgtgataggggatctgctaaagatagcctaatcagcccattcagtacacaagagttgtgaattaactcctacatgctagaacaacactccatacagatcgaaagcctcccaagcgccaaatcgagagaatcaagcaagtgatagacactctaaagtggtttttggtagtgccttgtgtgagtgtgttagataagggtgtgttgctaccatcttgtgcccttatgttttgagttgcgaactcccattgttgtaaacgctagcaagaggctttgaatctgtgagtgccttgtggagactctggtgtctcagattgagtggaggaaaagagaggactcaagtttgatctttggaatcagttgagagggttgaaagagacctgatcccttgtagggatggc

SEQ ID NO: 142912 - DNA, 533 bp, Zea Mays
tgacaaccaaacatccagaaaataaaaatggagcaactttattctcttccactgctcaaccaaacacaccctaaacatgtccatagaggccagccgtttagaatattgattctcaataattatgaatgtcttcatcaaaatccgtttgaaaagtgaagtgatgcagagcttcgcttgtggacgtcaatcatttttcaagcttttaagtctgagaactagcggtgtagaattgtccgacggatcgatactgtaatatatcagtaccataaataatgaagtatacatgtcatgtggagaaccttactatactagcacgtagaaggccgtagcatgatcaacagagagggaaggacaggcttgcacgagcacgggggcggctggggccggggatcggaatctgatacctccgcggcatcctccggctgatcgatcacttcgaacaagcagccgcaacgcaggctggctgcggctctgcctggccggacctccctccaccggatctggacacccgatcgattcatggccatggctcg

SEQ ID NO: 142913 - DNA, 996 bp, Zea Mays
ctagagggcagcaaaaattacttgagctggtcgaggagagtgcgcgtcctcttaggaggcaagggagtggagcactacatggaggagacctgtgttgagccggttgataagcttggcactgaatggagaacttggcatacaacaaactctgtgatagtggcatggttattggcatctatgtctcccactgttagcaagagggtggaagctatgcacactgcatcacagatatggcagaccttgagtagcatatactctcggaggggtaatgtggtggtgatgatggagattcagaataaggcagatgtggtgaaacaagcagggagaccagtggagcaatatgctagtgagcttcagtacttatggggagaactagatcactatgcccctctccaaatggtttgtccacaggatgcacacattgttcataagtgggtagaggacaggagagtgacccacttcttaaagaatctggatcctgagtttgagagtaggagagatgccttttgtcaccaggagagtcttcctaccatggatgaggttgtgtcggccatgattgatgaagagagcatgcttcgagtgatggctaatgataatcatgtgaaaccggtctatgctgcaatcgaggatcgagaatgctataattgtggggaaaacggacacctaagttacaattgtcctaatcctagaggaaatggtggccgaggaggatctcgtggaggtcgatggggtactcatgggagttatggaagaggtcgtggtagtcgtggaggaggtcgaggtcgtgatggttctagggccaacatagctaccactgaagagagtccctctgttactctaactggggaaaaagttaaacagtgggagcaatggcagaagggcaaatcttctgagtgcctcactgtacctgttgaacaagccaccaataactttggtaactttgccaactattcccacatgggcgaaggtactcaggcacaagtttttgcatcctca

SEQ ID NO: 142914 - DNA, 348 bp, Zea Mays
tatataaaagagataacccttcatgcatgcatgtgactacctaaccaccaactcccacttgcactatatataccgcgcacgttcaaattattactcgcgtacgatggatcacctaaacagtttgtctcttgcactttttgcacagagatcacctaaacactttgtgcagctcgctggagtgataaaatactggttttcaaacatgccaatgtcagctaaacaaattgagcctgctccagtgcttgtgccagccacgcgcatgcaagagagggccagttagttacgttgagacgacagtgaagtttactgttctggattggaatgtgggctggagctagctgctctaca

SEQ ID NO: 142915 - DNA, 512 bp, Zea Mays
ggagaagggagtgagacccacctccccgcgcctccagaactaccactagatttggcccaagttcaagccaatcagacccgactcattgaagtcctcactagaagtctggaaaaccagcgcccaggtggtgggagaccacaggataggatgggagaatttctgagattcaagcctcccacattcgcggggtctagcaatccccttgatgcagatgactggctgcgcacgatcaagaggaagctggaagccatcagatgccccgaaaatcagcatgttcaattggctgctcatcaactttctgggatggccctatcatggtgggataccttcagcgaggccgtcagggatgctacctgggcagaattcgaaactgctttccacgagcaccacgtaccccaggggatagttcaactcaaggaagatgagttccgggaactaactcaaggtggaagatctgtcagtgagtacgtgcacaagttcacagagttggctcgttacgcgcctgacgatgt

SEQ ID NO: 142916 - DNA, 764 bp, Zea Mays
cccatttgggttcgtttttcaggcgcgtccagcagtgcatgaaatggaatggctttttctgtgatgttgcatacaaagttgctgctttcgaagtctacacaagatgtataaccacttgtcagtgcacgaataacagtaagtttacataaaccatgaccatacataaagtattacaaattaatataagtgtaccttgtcgttatctgtgaggccactttggttttccctgaggactcttgcgtagaatccggcaaatttgcctgtttcagctcttattttgtcccacctgctgctgagagccctattaagtctcaatggaaactcacctctaagttcattgtaccttttctctattctagcccacaaaccctccttcctctgccctatgctaatcactgggtcactactaatctctaaccatgttttgcaaagcaacaggtcttcatcaggtttgaagttctgttccttcgtcctcctaaatgtccctggtgtatctgacggcttgctagggctgttaacttcctggacgctgtgttctgcttcggattcaaaagttatagggtcagtctggttgggaacatgggtggaaaccggtggacatggaatgggtggtaccaattgtggttgaccgaaacatgtttgtgtaggaggacccccaggatttgtcataccaaaatatgggttccatggagtacgaaaggtatgtgcagatgggtcattaggtccctgggaccaggtaggattggtcatatgggaaattgaag

SEQ ID NO: 142917 - DNA, 493 bp, Zea Mays
agtaactgacgtcatgaactctatatggccgctgcaaacatggggcagtcggtttggtccactgacgctacatgcctcgacaactcttacagggtacctcaaaccctccacacaaggaaatcggctcgggcagcaaagtccgacaacaattcggtgctacaggcctcgattaactcgtgggtgacctctaagcccttacttacacgaggcaatcgatgcgtgcggtgaagttcgaccccagttcggtgctacatgcctcgcttgactcgtgggtgtcctctatgcccttacttacacaaggcaatcggctcgggtggcgaagtccaaccctagtttggtgctacaagcctcacttgacttgtgggtgacctctaagcccttacataaggcaatttgctcggtcggtgaagtccgactcttgttcggtgctacatgccccgcttgactcagggtgcactcaagccctactttacgaaggcaaacactaaaggtt

SEQ ID NO: 142918 - DNA, 898 bp, Zea Mays
aaaagcttctgtacatggccatagcacttgaacacaaatgtgttcagcttggggagatgaagaggaaggccatcacccagggcctaaggagcggctgcatccgtcctcggtacgatccaccctagggtaaaccaactcgtcctagaggagggcaacagtctcaccagcgcccgattcagcagacacctcaggctacgcctcagactctgtgtcctcgtcacactacccccactggcaccccagcgagacctgctggccagaacactgcagtaacacccctggtgttacttagggttttctctgagtccccccacctgtgacatattattacatgcgatttggaccgagaaaaaggcaccaaaatttaggagccaagccctaaccaggtttcatcaccctaagaaagtatacattaaccatgtcaagcctaagaaagaagggaagtgccaaaaccctagaattccctctttagaacattagagcaccaaagagaaactcagtgaaaagaccaagtaaatcacattgtcatgacatgggccaattataaaagttataatacactaaatgacctaaaaatagtgagagaattgtcccaaaagggttttgcaaaatttccaaacaagccactcaagtgggagcttcctataaaaatcagaattctgaaattcagccccctcgcaaagatcaaacacgttccccatgttccttaactcaaaaccacttggcccaattgacaaaatggtgccaaaatacccttagaacaccctagaaaaatttgaggtcaaaccaaatccatttgacacgatttggcacgctattcttctcggattggggctgttagacagaccaatcttggggacgcgactactcactgcacagcccaagaaacgcctcggcc

SEQ ID NO: 142919 - DNA, 545 bp, Zea Mays
ctggaatttcatcatgtggagagagatcgcaatgcagcagcagatgcgttgtcaaaactaggatccagtcggacccaggtaccacctgggattttcgtccaagaagtaccacacccgagtatttccttagatcgggcagaagagtgcgatgttctgagccagccagagtcagaatctagtgactggagggagacaatcatcagatatataaagaatgaagaggagccggatgacaaaactgcagcagaacgcatcgcaaggcagtcagcccactacactctcattggggaagtactatacagaaggggcgcaacgggagtcctcatgaagtgcattcttttggctactgggaagcaactactagatgagatccacgccgggtaatgcgggatacacacagcgtccaggactctggttgggaaggtcttcaggtctggtttctactggccaacagcaaagagtgatgcaaccgagttagtccagaggtgtgaagcttgccaatacttatcaaaatagcagcatttaccagcacagcaactgcaaac

SEQ ID NO: 142920 - DNA, 351 bp, Zea Mays
atttacttctccttcctggtacaaataatatgttaccatgcatactatatgttccaaatagtataacatttaaaaaactggaatcttattacctggttttcctcatcattactaacatcacatgacccattacatccaatgtctggctctaatcggcatagaatgccatcgagctcatccaacacatccattgtcttgtcgtaccctgcttttgacatacacgcctggcgaacaactttcattgttttcgttagcaacattttctgtctgtatgatttagtaactccatcctttcccctgaagctcttattaattctttcaaacggcacatcttttcttgatgagacagtg

SEQ ID NO: 142921 - DNA, 466 bp, Zea Mays
aaacaactaattccttttgttccagaaaatggtattgacacgcataagtataaaacctatctgtataatgttcgtgtacactccaacacctacctatgtatgaacatctcaactgactaaaccagcgtgaattcatcggttcaaaataaatcaggggcgctctgaggtatctgcaacatcattgtttcaaatttgtgaggttattcatgcctaattttatagctttgtgcatgatttggttacacaaactggcccaacccgtgaaccaccagcaagccttcgcatatgcgcttcctttcacgagaaatcagactaaaactgatgaggtgagacgagataaggggtgaggcggggctcacctgattccagacggagacgaggggtggcgggttcccgttccggtgacgacatggttgaccttgcgcgggaggaagaggaagagggaacgatgtgagtgctgtcatcg

SEQ ID NO: 142922 - DNA, 358 bp, Zea Mays
aagacgtgaagcgaagacaggcgcgcgcgctgatggactcagacggagccaacgggtgacacggcccaacgtccggctcttgggccgtgagtgggtgaagtgagtaggccagacgtgtgatacggaggggagaggaatataggcggcgactgagaggaggagaggacagactggcattttggacttgacccggctgcgtccggcgaaccgacggtgtgccgtcgtgtaaccaccgtacctgctacctccataaactttgagagaggatctgagcgccgggagcggtgctcaactcattcccaccaccgtgctctaacaagcgcgctcatctccctcaagcttgtctgctccttctccc

SEQ ID NO: 142923 - DNA, 450 bp, Zea Mays
ccgcgttgtgccagtccaatccatggattggtcaccagggagggagacgccaatcaccggtgagcgcgcctccgcgagcgacctgggccttttgccgctcggcctcggtcggggaagaagttccctagccgcagattcaaggatgagcggtggggattaggcgacacgcgtcccttttcgctaaattcatctcggcagtaggatcgtgatcggagggttagggtcggatctcgggatcgtaggatgttggccattggatctagatccaatagctctcgctgtgtaccgtttcgttaaagacctagatctaatcccgcgcgtccgtttggatcgggcggctcacgggagccgataccgcttcacgtggccaacttgcataagcgccccctgtgcttctagggaatcaacccgccatccactgcggggttgcgtctatgtcttgggttgttt

SEQ ID NO: 142924 - DNA, 390 bp, Zea Mays
gaagatggcatcgggaagcatgccttggacacgtcaaacctgggatcttctctctatgcacggcagtgagacaaacccgatttctcccctctctatctcttgatccagtcagcaaaacctgcaagcctccacacacaaacgacaaaggaatttcaggggaagagatctctctacgagatcatggccataatctcaaagatttggagccaatccgcgcttgaactcgacctctctctctgcgctgcctcatgctcgacgctatgccaggcgctagagcacgcactggcattcgcccgcgcacgccccaagcacttgtcagagcctcgccctcggcctataaagccttcccgagcatgcctcacctcaccccgtgctcaccttcgccggcca

SEQ ID NO: 142925 - DNA, 494 bp, Zea Mays
gaccaccttcgaggcggagatccttccccctgcgccgtcgccggaagccgagatggaccttaccgacggcggggacggaactgagggcgcggctccttcccaaggcggcgcctaactcttgttggaacagcttctgttgaatgtgtgtcttaccgcggccgctgaggcctgaacactttgtttttcttgcatgaattcgtactcttctttctttcagtctgcgtgtccggcccagcttgtcaataatggggtggcttcccaagttgggtcatttttcgtggcaggtgatgagtgaggcgtccctagcccggaggcataggagttcctcggctcaatcggccttgccacttacatgtacccacgttcgctcctcggggccctgcttctgtcatagccgggagaacgcaaaagcccctttttgattgaaaatttttgatgcggagaagtacacccgatctttgacgcagaggggtcccccctttctagcccccgag

SEQ ID NO: 142926 - DNA, 300 bp, Zea Mays
tcacattaatgttgtcagagaaagtcaacctggacatgtgggtactgtactgcaatgaagtgcaacacgagccgacgacagtgacacagcgagatcttgcgattgttggctgcagtactacctagtagtagtactactaactacaatacacggccaccacccgatagaggcacacgctaggtgatgctgccaagtgtgacgaggcagacgggcgggcggggtccggggcagtaccgctactggtggccatcagtggtgctcgaccccccaatcatctactactaataatacccgtacggg

SEQ ID NO: 142927 - DNA, 443 bp, Zea Mays
tgcttgttggtgccaataccttattgcactataatgagatcatcatggcttttgttcacagttcattcattctggcaccaccatacagcacatgtaaaacaacctcatgattaattagcgtttcagcgtacttggtgaggaagaagacgaacagggtagaaacatacaagatctgaaagaacttgataggcagtagcatgattgattagtgtttcatatattcgataattcagctgcacagacatcctgaaccgctggctgactgctgtactgagttatgagccgcacgtctaattgcctctattgctgcagccactaaagcaaaagttaccgaatgacattacccccgagctaattcaaagctataacttgaatctcggcatatggattgcaaggaagctctacgacactatgaaaactaggctcctgtaagttcccgcggc

SEQ ID NO: 142928 - DNA, 667 bp, Zea Mays
gaggaccggactgtgtcgtgggatcataaattttgtgctctggggagaatctgggcataggaagctttgggggcaccgaatttcctcatcggtgtgcatctcgccctgctttgccgcaccacgacgaaggctgggatctgtgcgttccaatcgccgataattatccctcacccatgttcgttgtggtctcctcatcgtatattacgggtagaattagagtttaatgcttggatgcggggaaatcgggagctcaccggcgcgcgccgccgttcctggtcactcgactggggaagaagtaatcggaggcgtgggattgtggggaggatggtcgagattgatgctagatagtcacttcgctcattgaatccctacagtaggtcctctaatgaatggtgcaaatcgtgggtggattctctgccgtccatccgtaatcctgcgggtatcttgatgcaccgggtctgttgcagggggcgtctaatcggggctgttgcctttagatccggcggcccagatcacatcataccgtttcggtatgtgcaatttgtaaaagaaaccctgacctttgcgcaaagaaacccgcggtacgttctggtgacagtctgagtctcggggattttagtagattagcccctgttgtctctagaatttgaggagcagtctagacagt

SEQ ID NO: 142929 - DNA, 706 bp, Zea Mays
gttttcaaaagtcagcctcggcgccccaaagattagatcgacgggcagcactgcttccaactcataaaccatgaagaacggggtatttccatgtagagcttgactgggttgagttcacaggctctagaccacgtatgacagttctctgatccattttcctgcaagcttttcactcttatcgaataccttttttctgagtgcttccagtatcattccgttggctctttccacatggccattggctcttgggtgtgccactgatgcgtacttgatctggatgctcctttgctcgcagaaatcaaagaactcagagctggtgaagttggatcccaggtcagtgacgatgctattcggtatcccgaacctgaatattatatcctggataaactccactgcttttgcttaggtcaaagaggcaatcggcttgtactctatccattttgtgaatttgtcaatggcaaccagtatatgagtatagcctccctaagccttcttgaaaggaccaatcatgtccagcccccaacatgcaaacgaccaggttacagggatggtctgcagctgctgcgcgggcaaatgttgttgctttgacaagaattggcacgcttcacactttaggactaactcggtagcgtaactctttgcagtgggtgtaacatcccaaaaatcctaacccaaggtttggaaccctaacctcctaacccccccc

SEQ ID NO: 142930 - DNA, 540 bp, Zea Mays
attcgtgcccagcgcagatggataacgataaagggtaagaaatatcacaccgtggatgaactccggtcactattctaccccggccgtcgtacccgcctaagccacagccgcttaagataggctcaccggagttagccacctcgtgaccttgcgccacgtgcctgggtgctttaaccacgccgccgtgagtcaccttagcccatccggtgatcgccggtgagcttgccacggtaaatgccaccaattgcttgcgccagtgcacccccttctccccgaccgccaccgcgcgatctcgaattcacgggccgccgctcaagggccctataaattgagcacaccctcggctccgttatgtaattgtgcactcagcacacccacccgtgcctccaattattcaccaaaacccctgaattgctcagttcccccaaatcagttttccgccgccatgaacaagctctcaccgtggccagtgcacttcaggtccgatcttttcctctgctctcttgtttcagcacccttacatgcccctgatgctcctcg

SEQ ID NO: 142931 - DNA, 626 bp, Zea Mays
accgacgagtgtatttctagacttttggtccagtctcaacatctatacgtgatagagttgcgactgcaggggggtgttagcactgtattagggtttggggtctccccggtgtactataatggaccaggcccatatctagtctattaatacattcccctccctattctagggttagggcttccaatagtcagaaaaacttctcagaatatgttggatgctcagcaaagtagtcacgaaatcatttcttgtcatgctcttctctacgcggtgccgaagagatggatgacggtgatctgcagcacagatgggaagtagctgagttgagcgggaaagagaaaagaatagaaaggtacgcgggagggaggaatgaaactgaattagctactttacaggatttgagacccaagggttggagattagaaatttgttcatgtcctaaacaaaacaaacaacactacagtagtgcaagactgtaatgcatgactgtcatataaattttagggcctagatttaagactccacgttgaagctgctcttatggcagtaaatagaatcgtcgattctattgctctttcccccccctttctgatactgagttttggccatatgttgaatcagcatggttg

SEQ ID NO: 142932 - DNA, 879 bp, Zea Mays
tgtagcacaagttttactttaaaattcaaattcaaatttaaacctaaaaaggaagaaaagagaaagaaaaagataaaagaaaaagagaaaacccgcagctgggctcactctcacacaattcggcccactgaaggaaaccaaccacgcgcagcccattaccacctctgcaccgcgccgaccgtggggacaccaggtcagccgggtcaatcgtgtcgcgtaggactcagtcgcgcgctgacgctcggggcccacacaccagtcgcgggcccgcaactcagctccaccgttctaccgcgcgccactcactgcaccgtggctcccacgcgtcagaatcttcctcaacagcgtcgccgcgcatggcgggcgctccaccgacgcgatttccgcgcacgcactctgatgggtgggtcccattgatagacgccgctctcacctgtgcggctgcttcgcggggccgctttgtcatccaccatcttgcgactggctgttccgcgtcgtccgcagtagtgggcgccattaccggagctccgcagctgccgtaggcgcaaccatcggggcggaatcttctcgtagtgggtcgccgcaggataagtgtgcgttcctcgctctccttttcctccccagttcccttgtctcggccgtagcattgcgcagagaggggtggtgaggagttaaacgcctgcgccgccgtcgattaccgccgcgcgccgtcgggtcggttcgcaagatgtgcccggaagattccttaagccgccgcgggggtgatcgtttatctgactgggcgcgtgaggcgatcggtgggcagcaattcctcgtcggagtgggcgtgccaccgtggatcgcgccgcgccgtggaccagggtctgtgcagctcaaaac

SEQ ID NO: 142933 - DNA, 306 bp, Zea Mays
ggataatcttggggatgaggatctagcccttgtggctagccggttcacacggttccacaaatcagctagaactggtggcatggtaggatgaaggatggatgcttcaactgcggcaaccctaaccatttcattgcgagctatcccaagaagggcaagcaggaggttgtgtgcacgaccaccactctggtcgacgcaagggtaagcgggagtacatctctaacaagcacaagtctaagggaggattcgacaatcaggcacttaagaagaagtacctccaaatggaaaagatcaaggagtgtgccttcc

SEQ ID NO: 142934 - DNA, 385 bp, Zea Mays
gcaaggaagagatcctacacggaaccctcactgagataggcactctagggcagctaaacggacgcttgaactcaggacagacgtcatcctccacgcagtgcacgccacgagcgtcggtcggctcggccgatgctccaccccgtgcccgagcccaaatcatcgcctataagaagcctcgaccctctgccttgtcctcccgcacacccatactcttccaccggccaacgagtgccagtaatcgcctgaaaaccaagcacaacgtcccgcaaggtcaccgacgcgacgaccaccttagcccggtcgctccagcccaactccgccgaatccagttccccagccaacttccctagaggctagcaaagcttcccagccgctcgaaccaaat

SEQ ID NO: 142935 - DNA, 609 bp, Zea Mays
gagcagtcccgggtccacgggccgttgcgcggcggtcggagtttgttagccgagcgtgggatgcggagaggagatagctttatccggtcggaaagcttccgcacgagactgaacgccagcatgtggaaggaggtctcgtcaacgatatccccacgaacgccccgaagaagagggggggccgtgtcacacccgcgagatccgtgcggcatctacggtgctgggaggttgaagacgtcatgacaacacggtcctacatgtcggcacggcaggccctgggtttaacgcgcgccagagtgactgactgtgcgggccccgcctggttgtgagtccgacccccagcacagcgcgggtgatgctagggaagaagtgggccgcgctcagggaaaatgggcccaaatgctggtttccccttattcttttttattttccttcttattttcagttttcttttctttttcttatttatttttaaattcccatttcaattcaagttcaaacttgtggtaaatttgccctcgaatttttgaatgtatggtttgaacatattgtttggaataaattcattttgtttacaaatttattttgtattatatggttgtcggggaccat

SEQ ID NO: 142936 - DNA, 385 bp, Zea Mays
aggctactagcgacgagttgcttggggcatatactagagccaaagatgatgctttatcctcagccttcgggggtcggggcaagaaaagattgaacagggtttttgatgcaattggcttcatataccctgattactgctaccccttgcgaaggcaaggaaaaaaagagaaagactgccgcttcgaccaccactgctgtgccgaagggtaagaaaataagggttttgacccaccagccacgatatattgaaactgtcgtagtgcctgaattttgtgaagggacctcctccgctgccgaaacgaaacgagctactcccgtcgcacggagcgctgagggatcgattgtagtgccgaaggtgcctatagtcgggtcagtcgaagccaaag

SEQ ID NO: 142937 - DNA, 835 bp, Zea Mays
gcttgggatataaatctccccttccgtgtccttggcaactggattcaagccatatccgagcaccattacatttgccaccgctgttgcgtgagagagtagagtgaggattgcgccgccgtgcccgatcgtccatctgccaccgctggtagtagtagggaggtcgggggtcttcaccgagcgggcgcgtaaccatacgtggtgcctgcgtgccgaatcgtcgaccgcgcgccccgtggttgttcgccggagtgggcggaacgccgtcaagccgcctcgtgtcgtggtcagcccgactgtgtgcccaatcctcggtaaattcacctccctactctctgcgctgtcctcctctacgtgtagctcggttcaatttgtatatggcgctcgggaacgaccgattgcagcctcgccggcgtgcgccgccgtgcgttctgagcgcgccgccatggctcggcggtgggtagggaatgggtcttcgaacccttggattctagccaacggctgagattaagtgttgcataccgtttcggccgggcacgctgtgaccgtagatctgcgatcctacggctcagattaaacctggtctcattaaatcgtaggcgtcggagttggatcctgtggcttagatcgcgtaccgattcgcgtatacaacagtctaatctggcgcgcccaagtctgatccaacggccgggatcaaaccgtaccccttcgcgggtcacttttgttaaagagccctcagactttagtgaaatcaacccgccgtcctatatcactgtgcgctgtgtcttaggagttttactccgtagcccctgcgttttccatttattgaggcctagtc

SEQ ID NO: 142938 - DNA, 405 bp, Zea Mays
tgatgacggcgccgaggtaagggtccattttttgaaatgaaattacaaagggcataattgtgcaaaagaaaccccaaaagggctaaaatgcaaaaaagttggtgattctaactgactagaaactgaagagcctcctttcagttttaaattgtgcatcggaattgtagaattgttatcttagctttcaaggcatcgacacttcaaccttcggtttactcgtttcacgtgtgatccagctaagcactagtgtgaagtcgtagaaacattggccctttcgttcgttctcttgggagagttccagtggcgatgaagcttttcagttttcacagctcggatgtgagcaaatccatcagctcctgcactgcatggtacggtacctgctacgttttgaacatttgtgaagca

SEQ ID NO: 142939 - DNA, 524 bp, Zea Mays
gcccctgagccctttgttacctgacctcgcaggacctgcaagtacctgaagaggttctcgattccagactcgttcggtgggcaggaaaggtgatacctcaagtcctgatcaggtggactgaatggcatccttcgctggctacctgggaagacgaagttgtcctcaagcaacagttttcctttgcgccagcttgggggcaagctggctctcgaggaggggaaaatgtcagcaactctatgtcgatcgctactgacagctgaaggaagacaaccccgacaaaggtccagcccagaaagagtgatcaagtcccgcagcccaacatgaagtacctcagaaacacctggatgtgatagggcccataattgttgtgcagcccaagaaggcttgcagtagagttgtataaatattgtctaaactgcgcgtgagacacaggcaggaagaacgagcttggctgacagagatcaaacagttcatttgttcccaataccacttcatttctagttcgcatacctgaaggctataac

SEQ ID NO: 142940 - DNA, 275 bp, Zea Mays
gtgaaactctagtggggagtgaaggtggtttttccaagagcattcatgttctagtaaaacattctcttagaggatttgaaaaggtttggactgagctcatcgcattacttacttaactattgcggatccctcttaattgaacgacgatttctatgactcaagaattgtaaaatgcaaactgccgttgttcccaagcacttggagcacgctatatgatgtagaactttaaaccgctgtgcttttacatttgcatactcatatgatctgtgcttctc

SEQ ID NO: 142941 - DNA, 908 bp, Zea Mays
ctcgagcctcaccacgcgatccggtcgtgacaatgtagagtcattcggtcccgtgcgtggttcgcccaaactggaagtaggccccgggggaacgagagtccttcaccggagtggggcttcggtgccgtgccgcggtggagcgaggacgctcttcccggcgccatcctgatctctggtaagtaccctggtctgtctggtacatccgtgggatcgtgtgacaccggccgggtagcagttggttcaacggtttgccggtgattgctcaccggacctcgtccacgccgcagggccgccatgggaggtagattgacgccggcccattgtgattttgcgcgtgatgtagtcgcccagcttgggtgcaatcgtagcttcgtctagagcatgtccactcggagtttgggagctcggtgtgtggaacgggtcttccccggcgaggccaccaccgccagacgctcgccggtgttgggagttggcctggagtatggtgacgatcgcgccgccgtcggatcctggatggagggcctagattagaagtagagtaaccgattggccaggggttgcgctagcggttggatcgtgatctggcggctggggttgttcgcgagtttgaagagggtcgggtttaactataccatagatgcttgatctgatggcagggagtggataccggttcataccagtcccaatctaatccgagtctttggtccaggatcggatggctcaggtttgatcataccccttcgccttgacatttattctaaagacccccttggcttttctcaaatcaacccgccacccgagtcagtgttaagatcattacagagaagacctcggatttacaaaatgaaccccgaactcctgttaaattgtgcctgcagtacacttattcgctggaattaataaaatag

SEQ ID NO: 142942 - DNA, 1067 bp, Zea Mays
gagccgcgggggtcagcctcaccactacttggtcgggcgcgcacgtggtggcctcagggtggtccccacctgtcggatctatcctcttcgccggcatccacgcaattctgttgcctctgccgaacccccgaccaaatgcacgccgtatccgcctgggttgttgggatttggcgtcagcggtgtataaaggagaacccccggcaactcctccttggccatatacggaagtcagccagcctcggtgcgaccgaaagcaaaaaaagagcgagaaagagagctgggaggtgagagtgggccgccatacgaaattagcgcatgtaccgccgttggggcttcggggtgtgcccgggagccttcgttgatgctcgttggaagtatctggacatcctctgatgctgcgacaactcgaagacccgagaatttgtcgtcgaagttcttcctccgccgcggtgccacctcacgccatgggcatggcttgtcaccgattcaaccaccggtaatacgtctcccctcgattcatattaacaaccgctgtaggtagcacggatctattcggtgtttcgggcattggtgcgtggtcgtttgctcgccggggtgttggccgctgccacggagccacctgtaccgtggccagcctgctctgctgcgcggcgaccggttgggagccacccattgtgttcgtcatcgcctcctcgtggaactgcactggttcaatgtatcggtttgtcaccatggtgcccagccccggtgggctcgctgaagtaatctggcgccgccgctctggactctggtggtcgaaaggaagaagaacgctgtggtccgttggattgggatggacggctaagattagaacatgcggataccccttcacgttttgagtcccagccgttgacgcgagatcggacgggtccgtgttgatctcggtaaaataaaatccagaccgttgatgttgatcggaggggcgcggttgagagccggttcagggtctgatctcaaccgcgggtgtgtgatcggacgactgatcctcgccgataccccttcggtcatgctaaatttctaaagagacc

SEQ ID NO: 142943 - DNA, 438 bp, Zea Mays
tgccgctggacatcacgtcgcatgtgtggccaaaagaaatgatcagagaggatgtccaatgtctttttgacaccaaaatgaccagctagtccaccttcatgtgcttcctgcaaaagaattgggcgaatcgaacaagctgggatgcatattttgttagtccgaaataagaagccatcatgcacataatatttatcccaaccttttccatcaatgcaatgagagaaaggttctttaaaatcagcatcagcagcataaagtgttttaatggattccaaaccaagcacttttgtatctagttgtgtaatcaacgcacatcttctaaacaaggcatcagcaacaatgttatctttaccacgcttatgtttgacaacatagggaaacatttcaatgaactcaatccatttagcatgtcggcggttcagcttgccttggctttta

SEQ ID NO: 142944 - DNA, 1013 bp, Zea Mays
gggaaaaaacatttctacatcaagaaatggaagcttcacgtgcatctaagccagaggaaaaaatcgctatagcgttgtggagggtgccaccatttctaggcttgagattgggaaagaaaagaaggggcagtggcggcatgacaagagtcggcactgaataggagcatggaacagaaaagagaaggctaaatgaaatccaacgacccaaaaccattcagtttgatacaatcgcaccaatgtccaaataatgcatattagtagtcaaacggattcctttcaacaagttctacacagctatggtctttgatcgaccatacgattcaaaaggtaaaaaaatccttctctctttagtacaatcggtcaactcactaattatataaaaaataaaggtattacagtgtccttccgttaaatatgtagtggagcaggaaggagaattcaggtgcaacatgttctcacaggcacgacggtttatttagcaatggcaattcacattccccaatgggccttagatgccattgataagataagaaaatgttttctatggagaggtagaaaggaaccaaagggaggacattgtttggtggcctaggaaaaagtgtgtcgaccccttcaactaggaggcttgggaatctctagtctcccagagttttgttgggctctccgcatgagatggttgtggctacagaaaacatatttggggcggccttgggcagaccttcccatacaggtcccaaacaaagctagagctttttctctatggccctgatttctgaggttggggatggatcaaacactttgttctgggatgatagatggttgcatggcactagaatctctgacattgcccccagcctctacaactcaattccaagaagaattgctaagagaaggacggtgaaagaagcatttttaaataggagatggatttcagacattaaggggctcttacaataagagtcttggtagaatatctaaagctttggtaatccctctcagagattgagttatag

SEQ ID NO: 142945 - DNA, 418 bp, Zea Mays
gtcctttgttgaatggtggctgcaaagctcgatggtgcttggggtgtcatttggtgctgtaacataggattttattgtcttgtagtcgttcgtatcgtataatcctccacgctcatccttaacgattatgttgtgcagaatgatatatgcgcttgatcacgctgaatacatgtaggaagatagaacgccattgagttgtgagaatatgaaatcgagcattaagcgccccaaatgccttctccgcgtcctttcgtgccccctcctagcatgcagtgaacattctctactttggagtctatgggagcgaaacggtcttctgaacaacggttgccgagggtatatgccattagcgtggtagtaatccttgttgtactcgtggccattcaccatgaagttcacatttgatgcttcatcctta

SEQ ID NO: 142946 - DNA, 344 bp, Zea Mays
aagtggtaaagtataggatataaccacgggtgcgataagtaagagaccatgcttgaactaaggtgggagattggaggttttagataacgaacatagcgtaatcaccaaggtaagattgagagatcggaaaggtcaaggcaacgctaaacagaggcacaaccaaggatggagttgaagactcacaagcgatgaggaagaggatacgaccaagggaaaagtaggtaaagtacaacactcagattgagatggaaaagaggaggttttaaagggccagtataagataaacatcaaggtaagatatagaggtgataagggtaaatgtgataaggatgaaaagcataatc

SEQ ID NO: 142947 - DNA, 582 bp, Zea Mays
ggtggatgttgacgaaccaaaagcatttgaactaagcctgatgcaagccaccaactttttcaatcaaatatggtgatcattcaatagagccctaatgcataaaggtcgtttaggattgcatctttctcagccgtgaccatttgatcaatggatcaaaagtaatagaatggaggtgcccccagcctgaatagacaaagggagtacgcatgtaccatgggttcatagtcataccattccatatttgaacaggacaatacatcgacgatgagtagatgggtgggaagcatcctggcatgacaggatgaacaggcgatgcttgttgtgtcatcttttgggccgttttactcagtcgttttgttttagtgggtgaccagggtttctttgttggccgatcgtgtacaacgaccttcttgccagcatatttggctagcaattgatcgaaagtcaggccggcttttaccagctgaccatgtgtgttatgttggctttaccattgcgtctctttccttgctttgtgtggaagctgacgcctctggccatgagcggactatctggctgagtcagctggaccatctgtctaag

SEQ ID NO: 142948 - DNA, 574 bp, Zea Mays
cttaaggttcgtgcatgccctgttgtcgttcgtcttcgccccttcttccttcggtgcagagtgcttgttcagtgaacaaattattgatgagatgccaatgcttgtttagagtagtacctgatcacctgtagcatgttcatcgtgatgcacgtggtagtcggtcgtgtgtacccactcatagtgcagtcaaggtgttcaatgttttgtgtgtaagacaaggtaaatcttggttgttttgattcagatgtatgaatttgaaagggaatttgtagatgttttttcctataaatgatcactttttaaccggctcttcctcgaagaaacttggcaccgtccttccttccttagcctaactcgctagtctagatcaatgattgaagaagatagcccagatagggaagaggacgtgcaggcgacctacgtcgtgatttcgaggacatgtaggcaggctacgttgtgcagctcgcacgatccttctatgcccttggctgcttcatgctcctccgtttccctcccctccaatcgacggtgcccaggcttcaatttttggccaggctccaccactgtcgcagcg

SEQ ID NO: 142949 - DNA, 462 bp, Zea Mays
tactttgaggcacacaaagtacgagtcacttctgataggggtctgagggagttgctcagaaatccggaggcgtccgctagaatagcaaaatgggcagcggaactctcagggtacaacatcaccttcaatcccaggacatcaatcaaatcacaggtcctagctgatttcatcgtagactggacagggccttcggaaccacagtagtgtcacacaaaaatagtctggaccatccaccgtgatggagcatggtgtcacgcaggcaccggcgctgcagcaatcattacatcacctgccggaatcaaatacagatacgccgcatgtctcagctttgcactcgagtcagataagtgcacaaacaacatcaccgagtacgaagtagtcatcctaggacttcacaaactgcgagcccttggcgtgaccacctgcgtcatcaaaactgattcaaaggtcattgccggccag

SEQ ID NO: 142950 - DNA, 814 bp, Zea Mays
cacattagctgcgcggcatgcgtggggcggacccagagtgtcagcgcggaggagtgaagtcatggtaacaacaggtgcccacattaagttcttaatagagtattatatatttcatggcatttatttcaatttaactttgctatgactggatatgcagaggcatgtctcttttgtaacaagagaaaaatgcaatagtgcttacaggactatgctagagagatgtaagtaggttctaatctcaagaactgatttaagagtttgtgttccctgattttgtgtgcacagcagcacaaggcctgcaaatgtagatttaagatctcgtacaccaagtataacttaactatgctcttaggttattagtttattgtgtttaaagttcagaagttccaggtcttaatatattcttaaattaatcgaccagatactcagatccttttctcacatgatacggagtagtatcattcagcatgttacatttatcaaagtccggtatacttatggagctaatattttatctagctctattttctgaatttggcattggttacaacctttaaagtttctgtacagattatctcatttcagctctattttttaggtacactgcttatattgagtcagtggccaaattttaacaatcagttgtggtcttaatccatgttactgttgttggtatgataatgcactttgctcaccatatcatctatgtttttggtatgataatgcgttaacgcgtcttaatccatgttggatgtaaacgcatgttttttctgctaatgcttcctctgtcccaaattataaaacattttggcat

SEQ ID NO: 142951 - DNA, 546 bp, Zea Mays
cgacttgtttgttgcccatcgtctttattatgcatttgcttttctattttatagaccacatattctgagtttctgacattagatcagaacccccattgtaccacgatattagtatgtttcaagtatcgttcaaccagggtttgatgcttggaccaatgcaggataaatcgaattacagccaattcatctacaaactcagacacaactttccagttgtgtatcgatatatataatcccttgtagtatgatattctgtttggatgtatgaatagatatggtcacttccttcctctatatctgagcatccagttgtaccctaactcattctgttcctgaaaaaaaagttctgtcatttgggcctatggacaccatactattgtgagctaattcaactataccttctatactcagcatcttgttgctttctttatgttggatttacctttcgttgcttctcccacctgttattttccttttatattatctttatcgcaaaaactatgttatatcttactgatctagtaaatccttagttgtcttttccct

SEQ ID NO: 142952 - DNA, 772 bp, Zea Mays
ggaaaaggggaattccaactcgtcgaagacgacgtggcgagagatgatgactctatgtgaggtgaggttgaggcaccggtaccccttttggtcggcggagtacccaaggaagacacagtgagttgagtggggcgctaacttatgaggagtggtggaggcaagattagagtagcaagcgcacccgaagacacggagatgatcatagaaggggtggatgccgaaaagagcaaagtaaggagtggggtgagcaaccgtcttggtgggtagacggttgaggaggtaggtggcagttgtgagggcctcagcctagtagtgggcaggaagggaggcatgaaaaagtagagagcgcatgacatcgttccctgtgcgaatcatgcgctcagtcctaccgttttgaggagacgtgtaggggcacgacatacagaagtggacaccgcaagagagaaaaaagtcacgggacacattgttatagaactcgcgcccgttgtcacactggatacttcggatggtgtgaccgaactgagtggagacccaaacgaagaagtgagacagggcaggaaaggtgtctgacttctgacgtaaaggaaaagtccacaaatagtgcgagaagtcatcgagaacgagtaaataatacttatagctagaaatgctgattacaggggatgtccatacatcacagtgtatcagatcaaaaatgcctgctgccctagaaaaggtggtggggaatgggagcctaacatggcgacctaactgacaagcatgacagaggtgc

SEQ ID NO: 142953 - DNA, 368 bp, Zea Mays
agatcaacctcgtcaaagaaggagagaagtcaaactcgatcttcaagatgcattaccacccaacacagaattcttcctcaccataaaccctcttacccctagctattcttgccctaacctatccatctcttgtatcctacacaataggtagctggatacccatgctctcctactcacccactaatgaaaaaaagagagactctttatttttgaactaattagaaactaaaagctaaattgcaaatcactcttcctatatcctctttctcactaatctcgaggacgagatttcttttaagggggtaggatttgtaaagccctaaaatttgtataaggtaaaaaaataataatacatgtatttatataaa

SEQ ID NO: 142954 - DNA, 278 bp, Zea Mays
gtctatgtcgtggagtttcaaaagcggggtttgccacatgcccatcttctactcatcatgcagaggaagtacaagctcacgtgccctaagcagtatgaccttttgatctcagccgagatcccacacaacaagtaccctgaactacgaaagatggtgatcaagcatatgatgcatggcccatgtgggtcgctaaaccctaactgtccatgcactaagggccatgcatcgtgcaataatcattacctccagccttttagtgacacaaccttgcaagggaa

SEQ ID NO: 142955 - DNA, 548 bp, Zea Mays
tgttaactacctctatgatttggcgatagactgttaccatccggcctgtagcatgtagttcgttatatgagtctcaaccatcaaattgcagtgccaaaaaaaccacagagccaaaggctcccacgtgaggggggtctaagaagggaataaactgatgcaaaccgtccttctacatatgctttccttctacatatgctttgaacccgtgacctggtaacttagtgagatagctcttaccactgcactaggctgcccttcatatgaagttaacacagttgccacaaatcccgtttcatatgaaggtattagctgtgcaacaagctaattgctgctctctgcccaataagttatgcagttgggagtaggttgcatccaaggtatacttgttggtacgcctttctttgccaaacctagtagcaggaaaggcatttaacaaagaaacaaatacattgcctgaaatctagaatacaaagtaacataaatggaggataatagttgatggaatcgtttttaatcctcacttaactcatgtttgaaggagatgggaa

SEQ ID NO: 142956 - DNA, 452 bp, Zea Mays
gacacagattaacccaccgatggacggcgggttgatttggaaacttcacgagggctcttatgaaaaaccacccaggcgaaagggtatgaatgagttttagtcgtccgatccaatctcaacggcccagaacagcccgagcccacagctaccctagttttaatctcacccgtggatccatcaatcaacggccaaaggaatgcctcatgtactgatctaacctcccccgcccatatcagatcggatggtcagagcgcttcttccccgaccgaggccgagtagcgaaatgcccaggccgttggcggaggtgtgctcgccggtgacaggcttctccctccttggtgggtctacgcggggtaaaaaggatgcagagggattgaagggaccttaccagtgctgattccatcctgagttccttccgcgaagggtgcaattaagcggcaccaccagccacg

SEQ ID NO: 142957 - DNA, 629 bp, Zea Mays
atttgagaacaagtcaccaacactacgcattgcagcttgttgcgtatcgacctatcatcatcctttgttctcatcctgtcatcatcgcacgtcatcgatgctgcctgctcgcgtccacgtgtcactcgtcggaagagtcagtgtgtcgtcttttgggagtgtccttcggtctgttcgccttgtcttcatgggtgttgccagtgcggctcatctgtgccccttcacccaagtgttgcctctgattccttttatctcgatgaattcgattcaatctgctgtgcccctgcctatattcaatctcatgccctgttgttcttcccacatcactagcgatggtggggagagggtcgtcagctggatcaaacactgtttgagctcttcgaaggctttttgctgagctggtctccattggaatacttctgctgattttagcacttcgaagaaaggcaagtttcattctgcggattttgaaataaatctgtttaaggaaggcttcctgctaacctttgagctcccttccttgacttcggcggttccatccgaagtatggcctctatcttgtgtggatttgcttcaatcccttttaatgatacaaggcaactaaagaatttgtccttcttcattccgaa

SEQ ID NO: 142958 - DNA, 379 bp, Zea Mays
actggggacaggccacgacaatggctgcgttggcttccgtgggcggagttcatcttcaatacggcgtaccaaacatccctgcacgacacaccattccgtgtcgtctacggtcgcgatccaccgtcaatccgatcgtacgagccaggcgacacgagggttgctgctgtcgcccggagcatagcagagcgcgacgagttcctcgccgacattcgctctcggctagagcaggcgcagcaggttcagaagcgccactacgacgccggacatcgccaggtggtctaccaagtaggcgactgggtcctcctccgcctgcgtcagcgtgcagcctcctcgcttcctcaggcctcgacgggaaagctaaagccccgctattttgggc

SEQ ID NO: 142959 - DNA, 692 bp, Zea Mays
gcttgatctagctaataatttgtaagctacctaattattagttatagggatttcaaatctctactactccttaagaaaggagtgtaggcgtgcacagctaagcggttctgcctgccactcgcacgccgcgacatcatccgctccgctcattcccaccccgcgacattgtgccccttgctcccactctcccctccctcggccctcctcccgtccctcgatagcacgccgccgcccgacgcccccggtctcgcgttgcccgacgccccagatccgccgcatggccccgtcctccccgctgccccctcctccaaccagatccgtcgcatggccccctgtcctacccgcgacgccgccgctgctgtttggggtttttgcggttgactccgaatcccaccgccgctgctcgtgcaggaggcctcgagctcccagtgctcccctcctcaaccaccccgggtaagtggttcccattcctaccattgtcgcggatcccccaccctcctccccctctgctcggtcctcgccccggatctcggtcttctacaggctttccggagcgcagcaaggacgcttgggtaggtcggcttccaagcagccccggagatctcggtcctcgcccacactcttgcctcgaatcccgccgccgctgctcgtgcaggaggcctcgagctcctagtgctcccctcctcaaccac

SEQ ID NO: 142960 - DNA, 378 bp, Zea Mays
tggtaataaaattagatagttaggtgggaaactgttttatctcttctttcctctttatctgagaagttgtgtttgcgtgtgttgggagtcagtgaagatgcttggttgttctgtgttgtaaagaactctatacccttttcttatgctacaagatttgtgagatcagttctaatgtgtgattgcattccacggatgttagacaacaggcgcagaggagagaggtgtgactagcaagagcagtaggcaccgcaggatgggacacctcagcagcagttgccaccaccgccccgatgataatagagcagatgtttctaatgcagactcatgcagtccagaggactggtcagactctagccaccatgcagcaggtgcagcggc

SEQ ID NO: 142961 - DNA, 509 bp, Zea Mays
ctcagacaatgtgggcatgtggcttgttagcacgatcagcggtgactcagagtcttcagaaggtaaagaccaagacatgtcttgagcgcaattgtgaccatgatcacgacaggaatggttaatggccgctgggatgctgcatcattcaaaacttgtcagttatttctcagaccagcttaacttgacgcgcagcaaatctcggtgtttggtgcaggaaccttcatctgagattctcagatcagctttcgttacacgcaaaagaagatcctagctagtgccaacaagaagcggatatatagaaccctgattgctttagaaatgatctgctcaacacacacacatagtatactactataccagtgaccagtggcaataatatatccatgtaggaatccattggcatgttccagccggccactgaattttcttcacaccagtagcagtaggtggcaatccctttcactgccaacggcgacatccaatcagtgtagcccaggatgtggtggttg

SEQ ID NO: 142962 - DNA, 295 bp, Zea Mays
cgtggagatccttgcgagcaccatagaacccgccaacaacccctcatcgatctccgaccattgcaggcggatcttgtgccgaagccgtgggttttcggttgctatcgatcggaatttgcctgcccttttctccgtgctacataatcccagagcttcccccaacagcctctcccatggctgggcgggcgtcgttcatccacggtgggggctccctgccagggctgcacgaccagctctccctgttccccagggcgagctccctccaacggccaagtccctccgtcgcgccccgctc

SEQ ID NO: 142963 - DNA, 360 bp, Zea Mays
cacactacccatgttccttgcctttcaaattttatcgcccaataggaatcatccccatttgccaatgacaccaaccatacctactgacctattgtttaccacccgagcatagttacatgccgcacactagtttctaacatgattctcgcataactcgtaattcaactactcactaacaataattcacgcacgacaactaccacatcgactaagagttctaagtattaaacatattatcacattccacgcgcaaataaacctcaactaaacaccagtgacaccgatggatttttactaaactcatcatgtgcataacctcgtctcgcatacaaccatatggtggcgtgcactcgagacact

SEQ ID NO: 142964 - DNA, 458 bp, Zea Mays
ctggcagccgaagagggggggtgagtcaccgacgcgaactaccatggcgttcaccggggcagtgtctcaggcgatggacagtctacctacgacggtctattatgacgtggtaactcttcttagtatgtggcatggctacgaagggcggcgaactccggcgaggacacctcgatcaatcgcgcggcaagtggcacggtgaacagtccggtgataaggctccaactcttcctagcattgagatctttcaccgtcagccgttatccgcacacgagggcgcacgaattgcgacgaccggcgtacatcatggtgtaagttcaccggtggcaagatacactgaacctaaagatcttttcgctactgtaccatcaggatcttctttagtcgttctgacagagcatcttcaggggtgtttttcttcgatttctatgtgataagctaacaaccagattacaacaaag

SEQ ID NO: 142965 - DNA, 415 bp, Zea Mays
ggggaagtctacccccttatttcaatccttagatttggacaaatcctatcagactgaacttttcccccaactgaattaactcttaaaggtggaatcattggttctatggggatgttatgtgcttctacccaagatgtagaaacaaaagaatgtgtggcaccagtgtcaaataatacttttgctggatgggattcgactggaaacatacctactgccacgtcctgagcatcctggattgcttcagcctccaggtggttcacctttgcatggttgtaagcctgaccatggcctcctggtgcctgctgtgatgctcgttgtcttgctggggtattgactgcttgcgactgctgagttgcctttttcggacagcgcttcgcccaatggttttgttccccacaatagaagcatgcgcggc

SEQ ID NO: 142966 - DNA, 399 bp, Zea Mays
tgaaaatcctttctaaagtgaatttatctgtctctggtccgcgcacactaataaacgaaattccaggggcctcagcgcaagtgttcccaagacacagaaaactcctgccaggactgcgggttgtttatgtgaaagctgaggggctcatgtgacaaatggtttgggcgaaggggtatcggcgtaactgagccacccgatcaaaaatcgagggctcagaatagatcttaggcttcgcgtgaaccggtacgtgcgataatcgcacgatcatgatccagtggtctagattttatcaatctaagtctaatcccacacgttcacagccaatccaagggacgcgaatcatcaagccgaatcactacgtctcttctaatctccatcgtccgccactatatcgacggt

SEQ ID NO: 142967 - DNA, 469 bp, Zea Mays
tagtccgatggggaagggtgactctcccttttaaggtggcttcctcctaccaagttaagtgagatgagataattttaaggctcacacggtcgccgcctgactataactggcctaactggttcaattgcgtctttgccaacaggtaatagtggaggatgtcctcatcattctcaccttcttgaaataggtcctggctctgataccagatggtatgcctagcccaggcggggttggccgaggcccaacaaattagggttgcccggagcctaatagttcattaagcacacccaactttgggaaggcccaattgcctcaaaagactagtctgatgggggatgggtggctctcccttttaagttggcctcctcctcccaagttaagcgaggtgggataattctgaggctcacacagtcgtcgtctgactataactgggccaattgcttctttgccaacgggtagtagtggagaa

SEQ ID NO: 142968 - DNA, 702 bp, Zea Mays
aaatagggtatcttaagtcatgtggttcacatatttgtagatttgcaaatgaaaccataagttttgggcttatttgcaaaaaggccacatttgtgctccaatggctgtctgaaaccagtgaaatagagctaactttagggctctgtagatccaaaaatattgagaatttgccttgggtcaacacatcaagtttgtagagatactaagggagaacaactttgctataggaattaaaccatggtcagacgaagaatttgaagaaaaatgagcccaaagtcgagctgtcagactgccctaggtctgaattcagactaacagtgtgattgggcaatctttggactggaattcaaccatgatctagtgagtgtttggctatagttgctatagcaagattgtagctggatcatcaggcaacaactttgttactggtggattagtaagttgccacatggaaaattgagatccaggccctgcaaattaggctgtcaggcgcactgaatagagaccccattgtacagtgactgaacaagatcctaaattcatcccccttcgccgccggtgatctgccattgcaattcgcgctcgcctgaaagattcgtgccacgagaagtatggataacatcaggtgtggtgagaatatccagcgcggggtgaatctggtcgctagccggaccagtcgccgtgtcttgccgtggttagtca

SEQ ID NO: 142969 - DNA, 537 bp, Zea Mays
caactgttctactatcctctctaatttcggctcttcggccagatttgtactagcctcgactggcacagcatgacctggttctgtggcaggagcaacccctgcacgttcaataagcttcggcacatcagtcgtctcaatacgtcatggtctatgtgtcaataccttcactttcttttccttcggtgcactagaagacgccaaagcaacagttttccttttccccttttgtttctgagcaagaaaacagtagttagggtagataaacccaataacatcaaaaaccctattcaatctctttttccctcgagcaccaaaggccactgtcatagcttcatcttcaaccctcaagtaggctccaagtagctcatcacttgttgcctctatagcatccaaccaatcatcatttggctcgtcaaaccgatctctaaatcgaaatgtgtactttagatagatcaggccactttggctggagccagcggcagcctccttcgtcatttcccatccactcgcaaggggccatactctataagcaatatg

SEQ ID NO: 142970 - DNA, 422 bp, Zea Mays
gttgtgttaggagcaacgggtcctgctggggtgcttgcttgcggaggagcagttggtgcccgttgagtttgttgtccggaactgccactagctcgcgtacttggagtggtagtatagcgaggacgggaattacttccagcctgtccttgcttagcatcccttcttttctccccaaacatactcctcttgttttctacagcaatagctttgtcaagcagcctttggaaggatgggaatgtgtgcgataccagttgatattacaagggtccaatcaaaccgtccagaaagagctcctgcttcttctcatcatcctcaacatccctaggagcatatcgagataactggatgaatttgtccctatattcactcacagacataattccttgcttaagggatagaaactccttccttttaatcttcat

SEQ ID NO: 142971 - DNA, 495 bp, Zea Mays
gctcattccttccttccttgtgctattggcgtgtgatcctagctagcgctctcttgatttcatccttatccacgtgaatcctagagcacactgcatgcagatcggattactggaaagccaaaacagttgctcgcattcactggtgcgcggtgtgggagctgagagctccgttcctatggctgggccccacctctcttgggcccttgtgtagatacgcagaggtagtgtcccctaatttgtttgttagagctacttgaggatatcaatgaggtatggctccgctggttcatcagtattcagtatttacaaggcattatgagttagcatgctccctcccgctaagctacctgaatgtggttatcaggtctcaataagtatccatttttaaaagtataaattgttatagccatacatgcaagtctttattttggaaataaccaaaggttctgaacctgcattgtgctaactcgtcaatcattcctaaaatgcgattcc

SEQ ID NO: 142972 - DNA, 272 bp, Zea Mays
tagacatgtcgcgaaagtatcttcctctcatggtgtcaatatgactttgtctaatggtcaattttccgaagatggtatggcttggccgctagggccgatcctcagaatcttcatctctactttctttccacatcataatcatcactatcatcagaatcttcagacaaatcctccattatctccttggtaatttttctctgtattcgtttttgccatagagtcataaaacccagcaataaaaggatccgcaactttcttctcctcgtacaact

SEQ ID NO: 142973 - DNA, 358 bp, Zea Mays
tgccctggcacctccaccgcgtcaccgtgacccgctgtaatcctctgtccatccccggggagatggccacggtaacccgacactaatcgcgcgccagtaactccttgtccctccggccgccgcgcgtcgtcgctcaaattcccggccaccgctcatgcttactataaattgaagccaccatgagctccgtaggatcatcacgcacccagcaaccgagtattgctctcaatcgatcaccagtgagctccaattttgaacttcccccaattcggtttttgccagcgcagacagcctcaccgcggccagtctactccaggttagttcaagcttctcagttgtttgttctagcatccttagg

SEQ ID NO: 142974 - DNA, 546 bp, Zea Mays
tgttcatcggttttcagtaacatcgccgcggataaggattggctcaccggcgataaggacgtcgccgtggctcgggtaagacgtcggcagccacggtaaaggttaccgacgacgtgtcaaggcctccctgaggtggcaggccccggttgaacggcggccaccgtgccatccccaggttccgccgcgcggcgagctcacctgcgcaatcaaatgtccgcggttctcatccgattccggccggtaggctataaattgaccacggacgctgcttcttcaccatatcccgcaccccagtaactaagcgcccgactcaataccaccggaaaacccacataattcccaaatctccctctcctctgttcttgctccgccgcgaaggacccccccgtggccagcagtcctcgggtgagtacctattcagttgttccatgtttttgcttgctgttagcctcctattgcccccagtatcaaccaatcgaattgcggcagaagcctttcaccagaacgcgtgcttgctctgaagaacaccgtcgtgacccccccctc

SEQ ID NO: 142975 - DNA, 606 bp, Zea Mays
gatatttctgaacagcctatgttactttactataagttcattagctcaagctttaggcacattgagctaaccaaatgtgttggagcacaaactaaactgtgattgtgcaactgttgcatgcggttcagtgttaaaatcatgcacgctgcataactaaccatttctaacccattttacttcaccaaccaattcgactgaacaccccaacatccagatttgaatgctcatttccaattctggagcagccacatgacatttctttgcacagaaattaacatgcaacaatgaatgcataaaaaggggcaaaaatgccacaaacattgtaccacgttcacagcgcacagatcagtcctcccatcattctgatcaaacttcgagtccacgtaaatattctctcccagacacctccacccatggtcaagcatcatggagcgcaactcacaccgaactgcttctgcgaccagtgaacctgagcataccagagcctcctcttcacccacctccacctacaatggcaaacaccatacacattgaccagtaaatagttacatacagagcacataagagtgaccattgtattgcagaaaaacctagaaccgatgtggg

SEQ ID NO: 142976 - DNA, 312 bp, Zea Mays
tctggccaaaagcgggacacatgtagctaaaggggaggtccagatgcgcattggctttgttatgccgacgagtatgttgccctcagtggaggttcctagtcgtcgtttcggccgcttcaacttgcgtcatgtttgctttctctgtttcctctctgtcgttgaaatccttgcagttgtctgtaatctatggtctgccacaacatcatgtaagggtttaccaaacaagatcgttgaggcgtgacttagtcatgaaattcaggtggggattctctcccgccgttgataggctaaaaaaagccagttgacgaggac

SEQ ID NO: 142977 - DNA, 445 bp, Zea Mays
ctataataggtggggtgctattacacccctatgtttgatgagaggacgccaggacgagcatgcatgcattataataataaaatgttactatataaactggcataaaagaagagtcatcctaactccttgaaacttgtctaaaaccatggttaggaaaataaggaaaattgctaggaaagtataaattaagtcgggataggtcaaaaccttaagagtttttctagtattttacacttagcacctttcccttccagtgtcccccctcacttacacttacccttcttgcacatatggcttcacctacacccactgacggaggagacatgttgcttcacctacatatggtttcccctctatcttgtaggaggtgttgagcgcagctgggtacctcgcacctcctcactacatggtgcaactatacgaggagcatcgagtgccacgctgc

SEQ ID NO: 142978 - DNA, 472 bp, Zea Mays
ttcttctactagatcttttgtctcctcataacaaaccactgaatcttcaagtataacatcagttttcagttaacatgttaccattggtgttttatctttcatagaagctaaaaatgaggtaggactcaaattatctggctgcaaatcatatctatagtgtaaatggcctaggactcgaactatcttttagttcttttttgtctcttctgcacgaagatgtagctgaagttttgttttaatctctactacaccatatgttggtaccgtgggcgtccaccacttggcttcaccatgcctccgccctcgccctcccgccaatctcgtagcagcgcccgccccatccccgcagccgtcaccagcgcagtaaaccctaagcccacaggtgtacgccatgcccccgcttcgcgccccctccccacgcacgtcggcccgtgccgctcgtcctcgccctccgtccctttctcgcggttgt

SEQ ID NO: 142979 - DNA, 424 bp, Zea Mays
cagaaattatacaagaggcagaagaagaagtacgcttgatacgggataatttgagaactgcgcagtcaagatagaaaagctatgcggatacccagagaagactgctagagtttaaggagggtgatcacgtgtatctaaaggtgtcacctatccggggtatgagaaggtttaaagttaaatggaagttgtcccctcgctttattggaccctttttgatcctaaagcgagtgggagaagttgtctatcaactggaactatccaaccaccttttggatgtgcatgatatcttccatatatcgcaattgaagaagtgtcttggggtacccgaagagaagctacctatggaggatcttagtgttcaagatgatctgacttatatggagtatcctatcaagatccttgataccttgactcgtgtcacgag

SEQ ID NO: 142980 - DNA, 571 bp, Zea Mays
agcgaatggataaatgtttgaacttgtgatgtcgtgtttgcgttggttaagtataggtagtgattgtcgtctttccaatgatgattgaattcgtgtgctcggtgacatcttgatagatagcgcttacgtgtagttgtcggcaatgtctcgtcattcagtagttgcttacggtattttagtaattagagtttagtttgctaccatgtggctttgaagtgtcttatgttgctttctgtcatgctcatacatatctatcatgctaccatctcatttaatgatcgtgcaaaatgaaggacgtggagtggagctgagcactagaagaagtcggtggacatccgaagggcaggtaaaacaagcgccatgataggagatgttcaccaagcgagtaccctctagcaaacattgacatagtgtggattccaagcaagccccagttctgtgcataacctattatatgttgttttattgcaatattatttgtaggcttcttttgtgcatttaagtgtagttgtttgaaacctagatgcatgaactcaggttcatttatgagatgaatactagtatgttaggt

SEQ ID NO: 142981 - DNA, 318 bp, Zea Mays
catataaggtggttctctcctacttaaatgggcaatatgggactaaagtctcacaccatctctacacaccaccttggcttccttattgaattgggccacacactagtgagcctaattccaacaatccccaccaaagccaaggtctccaattgactcaatctctacgctttcatataccagctttacagtgcagatctgatacgggttgagctaaaccttgcagtacaggattcacctcctcacgactttgcaatggacaaagccttgaattgctagtcttgtgtaaattggtttcacctataggcatcactgatacta

SEQ ID NO: 142982 - DNA, 424 bp, Zea Mays
ccgtgagggcccccgacgccacgcggtcagcgaagtcagccgcctaaaagacacacataagacaacaatcccaacgaagccggtaaaaaccgaagtctagctcaacttacctgacttagccgctgcgacgcctccttcagccggcgggacacagcgcccgcctcgtccttgacggcagcgagcgccaaaatctcactgccagcgctgagagcgccacccttcgccacaggcactgtggcagacaccgttgtcgccaccgcaggcggaacaacaaccagttgccctttgcccgatcctgtgacgcatcaacagtcaaaaaaaaaaactggccaacgccttaccagtgagataatcatccacactaatatcagtgccgaaatcagcaatgcgctttcccggcggaggcaattctcgggccttcgcg

SEQ ID NO: 142983 - DNA, 714 bp, Zea Mays
gcccactggacgccagcctacgccatttatgcaaaggataaccacgtatcccggcttacacgcgacatgcaaatacgcaaccataaatatgtgtacaaatgtgcataactcatgcataaatggaatctttgcatgccaggaatcgcgcgcacgaatatttgcatgtgcttgacgtttacgactgcataacgttgtgatacatgatagcgtaaaccatgcaaacgtttaaaatctaccaccggatttgagataaggcaatacgtgatctgcgtgcgcgtaaataaaggcgcagttacggcaggaaactaatacaactttacagccgcgtccacgttcgctcgtccatctgaaatattggcggcggttagcggcggcggaagtgagaggtccggccgacgatgggcggcgagaagatgtccaccaccggcgctggcgatgacatcctgcctgtaacatctgtgcataagccagcaggtacgtctatttcaatggacatgcatcatgtagcgtctgcaatcgccccatacacagagggtgtctctgttactcctccggcggcattgagggcacctggacatatcgaagagcacacaaaaacagcagacgtggtcggcgcagagaagcacatccccatgagagcacatcctcatgagacatattgggccgcatgaacaggacacacctcatattcttcaaagccacgtaagttctccc

SEQ ID NO: 142984 - DNA, 430 bp, Zea Mays
tacaggttcatcacccaactaccccatgcttgaacaggaaaatatatcggcattgaataggctgatgaaaggtaccatgtcatcgttggatgaacatgcgacacttgttgcgtcgccctttggtccgctttattcaaccgtattgcctttgcgagtgatcggagttgcttcgttggccgaccgctagggacaaccttttcaaaagtagggatggctttaaacagctgaccagatgttttgaatgaactttgctttgacgtaccaaattttggtttccaatacttgaaggctcttagatgttgtggcctctggtcgctaccagactgtctggccagatgagacagactgtctgtgtgggtttcagaccatccactctcatgtgcttgaccgtccgtgaagcgtgagacagggagctttaatcagttggctg

SEQ ID NO: 142985 - DNA, 370 bp, Zea Mays
gggatactatggttcgaagaccgactagtggttcctaagaatggggacctcaagaagaaaattttggatgaggctcacatcttcaaattctcgatgcacccaggaagcaccaagatgtaccatgatctgaaacccctatattggtggacaaggatgaaaagagagatagccaagtatgtgtcgaaatgtgacacatgtcagaggataaaggcaagccacttaaagtcagcgggtgccttgcaacccctgttgataccttcatggaaatgggatgacatcagcatggattttattgtgggtctgcccaacacctctcgacatcatgattcaatctgggtcattgtggactggttaacaaaagtggctcatt

SEQ ID NO: 142986 - DNA, 751 bp, Zea Mays
gggttcgagtgctcgttcttgttccacactattttttgcgggcgctgggcgtggggagggtgaagtcatggtagcaccaggtgcccacattaggttctcaccttagtatctcaccttcactcggccagacatcacatatgcagtgcaatagatctgtcttcacatgcacgacccgcgagagccctacctcgctgcactgaagcacatccttcgttacgtttgtggcactcttcatctcggcctgctgctccatccttctgcccagactgagctagtggtttactccgatgctgattgggctggctgtctagatacccgtgggtctactttaggctttgtcgtgttcctaggcgatagtttcgtttcctggtcctcgaagcgtcagcaaacaatatcccgctctagcgctgagactgagtaccgagctgttgctaacgccgtcgccgaggctacctggctttgacagctattacaggaacttcatgcccctctgcgccgcgcctccttggtttactgtgacaacatcagtactgtctacatgtcctctaaccctgttcagcaccagcgcaccaaacatttggagattgatcttcactatgttcgtgagcgcgtgtctctcggtgatatccgtgttcttcatgttccaacatcttcacagtatgctgacattttcaccaaggggctaccttcttcggtcttcacggagctttggtccagtgagtctgaacatccattcctacgatgctccgac

SEQ ID NO: 142987 - DNA, 756 bp, Zea Mays
gaagatgaggctgcaacagcaagtaaggctcggacagtagtcagatgggccacaggtgcaaaagtctcatcataatcaataccctgtgtctgttgaaaacctctggcgacaagacgagctttatatcgctcaatagacccatcagatttggttttaaccttgaagacccatttgcacgtgataggtaccgcaccagcaggtaacggaacaacatcccatgtacacgtgcgatgaagggcatttaattcatcagtcatagcaagctgccactcaggtataccagaagcctctttataagatgatggttcagcaatgactgccccaacacgggaaaacccataacggtctggagctgcaatagtgccacgatcacgaagatgatatccctgattaaaaacaacatgagagtcatcattgttagtacaagtatcaacaacaggatcatcatcaggactggtcgtgggagtagagcgaggacgacgaatgtaagtctgagtgacaggtggtttggaagagtaagactgagagggtgtggaagtggaaggtggtgtgatgggaataaggacatctggggtagaaacagtaggtggtgatactgatgaagtttcagaaatgggaggaaggctcatgaaggaggtagactctgtggaataaaacgaagaatgagtggaagaattgtaaaagaagggacgattttcgttgaaactcacatctcgagaaatgcgcatgcgacgagaagatgaatcataacatcga

SEQ ID NO: 142988 - DNA, 515 bp, Zea Mays
ggccaccgcccaccgtcctataccctccactccatccaaggaggagaaaacgaacccagcctcacccaggctcgttcagacgccgaccaacgcgatcgcttcctccgacgcctcccgcgctctccacgaacaactggtatgagcttcgttcgcctcggccgctcgactcgccgtcgtccagccgcggttctctttctcctcaaaggcaatgtatctcctccggtccccacccctgtgattcaatcgtttcgtattaggtatcgctgcagtgccaaacggtgatcggccggggccgcctggttcaaacttcaaagcaaacttcgattcgcatctcgccggttgagtttcataggcgcgttgcctgatgtatcctagttggaatggacgctggctgctgggtgtgtgaggcccttagcaggtaacttggagggatgggcgtgggccggccaatctgctagttgtagatggcgcgttatctgaagacgcagaatggccacgtccatgtggtatggtct

SEQ ID NO: 142989 - DNA, 478 bp, Zea Mays
cttgcacggtattctcgttgttttctattcctctcctcccgatgacgctcatgttcatcggacggacctggttgtgggaacatatatttgcaaaaaaggttcgacatcagtaataataaataataaatgaaaacattatgctacttggtttgattatgcatgaacctgtgataatttggttagatatattagtaagcgcagtctgtcgtcttgttcccattgtgtactccataggatcactgggaccagtcgagtccatgtattgcaatccggatgcctgagaaattgttgaacatggtgtctgcaacaagaatctcgtagtatacggtgtctcagcccgtgccacatgtgtgttgtcccctccaggagcttgcattacgatcgaagatccaaaacaataaagttgggactgtccgggcgagcaaaaaaaacgatagaatatattattcataggggatacctgtctcagccttcttcc

SEQ ID NO: 142990 - DNA, 583 bp, Zea Mays
gacgtccatgtccttcggcttaattgtggagcaaacaaaaaatgtttgtatattcccaagcaaacgtcaaatattaagcctctgggtgttgagaggatccaattgaattttctccatctgaaggcggcctcatattccattgcccttggtagcggcgttgctgcattgaaactttgggactggccatgaggcagacagttctaccccatattaatagaacaagctcggtttagtgtatttatattttatcaaagtctttgtttttcgtttatttatgtcagttttacaatcacacttgtctttataattgcttctatttgattttattgtgaggtgtttgtattaacttcgagacaacacaatgcttactgacggaagggctctttagttctttcagctttttgtggagcgaacattacatgtttgtatgttccaaagcaaacgtcagaaatcaagttttatctgtagaggtttgctggcgaggattttcatccttgaagccatcctccatttgaaatggtctcatattccattgccttgggtagtggcattgctgcattgaaactttgggactggccatgag

SEQ ID NO: 142991 - DNA, 517 bp, Zea Mays
atcacaaatatgaccatcacaattcttttgcgaaggggggagggcagcgtttttgctcatcgtcgccaaagaactgcgatggcaacactcactattacattggatcctccttcaggataagaccaacctctcggaaattaaacaacatcaacctcaactcttcttcaaaaaggtcccgcaggtatcctttcctgatgcacgacccagacgtcgccgccagcaacttgcgacgggtaccctggtccagtcgcggtccgcttcgaagacgggacctcttcatgcccattcggcaatgtcttcttacacatcgcaaagactcactgacgctctgtttcgacacacccatctttttcctcctttgcgattctcccgggcttgcaccgatcgaagccaccagcgcctcgcgaggggtggaccacaatagagactctgctgcagctagatccaacgccgcaaaatagtctaattcatcctcagaggattcatccacccacgagaaaggcctccctaattctcc

SEQ ID NO: 142992 - DNA, 668 bp, Zea Mays
gtcggtcaccatgcctcctccgtgtttgcgcgcggggaagcttgcgtgtgggccagctcggcagtcaccgcggggccaactatctccggtttccccaggcgcatgggaccagcgaaccagaatcgtccccgacaaaatcgcgccgcacggcggagctccatgcaatctggcacagctaatcactcgagaagctctcccccatccttgaccttgccctcttgagtccgcactcgccgcactattagagacccgtattcctcttctttcgaagtaacccgagagcctggcatgacccaaggaaaaacacggtgaggaagagggaaggccaggagcgccgtcgtagccactgcgtgtgattgtcgccgttcgaccattgggggtatgcagggatcgcctgtgcatgcagattcgggataggaacctgccgtgatgaatcgtgggcgggccgccgtcaaattcctcaccgaagctcagaacaggggcgacatacccccttctcgtgggcggagctcggtgcaccatcaacgtcggtaagaactcccccgatgaactcgcgctaccttcttctgcattttaaagtcattagacaagcctgggatggccggggcgccaaatcaaccgtcgccagcgagtcgccgtcgcgaccgtgttgcacgggaacgctcgac

SEQ ID NO: 142993 - DNA, 347 bp, Zea Mays
cggttaggatgatacacacgctattagagtagacaacccaggtgctatcaagtatcagtcagtaactcctaaaggttcgatttgagatgctctacacgcaaacaagaagagcttatcggccggcttatcgcggcgcctctctgcacaacttggcaacagatgaagacccggccagagcagcgttcgcgtgcgtctccggacacggtcacacctaacaccttgcgcccatgcaccccctctcacttactctgacgacaaagaaaacattacaaaatttcctttacgaccagttccagtcgctcggttcgcactgtgatccgctgctgagtactaccgccatatactcg

SEQ ID NO: 142994 - DNA, 603 bp, Zea Mays
gcaaaagtcgcctaagggtgcagccggactagcacaacaagtgcgcaaaaccgaggtcttcctcaaaagactatccgtgcaaaagtcgcctaaggatgcagccggactagcacaacaagtgcgcaaaatcgaagtcttcctcaaaagactatccgtgcaaagaccgactacaggtgcagccggaccgacataataaacgcgctagatcaagtgcacaagtcccctatgggcacggccggatcagcgaaggcacacaacctcatcatacaaattatagttacatacatacagtgagggcatcacaccttacattggttcaaccttcgggatgatacccatctccctatagttaaacagcattatcctcagctcctcaccctcaaaaagacttcgcaactccccctcacccacactcgccccaaccggcgaggacaacaattcccgcttgccagccctgtccacacgaagacgaccaccctccacctcactcactctacgcttcgccaccgcccttcgctgcctacgcccagcactcggaccaggaagaacttcagcatccatcacacgcggagaagcctccgccgcagccacatccaatgccgc

SEQ ID NO: 142995 - DNA, 465 bp, Zea Mays
ggatagtgcagactctaatgctaggcactttcgtgataacattaggtttttcaatggccatttctctttcacttccctatattgttgcctcgatagtatgacaactaatgtaagggattctggtatatacacgttccgagcacagggcatgatgtaccacaatatcaagtcatttggtagggaaggtggggcagagcataaacaccttgagctttacttttatgatgatgatcccaatctctagcatcggtaccgtaagtgccgtgaagagcatcaatagaaagacaaggaggttatcaaacaaatagtcatcatactacgtggaaacccatactccaagcaccttaggaccatgggccacgttgagaaccttgatggctatcgtaccgcattgaacctagaccaaacattgaactagaagacgtataacacacccctcactttggaggtggccgctgtctggat

SEQ ID NO: 142996 - DNA, 487 bp, Zea Mays
gggattttgcatcaggtatggtcggcttatatacccaaatgttcgattaatttagcatctgagctgactgtgctagagagtgacaggcaagggccagtaattttgtttctttccatttcttttactccaagatttttacttggcaaacgatggcgatctttcggctcggtgcaagcactgccttgcagtaggcgtcaagaaagttggaacgggcgtatctccgaacaccttgggctctctagcctgagatggatcgtggacggagacagcatggtgtgacctgcggctcgcaatctcgacggctccgccggctgcgtagtatcatttctaaacgagcgggagaccagccgagtacaagtaaatcccctggataatcttcagcggttacacggtaagtaattagcgttgcagcacgctttcgcttatttttcctacgaaattaattacaatttggattagcatgatcaaaggagtactatccagccag

SEQ ID NO: 142997 - DNA, 476 bp, Zea Mays
cataaacctagctcccctgggccgccacttccaccggagagggaagagggacccgagggaatcctagcttaccatcggtcgtgctctcagtgttgtacccaggggctcctctcggttgggtggaagacagtcgcgtccgtattgcttgggattagccactagcgccgccggaattcgtcgccgtctctgcgaattcgccgtgcgccgtggtcgacttcatttagtgcccatctccagtgagtataccctgcgccatgttcactcgttccctacgattgcgtagcatccagtagagtcgagtttagagcgctgggtctctgggtctgggtgtccggcgatggcgtccgccgcgggagggcgcacgtcgccgcatttctacgccagagattgagggaggattctgcgtcgttgatggaataaccgacatccacgattagagtgcgaggggtaagcgcctcagccattagatgacatct

SEQ ID NO: 142998 - DNA, 662 bp, Zea Mays
taggaggacagctttgcttaaggatgtgagcttagttgttaagagtaaattggagataattcagctcaaaatctggctgtcaggctagttccactctgaaagttagatgttcagtgtaacagagccatctttgggtgtgaattcaaccatgatctagtgatcaaatgagctcagtcactatagtcgaaatataggtggtatatagctctccaactttgctgcagagtttgggttgtgttaccataggaatctgggagaaaatcaagctccaacttggtctgtcagacaagctttttactgaatctggcgcactgttcatcgtcttcagaaatatcgcgccgtggataagggtcagcccctcgccggcgataagaacaccaacgcagcgtggatggtcgtcggtggccgcggtaaatatcctcggcatcgtggcagaaggtcactgaggtggcaggctccggttaaacggcgacccccgtgccatcaccggaatccgccgcgcggaaagcttgccagcacatctgaaatccgcacttcttctccaactccggtcgacggcctataaattgagctcggactccgcttcttctccacattacgcacctcagtgcttaagcaattgactcaattccgctagagaacttgcgcagccccaaattccc

SEQ ID NO: 142999 - DNA, 340 bp, Zea Mays
ctgaggaacagggttggttggatccacggcctagtgaacgaggatgtcagtgtgggcttgctgcatcgggtgttggaggtatggccccctttggtgttcgatgaaatgcctcacaacagcagcgagactgtggttgtcctgttccctgaagattcagattccttggtgttcagtgaagtgggcctaaaagtggtatgggatgaggagatgcattctgaaactcacatgcatgaaggtttattgaagcggcttgctcgaggtggagaagatttagaagaatcggctagcaaggatgatcatgttgaagttaaagctagtaggcctgacccaccaagtgagg

SEQ ID NO: 143000 - DNA, 272 bp, Zea Mays
attgaagattgacatttgaaatctcaagaacatgttcggggactcgaagaaacctcttcaactgatacacgtggaatatgttgggcactgttgaaagattctctggcagctgcgccttataagacagaggtccaccaaaatctctattccaaatcttggttcatcttactacttctagggtaattggagttccggactgcaactcgatcgcaaattccacgaccctttccggaggtaaaccaagcagattcttggggaacacctctagaaac

SEQ ID NO: 143001 - DNA, 442 bp, Zea Mays
ctgcatcttagtggagggagctagaccagcattgttccaagtggagctggagaagatcgcctcaacaccctagctggtgtagtggcaggtcttaacaccgacctggatagtgctaccctggacctctctagggtacacttagagctggaagatgcacatgcaaggatcgcagccctggaagctcagcttgatggaaggaatccccctgaagttcaagtccccactatggcgttatcccctccccgcaagaggattcgcaacggagaaccaggatccatcaccaggctgctttagattttaaatttatattgcaataagttagtgttcgcgttagacgaagaacatctttatattattatactattaataataacaaccatgtgatggtgttgtttgaaatgtttgatttggatttttgcttgagtgtgatggtcttatggaa

SEQ ID NO: 143002 - DNA, 412 bp, Zea Mays
tccgggtgcaaacgcagatgcatggggacgtgacgcggctctgctgcgaacatggtgatgcggcgagctccagcgcgggcacatagcaactgcgcaggacgcggacgctactcctgcgagactgcgaggcgggggagaacaaggctatggcctagatggggtatcccgggcgatcagttttgccgaagaaaccgtgccatgagcgatctggcctggaggaggcggttgtctgcgttgcagccaagaacgaaagggagaagaggaaccgtcaagactcaagatgaatagccaacagggatggtccacctgccatagagtgagagagaggccacgcacggatgtggagcatggcttctcgaccaaagaccatggcgctcgttcaacttgtttagttgttttctttcttttcttt

SEQ ID NO: 143003 - DNA, 577 bp, Zea Mays
ttccaaaccatgaaacttatacaattccttattgcaaagttcaatcatcagtgaagcaaatccatatacatcatgcaaatgccaagtgaaacccagtacacttttgatgcagaggagcctcatgccctcatgtaacattattggtcctacacattttgtacacaaactattttgctcatacagctggttatatatcataaatattcatgcaaccggagtgctctgcattgtgtgcaattggtgaaacacaatggtattttccaccttgtactgcatcttcttagggcagttgaagtctgtaacatatcaaagcatagatttttttagtatgcttcttcatgcttggagtaactcatttttttatactgggaagaatagttaccccagttcaggagccataaattcttggcaccgatttccctcctttggttgcgagtgcctctgttcaagattaacaggggcatctgcttgttgtgttgcaatacaaaagctgtagggagtgctagagcttgcaccagcagcacctcttggttcactggcctggagctaaaattaattcatttagcttcctgttgac

SEQ ID NO: 143004 - DNA, 484 bp, Zea Mays
cttctgtctcagtacattcattgcgtatactatatggatatgacttgttcagaaaatctattgaaaattcctggttacccccaatgggtgtgactaaggggcgtcttggtacgcagatcatttagcgcactgtcctagagtagtaacttgatgtgaccgcggggtgtaatcatatcgcccaagcagttgaccttagtccaaatggtgtcgtgttacgccaagcggtgtctgttgcctgactcattttcaggcggcttgaattgcttattgaatacttgcgactgttcggcgagcgtggtaggaagtggaaggtcagttccgacctctataaatagcctgcttgcatcgttgttctcttcactcatccttcgatcatctgctactttcttctccttttatcctcttctccatctgaccatgggcaaaggcaaaaaaggtcgaggctcgccccgccataccggcgacaagcggaagcgggatccaa

SEQ ID NO: 143005 - DNA, 360 bp, Zea Mays
ggctgaccccaatgggtgtaccgtccacattgttgatgaagatgaggaagaggaggatgaaatccctctagttcggaagaacagccaacgctacatagccagcggggaaagtagtggtgttccttctccagctttgtctgccctcattggtctgcaataattgtctctggcaaactttgatcagactcttgaagacatggtcccagaagatctgttgtcagaaccttgagatggtggaatgatggatatttgtgctgatgtgcctgatgccgggctgtagttgtctcgagtagcgtcccgtgccttgtcgaccttagagcgcggtcttaagggtcaggaggctggtctggattgttctgc

SEQ ID NO: 143006 - DNA, 383 bp, Zea Mays
gttcaatcatctgtcctagtatgctatcgatcaagtaaatactgatctgaagaaaaagaattgcttcatgaggggacttaatgacaggctttagaggaaaatggcaacctgtctggaccttacttacagcagagctgtcagcacgacattggtcgtagaagccaagaacacagaccatggaaaatcaaagggatttggaggtgataggtctaatcagggacctgagaagcgaactaggttggtgatccggccttttaatcagaatcgttcttcgcctcgtccaccctcctatcccttcaagcagcctgttttcattcgtcctaccattgcccctgcttcagtcgagtgccactggtactcatttccccgctcttcctagttct

SEQ ID NO: 143007 - DNA, 778 bp, Zea Mays
cttttatagcccccaggagggatccctggagtgcctaagcttatcgtattgaggaggggagatgagtctaagcccctgtagctagcatgaccgatggagtggcctttgtacttgtagttgacttggatcaggaggaggatgttcgtcccctggatcttgcatcttgactgagcagagagccgaggccacgatcgaggcatggacgcatacccgagcctgtctgatggaggtgttgtctgagtcatagttgttgaaacagtgataagtatggtgaaaagcacatggtaattctccctgtatggcgtaaagcagacttgacgtcagtcatgtagccatcccattgtcagcagccttcatggaggagttggtggcgtcctttcgtcgatgttatctaggccgaggccaggctcgggcgagacagaggttcctcccgaggccttagcagagcctgcctcgggtcgtgcagacgtgcagggaggggttaatatagttgtcggagtggcctcctgcgggattcgtggggagtggttgccagggcagctgggcgaagccgagctcgggcgaggcggagttctctcccgagggtgagttcgtgcttagacgcgtgcacgtcccatccggagtttttgaatacagtagtcggtgtgggggagcaatagtcgttattcccgggcatgtgtcatcgtaattggtgaaagtggatgggaccgtggtcccattgctccctgtttgaccgtggtgtcacgtggggtagttaattcgaatcattgcattaaat

SEQ ID NO: 143008 - DNA, 453 bp, Zea Mays
aaaatcgtgccgcatgcaacagcttttgtcctagcatgcagcgcatgcggtgggggcctagttggtcttttttcccaaacgcacggcaaggagaaaacgtggggcagtggaaatcgcatgcaaggtgggccccaagggctgttttcttttccctggttgcacgaacgaacaactgcatcggtgcttttcttcttccttgagaaaaagcacagaacgacatgggggagaaatagaggggatcggccatgggggagaaggagaggcagctagccacgcccaggctgcaggggattttgttgaggcatgggaggtgagcggctcatgcagggagaacggaggacacctaggagctgctgctggccgcggctcctcacgtaaacacgatatcttctcgaccgtagcttcgagttcgacatttctttttcctgtcgtgaccgtagaagcgagctttat

SEQ ID NO: 143009 - DNA, 674 bp, Zea Mays
cgaaaacactgcgtgcagcccaaaacagcaaccaataaaattcagctcctattcacttcaaaaattgcagcgtcctagagacttagaaccattctaacattttaccatctattagagttaaaataatcaaattaggaccaataagtagacttactaattttattcaagttattttgtgcgctagaattaccatacacaatttacaacacacctaccacaataatcttacctggtacatagatgtttatcgatgtgcccttcacacactaatttgtattttaacttagacatcacatgaacactactacctttcatccgtgactataaccatgcacatttagactacaacaagccaatcatcgtgatcacgagcttatccaaagccgtctaacaattcggctaactagagcaacgacatagcctgctaaataacatacacgtcggcttgcctattattattgcaatctgagacacaacatacactacaacatttttataaacacatattcacaagtatcttcgcgcaccgactaactcatacaaatcataaaccactaatctccaaatcgcaatcaccatgcatttacttcccaaatcacgaacgcatacatgtttatcatatgagccgagtacttctataattatcctaaaacaactaactccattacacactt

SEQ ID NO: 143010 - DNA, 474 bp, Zea Mays
cggaaattaaaacaaatgtatatcttgttgccaaacatgcagctaagggtcttacttaaaaaaaaggaatagtgaagaatatcaagacaaaaagtaagaatgcaggtagtaaagaaaataaaggatacaacacaactgcaggcacagagtaaattaagttagataggaaattttatagaaggatcgctctgaaacacggaaaaaaagttttgtgaaaacaacctgtcgatcagtctccaatccctctcttgcagccttagctgcaaaaatagtaacattaatccactataaaaatatcctggagaaataaaactttctgattttcaatggaatatccaaaaacctatttcctggtttgagccaaattcagcaaaacggttaagtacagtgtcccagacaagcatttctccgtccaatatacatctgcattatcagtaccaattagcatcagaactagagtgagcttcaaggaag

SEQ ID NO: 143011 - DNA, 425 bp, Zea Mays
ggaacggaaaaaaccgtattgccttcgaatttaaaattcacgaggggttcgggcgaagttttgggtggatttcgcccgggcctttatatacctggaagaggggccagcagtggttctttaccctgccatttgcgcttgccttctgcttttgttctcgcaacctgagggagtagacagagaagagaaaaccgcgcacctcgtcccctccgcttccaccgcttccgctcggcgatggctgacaaggcgaccgtcattccgccgcgcgacccgtggcccttctccaccgtcactgtggaggatctgcaggccctcgttgccgagggtttgctccgtcctctctccggcgggccgcagcctgagtggttggcccccgggagcgaggccgacccgactccgccgccggggtacgtggtcagcttcacccc

SEQ ID NO: 143012 - DNA, 273 bp, Zea Mays
cggaagagaaggttcaacgaataatacataatttgaaacaagcccaagcccgccaaaagagttatgcagacaaacgacacaaacccttgtactttcaatttgaagattatgtctacctgaaagtcttaccaatgaagggtgtatcacgtttcggggtaaaagagaagcttgcaccccagtacattggtccttttcctattcatgaacaatgtggaccagtggcatatcgaatccaattacccgaaacattgcctgctgtgcacaacgtgttcc

SEQ ID NO: 143013 - DNA, 462 bp, Zea Mays
cttccattcaggcactgggaggggttgcagtaggcctgcaggtttctggtgttcggccttcgttcgctggcaggtgtcacactaggccacatactgtgctatctcctttttcatccctctccaccagtatctggctttgaggtctaggtacatcttggtggttcctgggtggatggagtaggctgagttatgggcttcattgagcaggacttcccgtgcctctccttttggtacacacagacggttcttgaaccaaagaactccttgttcatctgccctaaggtccggaagttgctccttgcgagctctttccataagtcttgttgtctccgcgtccaggcgttgagccttgaatatgaggtcttctagcattggcttgacttccaggctaccgttgtctcccagacatgcatttagctgagctaatttcttcttccaatcatctaaaaagttggtcccctg

SEQ ID NO: 143014 - DNA, 1477 bp, Zea Mays
cgtcacactcaacgacgaatggctggacaaagtcggacagcgcaagcaccggtgctgtggtgatggcggttttgagcaccgtgaaagccgccttagccgtgggtgactaggcaaacccctccttgcgaagatgagcggtgaggggcgtgacgatggccccgaatgtcttgatgaacttgcggtagtagccggcgaggcctaggaacacgtgcaccgctcatggggagcgagggatcagccattctgtgacgacttgaacttttgttgtatccatggtgacgcctgcagcggagatgacatgcccgaggtagtagatggaggtggctccgaactcgcacttggagcacttgacgaagaggtggtggaggaggaggacgtggcgtgcacgtgtcgcagttgatcgttccatgtcttatttatcctctaatacttatctccctaacaaacttctgctgcttatcctcttatctaagcaaatctcctactttctagtcacacctaactgcctgctactcctgcgccgacgtgatctgttgctagccgcgtggcctacgctgatagtggtggccccacatgacacaatccgttgacagtattttacccacctgcgtacgttgtgcaaatgtacagcattgaagctaacagctactgcccttctaaaaaaaataaaagtagctagttactgaaccttggtctctctcttatctctttcaccggatgaaagaatatcagaaacaaacacatcttctccttccttatttttcctcctcaacttttgtagaagatggtccttgctgccatggcccatgcagtgaagctgctcaaggtaagaagtcgaagtagacccatcagagctcctcctccactaggaagcagaagctcatctctacacgcagcaacttttcattacaccgccacacaggagcgacaatgtagaaacgcagaagttccagctgcaacgcgtctggctgtcatacgtcactgatctcaaagcatgcgtcctccaacaactggtatcgagatccatagaatgttcgattttgtccagaatgggaagaatcagctgaaactgtgactggtacagacagcacctattatgttccagtctgggcagcggtacaaggcattccatagactgttccaacaggtaccgaaatggaatttacacttacacctatgtcctcaagtgtattagaatcttaagtctgctctttagatggaatcaatatgaccaactcaatattagatttaattaaatcaaaattactgtcagtttttttatgtgctgataaaatcacaatatcaaatgtgtttagcatataaaatatttaaaaatatatacctcactttcagttaatggtctatctgatgataggacaaagagcaccaaatcagctcgtggcacgtattcttcagtgagtcgttgctgcctctgaagaataacatttgttccaggtgtatcaactagattcatctg

SEQ ID NO: 143015 - DNA, 498 bp, Zea Mays
cattgaaatagagaggaaaatatagagactaactggtcacctgggccaaatcctacaaaccctagcccatttagccaccgctgccgtaaacttgacctgcgccatgtcactgacgggaggggtcggtcaccagaactcccatcgctcagcctctaatctcatcaccgctcacgtctgttacctgcatgtggggccccttgagccagcttcgtttccatggcgctgtgactggtgcgtggggccatgcggtcagtcctgtgccaacagaagcacctgcagtcctcggatcggtcagcgccgagcggcttcatccagccgaatcaggggaggctagagatcctgtagccgcgtcaaccacgtccgccatcgccgaattccgcgtccgcctatctacctctgcacccaccagccggatatgtcgggctcgcgcggtaactctctgggatccaggatatatgggcagataaaagccagacccattggtgaatctccaccgag

SEQ ID NO: 143016 - DNA, 639 bp, Zea Mays
agaagagcttcggaaaaaaggttattaatttccaaaaaacttcaagaaatttattatcaaatggctagagtatgctccactgccagggttgagcgtgatggaggtgagaccgaagccactaaaactgttccgatttctgaagcaatgaggtgttctgggctggtttcatcagaggacacacctgctgccgaagcaacacaagctgatgttgaagaagttggttccaaagatgagtacagctgcggggtgccaagtaaacctagtcatctggactttggaaagtctaccatctctgaagctgatcttcctaaaatggtgaagctgggttattttagtgaggacaagaaggaattaattcgttttggtggagaagaaactatcccaaagccaggaaaggatgaggtagtagtcttcaaaagttttcttaaagctggtttaagattcccactaaacaagatgattgttgttgtactgaagaagtttgggatttaccttcatcagctgacccctaatgctatcgttaggttaagtgttatatttgggcccttcgtagccagggagtggaaccgttcggtgagggtttctgccgagttcatgaattacactaccagactaaagccagaggagatggtctgcaca

SEQ ID NO: 143017 - DNA, 431 bp, Zea Mays
catctaagtatgccatgaatagaggggattataggaaacctgttatcacaaaaggccattagctagctcgcaaacgtcttcatccactagttgtactctaataccctctcgtgcgaatacaatgccctcaatataatagaaacactatttttagctccaaaggtgatatgttgttttgaattatttatatttcaaccttttagcaactgtatggtggaaaaaggtgtcttacaatcttaacctatgtttggagatatctcttacgtaatttggttaaatttcctatggtctttattatattttgacaaacaatgtggcataatgatgtgtggtgttttacttgagtggacataaacaccatatatgtatgccttgaatagaggggattataggaaacctggtatcacaaaaggtcattagctagcccaaca

SEQ ID NO: 143018 - DNA, 363 bp, Zea Mays
gaaacaaggtttagtacatgattatatttgtttaaacactaatgcacgataaatttgctgagcaataaagggtttttgtttttgtctttgtgtttaatgttagacccgctaaagaagcagaaagagaagcaagtgagaaatagagttgggaacggatgcaagcgcaccgtactcaaagtatactaccagctaagccttcccactatcatgttatctcaagtttagcatcaacctatatatacaggaagcatgcatatagaattttatacccccaaaaatacccccaatacacacaatggaatgaactcatgtcatattttaattacaaaatttaccatatatcttactaaactcactgatggg

SEQ ID NO: 143019 - DNA, 518 bp, Zea Mays
gtgatagtgttctcagcctctcatgaagacatggatgtgcgagaccacgagctatgtgcctcttctgcatgtattgcctaggcggctaggcccatctcagtgtgcctccacggctctcttgttatggtcgctagaggaatgcctgctatcatgagcaggagccttcatattcaaccaggcctgataagggcaaggtagtagttatcgagtagcagcgcaagaagcttaagaggctcgatcacggttagtaggaggcaatcattgtcgcaaccaacacaaagcaagctaagagatggattggttcatatgcccctcccacataggcaccaccgacagagactacaccgcttaaacggatgatacaccattgtgtcctcatatacccttcagagagatagcctttagcacatcctagagtcacatcataaccatagccatagttcagtgagaggatgattttgaggtggagtaggtctaggatgaccccgactatcagatatttgtagagccacaaccag

SEQ ID NO: 143020 - DNA, 407 bp, Zea Mays
cttccatccatggctccacgcaagcagctctcccccttcctccgcgcagcgccccaatccccttcctccatgcaggcagtgtgctccctacacgcagccacgcgccgtttccgcaaaccgcatgttgtccccttcctccgtgcagcgtcgcattccacattctgccccaaaaatctctacccgctcttcggcgatggaagggaatcaattcagtgatggaaggaggcacagattgcggattacacgacctcgttcaatccgtcgatggagggaacgtcctcggcgcccccaaccaaactgcgactattaaagaaacacgaagggagcacccaatttgtgcggagacccatcccgtgcgccataatcctcgcatcttcaccaggtacccgattcattttagtgcccca

SEQ ID NO: 143021 - DNA, 484 bp, Zea Mays
aaatggagccctagaggggattatggcaaaaagtctatgtaaatcacattgtcatgacttggactaattataaaagttgtaatacacttaataccctacaaaacatagtaatagtatgaccccaaaaagaattcagaagaaccccaaaaaggtcaccaaagagaagagcataaaagaaaaatcaggatttgctcaagttcaaaaccgaccatctttcaaagatcaaacatgttcactttaatcccaacctcaaaaccttatggcccaattgacaaaatggcgcccaaagacccctagaacaccctggaaaagtttgaacccaaccctaagccatttggcacgacttggcatggcttttgtctcagtgtggacagctctgacagagccgacttatcacccctatatctctctaccctgaccatatctttgcttggaactcacataaaaaaggtaggattaggtgcagggaagagaccgtacatgg

SEQ ID NO: 143022 - DNA, 413 bp, Zea Mays
catactatcactccactgctcccgatgtcgaggactcgaggtccaggtccatgtcgtcgtcaaggacgtcgtcgatgcacagaaactgggtcgtccagcgggcgccatcggccggcactgttgtctccgccatgctctccgactcctcgtagttcactgtgccgtcgcccatgaggtcagctgggaggttcctgacgaaccaaggatgactctttatctcaggcatcgtcgtgattctctgcaaagagcatgcgttatggcacatcgatctgaaagttctgaacaatcaaagtgactgacgctgcaaaggggaataagctagtatggcatcattcacatctgctgggttggccaaaaaaaaaaccttcgcattctggagatacgcgggcgtagtcaggaaccgcgtaccgaac

SEQ ID NO: 143023 - DNA, 298 bp, Zea Mays
caatgaaaggtcaataaagccgtaaaggaatgttggtgttcgcttgttgtcatggcagtagcgtgttagattgtgtgtgatgttgggacttgggagggtgggccatgtttggtctaggaaatgggtgggttacagagttatcagatcctaatacctgaatcaattttcttgtttagtttgtaaaatgcatgaattgttcaaccagcatgccaatctacatgactatgatgccagtagaagatgaggaatagtgtgtgctattaaatggatcatatctaccagcagtggaccaaccgct

SEQ ID NO: 143024 - DNA, 620 bp, Zea Mays
gtgattcgtgcctggcacgccgtggatattcgcagggaggtaactttggacgtgtcgcgacctcgcggacctagcccgagtctagtaggagataattcaccggtggccaccgtagctcggtcatttccgccaccgtgtcatccatgcctcgctcctccctcactgtatcccttctttacgtggtaaccatgcacgaatggtgtactccgcggccgtggatcgttagccggaccaccgcgcctttaaatagccccgccacccatggcgaggtattcacatctccaccagtgagctcagttgaagcccaaattcgtggaatcctctccacctctcccaaaattggtagtgcacggtgaaaccatagtcctttacggctgtgtagccccaacctcacctcctaattctgcccggaaccgttgcggcgccattttcccccttttctatcaccggcaagcgaaaatcctccgcgccccgtggccagctacttccaggtctgctcctgctcgttttaatcgtgtttcagcacctatatacactcgtgatactcatcggctctgcccttcttgcttgtccacgctcaatcacccagaacacatgaacttgtgttcgatattccccgc

SEQ ID NO: 143025 - DNA, 736 bp, Zea Mays
cagtgtttcagcaggagcggcatcagaagaaacctcagccaacatatccagcatggcacttatctgtgcgtcacttggattcaaaggcacctcaaaatgaacctgcctctcgtcgtcaggaatttcttcgagtgaggcaaccaaagcactaacttcttcgggagagggtcgcactctaaggcccaaaccgctatcaccggcaggaggattcgacacaaaactggtaaaggccttggaaggaggcagattccaggctgagtacgcaacaggagcgccgatgtttgacaccttgcctctgagtatcatttcgagccggctcaccaaatccatagcaggaattcttctgttggttacccgggttgaatcagccaggcctcggtatagataggtcggatatgctctgtctttcagtggataaatgttcttgaaaacaaagtcagcaaccacagcttctgcagtcagacccctttctttcaacaatccaacttcagctagcagagcccctgcctcagccacctcctggtctgtgggggattcggtccagctcggagtgcgaacatccgactgtctccctgaccgtggggggagggaattcccatgattctccatgatgaaccattccaggcgccatcccttgatgctgtccttgagtgggatgtcgaggtagtcagtcttcctcccacggcgcatctccaagctcgcgccccccaccagctggtgctgccctccggccatc

SEQ ID NO: 143026 - DNA, 711 bp, Zea Mays
taaaaaggaataaagttaaaaggtttaaggaaaaccagtttgcaccgaggctcctcaggtttctcctaactatttctttcaacggtgcccctacggaactattcccctgagtcactgatctcacaaaacccccctggcttttctttctttcaacccgggctccttcccccttgcaacagtaaccgcggagaggaaaaagggtggcgtggcttaccgacggcgagggaggtccggtgaagggctgggtgaggtccgggaggtcctggcggtcacgtcgaggtgcgggtcgtcaacggtgatggtcgtaatagggctgactgcttgcgcaggaggtcgggctcgtcggcggcgtgtgctccagcatgctcacggcggtagggctcaatcaaatggcacagggagcttcacgggatgccaagggtgctgtaggtacaaggaatcgatgaatggcttaccgtggagctcggtctacgtgcgacggcggccaattgaagtctggcgacgtcaatctggcgtctccgtgaggtactgttctatcctcggctcggggagcttcactgaggtccgtagaagctaacccaatggttggacggggcggaggatggctggtttggccggcctacggtggccgtggcttgcgcggccgctggcatggggttctctgggcaaacgccgacaaacttgtgctcgggctgggtcaggaacgcgcgg

SEQ ID NO: 143027 - DNA, 332 bp, Zea Mays
gtcgagtctccggctgagtaggtcagtggaccgagatcttcctggtggaaaccggttcaaccagttttttacctcttttctcccacggctgccagcttttgggggatcctttatatacccccccacactctctcttatttacttctgcctctcccacgaaatcttggctgaccaaaatctcaacaagtgcattcatttcacctctcacacccgcaatcgcatctccttcaatcgcttgaaggatccttggtgtgaggtgaactcgatctaacacgctgttaatttcatctcgattctcctattctctttgttcttgagctcgttgcaaactt

SEQ ID NO: 143028 - DNA, 445 bp, Zea Mays
aagtgagccggtaggatcctggtcgtgtgaactctgcgacgatgaatggtccttcacacggtggtgataatttgtgtcgtccctcccccgtcagcactcagcggaggaccaagtctcccacagcgaaggatcaatgccgcatcgctttgtcatggtagcgcctcagggtctactggtatctggccgactgaattaccacatttagctgttcttcctccagtacatcgatgtcctcgagcctggttgcttctgcttcggctatgctttcaaatgttaatctgggtgctccaaagatcagatctactagtaccagtgcctccgatccatacaccatgaagaatggggtgtttctgtgcaaagctctgaaccatttccctgcgagcttctcgcttttatcaaacacctttttcctgagtgcatcgagtatcatcctgttggctctttc

SEQ ID NO: 143029 - DNA, 1581 bp, Zea Mays
acttaatgttgcctaaatgcttgaataactttgcctggactctggaatgacttaatgttacctaaaataacttaatgttgtctagacgctaaaataacttaatactgtatggaatcactgaaccatgaacaaggaatgtctcagaaaaacatgaagaatgacagaaaaaacaacaataacttaatgttgctagatgctggaatgccttaatgttgcctggaatgactaaaccaaaacaagaaatgtttgagaaaaacatgaagaatgactaaaaccaagaacgactcgatgtttccagaaatgacttaatgtttacaggaatgacttaatgtttacaggaatgacttaatgttgcttgaatgcttgaatgatttttcctcgactctagaatgacttaatattatttggaatgacttaatgttgtctagacacttcaatgacttaatattgtctgaaataactgaaccaagaacaaggaatgtctgagaaaaacatgaagaatgactgaaaaacaagaatgacttaatggtgtatggacgctgcaatgtctaaatcagaagggaaaatgacttaacagactcacgggcccagggagctaggaaaaaaatctttacatctcgaatgcaaacacactcctttacagcccatcacatccacaacctggaggttcacataaaaagaagaaaaacaaactataagggggttaagttgcaaattttgatctatttttctaggcctctaactggtggatgtgaggggctacaaaggagtgtgtttgcatctgggatgtagagaattttttcctagagccgacgcatggcatggagtaagccacatggggggaagagccgacgcatgccacgcgcgaagggagccacgcggaggaagggtcgcgcgtggtgcggagagagccgcgcacggggatgctggtcctggtgggtcgcgcgaaggttgatccaggcgatgaacagttgtatccatcgccctaggtgaaaaatagagatatatacactttttgtctaattcatcaatctttccatctagctagtcaacaacgtggtcaagcgatgaggctaggagggaggagcttaagggatgagtaggatggtgggaagggcagagcttttgggcattaacgactaagcagtccagagagggacccgcttcatgagaaagtagaagaatgggcgatcaagcaactagggagggcagagttgcatgggacatggccatgagtctgacaagtgatggcagtggttcgggatgatgcgcaagtcagtgagggtacggtggagctctggtggatgaatttgaggacgacaacgaacctagggtttcaactataggattcatggaacaactatgagttttatgttgatatttagaggattcatgggacttgaaaatttaattggattgatgttgaactatgtgaatgtgaatgtggctggtgaatgtgatgtatatatgaatgtggctgatatgtattgaatttgtggttaaatctaatatatattaaatttgtaatgtattgaattatgggaattaacaaaaaatagggaggatttttacctccttgct

SEQ ID NO: 143030 - DNA, 431 bp, Zea Mays
cttgttaggtgtgtgtaccgcttgtcctggcttgcagattgagctagcagagagagaaacgctaggataaccttgcttgagaaagctagtgcggtgagtgcccctgcacctacgtagtgtgcactttgtgagggtttagggtttagtgcatgtctttcgttgtgcctactatcccaacacctctgacaccgctcccaacaagctctcccctcgctccacccattgtctttttcttggttactcctctgaccacaaggggtaccgctgccttgatctcctcacccactgcatcctcatctctcgtcatgtcgtttttgatgaagatgactttcccccatgtcgtttttaatgaagatgactttccccttgttggatctgccccacctactgatctcgactccctccttgaccccgatcctgttcttcctcca

SEQ ID NO: 143031 - DNA, 577 bp, Zea Mays
attgatgacgttagctagcttggtaattaatccatgatttcgagtatgtaccagctgaatacgtgtgtcattcggccttcacagtatttcctttatattaaagccggttcaaaacggtaacaatgaagctatccacgttatcaagaaatcatgcaccgtttgatcagtggatgcgtgccatcctaatcctccaatctgcatgctccacacaaataaataaatttcctttatattaaagccgattcaacaatgaagctatccatatcatcaagaaatcatgcactgtttgatcagtggatgcgtgccaacctaatcctccaatctgcatgttccacacaaataaataaatttcctttatattaaagccggttcaaaacggtaacaatgaagctatccacgtcatcaagaaatcatgcaccgttcgatcattggatgtgtgccatgctaatcctccaatctgcatgctccacacaaataaataaatttcatttatattaaagtcggttcaacaatgaagctatccacatcatcaagaaatcatgcaccgttcgatcagtggatgtgtgccatcctaatc

SEQ ID NO: 143032 - DNA, 673 bp, Zea Mays
agagcatcgtagacggtgagactagagatggagttcacaagctaaagtccttcagagtcataattggttatgtgtctcgtatgttgtggccggagaaaaggctgactatcctcacgcaaggcagtagccctttgtccgatgtcaagatatccaagcgtgagggtggaggagtcgtggtcgagcatgccatgttggagatagccatggtcaatatagcagtcgagatattcgcacatgaagccacgtgcacaaagaagcaccattgtgattatgaagacatgttgaggcagttgtcatggaaggggcgatgctaaggtcaacataatcagggttgtcgatggcatagacagaaggcgacgatgcaattgagatagatggggtggggatgccaaagtttgcttgaaccaagatgtggactaagtttgctagacccaacaacatgtcaaggatgaaacgacatgttagtgttgctaatactaggtgtacaagatagagggacccaaccatcatgtgagatactagcaaagaacgaagttcttaatgatggttatggtacataaacgatagagtagaatgtgtcgacacggcccatggttattggagtagacgaagaaggtggagaagaaacaacagcgtttaagatgtggttgtgctggatgatgaagaagctatg

SEQ ID NO: 143033 - DNA, 387 bp, Zea Mays
gccgaatggatatggaggttggatggtggtatactagcactatgccttggctgtttggggcaactatgaggccaggatcaacaatgtggctcgagggtcatgtcatccttccctagccacaaccagggcaccatggaccatagtatctaccaatactaccctctgtgcaatttggacggagtcataccaccatcaactccagcatggtagaggacaacatcgacatggagacactgctgaagtacatggtggccctcaacactgagcatgcatgacacatccttggtggagctggataacccaaggagactgaatgcccagctacaagctcacctagataacccaggacatccttagtcggttaaggtggcataggaacgactggtt

SEQ ID NO: 143034 - DNA, 651 bp, Zea Mays
atgagtggaagatgaggattacaggggcggggctaatttctcctgcgggggcctagggcggccggtccgcggcacggtggcgggcttccgcgacggcgaagccgccggtgagttttccgaccgaggtagagtgggggaggtggcgtgtcgtgaacgtggaagtgtggcgggaactcttggcactatttaattgaacagaaggtcgccagggagggagaggggagcttaccggagcggtggaggaagcacggcggcgctgctagctcaattgagctcgggaagggggggaggaggaggccggggctggtgtggagtgctcgggctcggctgtcccttttataggcgcccgggagggggagagggatggaggggacgacgagctccaacgagcttccatgatggcgggcatggagcaaacggcgacgagacggctcgggcaggctgaggatgaggggacggctcgggcacagtggcggggttgtcgcggaggggctggcgagcattaatggcgaggcgacgaggcgaggggtgctcggcggcgatcgcgccggtgagggatgggcgagggagaaggtgctgactggtggggtcgggctgtcagcgggagaggtccgcgcgagagagagaggggcggggcgatgacgggcgggg

SEQ ID NO: 143035 - DNA, 746 bp, Zea Mays
atggttgacaagcggaaaagtagtcaactctcaactctgaaacttgtaataactgaaaaaaagagagaaaactctggtggaacgcatgctatttccttgtatcttatacctagtaatcctttagatgctcctccgttgtgttaaagtctcatcgtatgagtgttgtttctgcatgtaaatcgagagcttagacctttgactccaactgtaaatacacgagtccatacagaaagcaaagggtgccgacaacaacacggcgtcgcttcgtcacatgacagcaggatctgattcctctggctaagagcaggcactctgtattggagggatcgggctcctaaatcctgatctttaggtccagaatagcatcttcagacagagaacccacggtctcattcagtccctcacacacacactctctcttcttaccttatctgcagtggcagaatctgcaacatttgctatctgtcattcctttgaacagttacaccataccttgtgagtaaatcattagccaagacaaccgtttgataattctgcctagtttttctatattttgttctctgaagcattttctgaccaatcactggccgcaacatgttatcagatacgcaggcatttgccctggcatagcattgcgtatcagcaaggtgcatgctgtgtaagtgatggtgtggaacagtcgccgttgatatgctgccgcgatggttcttctcattgtatgatgcaaaccccccaggacaagtaga

SEQ ID NO: 143036 - DNA, 733 bp, Zea Mays
tgctctattcatgcattctccagttaatacatagtttatggccatttcatcatgggatgcttcttgcatttcttcttgcgtttccctgctgcttcttattgcgggagcgagttcctttagtttttcattgcctttgtgtgcgcacatgtttgggttggcggtttcttcaacgggaaggttcaagtccggaatgcttttcttcatgtgttccttcccggtgccaggtctcgtctggctccccttcttgttttggggcatttttgtgattggttgtggtaagtcctctcaccctcttttcccgggacatatccaagtacttggggtttgagaagccagagttcctgtccttttgttatgaggcttcttaacaggatcgggtataccttcaattttctttggtatttcaaccctctctggtgcattccgtgcgggaacatgcgacttaaccacgctcttcaaatcacaaaaatggtcaggcagttcatttgctaagtcttgcaaatcgattatcttttgaacttctagatttgcttctttggtgcgagggtcatgagcggggattcccatggattgccatataatttctcggcatttctcatccaaaggttcttttgctccccctaatgacgggaaattatcctcgtcaaaaaaacagtcagcgaatcgggtcgtatgcaattctccggtcatcgggtcaaggtatctaattatggatgcactctcatatccaaca

SEQ ID NO: 143037 - DNA, 1908 bp, Zea Mays
ttgtttttttgttattttctgtgattcaagataaggccttattgtcgacacagttagtaagattaagatccattgttacttgctaatttacatctgcttaaacatatcatgcataagagcaagtttcggtgctaatgcagctaaaatgaacatatcataagagcaaatttcgatgctaatgcagcttaaataaacacaccataagagcaagtttaagtttgcttctatctaagccaacgggatggagatacacaattttatttagctgttccatgaacattgtgacatctggccatcatgagcaggtgaatttgcagtggcaaacgcccatgggcttttggaaacttcacatgttgaataaagtcaaaaggacagccattggtaactatggaagcatgtgaaacctgttaatactacagcctaacaaacagtagcacagttctgtacagaacagtttgtgtttattttcttgccatttaattccaatgtatttaggcaatgccaagtacagtcatgcatgcaggttactgcaaaggggtatgaaacattgtcatactgatgaccacagtaaacgtatcccctgttttactcagaggggttgtgattttatacggaaactctgacaattcgatcaggccaataggagtatgctcgcatgtttatgcaaaatgattgtaaggagagcctagcaatgagcagcatgcatataattaatatttggcagtgacaagctaccgagataaattgttataaatgatcttgaaattatgttatcacggttttgtgcagcaatatattatatgactactaatcccgaaacgacaagttcattcaacatcgcattagtttgtgagtaaaactataaactcttataatctttggtcaatgcctcaattcagctatatgcacatctgtaatggatttttttttttttttgctaaatgcaggcacagagtagcatgcatgcatgtattcagtcatttactttgctatacgagttcaacaatttgttatggtcttaagcaaacaagattaattgtcttaatagaatgcatctagatgacaactccaatgttagctattataagttattgctatagcaatgagctaggattccttgtgttgtttgttgcaatctagtttttgaatgtatgtgtttaacatgtgtgccttttcttctcttttttgtttatttctcgatctttaaatggaaattttctaaccttttgtgttatgagaacaatatgtttttcttcattgggaaattaaagaacgatagggttttctcgaatcttttatatttttaatatcctgtgattcctaagggggtgaaaacagaaataactgtgggggcaaacttgtcctaataacgggattggtctatcttgctatcaagccttaatatgataagtgctttaggttatctgtttataggatcaatgatgaaataagtgctgccctcatgtgccaactatgaaacccttcatgcatcccatggcacatcaatatctccggtgagctggatgatccagtaagtaatgagtgaccctttgtcggcaaggttgcagtgttacagtgtatggtagtacaaatgagacacagactccacactaagcttgattatcgttgtcctcgcaataaatgagtgtatgtaatgcctgcttaagcaccattggactggtgaagaacagaatgatggatgctcttgtatgggaaaggaggactggcccacgcataggcgatggtgccactatatatgagtagggcatggggttcaggaattttctcggtctgcatgagtggtcttctacctcaaccagaatgcttggggtgggggggggggggggtgtatctccccagatcgaaattctggcctggctgtgttagagatgtacacatggttatggc

SEQ ID NO: 143038 - DNA, 446 bp, Zea Mays
ctattaccgctcctagtccaaacctcaaagcagctcagaatcgacagatagtatatctaatggtaataaatgtgaagtttggaatcaaagcatgactgatgtgagagtataatacattgattaatgtatcaaacaccagcagaattatgataatattgcaacagggtaatcatcacaaacattttacaattcaagtaccgtgccagagttaacattggccgaccaaacaggaaaacattcacatcagaaacctgctgcttgtatcaaggtatttttcctcttctgttcatcatctcaactgtagttgccctaagagcagcacaaactggactggtaaatgttcaatcagtaatagcaagttcaacatttccacctgcaaggctttcttacataaaagggtctgagaacaaatcgcatatgataatcaacttcaatcagcccaaaga

SEQ ID NO: 143039 - DNA, 1338 bp, Zea Mays
gtaatgtgtcttttgagctcctcctcatctactatacttgtaccggaatcatcttctagactatatatcttatgtttccgatgtttgtcattcgccactaactggaagtatttcgtattatcatcaccttcaagcaggtgcttaaccttggctctttggaataaacgaatttcctcctctcttagaatgcaagccagtcgttcatgaatataagctttcaaagctagtttattaggcgataggcgaataacctccgcctttttatccagatcttcaattaaattagtaagtttaattttctccttcttcattgttccagctgtgttttttgcccaccctctgaggtgctggcgtacagcccgtattttgttctgccatttttccatggcagtgcatcctgtcgtttcctgatcccagatagaggaaaccatatcatgaaaatcatctctaattaaccagccttgctcaaatttaaacaaggtgtggttacccgtcgaagcagctactttgccatttagtaaaagtggcatgtgatccgaccgggttcgatcaagggcctctacagtaacatttggaaatttaatatcccattctggactcatcaacaccctatccaacttctcaaacgttggtgggtctaagtcatttgaccaggtgtactgtcgacccgccatttctatttcccttagctctagactctctatgaccgcattgaataaattaggccatcggtaattaaagttgttattatttttgtcttctggtcgtctcataatgttgaaatcacctcctatgataaaagggtgaggctccgtaccacacgctcttgccatttcagttaggaacatgctcttaagatcatcctatgctgggtcgtatgccgcaaaaagggcccaaatgaagccatcagttttatttctaaggcggaatatacagtaaaagtctccctcgtctatagctccaatatcaaatacgctaggatttacacctaagagcatacctcctgatctcccccttggtggcatagagtgccataagaaatcaactccaccactcaagtgtctcaaagttgaatccgagaagccacttctacccgtttccataatagcaatgaagttgagacgttgttctatagaaaaattgacaaaaaattgtgtttagccaagtctcccagacctctgctgttccaaaaaatccctttcataataaattggtattcgaaggggtgatcggttttttaggacggcgagtaaccttcccaatagatctggccctgttcacttttttcctacgcggcacatcatttaaatcataacataagtttatgccattactaac

SEQ ID NO: 143040 - DNA, 383 bp, Zea Mays
cggaagttttaagtccttcggcaagagttgaggtgtcaatgccgaaggcacaaaaggatcttacaacaactcccaagaggaagagaatggtcaacgttttagatgtgctagaaacaataaaatcttcaaattctactccgaagagagctgccgaagcttcaaaaacacaaattgaggagaccgaaactgagccttcagagcccgccaagaaggaatccttggaaattagaaaagaaacggaaaaagaatatgtagaagaaattttatctgagaaaactgccatccctattcccgaagcatcttccgaagcccttaactatgttttacgtcatgcttcgggtaaaaaattgactgaaaaagaaaagcgagaagctcagttctat

SEQ ID NO: 143041 - DNA, 471 bp, Zea Mays
cacgcatactttttagtttctcaacgggcagccacacacgtgcgtactgctttcttgaccattccatatggcgcgtcaggtgcggtccaggcgtgacgtaaacgcccccatgggccgggaaatttaatggtcgtacgtgcggatcggatggatgcattgtgtgcagtaactgcgactgcgagagtaaggtagatgaggcagaaaagttgtataaagctttctcgactcaatcttttattattaactatatagacgcctataggaaaaaaagatgaggctcgagaaagaaagctccttcgtttcatcgtacaactcgtcatgactcacgcaacatgaacatgtataaggaaggaggtactcccattagtcccatatatactagcatgatcgtgcgggtggtttgttacaaatttagtcattatcaattttaatttaattcaaaaaaatagtgtgatatatgtgatgacatgt

SEQ ID NO: 143042 - DNA, 571 bp, Zea Mays
ctggtttgcacaaaggaactaacggaggtcccaaatgagcccattgttcactaacaaatgaggaagagcttcccgagtccactaatatgatcacttttttagcaaataaagtagctgccaatttgatcgtttgaggggcctctgtaccttgcattgcatccaccgatacaaccatgagatcccctggtagctctccaataggatcaaagtgattggtcaccatttctgatacgtccagcatctgccataattcctcgactaaatgcagaggtactgttgtgctacaagtatgtgccggaccccatttcgagccacatttataacacaatcctttagccttcctgtaagccatcaatgcagaaaccttcctcccatcattgttgtgcctggaaaactctgtccctggtgatctatgaggtctttccccgccttgagtcgccacagcagaaataggcttaaatcctgaatttctgttgaacatagctgaatcttcagagccagttgatacttgttggcaacgtggagagagtacttcctcctgtaacagagcaagagagacagcagtatccaa

SEQ ID NO: 143043 - DNA, 539 bp, Zea Mays
cttcaactgggcgacgcttggattacgacaccacgatctctcttctttagttgctccattctcagaggaggagatcaaaagagccattgatctgttgcccattgacaaggcgctgggacctgatggtttcaccgggttattttttaagacgtgctagagcataataaaaggggatgtcataagggtggccaacgctttccatgctctacgttgtggcagcttatcactcatcaacatcgctaacgtaatcctaatcccaaaaaacaaaggagccgaggaagtgggtgattttagaccgataagcttaatccattccttcataaagcttatttccaaaatactggcattacgacttcatccccatatgaacgggatcgtcttcacttgtcaaagcgccttcatcaagaacaggagcatacatgataaattcttggtagtgcgtactgcggcacgccgttttcatacaaacaagaccccaacacttttgttcaaattggacatagcaaaagcctttgattcgatacgttgggagtatatcc

SEQ ID NO: 143044 - DNA, 360 bp, Zea Mays
tggagttattgctcccaagttgtaagcgatcaagagcctccgacttagtgtggagtgccttgtcaaatattgatctcacccatttgagaaagggaagacccaaaattgatcttggtgatcgcttgagtgaggaaagggttgatcttatggaaggatgggaataggaccaagcgagtgacccaagtgtgaaggtgatcgtagcgctcattgaggccgcaaaggaggttgaggatgagcgtgtgattagttacgtgctccatgaggtcatagagggaggccaccatgtgtggctgtcatgcccttcatctggcggcagtactccatgatggagaggtctccctagatgaagcttcaaaaggc

SEQ ID NO: 143045 - DNA, 692 bp, Zea Mays
ttcacgccaccgccgtaggattcgagtcgccgatgacccgatatggccgccaggtaaaagccaccccctggggataactccggtgactcaccgtggctgccccttctgctttgcggctggagcaaattagctcgccggtgaccgccgcctcccggccgtgcgccgcgtggctcaacctttccaccacgtcaccctaactccccactgctgtctaatcaacgctggtgaggttgccacggcatgggacaccaattcacgcgcgccagtattcttctccacctccgaccgccgcacgtctcgtccaaattcgcggccaccgcctgttctccctataaattgagcccgtgactagctccgcaaggtcatcagctacccagccaccaagaattgctagcaattgatcaccagtgtgcccgaattccttgttttccccaaaactgtttccgccaccgtcgaaccaagctcgccacggccagccctttccaggtcagttcatccctcactctccttcgtttgagcactcttgtcgctctgggatgcttactgtgtcaccaattcgcactgggagtccaccaatcgtcgggaacacgatcaagtgtccgtagtctccgcggttctcgtggacagaagagagtagatcaccatttgcacaattaagttaggggaaaggcttaggatgggtccaatttggt

SEQ ID NO: 143046 - DNA, 361 bp, Zea Mays
ggaaaagctcatggttgtttcatgcttggttgcacatgaaagagataagatttatcttatatgattgttcggcgagacacagaaagaaagatagatctacacggttcgcgcgtgacacacgacacatgaaactcgtgttttaaaggagtagagatatgtgtgacccttaccacggtggtttatggtgaagtgaaatatatttttgtgccccttgagttttctaagttttcgctatggatttttcttcttggtctcctctccttgatattttctacgatctttttaatatgagtacttggggacttttgggttagatagaaacgtgcaaggacctcccaggatgattcccaccaagtggttt

SEQ ID NO: 143047 - DNA, 462 bp, Zea Mays
tggaggagtgcccgggggcactgtccctgcgggtgctgctctaggtggcgaggctgaggtgcctcttcctgtcagtggtctttctctgatgcagtggatgggcatgaagctagatgcttttgatggcagtggtactccggtcgaggcgacagattggctaacttatgtggaggataagatgaatgtctttgagattgtgtatggtgatcgtgttcgctttggcacacagctactgaagggagaggctcaaatttggtggagaggcgtgcaggcagcgcactcctcctcaccaggagtcctgacttgggatgtcttcatcaggcagtttgaaagaaggttctacccggtcaccttcctggagaaaatgaagattgatttgcagtctttcaagcaagagaagaagtctgtcacagagtatgaagtgggcttcaacaagatggtccgctttgtccctcatgtggc

SEQ ID NO: 143048 - DNA, 830 bp, Zea Mays
cacgcttactcgacttagggtgaccactataccctactaacggagcaatcggcttaagtcggcaatgacttaagacggtgcaacatgctcacgcttactcgacttagggtgaccactataccctactaacggagcaatcggcttaagtcggcaatgacttaagatggtgcaacatgctcacgcttacttgacttagggtgaccactataccctactaacggagcaatcggcataagtcggcaatgacttaagacggtgcaacatgctcacgcttacttgacttagggtgaccactataccctactaacggagcaatcgacttaagtccacaatgacttaagacggtgcaacatgctcacgcttgctcgacttagagtgaccactataccctactaacggagcaatcggcttaagtcagcaacaacttaagacggtgcaacatgctcacgcttgctcgacttagggtgaccactataccctactaacggagccatcggcttaagtcagcaacgacttaagacggtgcaacatgctcacgcctgctcgacttagggtgaccattataccctactaacaaagcaatcggcttaagtcggcaatgacttaagacggtgcaatatgctcacaactactcgtcttagggcgacctctatgtcttaccaaccgatcaattggcataaatcaggaaaagactccaaaaccaaggacacattatagtaccctatccacttacttctgcaattgttcaggacgactgttcaattctaacaacagaaacaaaatgttatagtttttagcaccaaggacacattatagtaccctatccaccg

SEQ ID NO: 143049 - DNA, 353 bp, Zea Mays
ctaaagtgtggcaagtccagatatgtagaggttaaaaatgatgatggtgaaaaggtcacatcaatgatagcccaaaagcaacttcgttacatgcctcttgcacctcgtgttaaatgtttgtttcttttgaggaacacggctaggcacaagagatgccacaaagaacatgaaagagaggatactcatgtgatgacacactcatatgacagtgatgtgtggaaggatctagatggcatcgatccagaatttgctagtgaagcgaggaatattagaattgggttggcaacatagagtttcacacctttcaatacgaaagcgacatcatatccttgttggcctgtgcttgcaattcc

SEQ ID NO: 143050 - DNA, 371 bp, Zea Mays
attgtggtggaccataagtgtaggcttttatgaaccttttgatgagaacacaaaagatctcacccaagccaaaaagaaatgcttacatcttgaacaccgagctactaacattttatatcaatggataagtgataaggtgtttaaggaaattatgtatatggagaccgctcatgatatttggacatatcttgatgacatatatgggaggatctctagcgaggatgttgagcacatccacaacacggtggttgggaaagattgctccacctcatggtcaagtgatgatgatgaaagacacaccacaagttcacttgataatgatgattgtgttggctctaactcaagtgatgcaaatgatgtttctatctcaa

SEQ ID NO: 143051 - DNA, 354 bp, Zea Mays
gcacatcctcttcgtgccatccttctccacaaataacaccggggctgcccaaggtgaggtacttggcctgatgtaacctttctctaacaactcatcaatttgcttcttgagttccaccaactctggtccggacactcgataagctctcttggaaataggggcggtgcctgggatacggtctatggaaaattcaactttcctttcaggtggcatgcctggtaacacttcagggaatacatcggggaattctgacacaaccctaattgcctcaatcggattggactccttgtcatctactgataaatggtgacatgctccttcctctagtttaggtaagtacaacttggttactac

SEQ ID NO: 143052 - DNA, 478 bp, Zea Mays
aaactgaaacacagggggcttggcataagaattcctaagacacagagcgccacagtcgaggacggcggcttgattcagtagtaacttaggggctcttttgtaaaacacgctggccgaaggcttatggggaaacctgaatcatccgatccctaatcgacgctccggattagattcgctcagatccgaactggtacggactgccattcttcagatctcgatctaacggccacgagttcaatactacgcgatcccatcacatacgcccatccacaatcagacggctaggaattaactaagtgaatcgctaccctacttctaatctcgcctgtacgtaacgagatcaacggtcgatgcctatcgttcccccccctcaaacccaatcagccgcccacccggccgacggagcgactccagccacggaggagacatcgttggagttcatcatcttcgcgcacaaatgtccagatcttgattccct

SEQ ID NO: 143053 - DNA, 387 bp, Zea Mays
gccatgtctccctttggcctcaaatgcctcaagtaacccagtgatgagtgcatggtcaccagctgcctccttcatcccagggccccctccttatgatcaagtccctgctatccaacccatgttcctaaggcaagacctacagcaaaggacagaagggagggatctaaaacccgtactgtcaacagtttggtccccgagatgaagcacatatattgaggaccccaaggggctgggtaagtgagcccaaagttaccaagaagccatcgttgtatatttacatttaatttcacaagcttttttagcatgtcatgcaaattaatataatgatgatccggtaccttcaagtgcaatagcgaaaatcttgcagtttcacttcacctaagtaat

SEQ ID NO: 143054 - DNA, 360 bp, Zea Mays
gtcggtcgatggggagggggccgtgccgcgcatcgtcgtagaccgcaccgcgtccatcggcattgttggtgagaactcttcgccccagttcgtttttgcctgcgcatagagtagagtttggccgatgggagcttcgggcgcgggcagatgggatttgggtgcgcggcaatggccgccgccgtagttcggcgatcggaggaaaagtgaggcaatcctggccgtcgatccattgttgggcgctcgtgatcagtttttagtttggtcgggcgtggtgtggcgttgatcggggatccaacggttagatatggatcgggcagaagttaaatcacggccggtcgatctcgatcagacggctcgggg

SEQ ID NO: 143055 - DNA, 990 bp, Zea Mays
cttgtgggaacttaactaactctgcctgctcaaggctcaatgcttgtaggttttgaagctttgcaatagattttgggagctctttcactttggtgtcatcgaggcacaaaagcctaaggttgaatagctccccaattgaatttggaatagtctcaataggcaagcctgataagtctaatactgcaaggtactttggtttggaggaaatagaagaataccacaaagataatgtcatgctggtgtcgaacgttatgaaggtgcgaagcctggatggatcaatggttgatagaatgtccttgctgcattggagcacagccactcgtcgggaatatgattccactagcattccttcattatttccatcataagttgtactaaaaccctctcgtttagattggaaaatggctagttcacgcacaagatcatgcattcggatacatctaaccctaccaaagctgttcctctctgcaacgtgaagcatgctccgtcgtatgagttctctaagataactttcagcagtgtcttctaagctgcatgcccctttttgttcaataaatccttcagctatccacaatctaatcaatctctttctgtgtattagatagtcttctggaaacatggcacaatacaggaaacagttcttcaaatagtctggtaggtatttatagcttagatttataattttctccacgcgattaaggttctcattgttgtgtagctcccagataagctgatcataaaatagcttccactcagcaacattctttggtctcaacgacaatatgcttcctattgccacaagggctaatggcagaccatcacatttctccacaatgctttcaccacactgacgtaactctgaagggcaaatatggttttcaactttaggaaatgccttcctacaaaatacaagccaggaatcatggtcaccaagaggttctactttgatcttacaactatcctcagctagtgaagctacctcctcagttc

SEQ ID NO: 143056 - DNA, 305 bp, Zea Mays
gacaaggcgagtgtgctggtgagggaggagaacgacaacaaatcacgatggcgagggtaacaatgcgggtgtgatggtgagggaggagaacgacaacacgcttcatacgtggcttctcccgatggcgtcacattgagatcgtggagggtcgtccgtccaacggaggcgacgacgtaggtgcgatgatgatggctagggctgttaaaaggttatcatctttagcgaccaaacaagaggagagatatcgcgacacgcaccggaagggaaggctcgagagatcgggagtaatgacatagaggtgggag

SEQ ID NO: 143057 - DNA, 1007 bp, Zea Mays
tctgaacatggcaatgatgtctagattcaggtcagctattaatgatctggcattaaaggaaatccaattgcatgcaggaaatatacttggtcaaatcagcatgctaatcctgtgttggtcaagctggacagagttttttgctcttctgattgggaggctattttcccaaatgtgttgcttcaaagttctgcttctcaggcttctgaccactgccccctactcttggggctccatgataattcatttgggaaaaacggttccactttgaagcattttggccaaaaattgatgggtttcttgatactgtacagtctgcctgggactctgtgggtagttcgccttgcccctttgtgaccttggatagaaagctcaaagagacctcaagaaggctgcacagctggagtgataagaaagtgggtcatgttgcctctcagttggcacttgcaaaggagctcctccataaatttgaaactgcccaagatcacataatgctttcaccggctgagaattggctcaaaaataagctcaagatgcaatccttgctgctggcctcctttaaaagaactatggacaggctgagatcaagaataagttggctgaaggaaggagatgctaataccaaatactttcatatgcatgcaaggcatagaaagaggaaaaatttggtgactaaacttaaggatggggataacatcttgaccagtcatcatgagaaagctggagtggttgaccttttttactcaaaacttattggtcatgaggttgaaagggatagatccatcaaccttgaagctctcgagcttccggtgcatgaccttgctgatctagagctacctgtttctgaactggaaatctgggaaaccatcaagaccataccttctgacaaggccacaggtcctgatggtttcactggaaggttctataaagtttgttggaatatcattaaacaagaggtgatgaatgttgtggcagctttatggaacagaaactccttaaatttgagcaaa

SEQ ID NO: 143058 - DNA, 331 bp, Zea Mays
acttccgccgcggtgtcacccatgcctcgttttccccttactgcgcctcttctctacgtggtagccatgcgtgaacaatgcaatccgcggtcgctgatcgttagtcggaccaccgtggctataaatagcaccatggaccacggcgaggtattcacatctccaccagtgagctcagttgaagcccaaattcacggaatcctctccacctctcccaaaattggtagtgcacggtgaaaccatagtactttacggccgtgtagccccaatctcacctcccaattccacccggaaccgtcgcggcgccgttttcccccttttctatcaccggcaa

SEQ ID NO: 143059 - DNA, 402 bp, Zea Mays
attttctaatgcatgcgtcatattctctatatcctccattataattttaatctgattatcaaaataaattttaacagattgaatatcggctaatggtgtggtgttacttacaatggggagctgatgcagcaaggctgacagtgaatcgtactttacttctctcttcttgacgaccttctggtggtgatctaccttgaagtgcgagaggtaccacttttcgccaccttgcttatctgagcctgttgtcgttggaattcctcgtccagccttttcatgtggtcttctaatttctcatcctcattgggcgccgagttagtcagccttgtgttaatgtctaggacgacattgttgtgatctttgggattggccattgcaactgatctgataggtctaatttaatag

SEQ ID NO: 143060 - DNA, 694 bp, Zea Mays
acaataacgagaaggaggtttcccagcatttattctaggttctcttctttgtgcaagaggtaactcttcatgttcagggatgggagaaacagagattggagagacattactagttagatctggagaggagtctgaagagagatatgggactggagcttcaacttgttcgggttgtggttgctcccctgcttcttagtctgcttttgatagtatactataggttgcttcccatgtttttcattcacttgtcttccaatggaacaatcaggttgctccccatgtttctcattcaacttctctaccgtggaacatgggatatacccaacaatcaccgcctcatcatcctctatcttctcctgaatgttcatagttggatcaccatggtcccctctaccttcatcattacttagtatcttcgtagtcatcccttcctccatttctgttggaatcatacctccaacaattacccctcctaatgctccattatcctcatcactaccgcgaccacaaccatcctggccactattatcctccccctctctacggtatcttccatcaaccggagagaagtcatccatgatttgttctagattaactttctttgtgtagtatgggtcttcctctcgaaatgtcacatccatactcacaaaaagtcgcctaccaataggatcccaacacttgtatcctttctgag

SEQ ID NO: 143061 - DNA, 336 bp, Zea Mays
ctgggatcaacacgcttactcgacctggggtgaccactataccctactaacggagcaatcggcttaagtcggcgacgacttaagacggtgcaacatgctcgcgcttactcgatttagggtgaccactataccctactaacagagcaatcggcttaagtcggcgacgacttaagacagtgcaacatgctcgcgcttactcgatttagggtgaccactataccctaccaatggagcaatcggcttaagtcggcgatgacttaagacggtgcaacatgctcgcgcttacttgatttagggtgaccactataccctactaacggagcaatcgacttaagt

SEQ ID NO: 143062 - DNA, 549 bp, Zea Mays
agcaaatccatatcttgattttctgccgctttcatctggcatattcaatttaatttcgaatctgattcatcaaattcaaatctgaactagtttggtcgttgtcttactgatcagttagaaattgattttgaatgatattctgagtcccatccaaaaaccttctttaattataggatctatgaattcatctggccacttcattctaatgtatgaagtttttataccctgcagttctgtaacgtgatctcagccgtccaatgccgatcgagataataaagctttcaaaatatattgcccgttctccgccaaaagggtcatggcggcggcggttcgcctcctccctctcctcggtcgcctcctcgtcgtcggcgagatccgccggagcccggactacctccgccgcatcataccccaccttccctcacacccgaaactagccgccgccgtctccagcctctacttcccgctcttcccgtcctccgccaccttcctccacaacctgctaatccgcgcctccgccgcgtccccttccccgcgcctctccttcgc

SEQ ID NO: 143063 - DNA, 511 bp, Zea Mays
atgagagttagtttaattggtgggagaacccaaacggatagattttgccctagtgcaagagttcaaatagggggatagagttccctgctgatctaatagttatgaataaccatgatgtgactataaatgtcatcctagggatgaattggctaaccaagtatcaagccaatcttaggtgtgacaagagaacggtgaagttagtgtccttatcaggagaggaagtggtagtggagtgggtcttgtctagaccaaggtaaggaagctgtcaccaagtcaccacccatattgaggaaattgaagcatcagaagctatcaacgcattatcaaaattcctagatgtgtttctcgaggagttactaggcatgcaccctgaaaggaaagttaaatttgccatagagcttatacctagcaccgcccctatttccaagagagcctatcgagtgttcggaccagaattggtggaactcaacaagcagattgatgagttgttagagaaaggctacatcagacc

SEQ ID NO: 143064 - DNA, 510 bp, Zea Mays
ggcgtgcgacgacgtgatacaaatggggttttcccgggtcagacaccgtttctaaaaagtgcttagtcatcactcggtcgttatttctaaaacgccgacgtggcctgatatgactcggctgttacttctaaaatgctaacgtcaccagtcatcacttggcagttatttctaaaacgccgacgtggctcgaaatgactcggtcgttacctctaaaacaccgacgtcgccaaacaccactcggctgttacttctataacgccgacgtggctcagcatgactcgactgttacttctaaaacgctgacgtcaccagtcatcactcggccgttatttctaaaacatcgacgtggcttgaaatgactcggccgttacctctaatacgccaacgtcgccaaacaccactccgctgttacttttataatgccgacgtggctcagcatgactcgactgttacaatctaaaacgttgacgtcgccaagaaccattcgctgttacctctgaagacaccggc

SEQ ID NO: 143065 - DNA, 577 bp, Zea Mays
ctgatgtcctcctcatcatagtcgccttcatcctcgccacccccgtcaacgcctacatccatgcttccattccctatggagccatccgatgctaccttctagatctacaatcccagcaagattagctatggagtgggtgggattgaggggtggggcggcggagagactactggctaggaggagtagtcagcggcgggggaggcaataccgatgacacgagatctcgtggagcttggggagttggcggcgatttgggaggcattggttgggcatgcacggatgagatgcggctagcagtgtggcgatttggaaggcgtaggtactgtgggcctcacgtggatctggcgtgggggagcagaaggcggggtcctgggcggagatttcggaaggccgacaatctgctctccatggaaagcatcaagcggggattgcacggtcgcgaggagggaggagagccgaggcctgagcatgggcgaggagagtcgggcggaggcatggtgaagccgtggtggacgccctcgttgcgtccttatagagtagtagtagattgaaatatggagtgaccactcaggataac

SEQ ID NO: 143066 - DNA, 812 bp, Zea Mays
cgtcggggccacgtcggcggcgtacacgccgagcaggagctcgcgagaggtgcgggaggaagagggcatcccagacctcgaggaggaggacgccgtcgtcaagcaggtggccggcgagttctcggcgcccgggagtggcgcacgcagccggcgcagctcgatcggcggcgtcagcagcggcattgcccaagtcgaccaagaggacagttctgtcgtcgataagcaagtcattggcgggggtaacgtggcgccggcgcaacgtaacactgcatcctctgcgcccacaccccgtaggcccgtcgacactacagacgttgccggggagatcaaggcgcagttcgttcgagctgcagacgctgtcagggcactttcaccacttcttgagatcgggaggcggaggtaccaccaccgaagctcagtgtaccatggtgagcgttttcttccagtacgcagcacgtctttggaaattggaaatagcttgttcccaattctttggtttgacttattggtattcggttatagtttcatcaagcatggtgtcagcgattgccttgccgcattcggacgttggaggcatcgaactcctggacgttggaagtgagaaggtgttgggaggaagaagcctgtgttcgacactggagaagctctatgtctgggagaagaaattgtatgatgaggttaaggtatgtgtgcattgttatcaataaatcaactaaaataaatgatacatgaaattggtattaacagtgccaaaaagctaatttgttgctccatagtggtcacatccacactcggagacacaaatagtctct

SEQ ID NO: 143067 - DNA, 550 bp, Zea Mays
caggatcaaatggctagggtccgttcaacagctagggttacacgcgacgaagaggaggccaaagctgctgaaactgccctgatctccgaagtaatgaggcagtcgggactggttacgccagagggtactgctgacgaaggtgcacctgttgccgaagccgagcagacagatattgaagaaggtgaggctgacgaggaagatatagattgtttcgtcgtgccatctaagcccagccacttggattttgggaagtcgactgtctccgaagctgatatgccgatgatgacaaaactaggctacttcggggaagccgagaagaagctaattcgctttggcggggaagaaaccactccgaagccagaaaacgatgaggtggtagtcttcaaaagcttctttaaagcaagattaaggtttcttctgcatgggatgattgcagatgttttggaaaatttcaaagtttatcttcatcagctgactcctaatgctaccgttaggctcagtgtctttatctgggctcttcgaagccaaggagcggagccacttgtcgaag

SEQ ID NO: 143068 - DNA, 411 bp, Zea Mays
tcttttgaggaaattcttagcgacagaggggacttctgtgcctttgccagtgcctggggagctacatccattttggagagggttggctgtgatcatgctaaggttgtagctcagccagattttgtcatctcagctaatgatgttagaaacccttcagccgaagctactaccctaggtgggaaattttattccgaagtatggctgaatggtggatgagaaattgctaatgaagctattaaaaggaatgagaaagaatctcatgatgctctagaagaagccaaaagagctgaagaagctgccgagcgggctagacgtataggtatgctctttataactcatcttcgtaagtttttcagcttcggtgctaatagatatttgtgtttcaaagtagctaagctttctccgcctctc

SEQ ID NO: 143069 - DNA, 299 bp, Zea Mays
cggtagtgccgggctacaaatttttccagaatgctctcaaattttgcaggcagcaagatatgatggagaaaatgtgaaccgtgaagtttgagtagaaaaggatgaaaactcctagtccagtagtgctagatttgggagcagcagtgtcgctttggctaaacttcatagaatctcctcaaattttacagatggtttgcgcggggtaaaagaagatctctggtgaagtatgaacccgaaaaaacaagaaatcaaatcacagattagaaatcctgagagtgatggggttttgttggggtttt

SEQ ID NO: 143070 - DNA, 378 bp, Zea Mays
agtaagggatcggggcgagcaggatcatcatctcatcgatgatggataggaggaacaccattgaagaatacttgccccacactagaaggacgttgcagaggttgctcattgagtaagtccgtgaacatatcaaagttgggactcaacctaggatccatatcaaatcggagattgtaaagctattgaatcgaaacggagagtggaacaccacgaatggaatagaggacttttgaattggagatgaatgtgtgtaaataaacccaagcacaaagcaccccctctatttataggatggattcaagttttttagattttttttaaaaacttttacaatttgagtgaataaaatagtgttgaccaatcagacgacgccacatc

SEQ ID NO: 143071 - DNA, 334 bp, Zea Mays
ctggcttctgtatcagaaggtgtatctaagataaaccaaaccaccctagctagagccaacagtggtttccttcggcatctcccactcactcacaagaggccataccttgtaagcaatgtgttcccaaaccaaatccctggtaccaatgtaagtgcacacggtgttgaaagccattaagcacgcctgcacctcattcccaattgcattcgatggccttctaatgccaaagcgtgaccatatgggacgctggataatgcccctcacatcctccctctcattcagatcattcttcacatagaaccattgcttcatccaagaactcgaccacttcttt

SEQ ID NO: 143072 - DNA, 757 bp, Zea Mays
ctcccttccccccgtgccgtccctctcgctgcccccgccgcccccgcgtcctcctatccacgccaatctctcctccgtcctcatacacatcacaagagcggggcacacgatgcgttgcattgcatggctccgccacacacaccccttgcatgtaccccacccaccacggcggcataagtatctccgccggctacgcgcgatccaggcccggccgcgtgcgtgcgtgcgtgcgacgactgcacccatacacacatatacgcgctctggctggctgcctgcctggcttgcggagctccgtttcggccggccatctctcgctacgctacgagcgcgcgcggcccccgcgcccgtgtcttcccgctgtcgaccgtcgtgttgatcgtacatgcagctgctagtagcgaactatagttgcagaccgcatcagtgcgtgacaagaggatatatattatcagacacgcacgcgatcgcgcggagatgaaccagtgcgtgccgagctgggatctggtggacgacccgacggcggcggtagctggcggcggaggcggcctaaaccatcaggtctcgacgaccgggggcgcgcaccggggcctgctcctgcaggcgtcagctggaggagcaggcggcgggggcgcgttcgctcccgtcgtcgtgcccatgtcgaaccagtactacgaggtggcggagctgacgtgggagaagggcaacatctcctcccacggcctgctcaaccgcccggcgcacaataagtacccgc

SEQ ID NO: 143073 - DNA, 474 bp, Zea Mays
gggaaacatgttgaaagaagttccaaaggatgctgtagaaacaactaatgcaaagttggcatctcaaattagaagcaagattgaagaattaatttaccgtgatgaaggatcaaacaatgggttacaaacacttcgggatagtattgttgcatttggtgaagatctttccatattgctaccggagagaatgacaagtcaagttcaagagatcgagtcctttgttggttgttcaatccctagccatgttattatacagccacctaatgaagtcaaatctgtgggtaggtgcaaatgaataaaacctggtcagaaagtaaagaagctcggtgacaatgtggagaagaaacagaaagttcctcgtatgtgcaggtgttgcaagcaagtagactatcatgatgctcgaaattgtcctttaaagaataatccaacccagtgatgaatatcatgttcatagatcaagagtcatcagctagc

SEQ ID NO: 143074 - DNA, 315 bp, Zea Mays
gcatcaccgaacagagggttagagaaaggaagcgagatccaccgcgaacgaatcacgggtacgccatcgatagagactcgacagcgagtctgggagcttcgtcggttaccctgggacgcgttcgatgcggcaccggggtcgatggccaacctggtggcggggaatttctcgccgtcgcgcagcgacgccatgaatccgtcgtgcgccgtggccaagcttcatccgtacctcaatgccggtaagaatacatccattgtgatcgcgatgccgcgcacaccgtgtagctccgttcaatttgactgtggtgctcggggg

SEQ ID NO: 143075 - DNA, 1110 bp, Zea Mays
atataagtcagatcatcttgaacactcagctcttccataggtagttgctcttctggtaccctaaggtacttcttccactggtatacgtggaagacatcatgtacatccataagatggtcgggtagttccagttggtaggcaacttcccccacgcgctttaggatcttgaagggtccaataaagcgaaggaacaacatcccttttactttaaacctcctcataccctggatcggtgacaacttcagatacatgtgatcaccctcaaattctaactgccttttctgggtatttgcataccttttctgcctagactacatagttctcaaattctaccttatcaactggacttgttcttctgcctcttgtataatctctggcccaatgaactgcctttcaccagtttgatcccaatatagaggacttctacactttctgccatataaagcttcaaacggggacattttcaaactggcccggtaactgttattgtaagagaactccgcatagggtaaaatcttatcccaactgccatcatgtttaagagcacaagctcttaacatatcttctagtacttggttggttctctcggtctgcccatcagtttgaggacggtaggctgagctaaaattcaactttgagtccaagcactcatgcaacttctgccaaaaccaagaagtgaactgggatccccagtctgacacgatcttcttaggcactctgtgtagacaaactatccgggccatatacaactcatctagcttggcctccgtgtaattagtccttacaggaatgaagtgagccacttttgttagtctgtccacgatcacccaaatagagtcatacccagcagaagtgtggggtagagcaacaatgaagtccataccaatttcttcccacttccactcgcgtaccttcagtgggtgaagtaatccagtggatctctgattttcagcttttaccctctagcaaacatcacatactgccacatgtgaagcaacatccctttttaggccataccaccgatacttttgtttcagatcttgatacatcttggtactgccaggatgaatggagtaggctgagtcatgtgcttccttcaatatggtttca

SEQ ID NO: 143076 - DNA, 715 bp, Zea Mays
ttatcatgttgtagtattgcaagccactccttatatgcatcaatcgacacttctatagtttcttcatcaacatttgttcgctgccttggacgcttgatgggagttatgcttacctctagatcactgggtggatcttttgtgagcacaaaacttatttttctctcatccatgttatcagacagcatggcctcttcttggtggatgtaatcaagtgccaatagcctggatcgatcaatgccacattgtttcttataaaacaagaagtccctcccagaatatccaagtttcaattttatgtacaccacattgtaaaaggcaacataagctttatcaatatttactgtgacaatttcttttccaggctgtgctccaatgcaatggaaatttcaaaggtccatatctcaccagtcaacctgccacacaaatatattctaagcaaacaatgactaaaacagtgttataaaaagatttcattcaacaattaagaggtatgaaaacaatatactataattatgatctgcgccaaggccaaagcagtagagaacaaaatgggtagatagatttttacttgtcaggaagatcaaagaagacgttcttcccggccataatctcgtccacaatccgtgtaccaagttggctaccattgtcgttggtgcacatattagcttcattgcttgtcggctacaaacctccttgagtcgtcatcataggtcag

SEQ ID NO: 143077 - DNA, 599 bp, Zea Mays
cccatgcatatctacatcgagtccatcgcttcaaaatatatctttcaggcagtaatttaatgttcaacaaatggagaccttttagtccatgcctacataatataccagttctctcaaagagtcaacatttgcatgagacaatctgactagtaggatccagtataacctttcgctcttcatcaagtgtaactgtccctccataagctccaattgcaatgacaaattcattagttccatttgaacctactacataggctgctagtgacttttcatactcactttggaatagggctagaaacgagtcgagctcggctcagctcgatgtggctcgctcagtggccgagctcggctcagctcgcctactcaccgagttgtaaaaggaggctcgggctcacaagctgcaccttgaaaactaatattgcattatatagtgaattaatagtctataaatgtgaaataaataatcataacccaacattacaagtaatctaagatataattgtcatatatccatcattaaagactaagaaacgagtcagatatctataaaattatccaatatcaatcattattgtgtaggtttattaattttgtgcagc

SEQ ID NO: 143078 - DNA, 425 bp, Zea Mays
attggcacattttgctggtcattaattccctatttggcacattttactggtcttgggaacctggtagtattggtatcttttcaggaccaaatgtcatctagatatttggggactggccccagcagaatcgaaaaacaagtataaacttgaattaatgcctaacattgttaattttttcatgagcacaacagctacatgttttggtgcattatgtgcccacttagatcatgatatgagtaaattattgttgttttctgacgtcataaccatatatgcatgttatatggtgaatacttgttatattctgttgtattttgtcaaacaggttaaatgtgtttaatgtgttgaccataaataatcaggctaatttacctttttatttggtccaacactgaatattataattttgcatccttaacacttca

SEQ ID NO: 143079 - DNA, 712 bp, Zea Mays
ccgtagtctccttgaacaacctgaaggtaggatttcttgtgtgtggggggcggttgactgagtggctcatggtacttatgtaggtcgtcagaccatggtcgtgcctcatggttggtagaggtccttgatggcagctcgggtggtttaggaatattgctagcagcagtgaatgtcccctgagagcttttccagttgcaggccctcgctcgatgtccggattgaaggcaaatccagcagcgcgaaggatccgagcagcagaaagctagatgttctggtgagaaacagttgtaacatttaccctttagcttcaatttgaaaagaccagtggccttcacgtcgaattgatgatattgacgtgttcgctcaggggatgaccagctcttgcgccaccagtaccgcggtctgaccaccgtccagcccccttcaatgtcatccggcgcagcagggtatggcctctgtccattcgaacgcagcgcgggatcgagcccagcagcacgccgatgtgaccaaacgttgcccgaattcaaatccccttccgccttacaggagtgctggaaatccggcgagcgatctgcaacctctttgacctttccagtcgccaggatacgcggcattgaagactgctgaagaggatcaccaagtactgcctgcactggacgcgaatctgctttggattttgaccttggatccacccggctcgtcgaaacagaac

SEQ ID NO: 143080 - DNA, 476 bp, Zea Mays
agctctttctgcatctttttctgtaatgttgtttcattgtgaaatacttatgtttgttgctaataagctatgtgatgggacctatgagagtagagtaaggtacgtatattccatctgccaaatattaccccatgttgtactccgaaccattaagggcataactccattgaggaccatttccgatggataggtcatcttacacatgcgatcgatgaagaacattaatatcatttaacgatcatatcattccaaaaaagtgtgccatatccataggtcgtaagtagccacaatttcaagaatgagtgttggctttttgaaatgtcttttgtactggtcgtgccaagtagtaggacacttctcccactccaagtgcatacagtcgatgctcctgagcattcttggaaatcccttctctaaggaaaatggacccgacccatttgtctaaatgattttggtgtttgatgatcaacataaac

SEQ ID NO: 143081 - DNA, 316 bp, Zea Mays
gcaagaatagcctggggtaagaaagtttagggttagaaagaactccttgttgggtggtaatgcctttgaagatcgaatttgacttctctccttccttgttcatgttgatcttttcttcttcggtcttggtttcattgattcgaggtcagtgtgtatcatcagagttgggagaatatggctaagatagatctgttatgtaggtcaagttgttgggtatggccgagttgatctaggtcaccaatttaggcttaagtgaattttggagtatagccttatcctttgtaccagcattaagtaactcacactagattagatc

SEQ ID NO: 143082 - DNA, 383 bp, Zea Mays
cgaatgcatgttggcactgcggagatcccagtcatttcaagaacaactgtccccagctgaagccaccaggacccgcctactccaactcggtgaatggccccaagaatgcctcggcatccgcccccatggtgccctcctccatcagcccacagaacaagacccagtatcaaggaagggcacgagtgaatcacgtcgatgcccaggaggctcagcaagctcggggagtagtcctcggtgagttccttgttgaatttactcctgctaccgtacttttcgattttggagcatcccactctttcatagccactagttttgtggagaaacatggcattccctctactcctctagggattcccttggtcacccgaaccccagggtccgac

SEQ ID NO: 143083 - DNA, 381 bp, Zea Mays
gtctacttgaaggtgtcaccacttcgtggtatgagaagattcaaagtcaagggcaaattgtcccctcgctatattggaccgttctgagtttttaggcaagttggagagatggcctatcaactcgagctacctgataatctatctgatgtgcgcaatgtattccatatgtctcaacttaagaagtgtctctgtgtccctgaggaacagttaacaatggaagagctcagtgttgagggtaatttgacttacacggagtatcctatcaagattcttgatacattgactcgagttataaggaataaagtgataaagatgtgcaaagttcaatggagtcaccatggtgaagatgaagccacttgggaaagagaagaagagcttcgc

SEQ ID NO: 143084 - DNA, 1044 bp, Zea Mays
cccgtgcccatgtcctacgccacaaccggcaacacagcgtcgcacatgtgtccacgcctataaaggccactccaccctcgaactattctccccgaccattgacaagcaagccctcaccggaattctacctaaaccaagcacgccactgcccgtcgtgatcacctgagccctactcaccatggttcggccaccaccgccacccctcgcccaagaaaactccaccgtccgctttcctgagtcgaggtgaaactcctcgacaagctccctcactctctacacccctgcagcggcgtgacattgctcgccagagttcgcccgccaacaggtgaacgtggccagcgccaccccgtacaccaccatccaattccttgcaccagcaacaccacaccaaccccgtgaagcttttctaccgaccggggcaagctctattgtcgtcgttggtcggaatttggaaccaccgacgatctccgccgcctgtgtgtgtggaccgagcagctctgaccatcaccggccacgatccgcccctcgacgtgatcggccggacctccgcgacctcgccagactcgtcattggaactcaaccaccaccagtgagcttcgtcgtcctttttcccatgtctggcactattccggtgagggagagttgcgcgggttgcataaccaagaaacccagggggtttttcgtcatgtctgagagtcatgggaatagtgcgctaagggctattttgtgaggaaaaagagaaagaaagcccagggacccgagcgctaaatgtgtttttcttttcctttatgaattcaaattaaattattctccagagaacttagaaaaggcacaacttgaaaatatttatccaaatttggtcaaacaaattttgttaggctctgtacaagtttaccttttagagcaaaaatagaaaaccccctagtccagtactgtttctggaagttgttatttaatttaggttatgagttaaaatatggcaatgatagtataaatagtagaaaatttgcaccatgactaggaaaaatgtggtagatacctatt

SEQ ID NO: 143085 - DNA, 509 bp, Zea Mays
actcgaccgacgaagatgaggacgaggatgatgatgcgagtgcgggctccaaactttaggccattctagatgcctcccatgccatgtcaactgttgactccttctcgccctctttgggcgaggcggcgagaggcttccccatcatggaggaggctgacttcaccataacttcgccactgtctgactcctttttcgccataacttcttatctttttcgttttttagtagctcccctcagcctgtagccttcatgtcgcgcacaaggaaagtggattctaagaggaggaaatcaatgcctactgttggtgagggcggtgggggcggtcgtgtcgtcgagttcctctttgccaatgcctctacaaggcgccactagggtcgatgcctcatgttcgtttctcttaacacctctgagcagttctagcacgagtccggtggggtggttgaggttcacccttctcttttcatttttatagtgggctcggaagttgcctttgctggcacggtggaga

SEQ ID NO: 143086 - DNA, 673 bp, Zea Mays
ctgatggtgaatctgggagatcatttccttggacggaggagtcctcggatgaaggcttggattactttgttgcgttggatgtggctgcggcggagacatcgtcgcgtgtggagggtgccggggatcttcctagtgcgagtactgggtgtagttggcgaagggtagtgggaaaacgtagtgtgggtgaattttcgcgaagtggtaggcaccatcgtatggggatggagcgtggccgtctccgagtagaccgggttggtaaatgagaattgttgtcctcgccgattggggcgagcgtaggcgagggggatcttcgaaagctttttgaggtgaggaattgaggataatgttgttcaattacagggagatgggtatcatcccgaaggttgagctggtgtaatatgtgatgcccttgctgagtgtatgtaactgtaatttgtatgacctgttggtcatatttgctcgcatgtgttgatccggcagcacccgtgggcgactttcgcgtggagtgtcttttaaataaaagactttgattgacacagttgttgtgctattccagctgcacccttgagcgacttttgcgtggagagtctttagtagaagacttcgattaacgcacttgttgtgctattccggctgcacccttaggcgacttttgtgtggagtctcgcacgcg

SEQ ID NO: 143087 - DNA, 374 bp, Zea Mays
ctcataagtaaactgtccccgcgaaagggtatggcgcaatctcggccgcccgatcagatttgaagggcaaagattagatctaaattacattaaaccggtacactacaggaacctttggatcaacaatctacggtccagattaaatgtcgctcgggtcacccagcaccgtccgatccgatctaacggtcctgatcgaatcgtccagggggacccgcccggtacaaatccggccgtccgcgccgaatccgacgggaacgacccaactcctctctctcaccgatcccacgcggtggcacagacggcaggcgcggcggcgccatggccgcgacgccccaaagctctaccccgaacgcacagctcagacccgaatcgct

SEQ ID NO: 143088 - DNA, 1043 bp, Zea Mays
ggcccttgggctggtgtcaccacgtgccccatcggtggaattgctcgacgactacaacctagggctgggccctcgtgggacggccccagaccccacgtgtgtcatccaaacttccagataggggaggtctgatgctaccacgtgtccgggccattacgtatgaaggacaggtttcaaccaggggaggtctggcggtgccacgtctgcatgtgctcccagcccctgctctccacttagatgagatacagtgttgccatgtttcctatggcacatcacgaaagccaccatgtatagcctgatgcaagcctctagcgtgggggccacccgtattaaatacgggtaagaggtgcgcctgtacgcactagtcacaaacggcgtgtgcagcctgcaaggcctgggttgtgccagtaactctcgtgttaccgaggcaaagaccattgactctctacgccaagcatgagtggctcccatcatgacttctactattcccactacagagacatgcgatggagacaggcggaggggataggacgacaccgtccatctactcccctacacaagtcgatgagccagtttatgtcgtagcttacaccagagtcttcgcccacacgccaacaggacaaggtggaggcgagtctagccagaggacccacatgatgaccaagagaagatatctgcccaccgaagtgaagaccttggtccacccagcccgatccattgctccatgcttcatattattatattcctgggcccgcctatcggggcccagtacccttgtaatgtgccacccttgagatataaaatggatggcacatacgttgcaaaggggagactactctcgagcccatccaggaactcgggtggacacagaagctcacttgaactccctcgaggacatcttcataacccaggctttctcaagctctcaataatacaactcacaatggagtagtgtattacgctccggtagcccgaaccattttaaacccttgtttgttcttgtgttcgtccatcttatcaagcaaaccctaggttgtcccctg

SEQ ID NO: 143089 - DNA, 571 bp, Zea Mays
gttgtgatttagttctagaactactagttttgtatttcttgattgctccaggtattgatgcccttgcagttgcttgtaggaggtggatgggatattctacacagtctggtggggagtaatgaatggttcatggcacagcctgctatctcagtttctgatagtagggccattctgctgctatgtctacatgttttttttatgtgtcttcatgtgctgggaagatgaattggtaggagactgacttgttttcatgaactaggaagttggacaagtagtaggccgacatgcctttatccaaagatcttttgtctttcatttgtgttagaaactagctacatggtcgttgcttgagatgttaatattactagcatgtcacacaatgttcataatggatatctcgatcaatcgtatgtttatcttttacagtttgtgtgcctcgatcagggactgacgacagttgtttgaagccataattgtctgtttatagtttctagcaaggtccaaaaatttacccctgttctatgattcagacttcagaggctggcgtagccatggcacacttaaattcctg

SEQ ID NO: 143090 - DNA, 283 bp, Zea Mays
tgaacgttgagtgtagtggaaaagaataggaggacgtgatagaggggatggtggagatggaggtggaggcaatggtggaggtggagaaggcgatagttgtggaggtgagggatgtggaggtgatggtgatgaaatagaaataggggagacaaggtggtaggaagaggtggaaccaagcagagaaaatcaacagactcagaggaagggaaagaagaggacaaatcagtaggaaagaagggacgtgactcatcaaaggtcacatcctgatatactcaaatgcaac

SEQ ID NO: 143091 - DNA, 4074 bp, Zea Mays
cagtactatacagcaagtaaaaaagtgaggcacacaaagagcttccatttattgaattatgctgcacagcatagttagcaagttgacaaaatatgcccattcgactttccatgaccccccccctctcatgagctcatgagaaggggatacaaggtcaagaaagatggtccattaagatagaaaatctctggaagagtgaataggttctaaatctcatgcaaatcacaaaggtttacacagtttccacatcgatggggccagagaaactctacttattaaaaggtggcaacaaaaatgtttacacattccatggacaaggaacaagactgagcctgtttcatatgcctatggtagtaaaaaaaatgagctgtaatgtcaagggcgttggttcctaaggtagctggccctcgactccgcaactcgtagtcttggtccgtcttcaccggcagggttacacccccttgccgtcggcttggtagagaaaggaggaagaagactggaggactaaattcttgcttaatttcctcaagtgccaattacagagacaaatagccttggcttgcaacaactcctaaactttaggatctaattccttctctttctattctagccactaatctgtttctataaaaaaaatcctcctaaactttaggatctaattccttctctttctattctagccaataatatgttcctggtttccttcctggacgctggaccaggacgcggcatgctctgcagcccgtcgaacgtccctggcgcaccgtcttcgggtgtaggggagaccccacatgacatctcccccccccctcgacgaccagctcgtcctcgagctgaaaggacgagtatttagcgatgaagtcgtctaggtcttcccatgtagctgcagaaatcggctcgcccttccagcacaccagcacctgttgaacgccacgagccacgctctggagcaggcaccaacaccccattgtgcaacttgggcagcggaggaggaacgtctagcggcgcgcctacccatttttttaagaggtcgacatggaagacgtcatggagcttggcctaggccggtagttccagccgtacagctacctcattgatcatctctgagatgcggtatgctccgaagaagcgaggcatgaacttccccttcggcgcctgggacagagaagcaatcggccgattgcgcagccgcagcaggaccccgtcacccacggcatatgtgaccggtctgtgggacttgtcgtagtggcgcttttgcactgcttgagcttgttccaggcggtcgtggacctcggccaggaactcctcgcgctctgccatcgtcttggcgaccgcatccaccctagtgtcgccagcctcatatgatcggatggatggcgggtcacggccgtagaccacccagaacggagtgtcgcggagtgaagactggtaggcggagttgtaggtgtactcggcccacgacagccaacgaagccactcgcgtgggcgatctccggtgaagcagcgcaagtacatgtcgatgacgcggttggcagcctccgtctggccatccgattgcggatggaacgccgaggacatgtgcttcttaatgcccgttaagcgcatcagctcgctccaaaaggtggacgtgaagatggggtcccggcacgagacgatcgactggggcacgccatggaagcggacaatgtcggagaagaatgcctgggccaccgattcagcagtgtatgggtgagctaaggcaatgaaatgacaatacttgctgaagcgatccaccacgatgaggatgacggatttcctgcgaacacgcggcagtgcctcaatgaaatccatgccgatgtatgtccagacacccgacgtgactggtagcggcaccaggaggccatccgggtggaggtgctcggtcttgcagcattgacaggtggagcaggagcagacgaagtcctggacgatgcggcgcatgtcggggaagtggaagtcgcgccggaggcggtggagggtgcgttgtacgccttcatggccatcaccatgtacggcggccaagatctcctagaggagaggtgatgaccccagcctgccgttgtaggtgagcaggttgtcgacgatggcccagggatcgccgcgggtgccgaccgcgacctcgtcccggagggccatcagggtggggtcggcctcctgctcgtgccgcaatcgtgtgatgtagtcgaaccgcgacgccgagacggccaagacaaccccctcctccggcgtctctctgcgagataaggcgtcaaccacggcgttctgggaccccggcttgtattccatgccgaagtcaaagccgagcagcttccccacccagtggtgttgtagaatggtggcgaggcgctgatcgaggaggaatttcaggttgtagtggtccgtccggactgtgaagcgccgaccctagaggtatggcctccaatggcgtagggcgtggaccagccctctcagctctcgctcataggccgcaagcgaccgatgacgtggtgccaccggtctgctgaagaaagcgatgggatgcgcctcccggatgagcaccgcgccaaagccgtgtgtggaggcgtcgcattccaccacgaacagctttgtgaagttcggaagggccaagaccggcgccatggtgaccgctgccttgagcgcgtcgaaggtcgcatccgcctccgctgaccatgtgaagccctctttcttcaagagcgcggtcaacggggcggcgatggtgtcgtagtcgtggacgaacttacggtagtagccagagccccaggaaaccccgaactacgcgcgccgagcatgattgaggccactcgcgaaccgcttgcaccttggcggggtccatggccaccccggatgcggagatcacatgcccgaggtaagcgacggaggggaccccaaaggcacacttggactgcttgacaaacaattggtgctaccggagtagcgctagcatggtgcgaaggtggcgcagatggtccgcccgggtggaactgtatatcaggatgtcatcgaaaaacacaaggacaaaccgacgaaggaagggcctcaagatgtcgttcatgagagcttggaaggtcgccggagcattgcagaggctgaacgacatcaccaggaactcgtacaagccgtcgtgggtgcggaaagccgtcttgtggacgtcgtcggacctcatgcgcacttgatgataacccgaacataggtccaacttggtgaagaaccgggcgccattgagctcgtccagcaactcgtcggcgattgggatggggaacgcgtccttgacggtgagcgccacgacccatcgggcttcttgatgaggaggaccggcgaggagaatgccgagtcgctacgtcgcacgatgccttgggcgatcatggctatgcactgctgctcaagctcatccatgtgagccgcggggtaccggtatggtcgaactgcgaccggagccacgccgggaacgaggatgatgtggtggtcgcggccccgttggggaggtagacccgtgggctcgacaaagatgtcggtgaagtgagccagcagcgcgtcgaggagctggtcgctggtggtggtgacgccgagggccgacgtcgcggtcgacgtggttccggaccaaggaatcgtgtgtccttggagctagaactgcatggtgcggttggcgatgtcacagacgatcgggcccaaggtggcaatccattgtgtcccgaggaccagatcgaagcccgccagtggcatgatgtagaggtcgacgcagaacgaaacaccctcgatggagatcggcgcctggggcaagacacccgaggacgcgatgcgctccctgttggccacccgcgtcgtgagccttggtcgagcccggacctgtaggctcgtgcggacagccgcctcctcgccgatgaaattgtgtgttgaaccgttgtcgaggagagtgatcagggtcaccgcgcccaccttcacccggatctacatcgtgccacaagctcggacacccgcgacggcatgcagggagaataccgaggcatctacggcggggtcaacagcctcgggtgcggcgtccgcgacgtcgagctcgac

SEQ ID NO: 143092 - DNA, 425 bp, Zea Mays
ccggccaccgctgggtcctcaccgccaccgtatagcccatggtcgaagcagagatcgccgccgccgtgggacttcgatgccagcgttccgcaccacaccgtgtccgacctcgtccccatctttgcttctggtgagacctcttccctgcggttagctttggcctgagatttgtgtagagtgttgcgaatcggggagtagtgcaccagtgccatggatcgccgcactccggcgatagctccgccgtcgttcactggtgcgcagccgtgttcaggctgagggatgaagaacagacgcggaaccgtggatccatggttgggcggtccaaattagttcgggcataccgtctagggcgttggacctgtgaccgtagatctgatatcctacggctcgaagcagatcgcgttttattaaattgtagccatcag

SEQ ID NO: 143093 - DNA, 401 bp, Zea Mays
atcaagtcaagcaaaggttgatgctcgagcagcaatagatgaaagcagattgcaatatatactccaaaatcaaaataatctgcgaactgaaagtattcaagggatatcagatgctgtaggtcgtggctgcattgatggtgaggaaatggggcagcgagttatattgcctgcatctcatattggcggacgacgatacaagtttcagaattatcatgatgggctagcaatttgccgagtctacggtccaccagatttctttgtgacgtttacgtgcaatccaaattggccagaaatagtagagagcctctttgaacctggccaaaaagcttcagatagatcagatatcattactagagtttttcatttaaaacttgatgatcttttaggtgatattcgatctg

SEQ ID NO: 143094 - DNA, 411 bp, Zea Mays
caaatttctgttctatcgtcatctcccaatcaagatatccctcaacatcataatgacccaaaaatgatggtatagaaatattaatcttagcataagggtcgtcaggagcacgattgttattaccttgctggcggtttggcataccttgtgtgttttgatgaagacgacgacggaggcgcaaatctctggtggccgcttcatcataattaccttcttcatcaatcactgcatcatcgggcagacgtggacgaggaggtggtggtggcggtgcttgttgttgttgtgtctccaacacagcaagtccgtcgaagatataggacaatcgtcgatccagcctctcgtaagtcctgccaaggtccatgttaatgaaggcatcatgcactgacttgtggaccatctcctctatttgct

SEQ ID NO: 143095 - DNA, 532 bp, Zea Mays
cttagagatcattaggggcttcgaaggaaggtttcacccaagacatatcagaagcattcataattcagagccagcacaacgacaaacctggtgagtcttaaggtcaatgtaatcagcttcaggactcaggaacctaatagcaaccctctcagagcagcttgcacctactagtaccaagaggggggacaagaggccaaagctttggagtgagatacaacgctcaaccaagaaagcatttttcctctttggtggggacaacaagggccacactgcgaagagttgtcaggtgaacatacaaaagcaaaaggagcttgtcgaaacatggaaaaactagttggaggaggttttcaatacatcttcgtattatttcccctatattctagaacatttctatcatcagcaaccaaatccacaaccgttcggctccattgctttgacaaatccgccactagatcaatggacaatgtctctgccattcatttcagaaccccaccatacgagtagttgcctataagtcaaccacaattctcgg

SEQ ID NO: 143096 - DNA, 645 bp, Zea Mays
catgcgaagaacagtttagggacaaactgtatttcaaggagtggagaatgtcagccctgctacataagaggcggttttgcaagtcacggacgacaaggatggagatagccgcgggtctgtcgaggcaagcaactgagcacgtccaaggcgtgagaagcgtggcaacgtctatattactgggccgagttggtcgtgtaagggttagctagaccgagccgagaaagtataaaggatacaactgaggcaattgtaaggacatcgaaaaatagagaacaaaatatcagctcgttgccatcacgtgaccttcttccccatgtctccaatctccgctgcttcccctgtttcctgctctatagacttctagaaggtgctaataccttccccgcacgccctccgcctccccgctgtacttcccggcgctcgagctcgtcgacgtctacaacaataacctgtccggccgctcccgcccctgagcgcgccgcacgcgcgctccctccgctacctccacctcggcgggaactacttcaacggctccatcccggactccttcgagtacctggggctcaacggcaacgcgctgtcgggccgggtcccgccctcagctcgctctcccgcctctcgcgcctccgggagatgtacatcggc

SEQ ID NO: 143097 - DNA, 412 bp, Zea Mays
gaacagtgaaatgtcattcatagaatcatttgagttgtctgcagctcgaaaacgaacgagctcacgctctcggatggcctcatcctcctctgtctctctctctccagcaagtgcatcctcttggatctaatggcctctgtgacccagaattcgacctgctggacgtgggtcgacctcctactggggccgataaactccaaaggctaagcgtgaactcctcaaagttgccactatggtgattggatcagctgagcaaaaatcctccggcatagctgagcaaaggttttagctcccccttagtcatccaccaaatactagttggtattattctgcacttttcgtggggaaatcggaccgatctggtgcgccacggatgtgccaccagaccggctagtaacatcagccaatggct

SEQ ID NO: 143098 - DNA, 329 bp, Zea Mays
ctgcttcatatggagcaccccttcaggtatatagtgctcccggaaagctagtttgaactcagcccatgtaatttgatggctggacggctgaacggcaacataatttccccaccatgtgctggcagggcctcgcaactgttgtgccgcaaataaggccttttgagtctccgtacatcggagaagcccgaacttctgttcgataacccggatccactcatctgcttccagaggatctttcgccttgacaaataatgggggacgtgtctctgagaaatccagatatgaagtttcgcggggtccttgcggatacgctcgcccgccttgctgct

SEQ ID NO: 143099 - DNA, 500 bp, Zea Mays
cgccatttttttgaccgggacactcacgccattataataataacactcacgccattataataataacttttgatttaaaatgcaattgagacgcacaactaagcaaaacgtaggaagacagcagtgaaaacaaattgagacgcacaactgagggtgataaaggttgcacctttgcgcattctgcaaaatagcttgctacaatcaccaaacataggttagcccaagtttgaagatggtacctgaagcacaaacaatgaattttcctaagagtagaatatgcaaaaaatatagccatgatcaagagttctagcatttaatttgaggatcaaaagtgagacttttgcaatgaacatgacaacagaagatcactctcaatgcataatacttcatgcaaaaagttgcaaaagaggcaatctaaggacaagcagactacataataagcaaacaacattttgagcatataactaatcctaatcaacattaatcaacaaatcagtcca

SEQ ID NO: 143100 - DNA, 498 bp, Zea Mays
gtggcatattacgagaagcatcatcaacctccaatcctgccatggttggacgaatagaggcaacaagataaaaaaagtgaaggaataaaaactctacaactattaggatgtagctactgcaaggcgctcactctcaacttaccacacaagctcttaccaattcttaccttgctcaacaggaggggtcagcaaccaacaagtctgcaactgtggaataagtgtatcggtgccgcatcaacacgacctgtcactgtagtcgaaatatgtagacttataggcgggctgaagcaaggaatatactagtaccacgttagttacaaaagcaagctgaataatcattcaacggtgctattatgctggtcctaggctaaactatgctagagacgtgagcctaggcacaaaggtagtcagtgaaaaagaacaactagcacagcacaaagagaaacaacagatttagagattcagcccccttctttcttcttcttttcctttttttct

SEQ ID NO: 143101 - DNA, 399 bp, Zea Mays
aggaaaagacttcaggctctgtcagggagagaccccaccgaggatgaccccaccattgtctacatggccggatacctccacaccctcgatacccactacgatgatctctcctcccactgcacccacctaaactcccgggtggaaagcctagagcagcaagtcaaagagcttaagaaggagaaggcatctctccaagagtgtctccacatagcggaaggcgaggaggccaacacccgtgaagcctatcgaaccttgaagatggactatgataagaagcttaagaagctcgcccccacaatgaaaatccggaagaaaaccacgagcaaaggatgccagacggaaaggaggaagaaagctcccccagcaccagcttccgccaggatagagaatttgtccgat

SEQ ID NO: 143102 - DNA, 371 bp, Zea Mays
agagatgcatgcgcagatgcggcagaaacgccaagaaatgcacctataaaggcaagatatgtgggaggagatgcgttaggagagaatggagaaacagcagcaagccccattgccaccacctacaccaccacttccaccccgggacaagcaccaggaatttatgagccacaagccgcctaccttcgccagctctccagattctctacacgtcgacgactagttgaagttagtagagaagatgctaaacattgcccaatgctccgaccgggagaaggttctctatgcttctggtcgtctgactggtcctgctgctgattggtgggattcttatgttgctgcccatgacgctactgatactattacttgggtgg

SEQ ID NO: 143103 - DNA, 440 bp, Zea Mays
atgacttgaagcaggcctcctcagaggaggtggaggactcctctgactccgaggagtggagcgactgcttgggcgatgacggcgagggcaacggtagcagcgatgacaacgacggccagggtagcgacgacgacggtggcgagggcaatggtgacgatgacggcaaggacgaggacaagggtggtggtgaaggcgacaatgacgacggcaagggtgaaggcgacgacaagggcgacggtaaggctggcgacataatgctactggcataaatattagtatagtgtagcagcagcagtagtagttagtagtagaataatgtagtttagttagtagtgtagtgtagtataagtagtaatgtaatgtaatggttgaggggtgggaggccgactcatgatgagtcggatgagtcgatcttaagtttgtaatgatctccccctgtg

SEQ ID NO: 143104 - DNA, 332 bp, Zea Mays
acaaattttgagggagcaatttaatgcttttattatgaagaagggaatgtttgcgctgccacccgttcaattggatgcatttaccatggagccgattgaatggtgggtaagttatggttctgagactccggatttagctgaggttgcaaaaaagttttatctcaacccatcagcagttcatcgaccgagagaatttggagcacattcaaccatatccataacaccaagcgcaataggatgaacactactgcagataaattagtcttcatccactccaatttgcgacttctgtcaagatcaacagatgactacaacatggcgcacatgctaaa

SEQ ID NO: 143105 - DNA, 620 bp, Zea Mays
gatatatactctaggatcatgtcgaaccactgttattggaaaaggtggaaaggtttttgcatgccatccatggaaaacgtaactgtaactgctcttgtttcttcactaggtatggaatggataccggatacaatggcaaattccaaaagagaactgtaaatcgcctgaaaaacaaaagagtacatagatgccgacacagagcaatgtatgtcagtgtgtggcttagcagctaaagagatacataaggcttaggttttttaccactacacaaattagtgctctaacgatgaagaaagagatgaagagaatggcaaacccatagcctctgtgtcaccatcgccacgagaaccatcggatggacgtgccatggcggcacacaaagccaaagccgccttgaggtcaggattcttacatagcaaacagggagaaaatctttgcctctgagcacgcgcatcatggaggcatggagccatcagccaccgcactgaaatcatgtgggagaagaagaaacagccaagcagtacactgacgccaacctgaacctgatggctgactccacaagcctcagaccatagtgtttcccagccatctggcacatctccgtggatctgtccactaac

SEQ ID NO: 143106 - DNA, 361 bp, Zea Mays
gcagacctacgcaaagtcaatttagaaaaactttatcagacctagctgatttattcaatagaccgtgaagtcaccccagccatctgttacctttatattttttgtcgaccaaacattgttcagctctgatttgaggctcatcaatgatgtggaagtcactagataagcatataacccatttggctcttgaaaaataactctagccagttttgttggcttcccatattttctatagctaaacttatttcttgacatgtgattgattcgaaaaggatattttgtattttgattttcatagccaaacactcacttatatccgaaacaattctttcttcatcaaatctgccaactagcatatctt

SEQ ID NO: 143107 - DNA, 312 bp, Zea Mays
aagaataatgaagtctttatctaatagtattcctgctaatcagcttgaataatggttgtcacatactcacaaaccgatgaaagtcaatcaacgatgcacaagggatattcatgcaatgcaatcatagcagcaagctcctttgtagcaacttcaggatcaaaagtgtagcgctccatggatactttccctccttgcaaataaaacctcaaagatagttgtgatatagtatcgttctagcctgtgagctttattttgcgcaaaacacatatcttcaaatgaccataaagatgccttgttccatgagtactttcc

SEQ ID NO: 143108 - DNA, 537 bp, Zea Mays
cccatccattgccgacctttagtcgttgaatgaaattttttcgcctcctggagctagcttttcggtgaaagaatttggtgttggcatcaccgaatctaaggcttgacatacgggaattatgccttttctgtgcccattcaataacagcatagccaaggatacgcatcttcagtctgcttcggagacttgactcgaagtctgacaaccgcctattttcttgtgctaggtctagcctaaggagaacttccatggccatatgcacgaacaacctagaatcaggaacaagcctgaagctccatcccctgagcgcccgggctgtgctctggagtttatagaacagcctatggaaaggttcatgatgttgggtcggcttcgaccaagcgtgctccaccacctgcttgaaacccggtaaaaccgtccagaaattctcaaatttgaaggagcgcggatgcctcggcctagcattattagatagaagcagcgagcagtggtcagagactgatgatgaaagagcatgcagcccatagttgtcgaaaa

SEQ ID NO: 143109 - DNA, 656 bp, Zea Mays
aacatattaggagatccaccctaaagcctacttcaaaagttggtaccaaaatctaagcttacgtggttttcccgttctcctagcatgtttaattccaacccgtctaaccctagttggtagaggcaatactggatgcaggtgtaggggcactccggagggggccgcgttcagactggaagctagctctatttccttgagatcctcctctccctcattagcgttcatgtcttgggggtgcatttctagatgaacgttggcctctgcaagctcttcctgcacatcatggagctagttttctaggatctcgatggtgttgtcccggatttccacttgctgctccaatgcttggaagtgattgctcatctattccacctgtagatctttctccaccaattccgaagacaggtcgactacgaagtcctccctatcatcgagtgtgatctttgcagcttgagagagtctggcaaggtgtgtcatggtgtcgctttgcatggcctgctggcggtacagtgcactcatgcactggacggtgattatcccaacctggtcgggatgcatggcccacacatccttcacgtggctcactctgttacaccacatcgggtcatccctcttcttggtcgggaagagtcctagtgggtgcatcatcaactcca

SEQ ID NO: 143110 - DNA, 497 bp, Zea Mays
tagacggtgggattcgaggctcggtcaatataacatgtgttttcctcttgctgtataaatggggagagagctagcagggctaacgtttaattaaggggtcgattctaagtcaattgaattctaattaacataaaggcggattaggctagatgaagaaggtgatggaagcttgtagatctcgatcctctgttatatgtgagtctgtaattttcttcatcttaatttgtgttaaatgaatcgatctatcgtcgttgagtaggagactaggaggaggacatgcatgcatgcatgtatcctgatggtggaaaaatcgacagccgactattggcactttcgatcgagatcgtcgtacgtaaaataatactgatcattcgtgtacgtaaaaatgctgataatacagtttttgtcttagtactgtgtaacactgcacataaatgtacagtctagtacacgtattactaggcatcgcagagacgatcattttgtgtacgtacaag

SEQ ID NO: 143111 - DNA, 311 bp, Zea Mays
gcaagggctgttgaatctgtcgatcgaagtccaaccgatagaggtccagctggatttgaaaaaatttgtcgtggcacccaattggtgtgcccaatgggtgggattgatgtccctttcgtaaaatagttccctgagttgacacagtttaatgatgcgtgtgagccaacagtcaacccatttactgacctttgatgtcgtgttcaccgtgttgtaccagggatatgctgcttcttggaaattgaagggactcttgattacttgtgtatgttcattgtatgggtaggaggcaaagaggcacccttctgtttctt

SEQ ID NO: 143112 - DNA, 443 bp, Zea Mays
gctctcgcggggttgggtccgcattgctgcattgacgcttagcggcgaaacatgaagcttctattggttggcgctgggtgaagtctagtcagtgtagattgaattctattggtgttggtatagattgaattctattggtgttggtatgctcggtccacactaggtatattgatcgacgacctcatttcagctggcttgtttacattgcagccaggcgcgcttatgggacttcgatggggcagtgatttgtgtggaacacgttaagctgaagttactcactgatcaaaacctgaaagcttcgcccatggacttctgtacctgttcatttttttttttttgccgtgaacccagcttgcagtcccatagcgtgtaggtctaattgcaacactgctctgttaactgtgtatgatcagcacactaattgctgcaaagcaagtcttcgt

SEQ ID NO: 143113 - DNA, 387 bp, Zea Mays
cctaggtccgccactggctcctggtgtctggttcgcaggcttctaaagcgacttgaccagcgagagccgtagaaacgtgcgtcaccacagcctcctcggaccaaactgggggcgatccaacgtggacatccatagaagcagcagagagggagcccgctccaacaccctcgggggctgggtcgctaccagcgccaccctcgcgggttgggcctttcgcagcagccacctctagggttgaagatcactcagacacgtccataggagctgtaagacccggatcaacgcttttgcaaggaagaccgccttctaaggtcgacgaggcacgagataccacccgagttacctcttgcccagcagaatcatgcagcataataccaccatctggga

SEQ ID NO: 143114 - DNA, 521 bp, Zea Mays
gaatgtggaggctttcttgcgaagtattgtgctgttgtcctaccctaagccccttgaccatggcttcgatgatgatgtcgtattggactactaatgcttgagctcgaagacaaaggaatcttcggacgaacgattgaaggtatttgtttggatcctaggtaccctgaaacagagcttgtgaagtgactggctttgaatggaatccttggggctggtgaggatcatttccttcaacttctgccatgacgtaacatttcttagtcgaagcaacgagtaccaggtctaggccacattcctgaccgccatgacgaaggacttcgccatgactgttgagttacaaccatatgaggatatggtagctttgtagctcataaggaattgctttggatcagttaggccatcatacattggcagtataggaggcatgtatagtagtggcctgggtgtcgcctgtagctctggtgtaagtggggaagtttcgtcgtagaggaaatcttggaagttgagtggttcatgacaaa

SEQ ID NO: 143115 - DNA, 433 bp, Zea Mays
ctcggattcgattccgggttactcgccggaacttgctcctcgccctggcgtgcgggggacccaatcactccctctagtgctcgtaaccccgtgctgctgctaaccggtccccacgcgtaggtttcggccaaatctccaaaccgcccgccaaactccgtcagcgttccggctgaatcggtcgcggccgttgcgccttggccctcggactacagataccagccgcggccgaagcctatgctgttcacctcttcttgctccccgcgaccgcagccctgtggatcttcttccctgattcctcgcggcagtaacgacccacccgagctgcccgccgaccttcgcgctagctaggttccgtaaccctcctctactctgcgcctataatacccaagcagtcgttccccttctcctctctgttcgtcccatcaattcgccg

SEQ ID NO: 143116 - DNA, 422 bp, Zea Mays
ggaaatcttggctagcgaggatggtcttgagttctggtcttagccctttcaaaaaacgggccatcttcttggtttcggtgctgacatcgtcaggcgcgtaacgagccaacttgtgaatttgtgcacgtactcactgacagatcttccaccttgagttagttcccggaattcatcttccttgagttgaacgatcccctggggtatatggtgctcatggaaagccgtttcaaattctacccaggtagcgcccctaacggtcgcgctgaaggtatcccaccatgctagggccatcccagaaagttgatgagcagccaattgaacatgctgattttcggggcatctgatggcttccagtttcctcttgatcgtgtgcagccagtcgtcggcatcgaggggattgctggatccagcgaacgtgggag

SEQ ID NO: 143117 - DNA, 425 bp, Zea Mays
cactactacggggtggagctccacaaattcaaccctagctccacctcttccacacagaggcgttctccctctcctccaacgtgaagaaggtgcgccacacggctcgggctggtggctgcatgctcctgccgcgctcagatcgagcataactgtacatccctgccatcctcacctcatcaaacaaggggtggcagagtcgatggttctacctccgcaacgacgatgggcggctgccggcatatacgcagcgtgttgtctttgcgatggcagaacactggcggtggggctcccctcgagagcttcaggcccagctgaacccgctgttggacgccttgcgtaggctccaggagcgtggtcttactatggccggggtcatcatcgctttccactggaggagggtattgccgctgaccgagtgtcggctt

SEQ ID NO: 143118 - DNA, 666 bp, Zea Mays
aaaaaacaccagggcacatcggcgaaggagaggagcaagcgtgcgattcatcgctccctggaaggtggctggcgctccggacaacccaaaagccataacattgaactcgaagggccgtggtgggtttgaaaggctgttttgtggcgatctttcggtgccatgcggatctgatgaaatccagcgcgaaggtccaatgaggaaaaccatgctgctccgtgaagctcatccaggaattcatcgataattggtacatggaacttggtcgtcgcagtgagtgcattaagatgccggtaatcgacacaaaatcgataggtattgtccttcttcttaacaagaataactgatgatgagaaagcacttttgctacgctggataatgccggactgaagcatttctgccacctggttttcaattttagttttcaaagctggcgcataccggtaaggcctcagttgcaccggacgagctccgtcgatgagtggaatgcgatggtcacattctcgatgcggtggtaaaccttgagggacctcaaacaaatcagcataagtgcccaataattgctgaagttcctgaggtagctgttgcaccagagtttgatctttgtcaggaagagtctcaatagcacagacttctattgctgcacattgaacatcaggagcccccatg

SEQ ID NO: 143119 - DNA, 623 bp, Zea Mays
gagagtccttccctagtgatctcatctatcctctaaagaataggttttcatgctttgtctaactctataagatcttctcattaggcctggtccacactagctctacgttcaacatctctaggtgtgtgtttgagcagactaagatgcagatccatgaagtctatcaatgctcccatttgttgaagaggtcggtggtcacatatggagttatgtaccgaggcctagagtagagctgccaaagagattttggctacttgacgtctaaagaatgaaaaaatgatgaaaaaattctatgcatggccccacccccatgaacactttgtacacgcatgcaaaggttgagatggcaagaacatcattggatgtgagatgcccaacctggaggtcatagtagtcaagtatttgaagaattaagtgtaaaagagggaagtttagacccactatttcttgataataaaatatgttatactcttctaactcctcatgaggggtacatgatagagctatcaccgagcaaacattattggaaggtgtgtgacctagcctatgaggtttcacaccttgtctaagccctcctggtttagcactctcccttgtggcacctaattaagggtgaagattac

SEQ ID NO: 143120 - DNA, 330 bp, Zea Mays
gtcgtagccactgcaaggagcatgctcaaggccaaaggtttgcccggctggttctggggtgaagctgtaagtaccgctgtttatgtgttgaacagatgcccgacgaagagcgtggacggcatgacgccattcgaagcatggcatgggaagaagccagcagtgaagcacctcaagaccttcggatgtcttgtgtatgttcgaaacacaacaccgcatctgaagaagctcgaggatcgcgggaggaaaatggtgttcatcggctacgaacacggctccaaggcgtacagggcatacgaccccgtcacgaagcgtgtccatgtgacgcgcgac

SEQ ID NO: 143121 - DNA, 513 bp, Zea Mays
tagagttgtgggtaacccaactcaaacttgtacatgtttgtgagtggttcactatgccgaagaggcgaaaaaccagctcatagagagcacttgtccttgcgcgtaacaaggggaagcgacacccttacatggtttctccaataaaggctagtggagagtgatgattcttcgatatctcaacaaagatcaagttgttcataatcccttctttactttaagcatttaaatttgaacagttcttttcaagcttttgtattattgaaattgccatgctagtataggattgggacttagggtgcaaaactcttcattataccattagtcacaaggggtaaagttgggattgattataggttttaatttgtgcaacaaaatgtggagaatcccaatttatccctccccctcttgggcaccttggtacttttaattagtatcagagccttgtgctctttaatttgggttcaccacatagagttaagatgtccggtggggatggacctactcccatctttg

SEQ ID NO: 143122 - DNA, 729 bp, Zea Mays
caactcataagtgcacttgaatgatttttttgttgttcttccattcgctaatttagtattccagttctggttgcagttagctgatgtttgtatgtggtcagcttcatgagaaatttatatgcttgtaattcaatccatgtactgtgtcgatatgattggatattaagaacatatatacatgggtgacgttttcttattctcggacggttttgagagtgggacactttttatcaagtggagacagatgattgccatttgcaagaaaaaaaaacagactatatgatggtgcataaatgtatagatagccagagtccttaagtgggcagtgcacagcacaggctgatgtgctcaatcagaggcccccaattgctactgcagcttatggaaactgacactgaaaggtaagatggaattagtggcctttgcaggttgacatcacacagatctctgaattccaaatctcttcgatcccaaaaatgacctgtcggtttgatttgcatggtagagaaaagaagcattgcagaatttgcagtccctgcctgtcggcctgtgagctttgacagtgaattaagggcccaaacagacaaactaataatggactattttttagttcaatttcaactagttgttagttcaccgattgacaaaggtgaactaaatcagactcaaatttcagtacacagaattgtccaaaacggctgcaaccagattaccataactcaagtggct

SEQ ID NO: 143123 - DNA, 559 bp, Zea Mays
cttttcctttgagggtttcagttcattggcaatctgtcttgacttcaccatttgagacatccatggctttagcaattttctttgcagtctcatttgctttcgatgactctaggtcttttgtccttggcttcacatcctttttagtggcattgaaaggtttgagcgacaaccacgagtgggcaccaactattgttctagaccaaagccttcgtgcatagggagtcgctgaacttctaaaaccatggctaaatgtaggaagaatcgtgaagcaaatatgatatgaaaggggaatagaaaagcttgttgagagaacaatgggaatcaccattcatcctcctccttgagactattgattagggcattatgtgtaggcctcctcttacatcgcaaaagtatgtcatgcccccatcctaccctaaatcttgagtaaatttctctgtcctaggggcatgcttgtgagatcagtacaacggcccaaaaagcattcaatcaccctaggacatgggggccatagggacctggttcgctgatgctaccataagtcagcttcacttgggtg

SEQ ID NO: 143124 - DNA, 353 bp, Zea Mays
ggagcaagctggcaggtgggtccctatcggtgctccttcctttgatcgtatgcctggcagcctgggtgaaaccacgttttttcttcaaccttgagaacgtgtgcggtgcaacacggggaggacagggatcgttgatcggtgtggagactcgccggcggcatgactgcctcggcatacaacagcagttcgccggacaggaggcggcgcaccggcactgggagtggcaccggcaagcaggtcgtgcccgcacgcagcatgcgaccatggaggagggagaaagagctaatgtcgcgcgggggtcttcatgacgctatctaggggcaaggctgctgtagccgtcgtgagccatgcct

SEQ ID NO: 143125 - DNA, 321 bp, Zea Mays
aaaagatcgaatgaccagggctgtgccagctgacatccaaagagtcatcgcacatacatatcaaacccaacaatacaaccagcatctatttcaaaacggacacccctattacccccagtagaaaaaccccaaccttttttccacatcaacaacgccttcaacaccaagaaatcctagctctaccacctccaccacctcagcatccaaatcatcccctaccacccccaccactacctgagcaagaatacttcaccgaccaacccttcaggggagtaatccacatgatctccggagggtccagctccgagttcgaaactaaac

SEQ ID NO: 143126 - DNA, 406 bp, Zea Mays
atttggttgatcacgagttgttagcaaaaaagcatgagatgcgtaccataaagatcaagaagccaactgggaaggattacaagaatgtccctaaatattatgtgcctagcagacctctactcacttgggatgtactcaaaaaggtcccaactagtataaaaaaggttacacgactggtatataagagcatttgttgttggcatcaacacgatcaatgtttgtataccagtagatgcttttgctattggcaattaacatgcaattgttatgttcgaggacatgtggctgatgatgaaccttaagagactcgacgtccagcttctaatgttgcttgtattgtaagtgtcactcatttttacacatgcatgtgttattattaatgagttgtattaattttaaatatctg

SEQ ID NO: 143127 - DNA, 468 bp, Zea Mays
gtgggatcacatacttcaagcgcacctcaagcggggagacgaagatgagtctgacccatgcgcccctcttcctcaccgacccatcgaagaacaccgtccagtactcctgatccatggctaccagcgacatctgtgttttggtccactcagcaatgacatcagcgagtacctaggatttgatggtagttcgagggtgtataatatcccttgatccatgagctcaagtgccacttagtgatcctttcgatggcgtcctggttctagatgacctcgttaggcaagaaggacgtcaccaccgtcgttggatgtgatttgagtagtggcacattttccttttgtgatcaggaccacatatagtagcttttggatcaatggataatgtgtcttggagtccgacaagaccgtaccttgagggtgtcgccctcctcctgcctctcagcgacaagagtcgtgctgaccacttgcgag

SEQ ID NO: 143128 - DNA, 597 bp, Zea Mays
gctgacattgatcccaatgggtgtgctccgcctgctgctgaccccgctgaggatgctgttcgtgctgttactgtggaagatgaggaggaagaaaatgacactccattaactcggaaaaacagtcggcagttcgttgctagcggtgggagtagtggagtcccttctcctgctttgtctgcccttattggtctgcaagagctgtctatggccaattttgatcaagctctagaggatatggtcccagaagagttgctatcagagcctgtggatgttgatgcaacagaaacttgtactgccgtgccagatgctgggctgaggtcatcccgtgcctcgtcaaccttagagcatgatctcgagggtcgggatgctgacttggaccgtcctgatcccatggaagtagctgaaggcccgtcaaccttagaggtggtcacgacagagagcttggatcccttgaataatgttggcacgtgcccagcccccgaggatgtcgccggggaggactcagctcgggtgaggagtgtaggccactgcccagcccccgagggtattgccggggatgatccggctcaagtgggcagtgccaactttgacccagcc

SEQ ID NO: 143129 - DNA, 618 bp, Zea Mays
gcgcgtttttaattgtaattaagttaaatttaattgtatttgtcaataatcataataattgcttagatgagtgataggagttgattcagtagatattttatatgtaaaatgatataaaatgtttttttctgcataaagacggagaggaactttaaaggcaattttgctaggtgttgcttcagctgaggcacgtcatttttgtaggacatatatgatctataatcatattggtacacataaagatgtgacaaatatggaggtacccgcatgacggacatgaggtgttacttgttaaaacaacatgttttgtatctataacgtacgaattaatgatttttaaagaagggtgtacgggttatccattccgttcatctataatacccgtctataatacctgtaagaaatttaactgaaatggttattatttgaactattgaagcattgcacaacttcaaaatttatgaacggaagaaaacatattacctttctatgtaacatatgacgaatataaccggaagcatatatgaaaggttgagatgaagcaagtttagtaaatcaaggaggaaaaacagttaactgataagtatagaatcaattatggtggctttataatatgaa

SEQ ID NO: 143130 - DNA, 275 bp, Zea Mays
agctttcctaaaagagcccagcataaggccgctacttcgagtagaaacattgatttcagcgttttattaagactctgaagctatccccgaacatatggtccgcatgatggattgaagccagtggtcatctgaaaaatgctccagactgaatgagctaaacgacactcaaggaagagatagttaataatctcctcaatatggcaggaagcacaatttaaacttccttgtcagctatatttagccaaattgtctttagtgaggagaacgtccttccg

SEQ ID NO: 143131 - DNA, 516 bp, Zea Mays
gtggggccctatagcgaagaaccgacgggctcgccggtgctttctgcaaccgtgagctatgcgccaccgcctgggttttgtctgagggtagaagaacgtttgtggaccgtggatccatacgtggtcggccaagattagagtagagaaaatcgtttgtgcgccgtcgatcccgtgttggacggccatgatcgtgtgtagcgtaccccttcgtcaaataaatctgagccgtaggatggtagttcgatgaccgagattagatcccatcctcatgaaaccctagccgcaggattttaatcggatgccccacgttgggtaccggttcggagtgaatcgggtctattccgcatcgtccatttgcgattgtgcggcccagatttgatcataccccttcgtgggtatgttttactaaagagcccctgtagttttacggaattaacccgccgtccaactcggggatttctgagtctgcgtaaatctttcaagttagcccctagtctcttaaggaatggtgtcccc

SEQ ID NO: 143132 - DNA, 492 bp, Zea Mays
gctcgccggggaaccgtcgtcgcacagccttgcgccacgtatctgagtacctccaccgcatcgccgtgcttcgttttagcttcccgtcgatcaccagagtagtcgccacgacggttgccacgagttcacttgcaccagtaaccttttccctctccggccgccaccgcgccatcatcaattcaagcgccaccgcccctggaatctataaattgagcccaccgttagctccgcaacctcatcacgcaccacaccgtctagtatcgctcccaatcttgcaaccgtgagctccaatttctggttttccccaaatctgttctgaaacgccgcagggtcgagctcaccgtggccagtcctccacaggtttaatcataccatccttgttcttgttttagcatctctgtgtgctggtgatgctcaccaactcgcccaattgagctaggatcccatgaatcaccgggaacgtgtagattgttagttcatccgcgcgctcac

SEQ ID NO: 143133 - DNA, 686 bp, Zea Mays
cgtcggtccagggaccccccgggtcgaaatgccgacaagcgcagacaaaggtttaactcggaatcatggattctctgcttcggtaaacattcgggtcgctgttaggaggcgtttggttagattaaatataacgtgatccaattacgtccgtaaagcgatatccatagaactgtttggttagatatagtctataatgaatacccggtaatcaaaaaccttcttcattcaattcccccgtaattcgataccactcgctcggcgacgttatcctctcccacggctcccccacgtccatctcctcgcgtcgcctcccttcgtgccgccatctcccctcgcgtcggctgccgcctctcaccggtgactatcatcctctccctccctctccctctctagctctatcctttctctgaaaccctaacctcccgtgaggcaggctccacggcacgtagtggcctcctcgtcgtactcgtggtcctcgagcctaccgtcgacgagccccgccaccgttgtgatggtcgacgaaccctaacatctcatccatgagcctatcgtcgatgatacacgtcctagatcacatcaaagaacttgcccccgtactgtaccagtgagcctcctttctctccctccctgtccctctcatccagctcttctaaggtggtgttcccatgaggcaggctccacggcgg

SEQ ID NO: 143134 - DNA, 480 bp, Zea Mays
ccacaacaagtggctgggcttccgcgtcctaaacgccgccgccgaggcggccgcgtacacggcggacacgttcatcaacgcgagcaagtgggtccctgagcctatctagtacgaccgcaccctcagcgcagtgccgccgccgcgcgcctgacattgctccgctcggcgcgcttaatttagtactgtactacgaaggctggtatttcgtttcgagatcccaccacctttggcattgtatgtctctagtatccatccatgcatcattgtatgaattaaggcatattatggcatgcatgacgtcgtatatatcgtgtatgcatgcatgtacctggacctctacctctatctaccatttctctaccgttattgtatgtactctctctgtataaatggattatatctatcattatttcatatgagctaatacacacaagtaattgttgatataagctctacacaagttggtaatagtactgctat

SEQ ID NO: 143135 - DNA, 343 bp, Zea Mays
aatttctgtaacgctaatagacaatgttgaaggggtctcaccaatctgcttcggtaactcagatggtttcctgccagcgcgatcaagcttcgatgatttccgtttctttggagtgggggattttggccctgattgcgaagattcaccctcatcagctcacatttgttttttcgaagccattttcttccttttatcctccttcactgatctctttgcctgcgtttcaagatacttacaactctcttcctttttatgccagtcgcttcttctttagaaaacttcttatagtctggaaaatcaagtcttagcgcatacatgactcgattcaacctttgcttttctt

SEQ ID NO: 143136 - DNA, 486 bp, Zea Mays
agtttacaaagctcaaaacgaagatgtccggagcgaaaaatcatggtgttgccctggaacagtcaggctaacacaaaggcaaggttgcatacagtttggatgagtgctgagaatgtgcctgacgagttaagaaactaccaggctatctgtgagttgggatctgtgttgggagtacttgaggaagttgatttagaatctctagaactgtcaaaatcggtcaagtttaaggttcatgttaacaacattaacatgattccaaaaactgtggaagtgggagtcaagcattttccgtttgatgtatttttaaagtagattaaattttggaagaggggtggaataatgagaatttgaacctcggtaagagagtgaagtgcaatacatatggatctgaaggttctatgtctaattcaaaaaggaaaagtcagaaaggaggagtctattgatggcaaggagaagaaagggttgaaacttctgctcgtaaaggtc

SEQ ID NO: 143137 - DNA, 403 bp, Zea Mays
tcccccacttatcaggaggtggctgaggcaggggctttgctagctgaagtttgactgttgaaggacaggggtctgactgcagaggttgtggttgttgattttgtcttcaagaacattcagccattgaaggacatggcatacccggcttatctgtacctaggtctagctgattcaactcgggttaccaacagaagaattcccgctgtagatttggtgaaccgacttgagatgattcttagaggcaaggtatcaaatgttggtgccccagtggcatactcagcctggaacctgcccccttccaaggccttcactctttttgtgtcgaatacacctgtcgctgatggcgggttgggccttagaatgtgaccctctgctgaagaagttagcgctttggttgcctcgc

SEQ ID NO: 143138 - DNA, 555 bp, Zea Mays
gccgacgctggtagtggtgaccccacatgacatcaactatatcatgtaataaaagcacacatgattttcgccatgcctttcagctaggaaagcatacccatttacctttctctagttcctccagtcgagcttccaaaccatttgagttggctcattgtgatttgtggacatctcctgttgttagcatgtatggtcacaaatactacttggttatttgatgatttttctcattaattatggacctttgctccgcgtttgaaatccgacacattcactactttgtcccagtttttctcatgtgtttccactcaattcggttactccatccaggccatccggtgcgaccatggcacgagtttggtaatacttacactcggacctttatccgctctcatggcactttactctggatgtcgtgcccctacacctcttcacagaatggtaaagccgagtatattattccttttactattaatgtcattccctctctgcttttccatgcttctgctccaacatgctaatgggttgaaggtctctacaccgtgacatacctgt

SEQ ID NO: 143139 - DNA, 359 bp, Zea Mays
aacaacttatataatcatatatgagtctatctacttctgtctctattcgcgcgtcgactcttgcggagtttggtcgcccgaattatcctccatgtatctcagcatcccgtggaccatatccacgctataagaacccaatggatctatctcccacacctcctccctccacacttcctctctatcgtgcccccttcctagccgacgcaaattcctccccaaccaaaaccctagccaccaccatatagagctcttcgacggtgcttcatattgatttgacgccaaacatcgtctacccgacacctagatcctaatccccaacttgtttcacccgattcgacagatgttgcgatgaatttctc

SEQ ID NO: 143140 - DNA, 509 bp, Zea Mays
atagggggcgagggctctggtggttgccactagtatctgtcgatcgttgagcttctgttgccttttgttttcttgcgacccgtgtcccccaaagatgacgtcgacctctccgttgacgcgtggaaattctccacctcctccctcttcctactgctgaggtcgtcgaggttcaccgggccctcctcatggtgggggaggtggtagaggttggaagggtcggccattcccgacggaatgcttgaagtctctgcaattcctcaaggtgtggcgcatatccttgtgatacgggcattgggcatcgaggatgtcgtctagtgttcgctcgcctccgctgggtacacctcgggcacgagagacgagtggtgcagcggcatggacctcttcacgaggcctcttctcccagcgcttgtcggtctgctgatttgcgtcacgccgcggtgcagacggagtaggcttcgctcccctgatgaggtcctaagccctttcgtcggtggtgatgtagaggtccg

SEQ ID NO: 143141 - DNA, 857 bp, Zea Mays
tccctctcctaaaccctatttccccactcgcgccggtaaagggaaaggtcagagaaagaagagcctgccggcgccaccgtggattgggtcctcggcgggatctccgaccgcggtgagtcaagccatagctcctggagactccgtcgtacgcgtaggaattttcgtggggcgcgtggccaattgtggcgcgcgaatttccgccacggtgctcgccatcaccgccgcgatttcttgacgccgtggccagccacctccctgccttcctagccggtaagccttctttcgctagcttcgccatttctcttttatggtagcagtccacgtcgcacccgaaatagagtcgctgggtcttctgaattgctcaccggagcttcgtgtcaaccttatgtcgtggctggcattgttcggtcaccaccgtcgtgtagccgtagcccgtagtaatcaccggtgtgggccttaatgaatgacttcagatgatcgccagaccacgtaggtggcgtatgcgagcttgaatcgtgcgttggggggattcggccatggcgccgccgtgggtttgggcgtcgtctgggtctgatcggtagggggggtgaggaagagattggtgtgatcgtcgatataggcgtggacggctgatcggctcgcagtcccgatggggcagtggttcatcgcaaccgttggtaatgagaccaacagtccggatcctatcatggcataccccttcgccatgttcagtcagggtcgtcaatctggatctagcggatgaggttaaatctaaggcaataatatccccatcgttgaatcccgatctagcggttctggtcacatgcttattcctccgcggtaggatgtaatcgtgg

SEQ ID NO: 143142 - DNA, 708 bp, Zea Mays
gtacaggaatgggaaatgacacaatagactaatcatggggtatgggggtcggtggaaatggagggtatgagcgaaccctccatcgtgtcaggccacaccggaacatgcacctccactaagaacgacagtgtgctgccaactccagtagggaccccatcagaaccaaggacatactacgacacgaaccactgcacccgcacgcacgcgtatggggtcgccttgactaggacgagtcgaaaagcatgaaactacaatactaacaaacgacggggaaagaaggcgtcactagtcgacataggacgttcctacttcctatccttcctttttttatttttcttcgtggtactccatcgggaagggaacaattgtaactagccctaccattaaggtataaaagggaggagtggggaccgacaaaaaggacatcgagaacacacactacacgcacaacgaaccagagacttgggaactctttcttcactcgttcaacttgtaacccctaatacgagcaatctagtgccggtagcacaagccacagaagactagagtggcttgtgtccaacttgcacaccatccgagtcccaaaacgcacatcacaagtttactagccggtgcttactcgaaacaccgacagtatgaaaacataatgatcaaatgatgaaagaaacccaaaatgcaatgtacaaattaactattccacccaaagtg

SEQ ID NO: 143143 - DNA, 568 bp, Zea Mays
ctgatcaatgtaaatttctgcatacttctctgtcctgtgtgtggtgtgcactggcaagaagtgagcagtcttggtcaacctgtccacaataacccaaatggaatcatggtgcctggaggtattgggcaatcctacgataaaatccatgcaaatgtcctcccatttccaagatggtatgggaaggggttgcaaagggcctgctgccttcaagtgactagcttttattctctggcaagtgtcacactcggatatgtacttggcaatttccctcttcattctggtccaccaatataaagatctgagatcatggtacatcttgttgctaccagggtgcatggagaatttggaaaggtgagcttcatccagtatcttctttctaagctcagggtccttgggaacaaccaatcgatctccaaaccataaaattcccctactgtcatatcggaaacacttgtatttttctgccttttgcttgatcatgtctttgataacctgaacacccttatcctcaatctgtgccctcactatttgctcttgcaatgtgggttccaccgagatataacttaag

SEQ ID NO: 143144 - DNA, 381 bp, Zea Mays
aaaacagaaggctggcgcttgggctcaatctggctaattcggcccactaccattttcccctccgtgcacacacggccaagtccatcccgcggcgccgatgagttggccaaccaggtcagtcgtgcacgtgccgtgctcactggagagcgggccccacgagtcagtctcagtcacgccgcgttcacaatttctctgccgctggcggatgggcccgggtgcgtagcgccatccccaacagaaggccaagcatggcgggcacgtcgccggcgcaaatctcgtgcccacgttgcgattgaccgcgcgaggttaagtatcgggtcctggggccatctcgcgcaccttccttgaacctctcgcccccacaatccttcgccatcaacc

SEQ ID NO: 143145 - DNA, 486 bp, Zea Mays
tacgagacgcgcagttcactgctcctggcggaaatggtggctgaagatgaacgacatgccgagcctggggttacccttatccgtcttctgatccaaacacgtcgtaggcgaggtgagctctctcctctcggttcactctccttttcttcttgcttccgccgagcgacgcggccagatcccatggcggcggctgggactactgctccctatgattcgctagcagcttgcatgctttgtgatctacatatggcactggcgtctacttttatatgcagtaggggtaggtaataatgacttttaactgcacgaccgcatgcagctcattcatgagcttatccatccaatagataagtgtcatccatgcatgatttggtttatcttatctggtgtttagttaaaaacgacgcatcccaaggcgagaacaaggatacttattttattagcttggatattacgttagacacaaaatactcaccaatctaatga

SEQ ID NO: 143146 - DNA, 386 bp, Zea Mays
tgcaggattcaggggtgccgggatggtgaaaacactgattcatattgtaaacaattcctggattatgcgaaagaatgtagggaaatggaacgaagaaggagagggggaaacgaaccagagcggagaacggcggagggcaaacgatgaagcacgatgattagggtgagtgggggcggtcgtcgatggcgatcgtaggagcgggttacagcgacggcgaggcgcggattttattagggtttcggtggggccacgatgagtgggttgattgtggtcgggtgggtctcggacattgaccatattggctcggtcggctagcggggagcgacgcgggactgcggggacctgtagtgtgcgcacgatcagttggtcagcgtgtgtacgttgtg

SEQ ID NO: 143147 - DNA, 293 bp, Zea Mays
cccacttaaaagaattatgacttgggagcatttgaggtggcagagaaggtctgatcttggggtttgggtgaccagagggacttctaatggtgtagtggggatgccatgcttttccacaaaactagtagcgatgaaagaatgagatgctctagaatcaaaacatacagcaacaggggtaaattcaactaggaactcaccgattactactccaggggcttgctgagtttctttggcgtcgacatggttcactcgagccctgtcgttgaactgagtcttgcttaattggctgctgg

SEQ ID NO: 143148 - DNA, 332 bp, Zea Mays
cagcaacagatggagcacccacattgggatcagcagtagatcgggcacacccattgggatcagcgtcaataaattcagtcataggcacttcttcagcagcaggaaccgaagtaccaacatcccgatccaaactggatactcgccggaggcgtctctttttctttttctgctcatcagcagaaggatcaggttgattagctcggcaagggcgcctcgggcgagtactggcaggcttctgaatatccaaggtcgtatcagcctctgggaggggcgccaccaccgatgtcccagcaggagcagcatcagaagagtcctcagccagcaaatcaagc

SEQ ID NO: 143149 - DNA, 457 bp, Zea Mays
attacttgagctgtctggagaaaagtacaattacctagggctgtctgactaggtgctactgtggtaggcatagcctgaacacctccctagcaccaattgctttatgaaacatttacttaactactgtttttctgagaatgaggtcaaaatggaaagtacaactaatagttaataatttgtaaatgagtagtactgctatacagcggaatcacacctatgcggcgccatggtttttctctagcctaactcctgtttgaacactgttgaggacatgggaccagaaaaaaaatcagaacagaactacagaagcactggagccggaagtcatataggagcgatgttaggcagctctccctttgtttgtaaatgtacgatgatactgtagaaagtgtgcagtgaagcctcctaacttcgaccactcatttcaggaaatcatttgaatcgatcacatgaagac

SEQ ID NO: 143150 - DNA, 291 bp, Zea Mays
cgacatgccttgtccacagctcattgtcttcgatgttgtaggctgtgatgccgtcttggccaccaagatgttgtagcacctgcaggctgtagctgctgcgatgcgtggatacccactcctgacggttctggcgattgaagagcacggccaacgcgtatatcgccacagcgtcgctgcctagataggccagccagattgtcaacctgaaccaggcagggatactgcgtttacgcaagccggctgcgaaaaagaggaagatctggatgaagagacagcacaaggacgcgcagc

SEQ ID NO: 143151 - DNA, 638 bp, Zea Mays
gcgtgcgtggattgcagttgcagcatgcggcccatctagtgcggtgtaacgagctcagcaggccgtgcctctgccatggcccatgggccaggggtgcgtgcacatcccgatcgtccctcccgcgtctgctgaccgctacatgctactgtatcgactctatcttgttgtagcaggtcggcattggattcggatagacacatgcacctgcctgcctgctacgcatagatccgcccgtccgggtccgggcctcacaccgttacactgaacgtgcacagtctgacacacaggcacgcgcacaacacaaacagagcatgcgcatgcgtcgccaggtgacgtggggcgcaggcatcggaccctttcgttacatgctttcaagacggaattattgttagcacaaattatacagcagaccacagacaagaacaagatggtccattccactcgcatcgatggatgctacacacaaaccaccagagcgacgaggaatcgcggtcgcaggccggcgatcgcatcgtcacggtccaggtcgccgtcgccggggatatagggcacgggtggcagcggcagacacgatgcaaaaggaaaccccacatggccacatcgcaccgcccagccggaggagcgacggtcgctcagct

SEQ ID NO: 143152 - DNA, 386 bp, Zea Mays
tcggggttgcgcattgatggcgctgcggcaccgtgtccggtcgtcgcggggcggagctctccttccgccgccctgtcatgcggtcgggagcaggaagacgcatggagtccattgatctggtgatcagcggtggctatagaatgatgaagtggatgagcccctaaccgttgatcccaagtgtgtggccacgattagatatcaggttatgctgtgtcgtttcttaaatcaggaccgtagattagtgatcgagcggtcaggagtgaaagcgggatttacactcggactgatctaatcctatgcgttggctgtcgatccaacggctccgtttaacccataccccttcggccgcgtgttttcacaaaagagcccctgtgcttcataaaatt

SEQ ID NO: 143153 - DNA, 544 bp, Zea Mays
tcagtttagagttaaaatgaattttctatgaattaaacaagtttttagtattattttaacaaaaaatcatttttgttattcaatctattaaattcaaggtctgtattgcactgcgggtatgattttccagtggtacaggggtcatattataaagttccagggcaccgttgtaattagtttgcacaggatgtggatggcggctataatataccagagtctagggtctcctttgcatgattacttgcgggtgacggaatagggttacttggcgcccaaccactagatcaacgcgaactgctagaccagtgatctacggttgggattcaatggtgtgaaggggtacctatggcatctaatcagagcctcccgaacggagatctaaggtccaacgatcgtcgtcaacctacagtgtgctcgacggtggcacaatctctcctcacggcggagcaaccatcggtgtgatcgattcctggcccctggtgccccacagctcgatctaaacctcgctacttgatgtggtgcacacccccaacacataccccgc

SEQ ID NO: 143154 - DNA, 377 bp, Zea Mays
taaatttatgacgtttttaaaccatttgtcacaaaggttgctttaacacggagcttctgtgacgatagcagttttgtcataaagacgtcacaaccgagcaaactatgacaaaaaaccactgtttgtgacgtaatacaaatgtcatagaaggtaacatgtgttgtagtgtactaacgctattttgcgcctccaaactgtcgaagcacttccccacacctccatctatttcaaaaattcaaaagattaaagaaattagtgctctaacgctattttgtgtaatacattattgacaaattactatagatcactaaaaacttgggtattcaatgaatacccatgaaacccctataggcccgactctgtctgtcaccatacta

SEQ ID NO: 143155 - DNA, 689 bp, Zea Mays
aacacattagcaccccattgtggtttcttacaaactaaagccacaaccaacaaattcctaagttcttcaccatctaatcatgagagtgagacccaatcttattttaaccataatacatccatcgacgatcctcactcataatgtaaaggatagagagcatgtgttaccttatcagcagaaggttgaagatggcccaacaacaacgcaccggtgcagatcaggcggtggcaaggtcgataacagcgcacatacgctagtgtcctatgggaaggcgtgctatggcggggtagccacgatagtggtggtgtgcggcgggtgtggagtgcaataatagattgggcgtggggagggcaattcaaggctgcacagcgtgacatgatatggtgtgacgatgagagggtgtgcagccgcggggggcatgggacagcagcgtagtcacgatgtgcagtgtgagaagagaagcatgtggcgatgagatatgcgagcaaggcgggcgcggctcatcgaggcttgtggctgggctagttgggtttattccactaactttcgtcggctactgacacaacccatggaagttatttgtggctttcatggttttgtcagtaggtaacaaaaataattaattttcatcagtaatcgacacggtcgacaaaaattatgaataactttcatcggttgaacgacaaccg

SEQ ID NO: 143156 - DNA, 819 bp, Zea Mays
cgtcactcagctgccatccacgccgacatgtgggtccccttcgctgggcaaggttgactcgcgcgcgcatcgcgtctctccttgctgacgagtggtcccgcttctaccagcctcgcactcacccacctcgccgcctatggcggatcgccgccgggaaaatcgggctgtgccccgccaattcgctcggtcgttgccctcgacgctttgtgctataaagtgtagctcatccgaccaagtcctccccttctctcgcccactcgcgcccacgtcggttagccccaccacaaaccactgccacgtccgcccgaaaagtagtccgctgccggtgaaactcctctgcgccggtgttcctccctctgcacgtggtcgtgtgtgtgcgccaacatcagggtgatccgtccgtgccttcgggacaagctgggcgaccccagattgggggggatttctcgccggagtggattttgccgctgggatcgtgcctcactgtggtcaccacccaccaaatctcgattcacggtatgatgcacctcgcttggtccgccttgcctccaccaatgtgcagcatcatttcctttcgagtttagggcgcttatactaggttttggctcggctccggcgatgctccgccacgaccagacgggcgacgccgcctgcatcgaccgtgggtggccgtgctatgctgggacgttgatattgcgatctgcggttgagattagaacgtagatactgattcgcgggtggcggtttcgggtcgtctgattgggttcagatggcggtcactcgctctgggattcattaaatcaggagcgtcggatctag

SEQ ID NO: 143157 - DNA, 416 bp, Zea Mays
ggcaagggtaattacgtgcacatctgtggactatggggttttaactgtaaggccatagtcgctttactctcaatccatgtggattggagtagtggatttaaattcatagcaagtcaaaatctctctttatccatcctaatcctgcacaatgcacatggcatgggaataactgaacaaggcctaaaaggttttccatgcagtttttctgttctaaattgcaagtaaaattggaaaccagatctacccagtcaatgatcggctgatcgtccgtgttcctttatcttgtttgaacttggtagttctcgagatacagatatccgtgcaacagctcacagctgctctcaacctagagaaattcacaacagcacagagcaatttcagccagtggcttctatgaggctttaagttcttgttgg

SEQ ID NO: 143158 - DNA, 307 bp, Zea Mays
caaactgatagattttgccctagtgtaaaggttcaaataagggggatagagttccccaccgatttgatagttatgggtaaccaggatacaactatagatgtcatcctagggatgaattggctaaccaagtatcaagccagtcttagttgtgataagagaacggtgaagttagtatccctatcaggagaaaaagtgttagtagagttggtcttgtcaggaccaaggaaagggagttgtcaccaagtcaccgcttgtattgaggagattaaaccattagaggctatcactgtagtatcagatttcccag

SEQ ID NO: 143159 - DNA, 370 bp, Zea Mays
ggagagggcgcgagaggtggttgtcaatttcacggcggctcttgtcctggccgagtgagagagacagctgcgcggtgagttgcatgagacaaggttagacagagttagatgggtggtagacagggttagataaaattagacgaagacggtcagagctggcccgtgggcccaagatgacgaggtcgacgccgaagggaaagacgaggatagacgaggatcgccgacgcgagcagcatgtcgttcgcgggaagacgcggttcagtaatctcgcgaaaaggggcacgagatctggaatatgttcgacgagaggaagaaatatatatattatcgagttccaaaaattttatagttttcacaactaccatatttt

SEQ ID NO: 143160 - DNA, 673 bp, Zea Mays
cgagacttttagtcccgttgtgaagcccgccaccatctgcaccgtcctcagcttggcacttcatcaggactggccgattcatcagttggatgtcaacaatgcgttcctccatggtatcctgactgagacagtctattgcacccaaccagctggttttattgaccctcaacatccagatcacgtatgttgcctcaacaaatcactctacggattgaagcaggctcctcgagcatggtacagttgttttgcgtctcacatccggtctctggggttcattgaggccaagacagatacttcgctcttcatctaccggcatggtactgccagtgcctatttgcttctctacgtagatgacatcatcctgacggcctccacatcagctctgcttcgccagatcatcagttcactacagcagtcctttccgatgaaagaccttggtccactttagcattttctggggattaccgtgactcgttccgccaccggcatgttgctctctcagcgccagtacacgcttgagatattggggcgcgccagcatgactggctgcaagacctgtgccaccccagcagatactcaatccaagctgtcttcttctggtgaacccgtgtctgaccctaccctctaccgcagtctggttggcgcccttcaatacttgactttcactcgtcct

SEQ ID NO: 143161 - DNA, 489 bp, Zea Mays
tttgattataagatagatttcaatatctacattttaatatatggtatgtgggtcatatatccactttaattttaatttttttatggggagggcccacattaatttcagatttaatttttgtagggacggtccatcacaatagcttgccactaggccctcacgtgtcatacagctattgcactataccatcaaatatgattggtgtaccatcacaacgtactgacattgtactagtacaacacacttgagcagattcaaggactggcatatgaaggaataaaccgctggtaggaccaccattggtgtgtttgtacaacaacaatacttcaacgacgatgaagtgacatgtcttgattttgtggatatatttgagataaactagcgaaatgcgctaggcctctctcttatcagcacatgtgttctttaagtttttaccttctctcttgtccactactaaataatatatattcaatgccaactgaagttttc

SEQ ID NO: 143162 - DNA, 462 bp, Zea Mays
cgagttatctctctgtttaatctgaagttgtggtggagatacagttcatcttggagggtctttgattctttgactgggagaacaggaagagatcatcaaagaagacagatctctttagtagtcatgtatactgacaattttcatgtgtagcaaaatctaactattggtcaacccatgctacaatacatggaactactcattttttagggatataggtagaggtcttaaactgaactgctcgtcatagaggaaggataacagttcatgtaagatatgctacccaaattgatgctgtgttagtataaaaaagtgggatggcagaaagatggtaccacacagtaagattcagggacttgggggaaaaaagggccacttgtgctgaaagaagttcacatttgccaaggtcaaattgtgaagcaaaggaccctattcttgacttttcaaataataatttccgctttg

SEQ ID NO: 143163 - DNA, 385 bp, Zea Mays
ccttcataggtgaaactttcagatacacaaaatcgccaacttggaaatacaagggtcgtcttctcttatctgcataacgttttgatgatgttgtgcaatcttcaaatgttgttggataagtttcactttctcttccgcctcctttactaaatctggcccaaagaaaaaccgctcaccgggttctgaccagttcagtggagttctgcacagttgaccataaagagcctcaaaaggtgccatcttgatacaatgatactctcttggtaactattgttataggagaattcaagcactcatcccattttccaaaataggctaatacacatgcccttaacatatcttccaagatttgattcacccgtttggtttgcccactggtttgggg

SEQ ID NO: 143164 - DNA, 807 bp, Zea Mays
ttgacatctggtccctagcggagtcgccaaaaagtgtgttggctccatccatcgtcactgcgcgtcatccccctcgacgctcagcctcacggtctttggtttccttgcatcaagccgacaagcagagctccctcctatcgtcatccccacgacccattccaccctgttgcgtcgacaccatgccacgtgccctaatcgcctgatatgtgccatgcgagcgtgtggtctgaaccctcgttagaaaacaaagtaagtgtaaaaagggtgagatatttctttatgttttccaactgtgttaggtgtcattttcatatgcgtgaagtggattggcgaaatttctcttatgcgctcgagtatcgtaaacacgtaggtgaattagagaaaagggtgagtcatgttgtttgatgtgatgagcggaattagaaacaccgctttatgcaaagttgtatatatattggtgaacaggtgtgtgccggagtgtgttatattaatggtcgtgcaaggatttattgaagtgttttgaatgcatgtcgtgatgtggttgtattcgtgacaaggacggtgtgctcgataagaaggttcggtcagtataattattattttggcttgtatagagaggtggtgacatgccaaggaagtcatcgcttcctctatgtttataagttaagtcaatgcacattatgcgtttgttgaattatgcttcacatataatgtatggttgtgttcatgacgtccagtagacgcttcaagtaatcgagtaggttcaaaatgcaagttgtgtgatagagttagtttgttttagggtgc

SEQ ID NO: 143165 - DNA, 465 bp, Zea Mays
ctaacagctcatctatctgcttcttgagttccaccaattctggcccagacactcgataggctcttttagaaatgggggcggtgccagggataagctctatggcaaattcgacttttctctcaggtggcatgcccggtagttcctcgagatacacatctggaaagttcgacacaaccgtgataacctcgagcgggttggcctccttgctatcaatcgaaatctggtgacaatcttctttcgctgttttaggcatccttagctcagccactacctcctctccgggtggggacttcaatgttacggtcctcttgtcacagctaacactcgcttcatacttcattaaccaattcatccctaggatgacatctaccccagggttgtttattactattaggtcactggggaaccctatcccccttatttccacccttacatttgagcatatcttatctgcttgcactttac

SEQ ID NO: 143166 - DNA, 276 bp, Zea Mays
aaacatattaacaacactactcggagggtacaagttggaagccatttggttgactggccatatagaatgggcaaaattgcattggaagaataaatgtttgattgtctcattatggtgacaaaatacacattttagactaccaatccaattccttttgccaagattgtcctttgtgagtataacccctcttcgaaggtaccatgcataaattttaatttttagtggcaccttcaatttctagatttttacaagtgctttgtacatagactccactcg

SEQ ID NO: 143167 - DNA, 542 bp, Zea Mays
ggaatgcatgtatggacggagttacaggcacaggtgatgggttgatcggaccccgtccgacagggatgccgataggaccacaaattcagaatccgcctcctcctgttactccacatggtatggggcctcctcctcctcctcctattattccacatggagtggggaatggtgatggtttgccaaggcgcggggaaggggagtgagatgcgagtggccaaaggggaggactgccgaagtgggagtttccgatgtttgatggagaggacgcaagaatttgggtggacaagtgtgagccatattttgcactgttttttattccagatgcattcagagttagtgcagtatctttacatctgaaagggaaggctgcacactggtttcaggcatatagagattcattgaacttgatggattgggctgagttcagagtggctgtgttggaagagtttgaggtctctactcattcagataagatgcaggagttgctaacattgagacaaactggttcggtgttggagtataaaacccattttgagaaattg

SEQ ID NO: 143168 - DNA, 420 bp, Zea Mays
gtggctgcaagctaaatggttaattgtgtggctgcaagttgaatggttaattggtctttcatataatgcaacaattgtttttatgaactttatctagaattggagttgttccttttgtggattttcagtaggactacacagatgaagcattattggttgatgtcatacttgtaactgattgagtcagattcgagccaaacaacccaatggctgctcctcgaaacaacccagggcgagataggggataaattgagaggtgtgtccgctcaatggctccatttccttactcgcatacctaacattgacttgaataaaactacatccatttccctgctcgctgcaacctgaaaaccacactcctccacatcgacttgaatagcaccctccaaagctcccaacttcagtttgcatccggttcac

SEQ ID NO: 143169 - DNA, 274 bp, Zea Mays
gtccattccttgtgttcaattctagagatcttgtttctattttttctttatcttccatttcatatccagaagttccttcgtaaattgcagcactgtggtgttcatttattcccaatgctatctctctagggcttcttatgtctgcatatagacaacttggttgcataccgttcttatttcagagttaagcacagtctctggtcaaatcaatacacatagcaggcattggttgtttgatatactaacgttaaacagtttttatatccttgtggct

SEQ ID NO: 143170 - DNA, 592 bp, Zea Mays
gcaagtttatgaggtgtggtggaggagaggttgggataacatcgacagctaaagacacagaggtgggtgtagtcgggaggagtaccgtgcaaggcctggtaaggggtggaaaaggagatggttttaatgggtgacggttgaaaagataggtggcgatgtgaagagcctcaacccagaaattaggggggagatgtgtttgaaaagggagggaacgaataatgttgttcacagtccaaaggacacgctcaaccttgccattcttctgttttttgtatggacaggacatgcgaagaatgaggccatgggagagaaataaggcgcgtgaagatgaattgtcaaattcacaaccattgttgcattgcactcttaatggtagtacgaagttgcgtggcaacataggagaaaaaatgagcaatagtggaggtcgtgtcagatttgagacggagaggaaatgtccataggtggtgcgagcaatcatcgagaattgcaagataatacttaaaaccagacatgtgggaaccagggaggtctagagatcacaatgagtaagatcaaaagggcgccgagctcgagattgggaagaggaaaaggg

SEQ ID NO: 143171 - DNA, 522 bp, Zea Mays
ggcgccggtgcaagtgctatagaggcggcatcccaaaggttggcagctggacgcgagtttgttatgcaacttgctacaaattagatgcaagtcactattgaggaaatatgaaatgaaacttgtttgaagttgttatgaataacaaatttgttcaacttatatataggaaagcatgctgctggcctcataggttcgcatagtactaatccttctacctttggtgctcagcttgctgcctttgatacttcacctgttgccgtaatgcttcctgcagcctaccaatctctagtttctgggcaaagatgcaggaacgagacacttgcgaggaagatgatacagaatgtaggcctcgacgtcttaggtccacagagtcaatcgaagaatcaaatatcgccaacctacaagagtgaaccatagactttgtactaggtactgttgcaaatcatatgagcataacttaaaaatcaaaatgaagtgtactcaccgtccaagggcttctgctcctatgctagcatatgtcgc

SEQ ID NO: 143172 - DNA, 627 bp, Zea Mays
gatttttcttttcttgctcagatttttttgattttatgagtaattcgctgtttaatctgtcaatttcggcttgagcttcagtcagcgaaccctccatagagtgaataacgaagtccttcttctctaaggcagctttgtaatctttaactttattttcaagatcttgaatgacgaaatcccttttttccaaagcagctttgtgactttcaactttattttctagatctttgattgtagcttcgtttttctcgtcttcaagatcttgttgcatcctcagcactttacttagcagtatactcgggcaaaacaaccttcgtcacaaaacatcttaattcaaaaaacaataaaaagttgagagttttaccttgaaattagcgtagaacaagctaccggcgatatgctgtcgctggtatctgcagagatccgcctcaatcttcggcaggccaacattcttcgagaaagtcctaacgaccttggcctcggtttgattccgaaggcatcttagtttcccttcattgactccgccaaacagcagagcccctggtttgtacccacaggatacaacatatttctttagctcttctttttcagtttctgataactcttgtcctagtatgtcttgaaaat

SEQ ID NO: 143173 - DNA, 612 bp, Zea Mays
caacatgaaaactggcactaggaaaccacattgtaaatgcgacaatgtgcaattgctggctaagctccagttctttctctccactctgatattggctcctgtacactcatcaagtcgttttctagatatattatgttgttcctctgccattcccaacgacctagcaaaagggaaaattgcagctaaatggaactttcccgttccaaaggtgttctgcgccaggaaacgaggtttgagtttgaccatggaagaaccctatgtagaagtgactaagagtcgtgactcctgaccaaatgtgtccatgataactaatgacattactcagcaccaagagatggagcatttgggcttggttgcagtagcagccgcagggccgcaggcagccacatctgaaatagaaagtggcgaagctgcttgggaacaaatggagctccaactgcaaccagctagtaaggctacaaaacaaagaggctataaaacaaagccgtcccaagtcccaacagtgtgggcatcacatataacaaggggagatttgtaagcttatatggtgtaggttctgcggtttcagtataggaaatgaaggagtataattactgcaaaaatgcaactctg

SEQ ID NO: 143174 - DNA, 977 bp, Zea Mays
cgtgccaccgtcgcctgggccgagtcgttagggcctcctccccaacagaatcgtgggcgttccctgtagatcttctccgcgtcgccatggtcttcgccgcgattctctctaggaagttagtagctagccgtggctttcgcccctatatatagcgccctctgtggggatctcttaataccgaccgcgtgcgcatcctcaacacggctcgaccgcagtcactgctgccgcgggcgttttccggtttaccatctcaacgccgggggggttcctcctttgcgtctccgatccgccggtgggtgcgcggattgcgctcgggggacaatcggggtgttcaaggactcgactaatcatgaattcgtcgccgtagtggagactccgctgcgggatcgcgacatcacgggggcaggagaatcttcggctcacatcgaggtaaatggtataccatcctctccgcttttcgatgggcatcgcgttggggggcgcagattaagctttggggccttgtggtgtggattggcgggcggtccggtggtgggctaccgtgcttggggcgtcgccgccgtctggttgttcggtgagagagagaagacgaaccgtgagccgttagattagagtcgacggcccggattagatgccgcataccgtttcgattagataggattcggaccgttggatctggcgcgtgcggatcagattagatcgggatgccgatttgatcgcgtccacccatgaccgtcgattggcgatccgatggtggggaatcggatctaaacttcattaaaccttggccgttgatcttgaatcgtgcgtatcctgctccgtaccggttcgggggaagcgcagatgtaatctgggccgccggtttctaatcgggcggctgtgggcttctaataccctttcggcctgacacattttcttatgagtccctacagtttgttgatatcaacccgcaatccaccctgtatagtgctttgtgt

SEQ ID NO: 143175 - DNA, 344 bp, Zea Mays
aggccaacgacgtgttgtaggaccacaaccaggtggagatggttgttgccaccaccttcatcggtgtctacgacggcctcaggggtgtcggtcgaggcgtgctgcttcatctgatcatctctaatcacctatgtgtgcatactgtctgtatgtgcctctcttgctactcgctagcttgagagttgaattgtttgggttactggttattttttaaagctgcatccctgcgctgttgcgattgtctacactctaaagtaaccacgagaaatatgtttctttgttaagttgtaccactattttgtgaataagataaaacatcaactgctacacgtggtggattcttg

SEQ ID NO: 143176 - DNA, 837 bp, Zea Mays
ctttcccttgtcttctgggactcgtcacctgacatcgcttcgagttgttagacttgtaaatgaagcgttgggctctgatacatattgatagttgcctagagggggtgaataggcaactcctaaaatttcacaacttaaaacaattctagaatcccaaattaattgttagttcaaaaaactagaacaaataagagtaaggagggggaaaagttcttgcacttgattactctattgaatgcataattaatactagaacaatactacaagtgaatataaagcaagaacttagggatagagaggaaaaacaaattgcagaaaaataaggaacacaagacacaacaatttgtttgaccgaggttcagctctaaagaacttatgtccccgttgtggtgtcttgaaagatagggttgcacccaaccctctcaaatgatctaaaaatcaaacatgaggtcacaattttcacttatattcatctaatacaaggatctccacagatcagagtctcttgctagtaatacacaagttgatgggagcttgaactgcaatagaagcaagagggaggaagaaacacaaaagagcacaatcacaagaccaaaagatcgaagaacgcaagtgcaaaactaaagcagagctttctctctctctctctcttgaatctagacgctttgatcactttggtgtgcttctctaatgcttggaatgaaagtctatgcacttgagtgaattagtgtgtttagggtgctggtttggggatctttttatagcaacaaacccccaaagagccattgaaaaaacatgcacatatctgctctacatctctacatgggcacaccagtc

SEQ ID NO: 143177 - DNA, 495 bp, Zea Mays
aaaaaaacacatatattcggctaattcaatatgagcccattcgtgcagctgaagccgttctcagactttttttgggcacacatacgagctttgtgattgcaggtgacaaaatagcaagggaatataaagccaaaaccaaacatgcatgtgaaatttccgtcagtgtgcacgtatgtatgttgacaacattaattcatcctttgactatgcatcacggcagtcaggcataacttgctcattccccccaacaagttgcagagaaaaaatattgacgatcgatgaatgccactttgtgcgtgctgtgtggcagtgacacctgtttgtcgacaaaactgtggggggtttcaatggtcacaggaggtaggaataggacgtgtcccctgacccctcccctccatctccatgtatacaccaacaaagaaactgggacatcctccatctagtgaaatgcgattttccttgtcagtttctgcaacacatagggaaataccactg

SEQ ID NO: 143178 - DNA, 280 bp, Zea Mays
gtgaatttacggcccagtcaatggtcgtattgcgttctgaaattttgtactgcaggtgattaattttagctcatagctcagcaatgcggcgactatcgcgcgcacgctccctacacacgtggcatagttcagatctgaggcgatccactttggcctccaactccccgatagggtcgttgcttccactactgcttccttcatgccgggatgccagctgatgtcgaggcacaccctgtggtccagtcgatttgcgctgggtagtgaaagggaaattgggtta

SEQ ID NO: 143179 - DNA, 323 bp, Zea Mays
cagtcatccaatttctcctgctgaggggaagaaaaagaaaaagagacggcttcggcgagtgtcatgcttgaatcaggatgtcggcccttctgctcctgctgtcgaggaagtgccagtggagatttttacaggggctgaacccaatgggtgtgacccggctgatgctgaccccaatgggtgtgaccttgatgatgctgatcccaatgggtgcaatccggccagagctgatcccaatgggtgtgctgttcgcattattgacgaggatgaggaagaggaggaggaaatccctttaattcggaaaaacaatcggcgtgatatagtca

SEQ ID NO: 143180 - DNA, 366 bp, Zea Mays
acaaattcattttcctatctctatgtcaaaaacacttgctttggcaaataaaaacattttgaagattggatttgatcaattaccaaaagcccccctttttcctataatcgaatttctcccccacaagagagcagtttttgcaataagagggttttgatcaaaaaccaagtattcttacactatatttttttgaaaaattcacaagtggtagctgatccagttactttagccttaatttctccccctttggtattaagcaccaaaatagaagatctttttggcccttttaaccccattggctccccaaaacttgcaagttaaaaccaaaggcaatgagaaaacacagatagggacttgggacaagat

SEQ ID NO: 143181 - DNA, 356 bp, Zea Mays
ggcggaacgagcgggctcgagaattcagaaaatggagaagcggcagaggaaaaagtaatatttagggtttggaactcaagaaggcacgtcagcatgaatataagttggctccttaggtcgggcagtacatctaaaagtgccagatcacaactcggaaaaagtgaggactgcaatcgccactcgagcattacctctaaaatgccggcaaactttcaagcaaacgaataaaaaagcaagcaaccgtggttaagtggtgtaacttcatccttcattcgtaatgggggaattaacacaaactcgaagccaactcattatgagtcagcctcttctacccctgtcaatacattacattgcac

SEQ ID NO: 143182 - DNA, 472 bp, Zea Mays
ccacctctgcttgatgtcttgtcctttcaccaagagttgatccatctcatccttaatgcatttaacttggttgaggtccctcgttttcctttcccgaaccctagccatcttatagacatccttctccccttcctttgtacttaggatcgaccctttgcctcactcacagctcgtttgcagttttctttgccaccttatacctctctatgttgaccacgttcctgtcatggaacaagctcctgtaacattctttcttctcctttattgccttttgaacgtcctcggtccaccatcgagtatctttaggttcacctctggtccctttggccattccaaacacctttgacgccaccttcctaacacaagttgccatcttcacccacatgttgtttacatcttcttcttcggactaagcgccctccacaaaaatctttccttaaaaacttcggatgtctcccctttgagtttccac

SEQ ID NO: 143183 - DNA, 508 bp, Zea Mays
cagggaggcctccggtggcagggtctcggacgtgggatgttaatggcacgaggggcgaagcttcgtcgtggagctcccacgagggcaatgaccgacgagcaaggacgaacaacgtcgatggcgatgtggatgacgaggtggcttcggcacgatcgggaaacgtcgacgaatgatgattgtgcacagcagccaagagcaatagcttcggtgagggcgacgacagggaactgggcgtgggcaggggattcacagccagcgagcgatgcacgacgatgacacgaacagacacccggtgcacagcagataggagcagaggcttcagagacgtcgcgacagcgaattccagcgagctgcgagcgactgtagagcgacgacgctgacagggaacttggtggcaagtaatagaggcaagcagagcatgcgcgcagtcacggcgaggaggcgattgtgggcgcggcttcgcaataacccgacgggcgcaggaactacgtcggcggcaagcgacgac

SEQ ID NO: 143184 - DNA, 818 bp, Zea Mays
taaaaaacttttcctatgcgcccatagtgctgctgcacgagcgtgtatatatacgcacatggggacatcccgttttgattaccagccccgggcaatgttggtcgccattgatgtcgtgtgtcgtcgtgtgtttgttgttccggtgcccgcgtacaatatatgccatgcagatgcacactctccttgcttgcttgggccctcgcacgcatgtcgtcgtcgctcgatcgtaatagttgactagactgatcgtacacgaacctttacttctatcccgagtaaagaagcgccagtatcttgcattgcatgttgtgtggtaggtagaccacgcatgcatgtgagcatgtccaaaagaagctctcggcaagaacagcgcgtccaagctttggcagcttccatctcgtacgtccccgttcttggagtgcgcgtgcttacaaatgtctgctcctcgttctcctcattattgtagataagtacctcgattgcctactcttttgagttaaacgtgatcatccgtgttatcgccatatatcaacttttgcccaattgttaatacgtggaaaactgtatacatgcttttcagggcactctagctaggcttgtcgttactattactactacagaaatcggagatattaaaacctgactccctttcaagctctccccgcgcttcacgggacctctgccctccgccggctgacacgtgtcccctacccctacagtgttttctctaccgcgtcctgctccacggccaagtcgacctcgcctccatcctccatccagctgcttctcctcgctccacgcaccccgtgagcgcccac

SEQ ID NO: 143185 - DNA, 411 bp, Zea Mays
aaaaatagaaagaaaagagaataaaagaaatgggaaaggaggttttggctaattgggccaggagaagccaattcagcccattcgccctaacacccccacgcccagcccaccgtcaccgatttccccccctgcgctgaccatggtggcccacctggcagatgctcttccactgggacgcttccgcgtggggtcggctggtcggactcgtcgtccccgcgaggttcgcgggcgagctcaacggaattcgagaaattcgcgcacctagcggttcgattcatgtataaaacgggggtgtagccggcgggggagcccgaagcatccaaaaccctagccgccggtggttctatggtcacagacatcggccccagtagagagaagcggagagagagagagacgaggatttccgtcgcc

SEQ ID NO: 143186 - DNA, 620 bp, Zea Mays
gtggaggtagacattggggggatccaacaggggattggacatgccacatggtgatgcgcctagtgcacagattatagatgaagggcaaaggggtgttcctatgggcacccccaccaccatggttgtcacttgcaccgaaataaaaaacaccccaaaccccacaacttcgaccctagactgaagggaaggatgtgtagagccaaagacaggaggtacaagacgagtgtgattgtgacacctaaggtatgggtggaagagggcggtcatgaggtctagcccctaggggtggagctatagagagtagcagcatcatcaaagcaagaaggcaacccctttgtgagctcctcgaggatgaggttgttacggatccaaatacatatgtgatcgtagcgctcattgaggccatggaaaaggttgaggatgagcatgcgatcagagacggactccccaagatcggagagggatgctacgatgcccttcatctggcggtagtactcaatgactgagaggtacccttggatgaaggtgggaaatgttgtgtcgacgtggagaacgtgagcctcacgattaccaaggaactctcttagatggcaacctaggcctgacgggaagtgcggcca

SEQ ID NO: 143187 - DNA, 303 bp, Zea Mays
tgaacttcacaagattgttgacaaggtggcagacaacctcccaaaatggaagggagcactcataaacaaggctgcctgactggtcactgtaaaggctgtcctgtccgccctaaatatttatcacatgactgcccttgatctacctaaatgggtgttcaaggcaattgacaagaagcgcagaggctttctttgggtcggaaaagataaagctaatggaggaaactgtatgatatcttcggattcaatacaacgacctctccaatatggtgggctgggtgttctgaatttagaggtaatgagttg

SEQ ID NO: 143188 - DNA, 565 bp, Zea Mays
ccacattctcagacacagggaaagaaaatagctgttgggcacagtgcaagctattatggcttttctctctcctgtccttcattttggctggcgcgtttggctggtctgttggaagggacttcgtgctgctacagtaccacgaggacagctattttagctttttttgtccatttggctggtctgttggactcagtcttaacaaattttctcgatccagtacatttccggtaacacttatcagattttttcaatcgttttggattaatcaggatatatagaaaatggcgagacatttttaccgtccgttttttgaaatttcagaaaaatccgatatattttcgtatttttaccatattttctcggcccactcacgatagcctaactgcccgagaaatattggcattttcagtaggcctaccagcccactagagtcacgcaactagctagacagccagcctccagcacctaccggcctccatcacaattacccccaaatcccctgtcccttccgtacgcaattgagtggagagccggaaaccctcttcagactacggctgtggaaggc

SEQ ID NO: 143189 - DNA, 869 bp, Zea Mays
ccacgtcattggcacgccagccgtccgcaacccagagggcttacaagtaaccaacgatgccgaaggccatcgcatcgtcaacctcattatgactgaagattggcgggccccaataaccctgttcctgcaaggatattaccacccaagtgacatcaacgaagccaagcgcctcaagcaccgaagccgggacttcgctctagtcgggggccagctatacaagaaggggatcagtcaacccatgctaaaatgcgtcaccgaaactgaaggcattcaaatccttcgcgaagtccacagcgaaacctgcggctcccactcaggacctagggccctcgctgccatggtgatccgtcaaggattttattggcccgcaataatctgcgccgcgaatcgagtcacgaggtcgtgcgaagcttgccataagttttctccctactcgggcaacccttcccagttcaccaagctgatcgcccacacatggccacttcaacgctgggggctggacattgtcgggccactacctacggctcaagggaacctcaagttcaccttcgtcgctatcgaatactttaccaagtggatcgaggccagggcagtatccacaataatgtcgaagaccgcccagaaattcttctggcaaaacattgtttgccgattcggagtcccgtctgagctcacagtcgacaacggcaaacagtttgacagccaggacttcacggatttctgcctctccatcggcaccaagcccgtcttcgcctcggtataccatccgcaatctaacggcgtcgtcgagcgcgccaacggcaaaatcttcatcgccatcaagaaaatacttctcgacgacaagaagggcaaatgggccgaccaactac

SEQ ID NO: 143190 - DNA, 412 bp, Zea Mays
ctgggccgcccttaaacgtcgaagaagcgtgagaaaccgttcgggttatttcttgcccgactggattacttgctgaggggatgacattcgagacctctgtacggatgtcagcaccttcagtctcaggaagctccaataaaagatcctcagggataatctcctccagtgcatggtcaatggcagacattatcaatctctggagactaactagtcctgatagagcttgaattgggacgtcatcgctgctttggctacgactgttcttacaaatcaaagggagaacttcctcttcatcctcatcaagcgcacgacaccgactctggcaccatcacaattctcaatatcatcctcgaggttggcgctcgccgagccatcgccgagaactgatatagtagagtcggcacccagttcc

SEQ ID NO: 143191 - DNA, 656 bp, Zea Mays
cgccggttcgcttcttccatcgacttcaccccatctccgtttgggctgtggattcatgacataggtgccgttcaagaaaataaaatcgggccacttcctaatttcagctattaattacattataatctatttattattagcactgagatgttatagggactatgttgtgcacggcgagtgttgtgataaagcttaagttggtagagaaaagcatgacatcgtgacggtagaggcggcctaaagtgtgatatagatatatgccgaaaaaatatttattgcacgtcaccgttagatagatagatacgttggttgttctttaatgatttggatatcggttaacattgtggcgtggcgacgagtaatcttttgcttccaagaggaaccgcataaggattgaatgctagctaaaaggatgccaaaacctcgtcacatcatctagaccggtgtgatagtaggatagagcaatgatgtctctctagagttagtcgcaaaacgaaagagagataccattctatgagttatcctcacggagaaacaatcgagattatctatgacgttttgatgctcctccttagtaacgtaaaagtcattggcggtgtcatgccgcaccgatggatttttgagccgatgtcatgcggcatgaccgatggattttg

SEQ ID NO: 143192 - DNA, 322 bp, Zea Mays
cgggtcaccaggaatgggtcccggacctgggtaaggaggaggagtatagtgaccagagccggatggactgggtcaccgggagtgggtccctaacccgagtagggaggaggaggaggatccgaggtgtagaagtgatcatcaaagtcctcgacctcatcctttggggtaatgaatggcacaccaaactcctgttggtgccactcattaaggtctgcggggaaggtaggggctggaggtggaggggacccgggagggagaggatgacctgtctcggctgcataacgaagaaaatcttcatgcaaccggttagtcctgcgacggc

SEQ ID NO: 143193 - DNA, 442 bp, Zea Mays
cagggaaccgccttggcttattcatactggatgtgatggttgcggtcgaggttggtcgggcatagcggtggaattgctcatcggagcaatggatccgctgcgatgccgctatgctacatgattgttaacctctgcgctatccttcttggtaagaacgcctctgtatggctcgccttcatctccgctccatctaccgtcctttggatttggggatttgcgctcggttcggtgggcggccatacgccggtaatggcgccgtcgcgggcttgctcacgtcgccgtgccgccatgggcggctgtgtcacgctgcgaggggggagtgggaaaaagggagaaacacatggcacgtagattagccgatgtgtggttgtgatcgacttgagataccagttcggctggagcacgctggcgcgtctgatcttgatccgataggtggcagtga

SEQ ID NO: 143194 - DNA, 626 bp, Zea Mays
gcagtagtggcatttttgaagcctgaagcaagccggagttgagaaacatggatgactgggtgtattttgctagaagcgggtaaggccaagcgataggctacattacccactctggctgctacctgatatggtccaaagtacttgtagctgagtttgtgatgagcccgcggcataaccgatgcttgtacatatggttgaagcttcaagtaaacccagtcaccaaccgcaaattcccgctcagacctgtgtttatcagcctgacgctgcatgcgaagctgagctcggaccaggtgttggtggacaagatcctgcataatagaacgatcctgtaaccattccgacagctgaccaggcacagtctggttcggagatacgcctagagaatgtggtttacggccatttaggacttcaaacggagatgaacccaaagccgaatgaaaagtagtgttataccagtattctgcagtgggtaaccaagaggaccatttcttggggcaagcacttacaaaacagcggagaaatgtctctagacactgattcacccgttctgtctgaccatccgtctgggggtggtaggaagaactcatgcgcagctcagacccggccaacttgaacagatgttgcca

SEQ ID NO: 143195 - DNA, 680 bp, Zea Mays
cttagagccccgccagtgccctgcgcacaccctcacctcatttcgcgtagcttcaccccctctcgcgctctgcccacgctgccagccgttgccggagaccagcgcctgcgttcccggccatccagctcgccggagactactccaagcctccccgagctccgccccgaggtgagacacccgtccccgtgcccaatttcccttattgcgccctgtgctcggccaatttcgccttcgccggtgctcggccgcatcggtccgccatgctcgcgtggtggccagccgatttagcccggtctagttcctcggagtaggtccctgtgtcgccccttcctctgctgaagttagccaaggccttagcgcgccttaggacccctccctatggccggaatggcccaccggagttgctccggcccgcccgaggctttctcaccaccgttcccccatctctgcccgtggattcatggccccttccccaccattgagtttgccgtggcgccctcttcctctctacccaactccggtgaccccggaccccctagctcacgcctgcttcaactccggcaacttcaccaccatggagaggagcggcgccgcccgcagccgtctgttttcccccggtctgatcccctccgtccgatcatgatcgcataacccagaccgcgggtaccgcttcacgtacg

SEQ ID NO: 143196 - DNA, 882 bp, Zea Mays
ctcgggggctaggcagtagcttgcacttcccacccgagccgagtcaccctcggcaacaccctcgggggctgggtaagcgtcaacaccatccttgagggccaggttctctgcagtagccgcctctaaggctgaaagcccctcagttacttccatgggaccgagatgatccaagtcagtctcctgaccctcaagaccgcgctctaaggtcgatgaggcgcgggatgacctcaacccagcatcgagcacatcagcacaaacctctatcacaccataatccgctggctctgataaaaggtcctctggaaccatatcctctagagtctgatcaaagtttgccagagataactcctgtagaccaacgagagctgacagagccggagaaggaaccccactactttccccactgacaatatactgccgactgttcttccgagtcagagggacctcatcttcttcctccctgtcgttttcatcagaaacataggcaacacacccattgggatcagcatcggatggagcacccccattgggatcggcagcagatggagcacccccattggggtcaacgtcagtaaattcaggcacaggcacttcttcagcagcaggaaccaaagtaccaacgtcccgatccaaactaaatactcgccggaggcgtctctttttctttttctgctcatcagcagaaggatcaagttgattggctcggcaagggcgtctcgggcgagcactggcaggcttctgaatatccaaggttgtaccagcttctgggagaggcgccaccaccaatgtcccggcaggagcagcgtcaggagagtcctcagccagcaaatcaagcatagcacttatttctgcgtcactaggatccaaaggcacctcaaagtg

SEQ ID NO: 143197 - DNA, 659 bp, Zea Mays
gctacatcagctcggagtggggtcgacttgagtcgttgctattcctctatctccacttcgtcaccctccataagccacacgagaaatacggccccaccaccgaccacggccagcgttgttttcccctgaagccgacagacttggggggctgactgccccacccttaagttgtcaccggcccatgtgatggcggtcggcggaggtgcaagggcaggaagaggcggggtagagcaaacggtcgccctggtgagtacacaccaggggcaactacatcgacctctaggagttcccttagggaaaacgtggacgacggcgagtcaatgagaatcacctccatgatggccgcgctcgccgcccttggaacgacctaggacgataacaccgctgccaccgggaaggaggacgacgcaccgcccgatgggacacacttatgagccagagggggcatacttccctgtggctgcaacccaaagtcctggggagatagaggcgtcgctctgaccaccaaggttgcgtccctcacggacttgtgtggcacatacacgttggctggaaagaaaggaaaggaggagtagacaatgaataaaagaccgaaagcaggaacacgagcaaattgatataacaggatgagcgcttcgtggtaatcaccttccctagcg

SEQ ID NO: 143198 - DNA, 408 bp, Zea Mays
gaagagacgggcttgcatgagaaggccacaactttgcatatgcaagctttgataatcgtgcataattaagctaaaacggatctatcagaaggggattgcttgaattgtccatagtgaagcatactaagggctacaatgtgatgatataacttataatgagcaaagttgtgcgtgaaagtattgtattaaagaaaaacatcattttgctactgtatcgtcctttgttccgtttgtaatgcctctcaggctaataccagttgcaactgttccatgaactgcaggtacgagcagcttgaaatggaaggcaagttattgaaggtatggatattttggtttcatttttttgggttatttcataaggcacttgcattgtgaatgttgtgagtagcatgatttttttaaaaaaag

SEQ ID NO: 143199 - DNA, 500 bp, Zea Mays
ttgtggccacatggagctcgatggtcaacaaatcatgcaaaacattgtttataaattttttttttcgaaagcgcagcaaaagatttgccccgcgagctttattagaaggaaaagaaaaacactcttacaagaagcacacccttacagacactcaaacaccatgaaatttaaaataaaagataagatgagtaaggatgctagagataacgtgagtggaggctctctggtgaagtagcagcgtgtctagctccctggcagtcaggggtcaccatcccgtttccatcttgtttaccgcacccctccgaaaatgatttatcgctcaacgcctcctcccaataaaacctccaatctagagcagtttaaaatttcaaatttgaatcccagatttcgttgtttctcgtcggaaaccaccacattcctatcagatttcactcctttttaaccgagaagcgtgatttagttaagaaaaactaaattttttgacaggtgagtgagcacca

SEQ ID NO: 143200 - DNA, 441 bp, Zea Mays
agggaatcctgaccgcccaatcctcacccgatggctcttattaggtcactactttaactgaagcggtacacaactgtggccactggatttcagatccacggttcagattatataggattagaaacgtgtttcctcccttgaatcaaaactctacggtctagattctgattgcgcgaaagggtacgcgcgcaccaatctaggtcgtccgtgagccaatcaatggctccagacccgtctccatccctctggcgagaccaagcacagcggcgaacgctgtcgcggccacacgcctcaccggagatggctacccggtgattcgtgtcccaatcctaactccgatctagtgtagagtgtacaggagatcacgtcaaactgagtggggcaactcttaccttggatcgttgctcgggttgtggtggccacagtggaatgctagcccgg

SEQ ID NO: 143201 - DNA, 543 bp, Zea Mays
ccagtcaaacgaaagagaaagctgattcctagcaatttcaacctaaggcgaagcaggagggtggccaagataccacctgaattaggctctccctctgctgcaaaggtgtgcaagcatctgagtttctgtgacgagagagagaatatctccttcacggatgcaagaaaatatgctaaactattcgattcacctctttctagagagcacattactgcgctggcagccctgttcggttgggaggtgcccccacctgggcagttttgagctgtgtgtttggtggagctggctgaattttgtttttcatggattcaaatggtattctgatttggaatgtgaggggcctcaacaattgtgctaagagagactctattaaatctttggttcttgcacaatgccttctattgtgtgtctgcaagaaaccaagctgtcatccatctctgattttgatattattacaattcttgggtcagtatatggtaactttatttttagccctgcccttggaaccagggagtattcttgtagcatggcgcgatagatccc

SEQ ID NO: 143202 - DNA, 451 bp, Zea Mays
gtttcccctcaactaatttctggattggagccctacagtgctctgcccacggtgacagcggcaacaacggaccactaagcgcgttcccgatgatctaaggcagctcggttcaattgggcaggttgatgagcatcacggttacataaggacactcaaacgagggagcagaaggtttgaactgacctcaattgcactggccacggcgagggtgttcttgcggtgggatgaattgatttggggaaaactcgcaattcgtgagctctggcaaacgattgagggtgggagtgggtgctttggtttcgtgatgacatagtgcagctgacccggccttcaatttatagagggcttaagtggtggtgctcaatttggccgagccgtgctggtggccggagagaggggagattacttgtgaagtggattcgtgtcttccgtcgtggagacttcaccggcg

SEQ ID NO: 143203 - DNA, 350 bp, Zea Mays
ttgtatacgatctcctagcactatgctgttttcaattggaaagttctattgtttgcatatttagctgcaacacgctgttgaacgccattgcagcattgctggtttgtgtaattacccataaactagatgcctggcactgcactcattcccatgaagatgcctcattcactcagggaaccttacagccttgggatgggatggaatagaggatcaaaatttaccctgcatcctctaaatgttgaagcggaaagtgccttccgggttgacagcttctcctttttgaagattttggttcacaattgttgtcacacactactagaaccattgttggagattgaactaaaaaccgt

SEQ ID NO: 143204 - DNA, 379 bp, Zea Mays
agggctggccgtaggtcgcagccctgaccttaaaagtttgccttaaaagaaaatacctcttacctcaagaaaaatcttctctccttttccccgatattaacaaacccttctgttcccattcagatggaagactctctagtcattaggacatcctactgctcagaggtagaggggttcccacatctgttgcgaagttgtgcgcttcgcatggggatccgcaagaagccggaatatgtctggaaggaatatctcgagaatggaatggagaagtgctctatggcaatctacctgggagaaagccgaaactacccacaccaccatccttttcaagtcactttcatcggacaccgcttcccagatacttgccaaaacgttgccc

SEQ ID NO: 143205 - DNA, 536 bp, Zea Mays
cccggcttgccctcgaggcctagtttctcaataaccgggaggcccatgccatcaacctcgatgcctccttgtggctcttctcctagggtaacctctctgtcaccgagtattgccgacggatgaagagcatgacgaaccccactcaggatctcgatgaatccatctctgatggcacccttgtcctcaaccttttgtgtaatctcagctgtcgctacaaccacttgaaggccctcatcaaatgctctatacccttcatgtccttccaacgtccgcaacgagctgctcctcgacgaactcattttgcgcgttgagtccaacgagtctgtgctaaccctctatgtcacaccctctagttgccatccacctcgcactccctcgactagggtgcctcctccgcaccctcctctcctactcttggggctcctcatcaggatgctagctccgacaacggtcatcgctaccgtaagggcgatcgtggaggcgatggccctcacgttggtacccctcctggtagaggggtcccacgtagcagtccc

SEQ ID NO: 143206 - DNA, 347 bp, Zea Mays
gtgaagaacgattttgattaaaaggtcggatcaccaacctggttctcttctcaggcccctgattagacctatcacctccaaacccttttgattttccatgtcctgcatttttggcttccactaccagtgttatactaatagccctactgtaggtaaggtccaagcatgttgccattttccgttgaagcctgtcattgagtcccctcataaaacaattctttttctttagatctatattcacttggtaaatggcatactaggagagatgattgaatttgttgagatactgcattacagtatctcccccttgctttaaccggataaactcttcttatttcatatgaagc

SEQ ID NO: 143207 - DNA, 1071 bp, Zea Mays
gtttcgaaaatctgtacaaaaattagacagattcagttactaaatttgtaaaaagcttctatttaacaccagcaagataataaagttatctaccccttttttatggcacatatctacagaaaatataatttagttcatcaaacatacatcacgacaaaaacagcgcgtgcagcccaaaacagcaattaataaaattcagcttctatttacttcaaaaattgccgcgttctagagactcgacttattctaatttatatcaacgcacacttaagcatagtcacacaatagatgacgtgacggctacgtagtcatgccatcacttcaccccacaatcccaagtagcgaaataactctaaccgaacttggcatttagccgatcgattcctaacccatttttcagaccaccactacacgacatgcctactacgttaaatgacttgttcacaattcacatacatctttaccaaaacattcccacatcgcttgcaacttaacctaagcttcactacacaatttcaggacatctacttaattcatgaatatcatcgtcgcacacatcgactcgatttgaattaaccacacatgtctatcacatgaatggagcatttcaacaaatatcctaaaacaaactaacttcatcacacatcttacattacaaacatttgaagtgtctactcgaaatcgtaagcacaatcatacactatctgcgaaactccatttgacgaactatgtatgcatcgtcacgactcgacttataattatagagaaagcgacgacaacttggcatgtcaccacctctctatataagccaaaataatttctactatcgactaagagttctaagtattaaacacactgttactgtccacgcgcaaataaacctcaacttaacattagtgacaccgatggatttttactaaactcatcatgcgcataaccacgtctcgcatacaaccatatggtggcgtgcacttgagacacttcaatcaatgtggcgcaaccactaatatatgaactccgatactcatgttttaacaatacatcctccacgcaaactagcactctctaaac

SEQ ID NO: 143208 - DNA, 535 bp, Zea Mays
ggaggacttaccagtgtgtggaggggaatgaggaccgaccgatttccggtccctctgtggtggagaagaccaaggcggtggcggctcggtctatgcggtgcagaagctgaagtcgacggcgggttggtctctgcgttggagacgctgaaggagaatgcggatagaatctctagggttcggtcgccgcggtggagctaagatggctcggtctctacggtggagaagaacaaggcgacgatggctcgatctccgcgttggagacgatgaaggcgacgacggctagaatctctagggtgtggctgctgcagtggagcgaaggcgactcggtctctacggtggagaagaacaaggagacgacgacgataatggctagggttcggccgtagcgtgcgttgcgggtgaggtgagctgaataattgcgtgctcgtgggtggaatcatgggcccgatacacatactctgctggacgaaatctacgtgaaggcccatggaccgacacgtggattactgtttcgtaaacggaaacataagacatc

SEQ ID NO: 143209 - DNA, 274 bp, Zea Mays
ggagtctcaatttggaaattggttacgttagttaatttgtatagctaatcatctatcttattcaacgttaatctactaaaaatggtcacgtttacattagtgcatgtagctaattcttttgttagaaccaattggagttagagcacgtaacgtctagttattcgtttacccgtagtgcgcctcgagtataagccttaaccctcgcgagacctttcccccgcctctttctaaccaaggtaaattcattatcgtatgtgatattctatgcatattt

SEQ ID NO: 143210 - DNA, 349 bp, Zea Mays
cgacgacatccaatctcttatgatttattgtgatgacacattcaaacagctaagtgagtctattgataagtttaccgcacatgtaaaaattcatatgcctaattttccatcacataaattgggcattaaaacaactacgccaaacacatctgcaataaatgggttttctcaatcccagccatattatggtatgtcaatgaactcatatctagggcaactgcagtcgttgtcttccctgaatagtggatcagctctgagcaaggtcggatagttcgagcatgttgatgaacactgaaacgcctagtcattctcctcaaaggatgtcatggtgcttttcagcctattcatc

SEQ ID NO: 143211 - DNA, 275 bp, Zea Mays
gggaaaggacactagaaggacccgactttgttaaagaagccgaagaaaaagttgccctaatccgcaagaggttacttgaagctcagagtcgacagaaaagttatgcagacaacagacgaagagaactcagatttgagaaaggagatttcatttatctcaaggtctccccgatgcgtggtgtcaaaaggttccaaatgaaaggaaagctagcaccgcgtttcgtcggcccctaccccgtcgttagccaagtgggacccgcagcataccgctttgag

SEQ ID NO: 143212 - DNA, 457 bp, Zea Mays
cgaccattttcatccctagtttgaacagatgcgaggtgaccaatgattcaccgtgcgctctgcgctgcatacaagatggaagttcaacttttttttgggagcggttaaaaatggtttttgtttagatctcaaatagtgttgttgagatgctctaatagcaatttaactttttaagatatgctaaattttaacaccccactaaagtttagcacgtgggataccaacaaactatttttagtcgtgagtatcgtcttgcactaatttttatggcatcccaaatttcaagtgaacatagacatttttattacctatctgtctgtgcgtgcgtgtgtctgtgtgtgattttttagcaatatttagatagtttatttctaaatgggagtacgaccacataggaagaggtaagaacataagaaacaattcatcaataacgagtagttgagcatcacaatcagac

SEQ ID NO: 143213 - DNA, 339 bp, Zea Mays
ctcaagtcggcttatactcacagactgcaccttttctctattctgctagttggagttgcaccatctaggtttacatgcaccatgtagggtgtgccaatgtgggaggtaggaggggacaagactaagctgggcaccggtgatgtcaatgttaagggtcatgatctaaattgttgagagctcttggctaggggtggacaagatggtgatgccatgctagcaggactcttctacatgtgtaaaggtccccacagacggacaatgccaattttcattgcaaatacactaggataccaaagatatctgtgaaaggattggtatggagcggagagtaagatctga

SEQ ID NO: 143214 - DNA, 470 bp, Zea Mays
ttgcagcttatagccctcaagtgtcaagaggtcgttcacaaaaccagaaagtgtacagatattctatagtaccagcaccagtagatcgatgagcgagacacggatgtggaggcacaaagagttacctagcgagacgagcggtgggcgagtgtgaataggatggtggtggcgtcaggccaagggaggggacatgagggtgtgtggctaggctggctaggaaggtagggtttgttcattttgaggaggcggcgtagggttctgatggaggcgggggcgtgaaagcgaagacgaccctctcgaggaatgaatccacggatcacgcagcgactaaccatcgaattgaatccagaccagagaccggaattgagcaagaatggcaagataacttcctcccaaatgatcaaacggtggctcaggcaatgtaccgacacggatgatgatagctttccttgtgatgctacctgagcgac

SEQ ID NO: 143215 - DNA, 452 bp, Zea Mays
aaatgactagccttgactctctggcaagtgtcgcattcagatatatacttagcaatctccctcttcattctggtccaccagtacaaggatctgagatcatgatacatcttgttactgccggggtgcatggagaatttggaaaggtgagcttcatccaatattttctttctaagttcgggatttttaggaacaaccaatcggtctccaaaccataaaattccattgctgtcttgacggaagcatttgtatttgttcaccttttgtccgatcatttccttaatgacttgaacacccttgtcaccgatctgtgccatggctatttgctcctgcaaagtgggctccactgaaatataactcaaggcacctgaggaaacaacttctatgttcagcttgcacaactcgtcacacagggtggcaatcttggattccatactcacgcagttgcactgggc

SEQ ID NO: 143216 - DNA, 502 bp, Zea Mays
ccccactcgtgttctgccttcctccggttctgcctcctctctaaccgtactactctgacaagtgacaaccatgaaccgctccctcctccacccacccacgcacgcacccaagccatcgttctgctcacgatttcgaggcagccgacgagtgacgctcgcgatttcgcaccatctgcccctgcctgcaacggattgagatccccgaagtgtaggccgctcacaccgtcttcctcgcaaagttctacgcccgggcgagcctgtgctcgccgccgcgctcgacggtcttccgctccctactctgcgtggctccatcggccagctccctccaccgctgccgcatcaccgcacctctgttggcgagcgccaccacctcctcatccttctccatcgaggtaccaacgcgcctcccctttcctcccaaatttctccttcctcctcccacgggccaacttcctggccaccccttcgacaccgtcgcctgtccaccccttgcgcacgtcca

SEQ ID NO: 143217 - DNA, 404 bp, Zea Mays
ttgttgttcactaacatgcttaagggagaagcattaatgagaacttcacgttgaatgaacatgactacaaccaaagatactatctcgctaatggcatctacccttggtgagccgttgtttgtcgagatcattcctctcccatagactctaaagtaatggatgtttgttgtatgccaagaggacgagcgaaaggacgtagaagagcatttaaggccctcaaggctcttttccatattctcgctagcccatatcattctttttattaccaagcagtcgttatgatcatgtttgcatgtatcattcggtataatataatcattgaggatgagcatggaggagcatatatgatgtggacaactattgtcgagtcctctgttgcagcatcaaccatcatttctaaaaac

SEQ ID NO: 143218 - DNA, 882 bp, Zea Mays
gcaccatgctcactgcttccacgaccaccgtgatgtataaatacagcggctcctctggttccgaagctaccaatattggtagggacaccaggtgctgcttcaactcctggaaggcttgttccgcctcttcggtccaagagaaaggtccggacttccacaacagcttgaagaagggcagcactctctcagccagcctctaaatgaagcgactaagggcggctaatgaccccgtaagcttctggacgtccttgactcgagccgggggactcattgcctcgatcgctttaatcttctctgggttcgcttcaatgccccggtatgaaaccaggaaccccaacaacttcccagcagagacaccaaaaacgcatttgtcctggttgcccgcagcttgtcgaagaccagggttaagtcttccactagggtcgaccctctcttagtcttgaccacgatgtcatcgacgtagacttccactttgtccctaatcaggtccccgaaagtcttactcatcgcccgcacaaatgtaggcaaggcgtttttcagaccgtacgacataacaacataggagtaaagctcgtccactgttacaaaagcgatatgcttcctatcttccctagacatctggatttgatggaaatcagagtaagcgtctaagaatgacaataggtcgcacccggaggtagaatccacgatttggtctgtacgtggcagtggatacgggtccttgggacaggccttattcaggctggtgtagtcgatgcacatccgaagcttcccattcgccttggagacgatgattgggttggccagccatattgggtgatgaacctcttcgatgaagctagcgtctagcagcttctggacctcctttcggatgaagtcctg

SEQ ID NO: 143219 - DNA, 898 bp, Zea Mays
accaggttgtcaagggctgagtatccccggacagcagggcctcgactacgcagttcgtagtcacgacccgtcttctccggcgaggctttgcccctcagccgcaggctttgttggtgagtggagaggagagattagagagaataaactatgcttaatccttccagccggctggttacacatatatatggctgatggaccctaacaaactggagataattactccttaatcctagggatagctatcttatctttcctaacaaccagcctcccaaatcttctccttaattctaggaacttgaaacagatagtaatcctatatgtctgtaacaaaccagtgcgtgcgcgcctaactgcccgcgcgaatcgcgtcctcttctgcccgacacacgtcgcgggcgcgtctgcacctggtgtaggtgcgtccgcacatgacagtacctaaattaattcatctcttagcctcttgatttttttgttggtcgaattaatttttaaggtttgggtatattccatacactatgtaccaaatggaatgatgatacaaggtatagattatgagctctttcctctttatgcatccagcaccagctaatactaaattctaccacagccgtgtgctactgacaacatcagaacttggatgcactgctgacatcagaactaactctggctggtcgaagtgcaaaaatgaatgattagtggttacttggctagtatgtgttcgttataacaggacaagacttggatgcaggttgagtgaactactgcttgttagttactggccaggatcgcatgttctactgctaaggtctgctttgatgttgtcgttttgaaaaaccatggtaccaagaaactgtagttttcagaataataggcacgctaggaaaaagaagtccac

SEQ ID NO: 143220 - DNA, 542 bp, Zea Mays
cggcactgagcatcgaagcaaagaaagcaaagtagaagcagaaggagcatcgaagcaaagcagaagcaagaacgaccctcagttcatcccgatcatctatttgtctctgaagcagtagagggttccactgcatcaaggacggaagttggtcggggacaggagctccacaagatttcagctgagcagatacagaatcgaagacattctgcattttcaaaaattagcgaagacaacatgtttgccaacatgaacaataagaagcaaaggaacaattggtcggctaacctagagattggagagaaataagggaaggcccaaagctggaagcattggtgcactgcttgttgaggggacatcaataggaacaatgttgaagtcataactcggagagacctcagctccgtcagcaggcagcgaattcctagcatccgggtcactggcctctaaggtgatcggaccaacaagagcagcagataaatttgtcaccacgagttcctcaaattgaatcagtggtgatccaacgtgaacgtccatataagcag

SEQ ID NO: 143221 - DNA, 549 bp, Zea Mays
gtacaaatttgggtattacaagaagttagaacaactcgaacaaagtgaattcaagacattcaagaagattcaaaagaagagtctcgtctgcctaaatcaatgactcgaccaaacaagacttatgggctatagtcaataatatgtaccatgggtacctataccaagcttcaataagaaggacatgtgtagaatgggttcatgggctcggtcgagtgcccagggatttggcaaccaagaacagaaggaggcctacaactcgtaggattctagaagcacacatatggaagatatcttatcaaaattgaggatatgatcaagatcctaacagatatggaaagacactagtagataaggaagaatacacatgtaaagatagagtttgactcacatacaactaaggaccaactcagtcaaaactccaaataggtaactgactcgatgcctctcttgtaatacactgcgcctcctttgcatataaaatgatggttggggatcctcctagggaaatatcacaccaaaagacatttgatatcagagaatacaaccacc

SEQ ID NO: 143222 - DNA, 509 bp, Zea Mays
tgccttcactggtgtctaaatttggatctacaacaagtacctggtctgtaatatacttagatgggtccaagaatcatggagagtccctggcataagtagacccatccttggcagcaagctcatcaatatgatgtgtcttttcatctgtcatatgctcttcaccatttgctagctgctgcagtaaaccttgatgcgagacaaagttctaaggcctcatctcatccacaccactatgtcatatagctcatattcacggtggcctcactaaccatacactcttccagagccactagcttaagtgaactatcttggggctcataaatttgcagcaactcatcatcccacacaacctggctcgaaagtggatcgaacactttgtgtgtatcactcttggacatcattggtgccttgaacactgccagcttgcactggtgcactagaccatatggatcaaaaccatgatacgattcctcatcccagatcaccttcgcaagaggactttcgtcgaa

SEQ ID NO: 143223 - DNA, 763 bp, Zea Mays
gacaagtggttggtggggacgacggcgggacattcttcgagccgttcaacgtgacctacgaccaccgcgcgcttatccttggcgggaagcgcaggatgctcgtctctgcggggctccactacccgcgtgccacgcccgaggtgagcagtgaggttctgtggtgcttcgcgggctctggcgccacggcggtggggcggggttcgggcgagtgggctatggttatagacggcgctttaatagctcgaattcttcggtctcagtttttgattcgcgcggcggttgggttcagctgttgctgcggttggtcgggcgtttccaattgcgaattattccgttctacggagtactcataatgtcgctggtgttggtccggcgtttccaattatgagaatttccaggctcctcataataatgctgtttgttttccatggagttcgttggcgagcttgtggcatctacattcatgttattagtagcttccgatcaactgacacattttgcgctccagatgtggccgagtttgattgcaaagtgcaaggagggcggcgtggatgcaattgagacatatgtgttttggaatgggcatgagccggccaaaggccaggtacctcattgactcatttgttcacgtgaaatgacagatataatatgccctcgattgttaatttatgcttcttctaatgtgctctgccccagtattacttcgaaggaagatttgatattgtcaggtttgctaagctggttgcagctgaaggtctatttc

SEQ ID NO: 143224 - DNA, 575 bp, Zea Mays
caaacaaaaaagcattcagatcaaatacgcctcggtggcacacccaagagccaacgggcaagtagaaagagccaacgggatgatattggaagcgctcagaaagaaagtctttgacaagaatgaaaagttcacaggaaagtggatcagagagttgccgtatgtggtctggagcctaagaactcaacccagccgagctttgcatggaaacactcccttcttcatggtctatggttcagaggcagtgctacctgctgatctcaagtttggggcaccaagattgatcttcgaaaacatagctgaagctgaagctactaggctggaggatgttgatatactagaagaggaacgattgaatacgatgattcagtcagcccggtatcagcaaactctgagacgctatcatgataaggccattcgacatcgatcctttgcagtgggagatctcgtcctccgccgaattctaacgggagaggggcggcacaaattgtcaccactatgggaagggccattcatagtagcggaagtcactcagcctggctcgtatcgtcttactcaaatggacggtatagaaattg

SEQ ID NO: 143225 - DNA, 799 bp, Zea Mays
caatcatctttcgagtaggtatgttgttgtggttcaatgttcgtataactcctttttccatttcagtcatgtatttatgtctgctaaacatgttgttgttgtcagctggtctgagatcatgattgtgttccaagtctacctatcgatcacccacttctgttgatgttcttttataaccatgactactttgcagtctgttttaacctggacatttgtattcctttttggccctttctcgcacccctgatgttctatgcaattatcttgttcctgctgattagctttttttgtttttccatgcttgttatatttcagctccacctttgtaacctcattgtttctttttttgttggaagttctaaaagtgtgggtgattgctggtttaaaaccagccaaaaacccatagaagaataagaagtgctccgcatctcccctggtcttaaattccatcccaacttgaggtgtgtatttgctgtctattgatgcattgtttccttctgatgcagctatctgctcactcataatgaaggcatcgatctgatcctctgttaactcttcttcacttccatctgttttttaaattccatcccaacttgaggtgtgtatttgtttgttttttggctatgttttgtatgttgttttgttatgttttgtctaatgattctgttatttttttgctatgctactggcagaacgtgtcgtgggtatggtctccaggtatggtgcttggtcatgggagctttttttaagttttgctatgttttgtctattgattctgttcttttttttgctatgcagt

SEQ ID NO: 143226 - DNA, 381 bp, Zea Mays
tgagaacaagtccccaacaccatacaagctaatgccaccatcattatttaaagaactgatcacattatgtctaaatctatttgtggaagcagcatgcaaaaacctagtgcattcgtcaccaagaaccacccatctctcggtgtatctttgtctccaatagttgtttttatactttaggagtttagccatatgaattttgatgatctttctcatgtttttatcctgaatgaaaagaggtctttgctcctctagcttgttcaaaattaggataacttaattgcaattggctatgagacgagtgagatcggaagagttcctactccattttttgagatcatatctaacattttttagcttagccacaattctcgttgaactgga

SEQ ID NO: 143227 - DNA, 469 bp, Zea Mays
gcggaacccatctgcaactgggtgcctgatagctgaaataattctttccataaggtactagtgaaagttctatcgcgatccgacacaatcgattctggcataccatgaagtcgatacacagctaccatgaatacctgagcgaccttaagtgcagtaaacggatgacgcaacggcacaaaatgagcatacttggtcaagcgatcaactaccaccaagatagtattgtaagacccagactgtggcagcccctcaataaaatccagcgaaattgcttgccatgcttgggaaggaaccaacaatggctgaagtaatccaggatatcgagacctgtcaggtttagcctgatgacacacttgacaagctgcgacagattcccgcacagaagtcttcatgcgtggccaataaaagagttgcttcactcgagcataagtaacaggaaatcctgagtgaccaccaatagcactgctat

SEQ ID NO: 143228 - DNA, 428 bp, Zea Mays
ggcaagtttaacagcatcacagatacattatagtgagacaacataggcggagttaaataccatttcaccgggctaataaaaaaagaggcaagtttaacaacattgtaagtacattacacatcaacaatgctacaatggtagtagtcggtttgtttactaagctcctcgaggttgattccatttaagctccacacagctcgtttggctcgtaagccaattatataggtcactaggacatttggctcgtaagccaattatataggtcactagtacaatgtccgtaagctgcgccaacacataattatttgttatccatataaaacaaatttaatattaaagtgaacatatggtccacgtatcgtacattataaactaatatacacattatcttagccaaaagaccaaaaagaatatgatttgaaaaaaag

SEQ ID NO: 143229 - DNA, 757 bp, Zea Mays
gcttccattaaacactaatgccccttcggatatttcaatttttgggcgtagtgttgtgcatctagcatctctcctgggatagttctttccccgaagcatgacgaataatgtactcaatacttttgttcgaagcttcgggagcagaagtttcgatcttttcagatgcaattttctctgtcaccttttcttcaagtgcggcaggctctgtctcagtgggcactgaaggcccagcctcggcttcagcttgaacttgtgcagtttcggcttgcctagtttcagttccggcctgcgatttggtttcagttggaacaactttctttgcgagagcaggactcaaggccttcatcgtttccagcacaacatccagcacgtttgccatccttctcctctagggagttgcggcagaagccttttgcaccttcggtagttttatctctgttgaaggattcaaaatttctggcattttcattaattcttcaatttttggctcttcaatcttcctctcaactggctcgactgtaagtacctttggcactatagtcggctctttagtgctctgcgtagtcgggacagtttcttttgcttcagcagctgaacaggtccctttgccaaattcaggtatcacggccggttcaatgtaaagcggccggtgagtcagaaccttcatcttcttgcccttcggctcagctgtaatgaccgaagtagcaacctttctcgaagcaaaaatctttctttttaccccttgccctcgcagcgg

SEQ ID NO: 143230 - DNA, 279 bp, Zea Mays
ggaaacataaaatttcgaggacaacatttgaccttcgtccagctcactaagttgaagtactccctcgagggctaccgttaaaatggaggctgaaccagacctcgatctgccaaacgcagaaatgacctcaagctaaaactaaccatgtctgagtgcaggagttagcgcaacgggggacctctccaggcctgcaccgcccaaagggtcttcgttgggcacgctcgacgaagccatgtagaggcaagcatgcacaggactcatcaaaggtgaaggcatcca

SEQ ID NO: 143231 - DNA, 756 bp, Zea Mays
catttctccactttgcgacgaccaagggttgaggtcagcgatcctggattggctgctgactcttgacaagagcggcatagcggttcgccagaccggcggccgggacccccaccgtgggattcagatccctggtgtaccggccggaggttcccagcccaccgatgccagctccagagctccccccgcgactctcagcccctcggggaagggcaagggagctgtgagcagttcttccgccccaggtggttctaggaagtcggagggagagaggcggtaccgcctgcgtcgtgccgatgggtctttcgtcgcggatccgctcctttattcgggcctccctcagaagtgccagaggacaactggtggggtcggggaggccggcccccagggctcgcagaggtgcgttagtcctccactagcaccaccatcagctccaccgccaccgcctccattatcatctggcttgccaccgccataggggcagcagcatcaacaacaacaacaacagtaggggcagcagacggctcgcttccaaggtcgttggaaagtccagggccccaagtaagtgtaccccttttcattttcctcattggtctagttaccatgttgacgagtgttaacccgtcctttgctcatcagggcctcttctccctctgcctccaaagtcactcctactggtgagtccggctcccagcagcaggtgtctgctagccttgatgccggcgacctgcctccacctgctactgctgaggcggcgcc

SEQ ID NO: 143232 - DNA, 620 bp, Zea Mays
gggcagatgagtgtggattattacaccccccttgctggcagaagcattagccaaagggtttcaatgttcgcagatgatgttgctatttttgtaaaaccagtttctggggacttagtggtggtcagagaaattttgaggtgttttggtgttgcctcaggtcttcaaactaacttgcaaaaaagtttctcctacccaattcagtgcaataatgagaggactgcgctggctgttcagaccttggggtgtgcctcaaaaaactttcccacaacctatcttggtctccctctgagcagcaaaaagcttagtgctggagacctcgctcactggatagagaaaattactgccaagcttctaggatggaaggctgagcttttaaatcttgcggggagaatcactcttatcaaatctgtactctctgccatcccagtttacttatttattgctcttaatgctcctaaatgggttataaaagccattgatacaattcaacggaacttcttgtggaaaggaagaaaggaggctagaggaggtaattgccttgtgtcttgggataaaatctctcggcctcttgatttggggggccttggaattcctaatctccaaaagatgaactgggccct

SEQ ID NO: 143233 - DNA, 550 bp, Zea Mays
ttccacgtgaccaacaaaaattaccccatcttcaccacaggtttgatcccatgtgtttgccacgctccgctcgtcgtcccactccaacatcttgccacaacttctaccaccaccactcgccaccaagtgcagatcaccaccaatagcatcgttgtctaccgccgccacacgcctctcaaaccaaatccccgccaccaccgccgtcaaaagtcaaatacccgacccgtcgaccatgccccaccccagaagaagggtcggatcagcacggttgaagagaacacacctcatcaccaatgaagtgcagcatcgccgcaaagaattggaggcttcgataccagttgtcatgacccttagccatcagtgtatcgtcatgacatgagaagtgcactcgagaatacttgagtgcactagagaatacttgtgaaaggggaagaccccagctcactgtttcgattatgaagaataaccctgagttcacagattggggtaaccctgcttatcccctgtcccaaccgacatgtgggcccgacttattacaatcaggaacacg

SEQ ID NO: 143234 - DNA, 677 bp, Zea Mays
gggccagcaggtaaattatcctagactcagccgacagtgacactagactgcgggttcatttctgtaaagctcagggtttctttcgcaaagtcatcggccgaaggggtacgttaggatctgggccgctcgatctcactcctacggcctagattagatctacatttattaaaccggtacgcgataagggctttcagatctagatctaacggccgcgatttaatgaaacgtgatccgcccgactaccacatgatcacagatccacggtggaaatctatccaggtgaaacattataccccgatccgatcagaaccacacatcgcgaaatcgaggcccagggttcatcttcttccctacgttcggcgcacagcagtcaaggcctccaccgcggcggcgatttcgccagtgaacagcgcgcccacgcccacgagaaccattcccaaatttgacagcagcgacacaatgcaaagattatggtgagctcatggatgagtggcataccggtggttaacccactgtaaggtccgcccacgcgtgcagtcgagcccgaggcggatcgtgatcctggcgagtaaccgcgagcgctcgaattaggttgggctgcggcaaattcggggttgtgctgctccacacccggcttcggcgacgatgaagggcgccagcacatagtaagactgttc

SEQ ID NO: 143235 - DNA, 563 bp, Zea Mays
tatgcaaatggaagcagccatccaacgtcagtgaagttcgaagctttctgggaatggcaggatattaccgccgttttatcaaagggttctccagcatagcaagactgatgaccgagcttctcaagaaagacaataagtttgtatggaccccgaagtgtgaggaaagcttccaaatcataaagaagaagctcacaactgcacccattttgacactgccagacatccattaggatttcgtcgtcttctgtgatgcttcaaggcaaggcttagggtgtgtacttatgcaaaatgagaaagtcattgcctatgcatcgtgcttactcaagccgcatgagcagaattatcccacacacgatttggaattggtagccatagtgcatgccctaaaaatatggaggcactacctaattggaacaaatgtcacatcttcaccgatctcaagggcctgaagtacattttcactcagctagacctcaacctccatcaacgaagatggctggaattgatcaaagattatgaccttgagatccactaccaccccgggaaggccaacgtggtagcag

SEQ ID NO: 143236 - DNA, 477 bp, Zea Mays
ccacaaatgcatctgtaacatttctcccctcctggagaaacaggtcgtccgcgacctgtatagctggatatcgtagttggaaatcctctagctgaacccaggatgcttctgctgctggacggcctacccagtaaactaacacttcccacacacctctgttaagccttgccttggataccttctcaggtgtaggtaccaccctgccatgtaacagatctggaagaggcaccacctcgtctggcaactgtccaataaatttctttaatagtgacacatgaaaaacatcatgaatttttgcctttggagggagctgcaatttataagatacgtcccccactaactgtgtaacctggtagggcccaaagaaacgaggtcccaacttagatgtagatgctggtgtcacgcccacggctgacctttgctgtaaccggagccacacccaatccccaacctaatttcacctcccgtcgagtctgg

SEQ ID NO: 143237 - DNA, 539 bp, Zea Mays
cttcttggtatagttgccaagaatttcgttacacatggtttcgatcatttctagccactctttgcatggcttcttgaactgtttctcaaatttgaatcgacaagggagccgaacaagttcatacttttcccccctcctttttctgaggcattccccagccactagaggtcgaaaatgtcctatttgccaagtactcttgtactatatctctagtgctgatttcggtagctaccactctgaattccacttcggctagctagcatggggagccaagttgcatgtggcacaagggccttgtcatcccgaagcttagtttcattggacgcatgaccatagtcattaacttctctcttttcttctcgttcgcctttatgtaaaaccattcgcttgtccaaccggtcggccacttggtgcgatagccaattaccgaggccttcgtatctttccgatatgcaaagttgtagcagccaaagttcttatgaagaccatccgctctggccttcgtctggtagtacagctcgtgcacccggcagaaagct

SEQ ID NO: 143238 - DNA, 293 bp, Zea Mays
ggctttggcagcggaagaggtgccttcaccaaattcaggcagtatggctgtttcaatatatcgtggccggtgggtcaaaacctttcttttcttgcccttcggcacagcagtgatggccgaagtggcagttttcctcttttttccttgccttcgcgaggggtagcagtaatcagggtatatgaaaccaattgcatcgaaaaccttgttcaatcttttcttgccccgacccccaaaggttgaggataaagcgtcatcttcggctctggtatatgctccaagtaactcgtcgctag

SEQ ID NO: 143239 - DNA, 409 bp, Zea Mays
cgaatggctcgtccgggaattcaccaatggtgacaatgttgctggctactactacgactacaacccagcaaggagagacgacgacgagccgaattcaccagcatggggggccagcagcctcgccggtgttcttcgtgagctcgtccacttgcaggcgtccgggaatgctgctgtcgccgaatgtcttcgtggagctgtaaaaattccaatgcctctagctagctcattcatcacacacacacgcatacagccatacacacgtagtaaattgaattaatctgttcctatgattgcatgcagtggatggaatggctcatggcatggactgaaaaggagacggaagaagcgtcacacgcaggagatacagcgctgctgctagctcgcacagtcgagatatgctcaggaaggc

SEQ ID NO: 143240 - DNA, 859 bp, Zea Mays
gcttaacagttcgatgtggagactgcctacggcgccaacccatgacggcgccgctatgttccaagcaacacacgatagtagaactggaactaccaactagaagagcttcactgacctttgaagaaggtggaacgtggaccacgcggccgtgcaactccctggaatgtcctggccatggtgaggtgagtaatctagtggctatggtcaccactggtagaggttggtgcgcgaacacaaggctaggcacacctggaactgaagaggggagctaacataggcttgcagactcgaggatcaccacgtactagcagtgacccagggctagaactcgagggctgggatgaacttcactggaaccaagtacttgaggcatttaaacataggcaagtgtccttgatctggcaaccatgcagtgggagagtatctcctggggtgccaacacaacagggactcaaagaggtggctcccatgcactacaaccacgcaggttcacagcacagcccagatacaatgaattttggtctgcctcacaccaccaaaatatcagttttgtctcaaattgcagacaggagaaggcaactgagaactcactggtggataagcactaaagggtccctagtttgatatttggcaggggtgagaccactaccatctttgttgtgcagttcactggatcaaagagccatgagataaggtttcactcaacaaaacagtccacacttggggattttttcagtaggaagtgggacctttagaaccttagttgtatccttcatccacaacttcatctatactcataagtgaacctagcagggagagaaagatctttttcatctatttatcaaactctagaaccact

SEQ ID NO: 143241 - DNA, 274 bp, Zea Mays
aagtttgctagcaaacgctgttttcaatatgccgcggagggtttctccatgagagccggtaaaacattctctaccctaaatatagcgcacatatgtgtccggtaagcgtccagcaacaaacgctaaagcatccgctataatatagcgtctctttctcgccctctatatctggcggacacacgacactcgctatacactgttcaatcatgcgtgtcaactccttccgttctctcccgtgcttgctctgaagctctagagccatccgccgtcgtga

SEQ ID NO: 143242 - DNA, 377 bp, Zea Mays
cagaaacccagggtctattgcataaaacatctaagactcaggcatacagtcgatgggctgcgggtttaatatgaaagaatccagggtttcttttaaaagactgccagagccgaaggggtacgggcagtcgctggccgtctgatcagaattcggtcgtccagattaaattggttgtgcgctcagaccggtatcgagccctagccgtgcgatcgtagatgaacgcaccagatttaaaaacccctagatctaacttcgctcgtccatattccaatcaacgcccaggatcaactttgtcgaatcgttacgcacgatctaatcacggccattgccacaagatctgacggccctgatccaatgccaactgattgctttccccc

SEQ ID NO: 143243 - DNA, 428 bp, Zea Mays
aaagtttgccttaaaaagaaaagatctcttaccctctaagaagaatcttctctccttttcccgatattaacaaacccttcttctcttaaaaccagatggaagactcctttgtcattaggacatcctacagctcagaggtggaaggattccctcatcttttatggagctgcgcgcttcgcatggggatccgcaagaagccggagtacgtcttggaaggaataccgcgagaatggaattgagaaatgctctatggcagtctacctaggagaaagccgaaattacccaaatcaccctcccttccaagtcaccgccactggacaccgcttcctagacacttgccaaaatgttgcccaagaagccctctgccaactatgccaaaactacaacaggaaaatctccgagacacccttcgttactttccacccagc

SEQ ID NO: 143244 - DNA, 868 bp, Zea Mays
actaataggttcctaaggaaattaggtgtaaggtgtttatcgtgacgctttatcccgaaaggtgttaagtcggcgcataaataagagatacgtgtattttgtgtagtgtggattgattttgagtgcatggtcgcaagaaacgaattagtgcgcatatagacgaggaatgagtgggatgaaatggtgacatgccttcgtagtcatcatgtcgtgtgttcgtgacctaactgaaggtcgtagagaaaggtcgattacatgtgtgttattattgtcaccttgtggttctgtatgaattgcaaggtgaagtagtaggctctctgtgtgatgctagatgtctaggtagacgttcgtgaattgtggtgctcggaccgtcgagatgaaggttaagtcggtcgatgcctattaagtagttaaaatgattaatggaataatcttggggttaaaactagaaactagtgttctcgcacccgtttgggatgttgtagcccaattgcgcatggttatgatcgcgggtaaaatctgtagtgctcatgtggtgtctaaactaaaatgcaaactagtgggtgaaaagcgctttgatatacatgtatgccgaaattgatgattgtggtgaatgcgttgattaaatgtgtatgttagttctagcgcgcgaaataacttggatggaaattagtgagtctacttgttagtccttatttgattaatttaactctaacaaatggtaaagtgttagaataattcaagtctctaaaaacatggcgattcttgaattatataggagctgaaatttattcattgttgttttggactgcacgcgctgctttagttgtgctgtatgtttgatgaactaaattgtgttttctgtaga

SEQ ID NO: 143245 - DNA, 670 bp, Zea Mays
cctgggggctcaatttataggtagctttgtcggtggcgcttaatttggccggaccgtgtgggcggccggagatgaggaagaaccttggcgcggtgaatacgtgtccagtggcgtggcagttgttccggcgatcaacagggagttagagggagtcacggtgatgtggtggcgcggttgggacacgcggtgaacaacggcgatggcacgacgacggtgagcagctttacccgcgggcggtgagcaagggggaatgagttacggctagccggagtggcttccaggtcaccggcggcgaagatatttgaccccgcgacgttatcgacttaccccgagcgtgaatcttgacgccggagacgcgaatcacagcgggaaaggttaccggcggtgggatttttctgccgcggccgatctgatccgctggggacactgtaccatcgcgctgcttcatcagagcttctgacagtcaatgtttgggctcaattttctctcaaatttccatggcaacctaaccgaggctctgcagcaaatttgtagagctacaaaccagcaacacttcgactataggggttgaactcatttgagcactggatcaaggtttaattcacactcaaagttgaccctgttacacttaaaagctgaatttcagaatgaaaccagcctgacagtcaaa

SEQ ID NO: 143246 - DNA, 569 bp, Zea Mays
ttaccttgttcaaccaaaatagttttgttcctaaactatagatcaaatataagcatagtgtcatttgagaggtgcgggggtaaggaaggagggggcaaccacgtgctctctaggaggatcgacctcagccttcggaactgtgcgctgctcgtcaagaccggcgttctgtagcacgctgtcagctcgcctctgctgcaaacccccaacatcaaggagctattcgcgaggttgcagatcgggcacgccaaggccaggagccaggttgtggacgcgctgtgcagggaggagtgaagtgtattggcgacgctcggccaggctagcgtctcggcgatgttggcgtcggcgctcgcggtttgggagtcaaccgccacggccgtgtgtcaggtcgcgaggtcggccgccgtctacgatgtgttgcttgtgtaggagggcgtcgtaccgccgctcattaggatggaacttggaagagtccaatagcgttgtgaacgcaagaaggatggggatggagatggggatcctggcggcgtgcagctcatcgggaagagacgcttgagtggattgggctcccg

SEQ ID NO: 143247 - DNA, 382 bp, Zea Mays
accatgacaaataaaaaataatggagtgagactactgcccaaaaggatctaatcttcatctccacttctctgtcacacggtctttgtcgcggaatgttttttttcttcattggacatataatgtattttgcagcacatagaggccccgaagcatggcactattgctagcaacttagtttgctgctctgcacagagaggcgaacctcgggccgatctcgagggtcgaacgagacgaggacggaagaagagggttgaccgaatcagataaaatctcacggggccggatcaagcatgtgcggggtaatcatgttatcaccccatatctatccccactatctctccgttcggcacaacatgacaatggtaggatcgtgcccttttc

SEQ ID NO: 143248 - DNA, 328 bp, Zea Mays
acacttcttcagttgggatacgtggaacacgttatgcacatccgatagactatccggtaactcgagttggtatgccatctccccaactcgcctaaagatcaagaatggtccattgtagcgaggggacaatttgcccttaactttgaatctcctcattccacgaagtggtgacaccttgagatacacataatcttcttcttcaaattccagcggcctccttctattatcagcataactcttttgcctggtttgagctaccctcaaattttctcgtattatacggacttgttcttctgcttcttgaatcaattcaggcccaaagaattgt

SEQ ID NO: 143249 - DNA, 741 bp, Zea Mays
gggtgtactgtccgtgttgttgatgaagatgatgaagaagaggatgaaatccctctgattcggaagaacagccggcgttacatagctagtggggaaagtagcggtgttccttctcttgctttgtctgccctcattggtctgcaagaattatctctgacgaacttcgatcagactcttgaagacatggttccagaagatctgttgtcagagccggcagatggtggcgcgatgaatgtttgtgctggtgtgcccgatgccgggttggggtcatcccgggcagcgtcccacgcctcatcgaccttagagcgcggtcttgagggtcaggaggctggtctggattgcactgctcccacagaagtgactgagggtccttcagccttagaggtggttgttgcagaaaactcggccctcaaggatggtgctggcgcttacccagcccccgagggtgttgccggagatgatccggctcggatgggtagcgcgagctgtgacccagcccccgagggtgtccaagtgggttctccctcccacacttccatggatgttcacgtagggtcttctcctccacattctggttgcatggcgatagcccaagccttgggtcaaggagtcgctttagaggccagcgcacctgatgacagagttctggcttctgctgatgacactgaattggttcccactgatgcattgcgggttgttccggttggtgatccttcgtcaagccatcaattgacttcccac

SEQ ID NO: 143250 - DNA, 487 bp, Zea Mays
caggacacttagtttttcgaccatcagagctggggaagaagacaagagagcgcaagagcttttttgcggctaaggaagaaggtgactaggacaggaaggcgaaggcagaaggtaaagaaccgaagagcccatctagggcgaatttaaaggggcgaacggagtcaccaaagcttgggccgagccacgccgagacaaaactaggagtaggctaggtcgcttcgaattccccgtgcacacacaccgcaacggtcggtctgcaggtcgatgcgtctcattgcatttaattctcgcccttcctgttgggatgtcatcagacaacgagcgttgcttcgcattacgcatcaaatggtgtgttttctctctcccttcctttccattcccttgcagataacgagaagaaggcacccgtacctcgggcatccttccttgagaaggaaaagggaaaaggcaacatattattcaggggttcgaaggttgggccctcaac

SEQ ID NO: 143251 - DNA, 720 bp, Zea Mays
ccctgagatccgctaatgttttgaactccatatctgtattcatgtgactctgttagaaagtgtggccatatctgcatgtggtacatggtgcttttgaattcaattcaaatctaattttagtctacacttgtttgagttcttcctctcctcgccttccctctccctttggattttggaagaaccttcgagttctagtgttgaggattgatttgggattgttgtggggtgagatacagtccttggaccactgtaatcatctgttttgagcagtttgtggtcgtgatctgatctcgtttcgttttaagttcgtttgaaaaaacccaacaaaaccctattcaaattgggattttgaatatgttcgtgaaatattgatttgttcgagttgaaacttcacgaaacatcttctatctctctgcgcttgctgctagtaaaatttgagaacattctgtgcagtttgcactgcgcggcgctactgtccatcagagtggcactgcctcttgcctagttatgtaattttgtctctggttttctgcatacttttgagttggtttcttgctagcaatttggcatagttaatcgacactagattgatttatactgtggtacatagatttcagagtcccgtggggtttgtgttgaagttgggattaagtcatggtgtgctctcgagtagagaaatgtttgtggctcccattcacactccctctagttgcctcaccg

SEQ ID NO: 143252 - DNA, 508 bp, Zea Mays
gttggtagtcgagcgagcagaagaaggacatgcctacccagtgcagcatcctgcttacttcatcagtgaagtcctgggcccctcaaagagaaagtatcctcaagttcagaagctattatatgcagtacttctaactgcccgcaagctacgtcactactttgatgaccacaaagtcatagtagtcactggttttccgataggggatattcttcacaacaaggaagccattggccgaatagccaaatgggcttgtgagctgggatctcatgatattgagtttcgacctcgcactgccatcaaaactcaagcactggttgacttcgtatcagagtggactgaacagcaagtaccagataacccagagactgcagaagtgtggcgaatgtattttgatggctcgctgaagttgcagggagcaggagcgggaattctcttcaccgcacctggaggcgagcacctcaaatatgccctccagttgctatttccagcctccaacaatgcagccgaa

SEQ ID NO: 143253 - DNA, 592 bp, Zea Mays
acggatttaaacaggctcctcgtgcttggcatcacaggttcgcatcctaccttttttccattggatttgctgaaaccaggtcagataattcactgttcatctatcgccgtgggtccgacactgcctatttgctgctatatgtggatgatattgtcctcactgcctcttctgccaagtttcttcaacacataattggtgctcttcagcgtgagtttgctatgacggacatgggccagcttcaccattttttgggcatttctgtgacacgctccgccaatggcctgtttctctctcaacgacagtacactcaggatattttggagcgcgccgggatgagtgcgtgcaagccgtgcagcacacctgttgatctccactccaaactatctgcagatggacctcccgttgatgacgctactcagtaccgcagcctggcaggtgctctacaatatctgattttcacccgtccggacatagcttttgctgttcaatagatttgtctctatatgcatgatcctcgagagccccacctcgcggccctcaagcgcatcttgcgctacctacagggcactctgtcccttggactaactatgcg

SEQ ID NO: 143254 - DNA, 329 bp, Zea Mays
agggggcagagggaggcgctggacatcctgctggacagccaacaccggagggagctgggcggccatgggaggctagcgagctgctgctcgccagcagggagcagggaagggcactgtgcagggcgccggcctgcaccaggaagctcctgctcctgtggcaagggacagagggaggagggtgctggcttgaggaaggggatgaggtgtgccatggagagagagagtgcaaagctgctgcacggcaggaggaagaagaggggagtgtccgctgggaagaagaaagggagaaggtgttgtggcggctaggggtaggagatgtaaaatttcag

SEQ ID NO: 143255 - DNA, 542 bp, Zea Mays
tacatcaatgacccagattgcgttcaacgaaacggtacgttatgttctaatctcgtgcgcccacgtccgattcgacggccaagatttctttccccaaacaggatatgcgtacggcggcgctggcggaaaccgcggaaaggccatggccggagcacctcgattccgcgcagctagccgccaatttctaaattgaatcgtgatacactaaacctagagcagggcgaacagtaaggtacccaacatacctcggttcagggtgaggacccttctatcgatgtggcggcgcagatccgcagtggagcacaaccacggcgaggaattcctgtggcgctagtgactaatttcgagcgaagctgatgcgaccgccttccaatcggccactagaagccttcaggtccacaccgggagtgcagacgacggccaacccggatttccctcgcgacaattccccttctccctcacggatggcaatggcggtacgacggctaggtcagcgtgtggtttctgcacaaggagagggcaggaggaccgacggggcgtcc

SEQ ID NO: 143256 - DNA, 565 bp, Zea Mays
gtttttatcaattaatttatcaaacaataagatttgaaacgttcccctaagacaagatttgaaacaagctaatgagaaacaagccaaagggaaagcaaacagtacagccttaaaaaacatcagcataatagcacacaatgtatctcaccaatgctgatggaccatacctctgcagctatcttcgcctctgaccttaggtcaactttcaacggtgatatatcctgatcgattgaattagcatgtcctgctttagaaggcgtactcatcaaatcaacgtcaattattactggcgctgctgcaggcgagctggcttcaatctggctgatatgcaattgctgacagcttccaggaccttcagaacaaaatatttatttgtacttctgtcaaggtggactataaccaatagagccattaatcaaccccacaaataatattcaataaattgtagtataagtcagatataggtgcaaaagctgaggtacatgcagtttttggaatattttattatcaccaccaacatatgcatcataagggaaaaaacatgtgctgtacagtgtactgaaac

SEQ ID NO: 143257 - DNA, 390 bp, Zea Mays
gggggctcggggtaagaatccagagacccggcgcacagaggcgagggacggcgggttctaattcgcataaacagaggggctctttaacaaaattgcctggccgaaagggtatgggcagatctaagccgtccgatcatacacctacgctccagattaaaacgcagtaccaccgaaacggtacgcagcgcgcgccattggatggaagatctacggctacaatcatctgaatcccgctcaacgcatccgaccgttcgatcgaacaccagcgctccagatcaactctagtgaaccggtacgcacagatccgatctagaccgcacgtttctaatccgacgtccaggcactttcccctgacccaacagtgccccggtgatggagcacagctccccg

SEQ ID NO: 143258 - DNA, 326 bp, Zea Mays
ccaaattccccaacgtcacctcccgcgccatgccgccgcgcgcggtgctccgccgccttctccccaccaaccctcaccactccgctgctcgccacgctccgcgtcaggcgcctcctccgccttcagcgatcgacgagggaccccttcccgacccgtatgcgctcctcgttcacgaccccatcgacctgctctcatccctgtggcgccgcgcgttcgcgcacccgctcccctcccccttccccaacctctccggctatgcctcccgcctcgatctttggctcctctcctaccagcgtgcctgcgcccatgccacgggcaccttcccg

SEQ ID NO: 143259 - DNA, 455 bp, Zea Mays
cctattcgccttcatcagcaccagacagcgggcgaccccaaagcgtcacgcagtaaacagactggcgatgagctgtttgccgccgggttagtagtttatcaaaagtgtggcgtttctatgatgtgtttggttttaagtcaaaatagaatgagtcctggggcgacaacgtcccctcgattttttataccatgatgtcacaaaaaattgctccagtgttcacttcattttcacgtgactcttatccaaacactataaaaaatatggccgccccttccattcttcttgtatgtccaaccaaacacacctttattattataggctatggaaaggagcgtctgtgatgtcttatgaattgcgatgatgatgatagcctacgcgctgattatgccaagtacagtaacgagcgcccgtgggcttatttaggtaccaaaatgaaaggaaaagggggcttttgt

SEQ ID NO: 143260 - DNA, 439 bp, Zea Mays
cacgcccaaagcaatactacaatcaacactacactggagtagggtgcaaacacaaactagtataaatcatttgggcaaggattctattggccaactgccatggccgacggtgagcaggttgttcgtacctgtgagggctaccactactacgcacgacaaacacatatgtcagctcaagccctcgagaccattcccattacctagccatttgagttttagggtctagaccttgtcggatccttcaagaaaagcacccaagggctgcacccactttcttgttacggtggataagttcaccaaatggacgatggcagccgagctacttgcattactctggagcctgcggaccatgtcgtctagggtgataggttgtacgcctttcttcctagcatttggcgcggaagtcgtgttgccctcataactagaatgtggctccccg

SEQ ID NO: 143261 - DNA, 433 bp, Zea Mays
attttattctcgaactggaaattgtagattgtacgatgctaccagcggctgcgaccagcgggtaagagtaagattgtgaaccgggcctcgagtccatagggctagccggctagcgctgtccgggtaggggaaccgatcgagccgacaacagctgagcagcactacaggcttgcagcagagggacaggcggacaacagccagccaccaggccagccccctcaatttccacgacgcttcatgagtggagggagacacgatgcttgcatgcaacagcttctcggcttgcatgcaggttctgcagcagcttgtgcggcttgcatgtggcttacatgtggtttgcatgtggcttgcatgcagtggaggttgagcagcttgtgccgcttgcatgcggcttgcatgcagggaggttggtgcatgcgaagcgcgagcgggg

SEQ ID NO: 143262 - DNA, 849 bp, Zea Mays
tataaaaataaaaaaactaaaatgattaatattttgagacggaccgattgttccggcttcaaccccatcgaagacaaggtatcagtcgcaaattattggagagaaatatccgtggttataaattcactcgcaaaagctataggacattatgacagagtttggcatcattgaccaatcctaaaaaaacgatgaccgtcaataggagtcaaaaaaaattgcatagctactgtcctactgactccaagttttggcaagctaaaatctgcatctcctgttgaccaataagtcactgcaatcgtgcccagagccttagccactatgtcccctgaatacaacctgcatgaaagtttttagtcgacatttctaaaaaataatgtaatttcttgatagcagtacggcccaacataacgtagaagcacctatcaacaactttagcatattatatcgctctgctagcacactttaatggttacaatacatcatttaaattctttggcagttgagttccaaatgtaaaaaacacgccaaagaaatcttacaaaataacattaaaaaatatgtgttgaatggtttccacgtggcgaaaaacaacatatttttaccatcaagtcaattccttctcgctaggttatccactgtgaggacaacagttttaaaataccacataaatattttattctttagagctagtttagaaatttaaatccactcgctaccagacacagctgctttgccgaatgtttcaggactcaggaaaagacacttggcaaagaagttagtttgttgcatagctaacggttgtcaactatagacgactactaacggcagtttaccccttgtttcgtcgag

SEQ ID NO: 143263 - DNA, 505 bp, Zea Mays
cttagaaatagtctgcgccattccagcctcgttaggttcctttgaaactttagcttccatccttggtgcttcagcagaaacatgagttgatgttttcacagactccattatagcatccagcacattagccattctcctttttcttggagttgctgcggggatgtttgacggcttcagcaatcccgttgcgcatggtggactcagtgccaactattctgctgttttctccacttttggctcctcagtcacatttgttctagcttcgacaggcacagagcgacttggctcagagataggagcgaacccttcaattagctttggcacgtcgatcgtctcaatgcgcctgggtcgacgcgtcaatactttaaccttttgcgactttgacgcactagaagtcgccgagatagcagcttttctcttcttcccttgcttctgcgaaggataacggtagtctggatacacaaatccgatgacatcgaataccctattcaacctctttttaccc

SEQ ID NO: 143264 - DNA, 357 bp, Zea Mays
ggagtttaggtttctaaccttgggatcaaaattgggatgttacagcatgtcgcaccgacttaaggcatttccgacttaaaccgattgctccgttagtagggcatagtgatcaccctaagtcatgtaagcgtgagcatgtcgcaccgacttaaggcgtttccgacttaagccgattgctccgttagtagggcatagtgatcaccctaagtcatgtaagcatgagcatgttgcaccgacttaaggtgtttccgacttaagctgatttctccgttagtagggcataatgatcaccctaagtcatgtaagcgtgagcatgtcgcaccgacttaagccgattgctccgttagtagggcatag

SEQ ID NO: 143265 - DNA, 1014 bp, Zea Mays
ggaccaggggctcgggcgaagccttcgggccgcacacggggatccaattggggccgagcacgagggacgacggtggctgtgtatggcaatggcgacttcgacgatagatggccacggtgcgagtgggatgaaggggagaagaggaggggatgcggctgggtcttatgtgcgcgcggaacggaagctaacctcttgaagccggaagacccgggaaggtggttgaggtcacggcggcgccgtccacgcggttcggttgagctcgcccgcgagtctcgcggggaagacggagtcacacggcggtccagagactgcacggtggcccccaatgtcagtgacgcgcaaggcgcagcggaagaaacggagcgcgagcgggactagtgggttgcggctgacaaccgggtcccatgtgccagagaatgtcgagagggagaggctgacgagagggccccacccgtcggcgcggatgcgacttgggctggcgtgcgtgagttaggtgggccgaattgggataccgaggcccagtttggggacttcattttttttatttttctttcacattttcctttctccatttccaagttaaatttgaatttcgaatttgaattcaaacatgtgataaatttattcttaatcatattgtaaaattaagtagtatcaattctgaaaatatagtttctctttgtattatatactctccttttattctatcttcttttccttttcttgattatttctcattctcaaatcttccaaatagatattaaatcttcaattttgtgacattaatttattttcttattgtggctattatttttactagatgcacatacaacaaaaccaacatgatgcacggttattctcaatattattaattgtttacttgcttttcgatgtggtgctctcatatttagttgaacagtggtaaaaatatgtaagagaattctctccttaatatagtttacaaagttgggtattacatgtaactcgtgcacccggcagaaaccttcggaaaac

SEQ ID NO: 143266 - DNA, 873 bp, Zea Mays
aataactctctaacgatatactatagtaaattgtacatttaataatgagttcacctctttatctcactttatctcacaaactggtgagcaactcgttttttcttctctcttcatttatcttttttccacgtcacctcatcagttctcaataacaaacgaatacgttggtttgcaaggtttacttcgaatgcttaaaccgtacctaatgggttctcaatagcgaacggctcatcttttgatgcggaagaagagaagacgcaggcgaaagcgcgctccgctccagctccacctccacgctctcggcggagatcccgatcctgctgcgtgctgccgacaccgtggtccgtggagctgatttattaatgatctgctcgtacctcaccagtcaccacctcacctcacctccagctccaacattatcctcctgacgacgatccgcaggcggcagctctgctcagcaaacaaaaatccatggcgggcggttactgaaaagggcgagcaggggaaagtctcatcacgcagatgcatgccgcgcgcggcatctcttttccagcgcgaaaaaggcacggcgtcgtccgtcctctcgtcctgaccccctctgctagtctgcttccgctggctcaccaactccgccctcgccctcttcactccctactagtccctcttcacgcgcgagcaagagagaaccgaccagcctgggctagcagctagctaccaccactccgctgcgctttttgacgccgcgcaccctaccatcccctgccccgcacgccgtcccctcctgcggttcgccaggtctcggcaggtgtcaggtgtggcgtcaatggtgtgggtctgaccctgactggcccatccatccgtcgcctactacta

SEQ ID NO: 143267 - DNA, 598 bp, Zea Mays
atttggttttgttcaaaatttcctagaaaaattcaaaattccctccgtctgggctcaccggacagtccggtgtacaccggacactgcactgtgcaatgtccggtgcaccggctggcgcgcgtagatctgctactgtgctgccctgtctggtggttcaccggacagctactgtgcgctgtctggtgtgcaccagacaggcactgtagactgtacagtgtgcccataatcagtttttaaaaactttctctgcctgagccagtgccgaggctccattcctccgtgatgctctctgtctctgggcgctctaggcgatttccttctcctaccctcaccggcggcgatcaccgttcttcggctctagcgtggtgccccttccctctggtgagaacacacctcctcttcccccctccctttgttattctctgtgcagggaaggtttcacacccctttttgaaaatcttcaattctctaagaaatcttgtgaaccctatgtgcctatatgtccctaggacttccctgtaggttctcgtctccctctaggaggtttcacaccttaaatcagctgtttcactgacgttccaaaatctcgcgcaccaag

SEQ ID NO: 143268 - DNA, 622 bp, Zea Mays
gtgtgtattggggactggtattggggtataaagtttatatgcattcttccggtatatatcggttgatgctaaactctactgtatgggggggtctcaaggctataatacaaccagaaaaattatgatatgtgttccatttaaattttaaattatgtcaaatgctacaaggttttgatggaaccggtcgtattgaatcgtgaaagagccgcagcggaccgcctaaaacggatgcctatgtaagttatgaccgatatatatttacataaaattgatctatcaaagttatgaccgatatttagacgtgtgtttaatatagcttcaggttgttcgacgactaccgtgatgaagatttttatgggctaccgcggaaatacagtattgtagctcgggtagaagttaaattcccgattgaaccacgttttcgagacagacaacatttcgttttatctgacatcaatgtaagccaacaattctctaagtttcattttcaaaattacacgctcttcataccattgcctcttctcctactgaaatactattagggagccaagatcgaggccataacatatatgtatgagacagtcaaacatttcgacaatttgctccatgaaaagcatgttta

SEQ ID NO: 143269 - DNA, 425 bp, Zea Mays
cgactatagatgtcatcctagggatgaattggctaaccaagtatcaagccagtcttagctctgacaagagaacgacgaagttagtgtccttatcaggagaagaagtgttagtggagttggtcttgtctggaccaaggaaaggaagctatcaccaagtcaccgcccatattcaggagattgaaccatcagaggctatcaatgtagtcttagaattcccagatgtgtttcctaaggagttaccaggtatgccacctgaaaggaagattgaatttgccattgaacttatactaggtaccgcccctatttccaagagagcatatcgagtgtccggaccagaattggtggaactcaagaagcagattgatgagttgttagagaaaggctacatcagaccaagtacctcaccttgggcagccccagtgcta

SEQ ID NO: 143270 - DNA, 596 bp, Zea Mays
attgggttgaccacgacggggtgtgttttacggtggcggaaaccgaattgggggaaatccaaaattgaggctcactagcgatcgactgaggatgattcttggcggctgggttcgtgatgatccaacagagctcacggcggggtcaatttgtaccaagtgaaagcggtggccggggatttgagcgacgacccgcggcggtcggagaagtaagagttcactggcgcgcgattagtgtcctattaccgtggcagtcattccgacgagccatggagagtcacaagggttcacggcgatgtggtggacaggtagagacacgccgcggacggcggtgatggcttaacagcggtgagaaccttatccaagggatcagtgagcaaggggagaggcacggcggctagccggagtggcgtccagctcatcgacggctatgctttttcaccccgcgatgttatctacttgccacgagcacgaatccagacaccggcgacacgaatcacggcagaggtatcatcggtggtgagatcactgaagcttatcttcttcagttactgtaccatggcattcctcttcagtccatctgacagagctacttcagg

SEQ ID NO: 143271 - DNA, 427 bp, Zea Mays
caagatatccatcttcacctatgatttctgaggcacacaaagatggccccctgaaatgaaccaaatcattctcatcaatggtgaactcccggggtttaccatcgccaaccctctttcgagcttcctgcaataaacgatcctgctgctgagccgcacgcactctctccatgagggaggattgaataagcatccgagtctcctcactagcggtgtcgacatagcacaaagtgatccccaaacggtctagatcagcaatcaaaggcaaggccacttttggaaccccggacctgctaagggcatcagccaccacatttgccttccccgggtgataatgaattgacaaatcataatctttaatcaattcgagccaccgacggtgcctcaaatttagctccttctgagtgaaaatatacttgagacttttatg

SEQ ID NO: 143272 - DNA, 652 bp, Zea Mays
ccatgcttgtgaagaaaagcataaaggatgcaaaaaggtttcgagagcctagccatcttcattctctccaacttttgttgtctagcgctgaacggttgttctaggggctggaggtaggaatggctcggcgcgccgaggccgtgccgaggtttgaatcatcataagttttggctagcatcctgcctttcttgctctctaggtcaacacttcacaactagagatgaggccaaccaacttatcgacacacaggagggggaaacagatcctttgaatcatgtctgtcgaagccagcgcagatgacccacgtcttccatttctcgttctccttttggtctggcatcgagtcgatcgactaccctggtcgacatgtcctcctggtaggctcaaccgcaaggagtctaccaatctcttgctcgatggcactccattcttctttgtcgaaatgtcgtggtcgccttttgtagtctttggagttaggaccaatccatgaagattgctcgatggttttcttttggggcgctcctcacaccggagagtttccatgttgaggtgtccttatggagggagttgttgagcgcaccctcctatcctagagggggcatggaccctatgcgcgtcatccgccaattaggctgcccggggtccagcgaca

SEQ ID NO: 143273 - DNA, 666 bp, Zea Mays
gaagcaagagaaagtagaatatgaaaatatttgtggaacactcaatctcacctcttacttacccaagctcttgcctgatctctaggatcgtgatggtgccggtgtgacagctttgatagaggtggtagagcggtcaaaaggatcacaagtcaaacatcccggttcaggtttttagtggagctataggaggctgatcaaggtgggctatggtactatcaaccaagtgtgttgacgtgcttgaaaaagatatgcaattgttgctataaagattctcaccaaatcaatgtaagtgaaattttcagcaacacaccgcaacacaatcccctttcattttttcacttcctttttttgacttctttctcttctttttctttctctctctttttataacagtaatggggtgcagagatcaaatgcaatgacacaatatgaatacgatggtggtaactagcaagttgaggaacttcaaacaacacaaggtaatagtaccgccaaagggctataggtttttttgtggctttgaactataggacaaaacaaaatataagatggatgaacactgtgataaataagtggatgacagtaatacctaacgtgacaacgaaagctctcataccagatgatatgtaccgagttatattcgatactagggtggaccgatcttca

SEQ ID NO: 143274 - DNA, 472 bp, Zea Mays
ctgctttcctcgtctgcttctactttgctcttcatcttcagagtgaactttggtccaaagattcagaagcgaaagctgctagtcggagttgcacaactgagagaacagttccagaggtaagatggtggctgtgctttgatttgttttttctgtttgtgatccattcattctactgtacgcataggcctctaacagtctattttggaacatgaacatccaggacacatgtgtatccttgtcattcatgcaaattgcatccttgtttgctgtctctctcttttttgtgtgtttcttccttgtcatgttttagtgtatattttgtagcatgaaagctaaaatcttctctttgtactacaaggacattttgatcttattctacattcttacaggagctctctctctcttcctgtcgaagggtttcaccagtaatggcgataaagatgaaggggatattcaaaggactgaagataat

SEQ ID NO: 143275 - DNA, 340 bp, Zea Mays
ggcatggcagcaccctattttctcttcctgggcgccatcgcgatcccgtaggccaaaaagcacaagaacagcgcgagaaagagtgagagttcaggaggctagaatgcggcggaggagttacaaagttagggttcatgcaccaagaaaccattgacaaagatataagtgagcgcattaagtcgggcgcaacgggacaggctggtagctaggaccagttttcggcataacagagcagaatgtgtcgggcagtgtttctggtcgggtacacttgagcgttttcaaaagctaaagtcgtcgatcgagttcactggaatgaattcatcaagcaaagacatgaact

SEQ ID NO: 143276 - DNA, 466 bp, Zea Mays
tatagcgaggagggtgggcttcttcagcgagcgatctgcttagagttggcaaacaggagcagaaaatagggtttcttcataggctccgttgctgcactaaaataaacaaacaacagtagaaagcaatggcaaggagttggcaaaatgaagaaaatcatatgtctagcgctaggaggtagaaaattcacataacttccaacacagagcaggacgaccaatccgttctaggccctgccatcgcctccgccacatcgtcgcaccagaaaagtagcaaaaatatgaactccataccacatactatatttggctgattacctggaaaccaaacaaaagtcacagattgtttacatcacaagtgtaatgccccaacattctcatatgaattaggcacacatcaacctgaaagggcgtccataaaaacacagacattttttctctggtccgagcgatgttgttggaccaacta

SEQ ID NO: 143277 - DNA, 563 bp, Zea Mays
gggaaatgccgaaggagaccatcaccgaatctagtgaaggtgaactggttcggctgaagtacacattcagatatggggataaattcgatgaaccaaacgatgactggctaaaatgcatcgaagttacaagtgatgaactgcttggatcatattccaaggcggaagacaatgcattatccacagccttcggaggccggggaaaaaagagattgaacagagtttttgatgccattggttttgtttaccctgactaccgctatccactgcgaggtcagggaaagaagaggaaaactgctacttcggccactccagacgagcctgtgccgaaaggcaaaaagttaaaggttcttacccaccggccgcgctatattgaaccggccgtggtgcctgagtttggcggggaggcttcttccgctgctgaattaagagaacctgctcctcctgcgcagaaggctgaagagccggctataacgacaaaggcaccttcggttgagctagttgaaatgaaggttgacaaaaataaggctgaaaggtcaaagactgaagaagtaacaaagatgtca

SEQ ID NO: 143278 - DNA, 613 bp, Zea Mays
gcgacgatgacccgtacatgaggcaacaagcagacatcgtgcgtaagtctacccgagcatatgccctcactcatgtggactagtccgaccttaattgatgcttcttcatggccacgacggctctagggctctagtgagtgcgttctgagcaaccaaatgcggtagcgtttaaattgaagctagggcgagtttcaccgattcaccagaggtcgggtacacatgcgaatttggacagaacgggggtgggagagtgggtcgacataagtacactctcgaatgtgttccgcggcggcgaggtgatgttctcgatgccctaccgtggtggtgttcaatcggttgagctgacgagctacattaacattcaaagatgctaaaacatggcacaaagggggatgaacagacatgggaatggctgatcatggcaggatgccttacggcggcgcgagtgaccaatttggggaaaaatccaattcctcgggctacaatggagggattgagaggaggagtggtgcgctgggtgcgtaacaagaatgtggagcagggagggccttcaatttatagtgactacacgagtgcttcgcgaatttgggacgagatgatcttgcagccagaa

SEQ ID NO: 143279 - DNA, 762 bp, Zea Mays
aaaataccacactaggaggatttgaacctgggcggtttgagaaagaacagatatatatgaagaaggtattgtaaatatatatactaatatttttaaaacaaaaatataattgtgtcggtgtgggccgccagcacaatatgctgagaagacatgacacgacttattaggtggctaattattagctctagaggtttagaataggaattaaaacttcttgtcatgagcctcctcgccgaatcgaactagtcatcccgacttttgtcctcctcatcgatctagtcctcacatctatctgtcttactttattcttttcgacgccatccaaaccagtctatcctccatgcccctatggcgccacccccttcctgacgcgacgtcgtccgaccctgcccctcctggtgcctctgcccctaccctgtcgtcgttgtgacaccggcccgtccaacaagtcgaatctcacttgccgcaacgtaccaacccatccccagcggccgcaagcttagcaaaccggtgagtcctaactcttagctggagatgtcgcctgatctcgccccttttctggcgcccctgcctttcgaggagatcgacattcgacaaggtatacataactttgattcggtcatcaagaacttagcgacatatgtttgcttcttttatttgtatattttttttgaacttgtatggtgtattgatattaaacttaaattctataatactagtttttaaggacttgcttgattttgtcatgtggtcttattggcc

SEQ ID NO: 143280 - DNA, 329 bp, Zea Mays
ttaggatatttggctgcagatgctttctgctaaaacagggtaatctggacaagtttgagtcccggtcttctgatggggtttttctgggttatgcattacattctcgtgcttatcatgttcttaaactagagactaaccacattatggagacttgtgaggttacattcgatgagactgcaccttgtccatcccctgtctttgagcctgcaggtccagatcagatgggacagaccatctttatggaggaggagcacgacgacaccgattgggttgctctcgagccaactccaccggccaccccagtcgagcctgcttccactactacggct

SEQ ID NO: 143281 - DNA, 338 bp, Zea Mays
acgaggactgactgaaatgtatcaaagctacaagtgatgaactgcttggatcatattccaaagcagaagataatgcattatccacagccttcggaggtcggggaaaaagagattgaacagagtttttgatgccattggcttttttaccccgactaccgctatccgctgcgaggtcagggaaagaagagaaaaactgctacttcggccactccagacgagcctgtgccgaagggcaaaaagttaaaggttcttacccaccggcctcgctatattgaaccggccgtggtgcctgagtttggcagggaggcttcttcagctgctgaaccaagagaacctgc

SEQ ID NO: 143282 - DNA, 643 bp, Zea Mays
tatgtttcctatcctgtctagacatctggatctggtggaaaccagagtaagcatctagaaaagacaggaggtcgcaccggaggtggaatccacgatttgatctattcgtggaagtggatatgggtccttgggacaggccttattgaggctggtgtagtcgatggacatccgaagctttccgtttgccttggggacgatgactggattggccagccacactgggtgatggacctcttcgatgaagccagcgtccagcggtttccggacctccttacggatgaagtcctgccgctcaacggactatctccgaggcttctaactcactggcctggcattagggttgatcttcagatggtgctcgatcacctccttggggatcccaggcatctgcgatggttcccatgcgaacacgtcggcattcgcctggaggaaggcgatgagcgcgagttcctatttttcctccaggtcacccgcgatgcgagtggtctggggggaatccgcgctgagctggatggtcttggtggggacgccgtctgcccccgatggctgcaccttaggcaccttggcaggcgtcttggtacaggaagtcgaggggtcccttcccccgtcatccgggcgagcagcttctgccgccagggcgtgc

SEQ ID NO: 143283 - DNA, 549 bp, Zea Mays
aggagttctgctagctgaagttggagtgttgaaggagaggggtctgactgcagaggctgtggttgctgactttgtcttcaagaatattcagccattgaaggacagggcatacccggcctatctgtaccgaggcctagctgactccacccgggtcaccgatagaataattcctgttgtggacttggtgggctggctcgaaatgatactcagaggcaaggtatcaaatgttggtgcccctgttgcctactcggcctggaacttgcctccttccaaggcctttacccatttcgtgtcaaatcctcctgctggtgatggcggtttgggccttagagtgtggccctctaccgaagaagttagtgctttggttgctttgcttgaagaaattactgatgatgaacggcaggctcactttgaggtgcctttggatcctagtgatgcagagataagtgctatgcttgatatgttagccgaggattcttctgatgccgctcctgctggaacattggcggtggcgcctctcccagaagctagtaaagccttggatattca

SEQ ID NO: 143284 - DNA, 552 bp, Zea Mays
gcaaggcataatatggttcaagaaccggatttgtgttcctgagattgacagcctccgtgaaaccatactgaaggaagcccatgactctgattactctattcatcctggtagcactaagatgtatcaagatctgaagcaaaagtactagtggtatgggctaaaaagagatgtaggtgcacacgtggctgtatgtgacgtatgtcaaagagtcaaagctgaacagtagaggccagctagaatgctacacccgttaaaggtacccaaatggaagtgggaagaaattggtatggatttcattgttgggttgcctcacaccccgaaatggtatgattccatatgggtgatcgtggatagactaaccaaagtggctcacttcattccggtcaagactacttacaagggttctcagttggcagagttatacatggctcgaattgtgtgcctacatggtgtaccgaagaagattgtttctggtcaaggatctcaatttatctcaagattttggaagagtcttcatgagaacatggatacgaagttgaacttcagttcggc

SEQ ID NO: 143285 - DNA, 306 bp, Zea Mays
gggagatcagatcgttgatccacaaggaggggcagggagtatcggcctgttgatttgcctaagatgatgtttcccaagtttcagggagctgaacccagtatctagtttgacaaatgtttggagtacttcggtatttaccaggtgcctgaattcatgtggccgtcgtctgcttcactacacatggagggtaatgcagcacggtggatgcaggtgcacaaaaggagacaaggtttgggaaattgggctcaattcaccagagcagtgcaggagaagtttgaagcagaagaggattcccaagcaatgagg

SEQ ID NO: 143286 - DNA, 416 bp, Zea Mays
ttaaaaacccagtgggaaaaataaggagagtagtcatactctattgttgatttatttgaactctaaggagataaactcatcacctagttcaaatacaacaataactatgtcataatgtatcatcctcgaaaacctctacgggaaaaatagatgatacgacataggccttgtgttgatgttgcctcgttaaaaactttgaatgagaaacccaatcagggaaaaactcatgcgaagaaaagagtacaacatgatgtgtaaacaagttcttctgatcaagaggaaactccccctgatctttacgaatcactaagtcatctcatacctactctcaaacacattaaaaatgtggagtaaggtaaggacttagttcgtaacttgtttttcatctaaacaacgcaaagtaatattatctccat

SEQ ID NO: 143287 - DNA, 512 bp, Zea Mays
gagagctcccccgcgcaggtgttgattacaatcttctcgcttatcccctaattagtagtgaacaatcttccattatcccgaggaaatctggtgctcctgcgcccgagctatcaccggcggttcaggatgtcgggcgcgcagaacaaacccggcccgacatattcgcacttatgcctcgactaacttggttgtgggcctctttcgcatctggactgactcgcttttgctaattccttttatccggcccatagcgggacgcctccagagggtggctgctatatggccccgggcgtattttcgcactcgtgtggagccgggggatatccatcccccacagttagggtccttggcatcacactttttgttcatctttgctatctaccgttccgccgggatgggtgttcgcaagttttcgggtccctcaatttccactagtgaccattatcgtagccttcgaggcataggtattcacagtctcgaccagcttccccatcaggtccttccgttcacgt

SEQ ID NO: 143288 - DNA, 485 bp, Zea Mays
tgccacgtagctcgaattccacagggataggcaaacttgcactcgaagacccaaagaacttggaccactttttacaatgcagggaaaaagcgcctgcacgaatagtgttccatctcactgtcaactggtcagcaaactgcagggagggaagcatgagcaggaaatgtccatgggccagtttcctcagaattagcgaattagaactgacttcaagcttttgagcaaccgcatctgcaatatcagcatctgacacaggcacatcactgaccacaaagatagatactgcgaacttcaagtcctcctctgctttttccatcaaactgttccaaccaatcacacaaggttgctgatgatgcgctgacccagtttcagtcagaggggcctcgtcatttctgggttgatcagattgcatccaacccggatcagaaccacccctagaagatgacttgcgcttccgatggcgcctgcgtcgcgggcgaggcggg

SEQ ID NO: 143289 - DNA, 1132 bp, Zea Mays
aaaaaataaagtaataatgagaatttgggtggtagcctaaatttaaattctagaaattgaggaaaagataggaaagaaataaataattatgcaatacaaattatgatttaattatagcacttcaccacattttgtatgaccaaatctatatttagtatgtatacaactgtgccacaaagtttaaatttagtttgaagtttggaatttggaaagaggggataaaacaaaacaaaacaaaaagaaaagaaaagaaaatggcaaaactcgagatgggcccaaaccaaagcacgcggcccacttaacctctaacccgcgccagcctagcctgagatgagcgccgacacctggggcctccctgtcagtcaccttcacacgcgctcctgatttccctctcgccgtccggtggggccctattgtcagggttatcctctccgttgcacgcgcgctcaaatccgtggaacccggagctccctgcgtcgatcgtggaggacgttgcgggcacctgggaccgattctccgaggctataagacgtagaactgggaccggtttcctctatgccccgtagcccagcctcattgccgtggaaccgtggggaggtcgagtcaccacagtcgcgccgccagtgaaaaccgtctgcgccggtgttccgtcctcggcgcgtggtcgggtgggtttcgctagcgctcgtgaagtctgtccgtgcccccgaatcaagccgtgagttccgaatcgaagtgaattcctcaccggagtgcgaatcaggggcggagctcccccttcccgtggacaactcgccggcgccagtaatccctggtacagaacccttacccgtgttcacttccgttagagcaacaagtagggccattggaatcggggtagggatcaaccatgccggggattagctccgccggtgatgacttcgtcgccgtcccctgcttttggggatgattgggcgggggaaggaagacgagtgagggtcggtcgatgggcgatcgacggtcccgcgtgtgccaccgcgtgggtgaagcctgggccactcgatcttgagtgaacgctagtgatcgatgcagagtagtgtttcactcgcaatcttgtgatccgtgggatccagatcgaagggctttcatcggg

SEQ ID NO: 143290 - DNA, 1449 bp, Zea Mays
atcatcctcatcggtggaggcatcactatcccatgtgatacaataggattgccccttcttcttcttaatgttcaagttcttctccttcttttctttcttcttcttgctcttcttgtcatcatcactctcattgtcattgtcactgttgaaaggacaatcagcaatgaagtgatccttgcttttgcacttgaagaatctccttggttcttgcttgttcttggagatgaacttcttcttgccttgaccgtagccctttttcttcatgaatctaccaaatcagcgcacaaaaagagctaactcttcatcatcttcatcacttgggcatgcctcatcttcactttcttctttctttgccttgcccttgctcttggatgatgtagctttgagtgccacactcttcgtcttcttctcatcggtgtcttcatcttcatcattgatgtcttgggtgatgatctcaccaaggacttgattgggcttcttcacactcaagtcttccctcaagagaagcgtcctcaagatagcaaatcttggaggcaagcacttcaagaacttgtgagagaagtccttgtccttcacctcttcgcctaggctctttagatcattgataatcacttagagcctattgaagcattttggcatggtctcatcatcttgcatcttgaagcttccaaacttgtccctcaaaacatatgccttggcattcttgacctcttgagtgccctcgtatgtttcttccaacctcacccaaacgtcatgagcatactcaagatccttgatttgctcaaagatgggtggctcgaatgcaatatagaaagcattcatagcatgtgaattgcattctatcttcctcttgtctgcatcggtgagagcttccggattggcaatctcaattttggtttcggttacttgccaaacctctctatgcatggttctcaaatgcatagccatctttctcttccaatgatcatagcttgtgccttcaaacttgggtggcttctctaacacattgatttgagccatgatgacaccgcaaggatgttaagcctcaaatacggtgacctcggctccgataccacttgaaaggtccaaataggctagaggagggtgaatagcctaattaaaaattctacaaattcactagagcaatttggttagcaaataacacggcgcaatgcaaagctctagctctaggctactctagctaagccgcctacacaattctattatcaagagcacaaactaccaaatcggctagagaatagctctccgaactatggagctagcaactatgcaaaatgactagctcaccgaactaaggagctagcaactaaagagtaaagcgaggattgaatggatagttataccaacgtgaagagaagataaatccaattaccgatatgaagtccaattaccgggagatggaatccaatcaatcaatagcaccgggag

SEQ ID NO: 143291 - DNA, 523 bp, Zea Mays
gtctgtagaaatatctcaggtacaaccccctcgccgctggtgaccttgcgcttggattcgcgccgattgccgcgattcgtgcccggcggagtgcagataactattcgaggtaagaaatatcgcgttaaagatgaacttgggctactgtttcgccctgtcgccgtgcccacttgcccgacgacgtggtcgcacgaccatctccgtcgtgacgccattcctcgtggttatgccacaccatcagccatcttagcacgtcgcaattgatcacagtagacaacccatctatcgcctaaggcctcaccacggtgacagccacggtcacccgcgccagtacacttctcctctctccggccgccagcacctcccttccaaattcggagccgccgctcgaagactctataaatttatgccccagcttgctccgctaagtaattgtgcacccagtgaaccagccctcacctccaatcgccccccatagctccccaatttgggatttcccccaattctgttctctgcgccaccg

SEQ ID NO: 143292 - DNA, 660 bp, Zea Mays
cagtgggcttatgatttctggcacttttattgctttttccacctgtggctcctcggccttatcatctttagcttcggctggcccgactgtaggcaccttcggcactatagtcggctcttcagcgctctacacaatcggagcagcttgctttacttcggcagctgaggaggtccccgcgccaaatttaggcaccacggtcggttcaatgtaacatggccggtgggtcagaaccttcatctttttacccttcggctcagctgcaatggccgaagcggcaggctttctctttttctcttgccctcgtaatgggtaatggtaatcagggtatacgaagccaatagcatcaaataccctgttcaatcttttcttgccccgacccccgaaagctgcggacaaagcattatcttcggccttggagtatgctccaagtagctcatcactggtagcttcgatacacttcagctagtcgtcgtctggctcatcaaacttctccctaaatctgaaggtatacttcagtcggaccagaccaccctcactagaattagcggtggtctccttcggcatatcccagctctccacaagtggccataccctgaaggatatatgctcttgaataaaatcccttgtgccaatgaaggcacacacagtgctaaaagccct

SEQ ID NO: 143293 - DNA, 285 bp, Zea Mays
caaggcaataaaagctgctccacttgaggggatttcgaaactacaacaattgcaagtttaagagggataatctttcagctcccaaggttgtttaatgcaaataagcacttgttggaaaggtctctttgtctactttctagtagaacaagagtcaaggagagaacgcatccaaggcgtccaggaacggccgagacaacttcatgactccaccagcccgagtgatttcgtaaatgcaagcactaaattaaatggagcatatctttcaacttccattgttgtttaaag

SEQ ID NO: 143294 - DNA, 488 bp, Zea Mays
gtttttttccagtgatctaggtacttgctgtttggggggaattttgtcgcagcttggaggagaccgctcgccattttgcgttttcgatcgtcggtgagtttgtgtgcctatacgcctgatctgttttataatgtgttgtttgttacgagccgatttattcactagtgttatgtgacgttcttccatactatgcgatatatagagctatgcctgattctccatgtgtgcgtgttgcgagatgccacgaagcgaagcgcccgaggcacaatgcaattgcacagggttagtcctcacaagttcgctgctttgtttatgcatgcgatggccggtacccatcctaatttgcgatacttctcttgcgggccaaaaaatacgcagcctctttagattgcccaatctttgagacaactgatgccatcgcatttttcatggtgaagacgaagtagacccatctaacctttcggggacctctaaccagccaatacctg

SEQ ID NO: 143295 - DNA, 535 bp, Zea Mays
cacagatcaggaggtagctgaggcaggtgtgttgctagctgaagttggactgctgaaagagaggggtctaactgctgaagctgtggttactgactttgttttcaagaatattcagccactgaaagacagagcctatccagcttatctgtatcgggggctagccgactcaactcgggttaccaacaggagaattccttctgcagacttggtgagccgacttgaaatgatcctcaggggcaaggtgtcaaatgttggtgctccaatggcgtactcggcctggaacttgcctccttccaaagccttcacccttttcatgtcgaatccacccattactgatggcagcttgggccttagagtgcgaccctctgctgaagaagttagtgctttggttgattcgcttggggagattcctaatgacgaacggcaggtccattttgaggtgcccctgaaccctagtgatgcagatataaacgctatgctcgatttgctagctgaggattcttccgatgctgctcctgctggggcgttggcggtg

SEQ ID NO: 143296 - DNA, 352 bp, Zea Mays
ggaagaggtggataactctgccctaaaagaacccgccccctatcgaaccctgcggcaccgagtctagcctttataggagtcacccctcaccggagataggctccaataacacccacacctatgacacctttctctcgaaggaagagcacccccgccaaatggtttcagactcaagctttctcctgaggcgtaacatcacgactccaattggagggagcctcgaacggagcgctctggtcgacaccgaggagctacgacctcggaaagggcccttgaacaacatcttgtaagtaaaaccatcgcatgtaccaacccttattagatagggagaggggaatcaacatgtactcgc

SEQ ID NO: 143297 - DNA, 333 bp, Zea Mays
cgaaaattctgcagctccatcggcaccaaggcagtgtttgcctctgtctaccacccacagtccaacggtgtcgtcgaacgcgccaacgacaagatcttcagcgctatcaagaaaaggctcctcgatgataaaaagggcaaatgggcagaccaactacccaaagtcatatgggcgttgaacacaacagagtccagagcaaccgggttcacaccctttcgtctgatgtatggatccgaggcaatgacaccgcaagagttaaagcacggatccccacgaaccaaccaattagccatccctgacgttgacgaatcaacttctgaagatcttatcgac

SEQ ID NO: 143298 - DNA, 485 bp, Zea Mays
gcctaaccagggcggtagagttcaattgaataggtcagtgagctccactaggtgctagggaaggcatgggcgcgaggaattgaagaatggctcaccggataactcggtctacgcgcggaatggctcatcggataagtccggcgatgatgatcttgctgttccagtgagacagggcttcgattctcgcttggagaagcttcacggctcttcagggaagctgtccaagggttggttgaggctgagggtctctggaaatggctggccacggtggtaggcgctcaggtggctcgggcgggtggcgcagagctcaccggagataagggtggtgtctggctagcgagggtgagtgcggagtgaggtgaggcacgtctatgggtggtcttaaaggcgtgggtgagcacgatcaaggggtggctctaacacgctctcggggtgtgcacgggcgagcgccagtgcgcgctctggcgcctaggcacgacgtcgag

SEQ ID NO: 143299 - DNA, 386 bp, Zea Mays
ccgtgttgttgatgaggatgatgaagaagaggacgaaatccctctgattcggaagaacagccggcgttacatagctagtggggaaagtagtggtgttccttctcctgccttgtctgctctcattggtctgcaagaattatctatggtgaactttgatcaaactcttgaagacatggttccagaagatctgttgtcagagtcggcagatggtggcgcgatggatgtttgtgctaatgtgctcgatgccgggttggggtcatcccgggcagcgtcccgcgcctcatcgaccttcgagcgcgaacttgagggtcaggaagctggtctagattgcactgctcccatggaagtgactgagggaccttctgtcagtgttttgggtccgaccg

SEQ ID NO: 143300 - DNA, 336 bp, Zea Mays
aaaaaaaaggggaaggtgtagggattcccatttctggagataagggaagggcatgcgtgtccaatatggcctttatagctaatctagaccctgaaacctgctttgctctgacattaggctgacacatgtactctgtgcaaccaatgatctcatgcttaatgcccctaacctcatagatagactggcataagtgcctccttgtgctgtttcaagtctgaacacaatgctctatggatttctctacaacagctgtaataataaagccttttagtcctaaacaaggctaaatctttaggtatatttcattttttttttcaagtcttcctttaccgtctc

SEQ ID NO: 143301 - DNA, 553 bp, Zea Mays
ctaaggtccaaaccgccatcaccaacaggaggatttgacatgaaatgggtaaaggccttggaaggaggcaagttctaggccgagtaggcaacaggggcaccaacatttgataccttgcctctgagtatcatttcgagccggctcaccaagtccgcagcaggaattcttctattggtgacccgggtggagtcagctaggcctcggtacagataggccgggtatgccctgtccttcaatggctgaacattcttgaagacaaagtcagcaaccacagcctccgcagtcagacccctctccttcaacagtccaacttcagctagcagaactcctgcctcagccacatcctggtctgtgggggactcggtccagctcggagtgcgaacatccggctgtctccctgaccgtggagggagagaatttccgtgattctcaacaataaaccactccaagcgccatcctttaatgctgtctttgagggggatgtcaagataatcggttttccttccgcggcgcatctccaagctcgcgcccccaccagctgatgctgtccacc

SEQ ID NO: 143302 - DNA, 434 bp, Zea Mays
gttctgagaactgacaatggtatggagttttattctggtgattttaactctttctgcaggaaggagggcattgtgagacaccacactataccatatacgcctcagcagaacggtgtggcagaatgtatgaacagaacaataatctccaaggctcggtgtatgttgtccaactcaggtttgagccgaaagttttgggttgaggccgcttccactgcttgtcatttgatcaactgttcaccatccacgactatcgataagaaaactccagttgaggtttggtctggttccccctatgattattctcagttgagagtgtttggttgtactgcatatacgcatgttgataatggtaaacttgagcctagagcaattaagtgtgttttcttgggttatggatctggtgttaaagcatataaattgtggaatcctgatac

SEQ ID NO: 143303 - DNA, 481 bp, Zea Mays
cttgttaatgatgcactgtaacaggtctgctacgagaacaaaaagtagcggtgagagagggtctccttgcttaacaccccttttttgttgtaagttcttccccgggactccattgagcagcactgcagatgttgctgtagaatatatctccatgacccaattaattcaataattagggaacccaagttgcctcataatcatcttgattgtattgtgttctatggagtcgaaggctttcataaagtcaatcttcaagataatgtattcatgctttgatttctgacattgataaatgtattcaaaggcccacgccaaacaatcttgaattgctctagatttaatgaacccatattggttaatgtggaccaagggtataataatcttctggagactgtttcccataagctttgtgatgattttaagtgctgaactgctaagggaaattggtctgtagtctccaatagttgttgggttgctgact

SEQ ID NO: 143304 - DNA, 395 bp, Zea Mays
tgttaagtgggactcgatgtgcatggcttggagatagttgactgaaccaaggacaaaagcaagaaggactttgaggtactagagcaagggagaaggtcaagaagactgaggtacctaaagccaaggtgaagaagaggttcttgcaagaagtcaaggttggtcaagctgagaagagacatggtgcattgaagaccacaagataaggacgtgacttacaaccattgaggtaatgtttatggtttaagtgataaggctcaagattctagctcgagtggagtcatggtatggattggttatgataatgatgttccttgaagatgatatattgctaaaactcggcttatactaataataattacctgatggattaaaaacaattgttgttgtttgttagc

SEQ ID NO: 143305 - DNA, 628 bp, Zea Mays
ccagagtgaggcttcgtagtggaaggctcgggcagaaggtatgttttgctttcatgtgatctgcctaacaggactcctcctttcatttgtgcttatgtgttgtttggctaggtttagattttgagaaggccttctcgagtctattgacacatccagggcactcacccaggccttcaacgcgaaaagcgctgagtgcaacgccttgtccaacatagttgtcgccttctgccggacctttgggattgatgacatccccttaggcaattccctacagagccgcatgcttgccctaagttgccaaatgcggagcgaactctgcggggctctgcttaccggcgtgaagcgagtgcttgccgtcgtctcctcccactatgagatcaatcttgagcgagtgatagagggctacgttctgccggagggagatgatcctgctgtggcagaggtctagaggcttgcggacgctggtgaggggccgagcgcgacactggccttgcactttgataaggaggttgttccgcctgtgtttctgctcagcaccaggttttattctgcggccacgcgctccagcgatgtcgaagctacctcggtcgtagctggcgatgttgaccctgaagatgctgcttctccc

SEQ ID NO: 143306 - DNA, 364 bp, Zea Mays
aatcctacccagcaaaagtattatttgatacgggtgccacacattcttttgtttctacaccttaggtagaatcacataacatccccatagaaccaatgattccacctttaagagctaattcagttgggggaaaagttcagtccgataggatttgtccgaatctaaggattgaaataagggggatagatttccccgctagcctagtagtaatgggaactcaagggttagatgtcatcctagggatgaattggctacacagaaaccaagccactatcagttgtgacaagagaacagttaagttggtgtccccatccggaaaggaagtagtaactaaattgtacttacctgaactagaagaaagagc

SEQ ID NO: 143307 - DNA, 722 bp, Zea Mays
ggaagatcaaattcatagccctctgataagtagcaccagcatttttcagaccaaatgtcatgacaacccattcaaataaaccaatgaagcctgaacatatgaaggccgttttagacgcatcttcttcggccatgaaaatctgattatatccggcattaccatcaagaaagctaataattctattccctggtgcattattgattaatgtgacggctatggacatgggatactcatctttaggagttgctctatttaaattgcgaaaatcaatgcatactctaagcttacctgactccttcttctccaccagcacaatattggagacccactctgcgtatctgcaaggtctaataaaattagcttccagcagccggtggatttcgttcttgattcgtgggagaagatctggatgaaatgttctagctctttgcttgaaaggtctgaaaccgaacttaataggcagccgatgctctacgatctctcggcttaatcccggcatcttagtgtaattccaagcaaagcaatccgaatattccttcagtagaccgatcatctcatttctaggatcggtctctaaggttttgtttacaaaagtcggccttagagttttaccatttactatgtcgatctcctccaaaggatcggccgatgtaaacccttgtcctagtttatcgagatctccgaattcctctatcatgtcccccacagaggaatcagatgat

SEQ ID NO: 143308 - DNA, 332 bp, Zea Mays
ctgaggtgggcgggggtgtctcctggtcgaccggaggagggcggatgatgagacgctgcgcagtggccatctgggcggtcagtgtggcggccagtgcgagggacgcggtgcgctcgcgctcttgagaggcggccacgacagcctggatagccgcaatggccgatgacatggtggagtcggtggagagcgtcgtggaagaccaggtggcatcggcaacgagcggacgagtggtggagaacctagggggcggctgcctggggaggcgggtcggcgatagaagaccggtaagggcgcctgtacacgccgggtagcccggtaggccaagcccgatg

SEQ ID NO: 143309 - DNA, 405 bp, Zea Mays
tgaagatttcttctttccttgtttgttgcttgctacatggttagtaaaaactttcttttctaacatcatgcctttttgttttaaatagggacaagatttaactaagtgtcccttctttgagcatttaaaacaaagtctatcatccctgttaataatcaagccatttttaatgtagggacatgacctaatcaagtgtccctcttcaaagcagtcactgcactttttatttatcttagtgtgaagtgtggcttgatcattaccttggatgttaccttttgtggaggcgaggttgaggcttttggaggaggtattgaatttcatcttttgtttctttctcttggccatcctcaagtccttgacattttcttcaagggatgtagtgcatgccacggttgttcccgtctc

SEQ ID NO: 143310 - DNA, 451 bp, Zea Mays
attgccttaaacaaaggctatattcaactcaaagaacgcataatattagtgcagacttagagaaaatgcagaacgttgggcaatggggtttcgacgacaacacgccatgttctcacatgtgcccccatccattagcagcagcatacacaacaacaggaatgccaaactaacagtttcgtatggaaggggagataccacaggcatatctgtgcgacaaagtatgcagttggcgggaagaggaggaggtcccgtgaaacgctcggaagccagctaatgtgctcgacagcagttgttcgaagacgaaacagttctttatttgtgtaggcgaaagggaaagagctagactggcataaccaggggccatattaaacctaaagaaggtagctataccagtacatacctcacaaaagcgcagaacgctgagcactcgggctttaacggcagtacgcca

SEQ ID NO: 143311 - DNA, 331 bp, Zea Mays
tgactgggcaaatgcagtacaccggcatggctaatgttaggatacgaggttccaaatctttgcttgcattggcaactaagggtgaactcaaaatttggaggggccgtctgtatggactacaaatcctaaaccgaaacaagggtacaaagtttgttgcagcaggtacctaaatgggaggatgaacaatgtaacaaggtgacagcttaaactaaaagtgtggatctggtaaagtcgtaagggttggggaaaataaactaggattgttgaactaaaccataggtgttgtaaatcattgttcaatgaagtattcatatgacggggtacaacatgg

SEQ ID NO: 143312 - DNA, 1330 bp, Zea Mays
gttaatacatccagaattaaagattgttcgatggtaaggtggtcaaatgttctttacttacactgtccttaacggccatagttttaaatgaatcttcagatggagtaccaacttttgagtgacaactgacaatgacttggacaacagaaatggagtaattcttgtttttcgttcatcttcctttgtcttatgtggtttctatctgctttgcagatggcacactcttagtcacaactactggtatgttttctgtttcactgcacgatgtagttcagtgttctgtttgtgttatgaatatcggttgatgcgaagtactgtactaggagttcattaattctacatattctaaattggttggttggttgtgctggtccaacagagcaggttggtatcttgagaattcacctgacaaaaaaaatgataaacttggtagcaatggtaagaaacagataaatggaatcctaataaagatgggagcattcggtggtcagactctcaccgcgattcactgaaattttctcatatcttgatttcctcactactttcatttgttattcatgcttttttcttctccttatatgttttcttcttttgtgatgtagttttcgttacagtttgtcataatatgcaagttctaaacctaaaaacacacatgattatatagtagaagagtacatcaaagttttcttctacctacgtatatctatttagatgacggaattattagcacacttcttgggtgtacaaatcagtaccaaaaggcaaaaaatatctgagaaggctgtttttgtttcatttgtgatattgtgagtgcagtcattgatgatttcttgcccattattcaggaatcaatgatgaagccatttatcgttatcaaattaatcttcaagaagagacatcaagtgcaagatttagcaagttggctaccgcatacaaaaatcatgcacgattcaggtacgctgtctgtttttagtttgatgtgactaatgaataccttgattgattaaattgtggatatgtttctcaacacagtggaactgaagtctgcctttgtctctcaaatgatgctgatgttgatgattttgtattatggttggtttgtttcttcaaaaaggtgatttctcaacatataattattagaatcctaataatgatcttatggtagggtatttgtagaatatattggcaaagacggtagaattaagtgtcaattttgcgcagctaagtatgtcacttttgtgttgttggctccattatgtctgagctgatatttttttcttaacctgtgcagatacaagtgctaagagcagcagtaagtatatctgaactg

SEQ ID NO: 143313 - DNA, 375 bp, Zea Mays
tttatatagttgaatattggtgaagtgtgtgcttggtttgaatttaggcgaagaaaaagtaatttgggcactcggcttggaaacgatcgctcaaatcgggaaatttggtaaactttaagcctgggatctcggattggtgtgaaatttggcaagtaggttactggaagtgtggtgaaggtgcctgaaaaatttgggttcaattggagcaagtttggctggtttgggcatttcatcgaacacgtgaagggcgaggaattagggttttagggaaatggccttttgaggtatgaaaaccctcccgaaggagctaggaacctgcaagaatgtttgaggcacgcataggaacacaaatggccacaaggttttactggattt

SEQ ID NO: 143314 - DNA, 273 bp, Zea Mays
agcagtcttacctatgccacctacaccaacaaacaatagagacaacagaaactgggttctcgacctgagaacttatcagagcagttaccagctgttgggcttcgaagtcccgcccggtgattctcccgtagggtattgagcttgtcatggcgttgcgattgctgcttccgatgttcctgggtagactgagtacttcacttactccacttgtaacctgctcaatacgctccaacagatttaccatcttattctttacccttgctgatctatccc

SEQ ID NO: 143315 - DNA, 605 bp, Zea Mays
ctgtgatggtgttgcgggtgccttcctcttttttcacacgatgggtcacaatgcaatcttcttgaaagatggccaagttaaccagctcattgtaggtctctacacggaccttgttcaattactccttgagcttggtgttgataccgtgaaggaagtgatctctcttcttagcatctgtgtcagcaacccaggatattggcacaaatacttgaaagcttgtgtgaattgcatgaataagcaggtgcattgagtgagtgccaaaaattcattcagcttcctatccatcgacctttcttgaatgtgatgtccatggaaggctatcttgaatttctcccaagtaaccacatggtcagcgggtagcatggtagttctaccactacatgtgagctgattcgttaagttgttgggctgtgaaccctgccttgttggcacatgggaatgcacaattaagcaaggtgaacttggattcaatgacatggagccagatatctgcattgacatgttcttcagttttgctaaagagcgatggctgtgtgctcagaaaattctgataacgtgcaattgctggttggtgctggtggttaccgccagaaaacggttgggac

SEQ ID NO: 143316 - DNA, 721 bp, Zea Mays
tgggaaaataaaaagaaaaaggtcaacatgctgtttgggccggttcctaaccaattcggcccactacccatgctctccccgctagcccatcgccaccgcgcccggactcactagcgcgtggggcccacatgtcggtttcccgggcaactacgtactcacccgcgcacgctcatctgtatcactgtcaagtcgggcccgtacgtcagccagggcacctcactcttcctttccccgcatggcttacaggtgggacctgcctgtcatctctatctcttcccccttcttcgctgtgtctgtttcgtatccacgtcaacaacccgagcgccatgcgcggcttacttccttgcttcgcgcgagttaggccacgaccccgactccgtgggctcggtggataaaagccgagcgcacgcgctccttctcccctatcccctcttttagcccgatttctcatcgccaccagaacgccgccgcgcgccgtgtgaggggattcggtccgccgtcgtcgaccggtcgatttctcagcaataggaccgaagtctggggtgcgggagctacgcctggtgcggtgggtcacggctgtaaccttgcattggcgcatcgcacggcgaacttcggggaattcctcgccgtggccgaagactctcggtcggaccgcctaacgccgtgggtagagcttcttcgcgggtgattctcggtaagcaatccacccagagcttcgtgc

SEQ ID NO: 143317 - DNA, 484 bp, Zea Mays
caggtaaatgttttccacaaattccaaattcccaaagcgcatcacccgaatgaggaaaaaggacaaaaagaataacctccacttctctttgcagaccgggtatcacactctaccccccttagaattcgacctcgaattctaacgcttctatcggaacgacaaaaggaaaaaattaatgaatcaacaacacttacccacaacaaaaagttccggatatttctgccgcatcagctcctcaagttcccacgtagcctcgcgctcagactgattagtccataagaccttgacatacttaattgatctcttcctcaaaacacgctccgaggattccaagatacgcaccggacgacactccaaggtcagatcctgctgcaccgcaattggttccatctcaatctgatggtccggatcccgcaagaacttcctcagcatagagacatgaaaaactgggtgtacccctgccatggaatccggcaattgcaag

SEQ ID NO: 143318 - DNA, 290 bp, Zea Mays
gcgacatgttaaagaagggtataatacaacccagttcatcttcattttcctccccagtgttgttggttcgcaaaaaggatgggtcatttcgtttttgcgtggattatcggtacttaaatgccttgacagtcaaaaccaggttccctatacctatttttgagcacctcattgatgaattagctggtgccagttggttttccacgttggacttgttgtcaggatatcatcaggtgcgattaaaagctggtgaggaatataaaacagcattccagactcatcatggacagttt

SEQ ID NO: 143319 - DNA, 674 bp, Zea Mays
ccgacaccgccagattcgtgccgggttccgcgagatctctggtctccccggtttcgctcccacgccccaatgccccccggtcgcgactcgcgagtggcgacgcgggcgcggggcgtggtatccgccgccgctcgttgcaccttccttaccgatcagctgattccgctcgtccggcgggggatcatccgagtgcgtgtgacgtaatgctcccgccagtcgttaattgcgttactggtggctggctggccgctactctgttaaggaccaacggcgctggtgcggtttgcagtagtatgtgcagatgtgctcgcagtagagcatggatcaataactttgtccttatgcaaagattgttcgtaatagaaccttgcacctaacaagtctacatctggcatggcttgccaattgcatgatattttcctgaattcctgcaagccagctatacgtcttccctttctctagaaggtttgagcccaacagaggtgatgatgtaaataaggtggcaaggtgatgtatgtacaagttttttttctatataagcacagtggtactcataagctgtgccaatatgcaactcttaattatcttggcattggatcgcttctaaaatttcagtatgaatagtaccttttgatatcatatggcagtttaactacacatcttaacgctatgct

SEQ ID NO: 143320 - DNA, 1060 bp, Zea Mays
gcaaaatagaaagaccattactatcaacatttattttgcctgaaaatgctagctcaatatatatgaacctagaatcggagtccatggcagagtgctagaagcacttagattggaacaaatggaaagcaataattgagacaaagttgtgctcgcttttatcaaagcgagggttttgggcctacaaccccaacacctccaaaagacatccctatatgatgcaaatgggtcttcttccagaagaggaatgaacatggacaggtggtgaaatgcaaagcaagactggtggcacaagggttcatgtagagatcttatgatgaaacttactctccgtgccatgagtggcataatgttctcttatcgtatacctatggtagtaaaatttaatctaaaaatgcacttgatggatgttgtgacaacatatttgtatgtgccattggattcagaaatctatatggggtccctaaaggattaaacatccttgaactaaatcaaaaccgcaacatgtttagagtatacatgcaacggtcgttgtatgggttaaaacctataaagacgtggttcaaccaattgagtaactttctcctaaagaggttacacaaaaaatgatgattgtccctatgacttcataaagaagtccaacgatggacttcacatcatctcaatttatgtcaatgattgtgcattagccttggagacttgatacgaaagaccaactattgtacctttttcatgcaaggtttttaacgaggcaacaagtataacataagtaatgcatgtgatgtgctttcttctactttttccaacataaatttttgaggggaggcgtaataagacatacatataatatgaattaggccaagagggtgttatgaattcatgtcaaagaacaaatataaaaacaagactttaatggtggccaaattaatgaaagaagttgcttagacatctcatgccatcctcttctctctaaaaatgagatgggtaggagagctaagagatatttcagtgtacatacattcatgttctccaaagaagatggataggagagctaagagatttc

SEQ ID NO: 143321 - DNA, 583 bp, Zea Mays
cttcggcgttggcactttttccttggcttcgaagagcccaagtatacacgctgagcctaacaatggtgtttggggtcagctggtgtaggtagatttcaaactttttcaaaacttcaccaatcatctcataaaggggaaccaaagttctgccctaaagaagctcctgaaaactacaactccatcctctttcggctctggaatcgtcccctctccagcaaaacgaaccagttcatcatcattttctccaaaatatcctagtttcttcattagaactaaatcctcagctttaactgtggatctcccaaattcaatatgtctgggcttagtcggacataggatattatcatcatcctcactttcattttcactttcagcttcagccacggcctgttcagcttcggcatcagaaataccttcggcgatagtttcttcctgcacaaccaacccagaacgcctcatcatttctaagatgggagttgtctcagtcgtttcagtctcatatccctcgcgggtcaccctagcatttgatcttactctagccattttgttgttcagactctagcagacgaagttgcacttcgac

SEQ ID NO: 143322 - DNA, 299 bp, Zea Mays
tctcgtccctgtggttctggacatcttttccatgctctacaccaggtggcacgacttcttcctcctcgccgtcggcaagtacaccctggaggaccatgtcctcaccgacaacttcgcgcccacttcccctgactgggttcgcatggactacgtcgtcaagtcgtggattgtcggcaccatcaccactgacctcgctgatgcagtcctcatccgcgacgctattggccgcgtcgcctggcttgccattgagtctcagttccttgggaaccgcaggactcgggccctcttcctcgacacga

SEQ ID NO: 143323 - DNA, 822 bp, Zea Mays
tcttttgtcaagctgattacaaggtcaactgcctaattactggatccactcagcaccagaaacacggacgtttggcttccttcgacgtcagcccatcttctgaaggcttgtttcagcagcctccgttcctgcatcctcctccaattgctgcgactgtgctgatgtcctgacattgtcctccccttgaaatgccgcttgcccccaagcggctgcagtcggaaaccgagcacgcaaagcttcctcatcttcccaagtagctaaagcatcatcgccttgagaccacttaatgaggacttgctgaatttgtttgcctccccgtagaatgacgcgtcgatcaagggcctgtaaaggaacctgaatgtgacttaaagtgtcaggtagagcagcactgactggtcgatttcccactgcacgtttcagttgagatacgtgaatcacagggtggatagtagcagaagaaggcaactgcaatttataggccactttgccaactctcgcaagaatcatatagggcccaaaaaacttgaagcttaacttgtgagctgccctgggcgccacagaggattgcacatatggttgcaacttgagataaaccatatcacacactgcgaactccctctctgtccgtcctttatcagcttgagatttaatccgttgttgggctcgcaacaggtgttgctgaatgagcttaagcatcaactccctttgctgaagccaagtaccaaggtctagttgagtagaagcatcagaaatattgagtcccagatggcgtggtgcccttccatacaacacttcaaaaggtgaacgccccaatgaagaatg

SEQ ID NO: 143324 - DNA, 852 bp, Zea Mays
aaaaggggtttttaatccctacgccaaacagccagacccccccccccccaaaaaaaaacatgcccaccactaacatagaacactataaacgacctgagccaaccatgtctcttggcgcaagggcaaagagatgagagacctcttgagtcagcggaacacagttgtaactcctactacacaagaaattcacttcattcaagcttcgcaaacgccaataaaaaacgcagcgattgaggtgattccacatagcccatgctcctaagatgatggaatttacctctttctgaactggaccactcactctatcatttgctcgtgcccaccaatcatcaaaggaaatatcattgggctgggggacccacataatgctggaggaggtactacgcttgctgagtgaaaacaccagaaacaagcaagtggtcaattgtttcttctgatcacaatattcggaatgcagtaacctcttttggcaaagatgatttgcagtccagcacttattatgagcaactatccacataaagaatatgcatttggcagtcgcccaacttttccaaattctctcccatggtttaaaatgaacagccccaacaaacaaatgttgattttgttgagtacttttctttcgtacaaaaataccaaaagtgagcgtcttcaacatcgagctgcagctccacctttgagagaaggtccaataaatcaagaaattcagcaatgactgtaacagtaactacaccttggatccgaaatccaaccaatttctgccaaagcatcccaaactgttttttgctttctgagaagatacacattgaccatgcagccaatgagggtcaagagatgatacacactgaccat

SEQ ID NO: 143325 - DNA, 438 bp, Zea Mays
gagtatttcaatatgtgtcatgctcgagcaagaaatatcatagagagggcttttggaaggcttaaagggcgatgggcgattcttagacccccttctgctgctccgtttacagtacagtacttttctgctccgtttacagtacagtacagtacaatctgctccccagttataatctagtaatgcacgcgtgaccgaccccttcagttcttagtgagatttttttacagcccttgctttcattttttgttctttggttccttacagcccttcagtgtcttggaagtatgctatatgtatatgtatttccaaggctggtttattttcccctaaactaatctgtcagcgtcacattatcgtcaatagtaaaccaaacagctggtgtttagtgttgctgcatagcaatcttttcttgtaggttgtggtctattttaatattcc

SEQ ID NO: 143326 - DNA, 521 bp, Zea Mays
gcgccgccgtctctggctggaggtgggaggagacacgacgaccgatggatcttacaccgacggcgtggattagactaggtataccgtttcagggtatctcgcctgtggcgttagatcgggatcctagggccacgactgggtctcgccttaattaaatctgggcggttgatctcgcatcggatggacgtgatcgcaccccaattcacattcacacgcatctaatctgtgccgtcagtattaaatcggatggccgagatttatccgtaccccttcaccatggatatcttactaaagagcccctgggatttactgaaataaacccaccgtccgtctgctttggaaattcattactttcaagtccctggaatttatagttttacccctggacttctatggaatagaaggcgcggtcctggaattgatgtttaatggtaaaattaattctaaaatgatttttaatatataattaatcctagaaccttgttttactcataactaattcatttttattccgatttaac

SEQ ID NO: 143327 - DNA, 328 bp, Zea Mays
gcagttctttggaccagaaattatacaagaggcagaagaacaagtccggcaaataagggagaattcgagaactgcgcagtcaaggcagaaaagatatgctgatacccagagaagactactagagtttaaggagggtgatcacgtatatttgaaggtgtcaccgatccggggtatgaggagatttaaaggcaaagggaagttgtcccctcgctttattggacccttcttgatcctgaagcgagtgggagaggttgcctatcaactagaattactcgatcatcttgcggatgtacacaatgtcttccacgtgtctcaactgaagaagtgt

SEQ ID NO: 143328 - DNA, 366 bp, Zea Mays
ctctgatggggagggtgacttgtagggaggcatggacacatccgataatgacatcctgaaggtataccaagatcctaatgaggacgaacctgaactcgacaaggaggaggaccccggcgagttggtggacattgataggccctagacacaggagccacttatacctatagttcctaatttagaggttcttgtacttgatgctaccactctagaggcacctattctggaggactctatacccatgcacccttcacctaggaccgaggaggatcatccactgcaacattggtctaaccttgtgatttcctcgcgtgttctgacacatgcttacaccagtactggacaaagtcatggtcaactacatcg

SEQ ID NO: 143329 - DNA, 288 bp, Zea Mays
tttgggtgcgtgtgttcttgtgtgggggcaggggccgggtagcaggcggaggtagtagtaaaaatgggtagtaacaaaaagagctaccactttcaatgcatgtgtgcaggccggccggccgtaacactctgaccaacgaagattatgaaacggagtgcaggaaaataccatccctcagcctggttgactaaagtggatttgcatatgacatgggaaacatgcttgcatgcatgtactactagcaaataaagcatcttttttcttgaatagaagaatgcatctttaatt

SEQ ID NO: 143330 - DNA, 390 bp, Zea Mays
gcggtagctttagctgaaggttctctaatatcattcgctgaaactgagaattctggctggattacagccttcgcatgttcacaaccagcttttcgagcaatgacatggcccctcgagcacctacgcaggcacaaaagtcccctctgccagttaagacttcttcaaaagcttcaatctcaccttcaatcaatttaaacacaccttcttgatctccacggataaaattctacttagttgagaatgcgccaactttagcaaaagcgttttcaatttgtcagaacattgcatagcaacagagaagcattcttcctttgcttgtcgaagctcttcaacatttttttgcactctcgatcgttctgtgtcagatatttcatgcttcgcctattcaac

SEQ ID NO: 143331 - DNA, 313 bp, Zea Mays
tacatgcgttattcagttgttttcactgatttttgctgggatctgcggtagatgttttcatttttctttcttttccctgaaaattcacaaggtcacgatcgactcgttattgccgctttctcaggattgttgcgtttgccattgtcagtaatgtatttttccttctaggaagtttactgatcgttgttatggtgctctgtttttagattccatggccaaaaataataaatgtggtaaaattaattgtcattgctggatttgaatctctctttgatggtattggttgtggcaggtcagattctaccatcagtgt

SEQ ID NO: 143332 - DNA, 1523 bp, Zea Mays
cttgattagtcatcggtatgccaatgatacaaagcttagcaatagcactatcctaagttatgattagcctccaggtagacagccagtacctcgacaggtaatgcatctgccgccaaagcacgatcatcagcaattagtggattttgtccatctgaagaagtaagctcatgaataccagccaaaaggggtcgccatcttctaagaattgctacaaacggtggtaaaatcagctcaatgtattgtttccttaggggtttcctgtccctgccaatagcgtgccatacctgcatcaaggataaataggcaagtggcacaaactcttatgactaacaaacaacttctttatattccttgaataatatcattacaaaaatacatgaataaaatattagaagcctaaaaaatgaataaggtatgctcattttttacaatgttttcatggattcgttaataataatagtgtttggcaaaaaaatggatgagcaaaaggcatgaatgtatagcataaaagtcaagggatttagagcaggccacgaaaaacttccaggtttatcatcatggaaatcttcacttgaaaagtacacaaacatgacatcaaaatgaaaaagagggaaggaaggtggacgcatgagcatactctgcatgttagcagttagcacataatattgccatattgaagataaacactatatatagcagatgtcacatcaagaaaatggatgatagccatctaatctacagccttgtcccattgagaagaggctccgatcatagccgagtttggtaggcaaagcgctttataagattgattcttgttccaagaatttctaagcaaggctaaggctacatactaggtgcagggctaactcaattaggaagatatgaaacagactaggacaacggataaggaaatatatttcaaaaatgtgagttgcatactgaatcaccaacaaattccagaaataaaaaaggtaatgttggggccatacaatccgtagcacttgcatgaagaaaagaagttaaaaaggaactctatgttcagtatactagtctactcaggcgcatgacttcaaattcattgaaacagattacatgattaagtgataatgcaaaaggaacttacctctgagtagagaatagaggaagcaaccaacactctctgtctcttagactctgttattggcatattaaggatggggccaagcacactgtatggtcacaaaatttaggaattaacaaaatggccacccatgatcgactaaaaagccaaaccatagaatatatttagctgcatgcgctgactagttgcacccaaaaaccaaatatgatggagaaaggccgaacactctccctcaccctcatctggaaacatgggattggagcgagcaaacaattcttattaaaaatttgcaccaacagttgcacccaaaatcctaaggagagggggagatgtggccagttcacttatacttcaacagaatatatatgaaagcaacttgctactgttgaagttctgattattt

SEQ ID NO: 143333 - DNA, 279 bp, Zea Mays
aaaagccgagttgcagcctctcattgacaaggtatcaaacaagttactaggttggaaagcctctcatgagttgagcagtccggctcgtgatggtcaaggtggtcttatcatcaatccccatctactatatgctcgctttcgacctccctaaatgggttttcaaagctattgataaacggcgaaggggtttcttatggaaatgacaagagaaagccaacgaaggtaactgtcttgtctcatgggaaattgggaatgcacccagcgacccctgcagtttgg

SEQ ID NO: 143334 - DNA, 382 bp, Zea Mays
cgagggatttggtaattagccaaggggctcccattcagagttccgctggtcgtggtcggcatatatatttatttactcgatgactcgatcagtcaaatgcatgtacataatagtatcaacatgccagaaataatggggtgttcacggcagaatgagcaatatcacatgtaaatttagatatgaactccattgtaaacggtggctggctggctcctggctgtgcctcggtggcggtcagccggtcaatcttttgcggatttgacaaccgacgacggctagctgtgctctcctgatgattggatgacgccgtcgtcacgcgatataatacaccaccagccccggtcctgtcattttgaggcctcaggcgaactaaccatagtgc

SEQ ID NO: 143335 - DNA, 350 bp, Zea Mays
tgtgtggcaccagtatcaaatagtacttttgctgggtaggattcgactagaaacatacctactgccacgtcctgagcatcctggattgcttcaacctccaggtggttcacctttccacgattgtaggccaggccacggactcctggcgcttgctgtggtgctccttgtcttactggggcattgactgctggcggctactgggctgctttctttggacagttcttcgccctgtggttttgttctccacagtagaagcatgcacgaactcctacttgtgctggggctgcttggccattctggttggttgctggggcaggaagacaagctgcctagttgttctgacgctagaa

SEQ ID NO: 143336 - DNA, 375 bp, Zea Mays
gcttcatctaggatcttctttctgagttcagggtccttgggaacaactaatcggtctccaaaccataaaattcccttgctgtcctgacggaagcacttgtatttctctgcctgttgctggatcatttccttgataacctgaacacccttatcctcaatctgtgccctgactatttgctcttgcaatgtgggttccaccgagatataactcaagttacctaaagaaacaacttccaggttcagcttgcacagctcatcgcacagtgtggtgactcttgcatccatgctcatacaattgcactgggcctttctgctcaaggcatctgccacaacattagctttaccaggatggtaatgtacttctaaatcacagtcc

SEQ ID NO: 143337 - DNA, 1584 bp, Zea Mays
cggcgtaataatgttcaagttatcttcccagaatctgtgttgcccgaagcccagaacgatggcagtggcaccggcacggttcaagccacgcgtgaatcagttgcatcggcttcatctgatgttgcagtcggttcttccataaaggataaagcaattgctgcgctgcccacagaattggctgagatggctaaggatactaagagaaaggcttgatcttcggacccagggtgaaaatatggattttggccagacattgcaaagaacgagatggttcagtgtattttttgccaaaaagttgtaccagcaggaatcaaaaggttcaagcaacatattgctggcgggtttggtgatgtagggaagtgcccaagagtgcctgaagtggttaggaaggagatggcagtctactcgaagaagaatgcaagaaataagatggtttttttagataatgaagaggaggatgtagaagggggtgaggaacatcaggaagatggtgatgcaagagaagtaccaagttctggcacaacaggaaaacaagtgaagaggaaattagctcaatctactattaagtcattcatggtttctggtccagttaaaccacaaacccaaaagcaatgcaagtcggttagttccatgttgtgtaagacaccggaggaagttgttgcagaaaggaacaactccaagtgttctcaaactactcttgatcatctcacaaagaaggacaaagagtcaaaacagattgttgatgatcatgtggctaacttcttaattgagaatgggataccattcaatgtcattaattcaagaagttgggaaatcatgcttgagtctattggtcagtacggtcctggttataggtcaccaacataccatgattgcaggggcaaattgcttgatagggctgttggaaggacagatgaactcaggaagaaacatgaagatacttggaaggagtatggttgctcaatcatgtctgatgggtggacctctacaaaccatcgtcatatcatcaatttccttgctaatagtctaacggggacctttttccttggttcagtggacgcttcaagtgaggtagcaaatgcaaacatgctggcagatctattggagcagcacataaatcaggttggcaaggaaaatgtcgtgcaagttgttacagacaatggggcaaatttcaaagcagctggaagaatccttatggaaaggattccaactttattttggacaccgtgtgcagcccactgcttggatttgatgctagaggatattgggaagataaacgatttcagcacctgcattaatcatgcaaagaaggtgactagatttatatacaaacatggcataattcttgatatgatgagaggtataagaggtggagatctagtgagacctgttgtgacccgttttgctactgcattcctcacattggcgagtatgcaaaagaataagttgggtcttaaaagtctttttgttggtgatgaatggcagaatcacaaattggcgaaaactagagaaggagaactagttgaaagcattatcctttctattccattttggacaaagttggaaaactgtcttcgagcttca

SEQ ID NO: 143338 - DNA, 731 bp, Zea Mays
accagatccaatactggaaatggccatccccgatctaatcgtgaccctccattctcgatccaaaggccaggggctgttctcctacctccataccagtcgggcagcggcgcagggcataccgcagtggcgcctccccggtaaacacctgcctaggtgagcccgtgcacgaaaacgagcgcaaagagttgttgagcgatgcagcatcatagagaaaagggatctagggcttcctaccgggtcttgatgcagcggtggatgtggccacggtgcaaagcggaaccatgacgctccttaactctgatgagtaattctgattgcccccgatcgtgatctcccccgaagacgtgacacgcgactcccatagttgtcgatgaagcccccaatccgaacccgaggaacgaaacgatgctgaagatggagcatgccatcggcggcaatcccatcccccacggcgccctccccacatgcttggcgcggcgcaggacgacccagggctgcggctagcttttggattgctgggcgagaggcggcacggggtacgcatacatgcttaacaccccgggattctcagtcaggattgccacgcggttgttacaatcgatggcgatttctgacgttgtagctcgagttgttacggtagagatgcttctgactaggtggccccacttgcaatgacagtgaggtataccggtgtgcgcctatggaggctgactcgtgggccccccgtctta

SEQ ID NO: 143339 - DNA, 588 bp, Zea Mays
cgatctttgatcccttaaaaatggcgttaggggtgcacgcgtggagcaccgtcgtcctcggccattgcctctaggtccagccgcagtgccgcacgcacctacctgctaatcattgcatctttcggctgcacgccgccagccgctaccgctagtagttctcaccgacgaccccgcgcgcgctccgctcacttttaaatgctccagcgcactggccgtggcaggccttccgccagtcgccttcccttcccattccctctgcagctccgcatcccacctcccataatcgtacacgcaccttcgaattttgatcgagcagacgaacgattggaaatcgtcgcctcgcagcacgttttccgttgcactctgcagccggatccatcctcccggcatgggcccgtgcttgccgtgggcgctgggcctcctcctgccgtcgctctgggaggccaaggtcgccttctccgccacggcgctgctcatcgccgcgctcatcctcttcctcctgacaacggaccagcacgccaagtccacggccaccggcggcaacaggccagcctcgtccgcgcgttcatctgcaaccgcagcctacca

SEQ ID NO: 143340 - DNA, 585 bp, Zea Mays
gcaggatcagacctatggagagctggccacggcgagctcacacacgacggagttttgactgatttgggggaacttcaaaattggagcgctctggtggacaatctgaggcacgggttggtgcgttgggtgtgtgattacctagcggagctgatgtcatgcttaatttatagggcccgagggctgtggctcttgaatttggaatggtgtgctggcggccagagagaaagaaggtcactggcgcaagggatgcgtggcttttaccgtggcaaggtcaccgacgatgaacgggcacactaaggcgagttactccgacgtggtagagcacctaggcacgtggcacccgatcggcaggcggccaactccggtgaatttatctggaccggccgtaaggcaagggggggggggtacagcggccaacccttggtctcattcgcgacgaagatcttttcaccctgaagcgttatccgaccaccaacggcacaaatcgcatcgcccgcgcgaatccaggcgcgggggtcgccagcgtcaaggtgcactgcaccaacgatcttcttcagttactatacaatcagaacactatcgagt

SEQ ID NO: 143341 - DNA, 619 bp, Zea Mays
gaaaaaggctgatgacagggtagttggagcaaatgacatgctcataaaaacataaaagacaaatttaaactaaagagtgaaaagtcggagtaacaataacacaaaccatttaccagttagcttcattaatggggaaaaggctgatcacagggtagttggagcaaatgacatgctcataaaaacatacaagacaaatttaaactaaagcgtgaaaagtcggagtaagaataacacacaccattgttatacagtagtttcgtatctgctgatgctttggatgtagctcaagctttggccttatgaaggtctgtgttttctgttatcactgatacaacaattttaagattcatgatggaggtttgttgggcccctatgatggttgcattcaacatgacacttgatcagagtgataaggcggccacatcataatgtttgcaaggattcaaatttgttatgttggttacctctatcatgtgcatgtagacacagagagatgcctttgtgacatctgtagccaaattcacatatctgtagaatacacatctagtttatgtaggcaaaataaataaggatctcacaaaataatgaagtgaattaaccagaaattagttcttttaac

SEQ ID NO: 143342 - DNA, 286 bp, Zea Mays
atcagttcaaaaagttgctctctgggctcggtatggactacgaaaaaatcgatgtctgtgacaataactgcatgcttttctggaaggagaccgcgagtgagaagaagtgtactgtatgtggtgagcgtagatttgttgaggttgaaaacgacgatgtttgaccatgacgatgaagattgcacgtaagcagctttgttacatgcctcttatacctcggttgaaacgtttgttcatctccaaaaatacagccagacacatgagatggcacaaagaaggggtacgtgag

SEQ ID NO: 143343 - DNA, 1345 bp, Zea Mays
tgttcttgtatctgttgtttctggtctctgtttcgatgccagttttggttcggttctaggctgctagctgttgattctgctttctgtttcgcttctgtttacgacacctgaaccagtttttggtaccggtgggggagcactgtcccaatggctggccgccgttcgccgtcggcggatcccggtctcggtcactgcgaagctcccgaaatgagatccggtggcgctttagagccctcgtccgttccaatacgcagtcggatgctgggttacgctcgcctctaaatctaagcttattatttatgcctttgcttcgtattcgtcagatctgatttcgtatttctgtctcgaccgaaattttgcgcggtgcagtgattataaaaacattcctcgtactgatgggtcatcctcgtgaacgactcctatacacccatagaatctgagcacccaaaacacatctccaaattttttttactttcgtgctctattttgtttgtttgttatactatttaggttttttaaaagaaacttgacttccgcgctgttttgcaaatctgtatttttcttatttgctttataatttgtattggatggttttgaattacttggatttatcatgacaatacattgttgtagcactcaaaacactgctagatttatcttctagcctgtggtcaagtcgtcacagcgagtggctctatcgttcatctactgcttgcccagtgcccagttgacacccgtccttcctgcgttgctattgtcgatcgacgaattcttcatgagatcttctatctggtcgcaaggtggaacttttggttccgatgctaccgcaacgtcagcatcgcatcaacttttgtattgacacaatgtattattaaaacaaatatgttattgataatgtaatgatgaaaattaaaatatgtaatttatgaaacatataattttactagttgtaggggttttattaaatcatttttagttaatcgttgtccgcattatcaatcgaagggtattgtgcggacctctctttgaaaaaaacgtctctaaacttttacaatgtccgtggagcaacttcaaactagataaagtgaattcggatttttataaaaaatgtaaccaaagagttatccaattgggaagtcacggccgtgcaaatattcagtgttttttaaaaaacagtgaatgttgttgtttaaatgactctaaatgttattttagtctgttctgtccagcttgataatattgcataattctctgggatttcagcatcaaaacttaaaatgggctccgaatcttaactgaaccacccacctaaactttctcggtggaatgtggagctttaatctcc

SEQ ID NO: 143344 - DNA, 283 bp, Zea Mays
ggcttgggtatgtcaatccaaacatccaaacacggttgctcgctgcttctacctttgtagtggttttaacgtacgtatcttatgacttgtgacttaatattgtttactagatgtgtaataatgcttcgttgcattttttaggagcacctgaggtgtttctttttccagtggatcggcggtcctgataaatttgaccctcgatatcttcttttcgctaattggttgtgtggaaggactagtcatgagcgttttaagcattgggtacctcctcccccgaatcctc

SEQ ID NO: 143345 - DNA, 490 bp, Zea Mays
cgaggacggcgggttctatttaggaaaaacacaggggcgcatgtgtaaaactaacccgcgaagaggtatggatctatcctggccgtcctatccaagatctatggccacgattagatccgcgctttatgaaatcccgcccagatctaggccacacgatcacaatttaactccacgatacgaaggggtacgcaagttttaatctaccccatccgctcatcatcctacggtcctggcttcttcatcccgttcctctaatcctcgccatccgataaaagatctacggcccgcgctatctcttctcctcctacccaagcagcggcgtcgccgccatggctacacggtggaggacacgaccgagacccaatcggccattcccgagcacctctgtcaaattaaacggggctacacgaagctagtcgaacggtgagcgttatgatgtagttcctaccggcgattgtaatgtgatgaactcctcccacggagttgtgcg

SEQ ID NO: 143346 - DNA, 489 bp, Zea Mays
aaagaggtctgcggtctgccacccacgaactatactgacaaaaacctgaaaagcccaaccctcagaaccaatttcccggtggggaattgagaaagaaaggggtgggaaggtgttagaaggtcagatctacctcctccgataatcattgacaactgaggatgtacaccgatagagaggaaacatgcatcatggcttcctggtcgcactacctttattgtatggtagggaaatcaatgttgggaggagggagattggaatagaagggaaaaccgtgaacaagtacgtgcatgagttgtgttattgatggctatggtggctaattactggcaacttcacgaggatgtatgaaatctacattttttagcaccccttgaggtgctccataagttcatagaatctatgaatgtggttccaaaattcagttttttgatggctttagatatgatagagttgaggtgtttgcatacacaaatgaaatccagagctgat

SEQ ID NO: 143347 - DNA, 428 bp, Zea Mays
ctcggtcatagctaagctcgtcgtacccacttgctcgtcgttcggtcaaatagacctcaccgccattgtccgattaccgccttgcgccatgtgctaaagcgcttgaccacgtcgcagtgaatcacatcgtgcatgcccggtgatcgcagggtagcttgccatggtgaaagccactaatcccgagcgccggtaaccttctccctctccggccgccagcacatcttcgcgaaattggacgacaccaccgtgggagcctataaattgccgacaccgcctactccgctaagtaattgtgcaaccagtgaagcaacccgtgcctcgaatcatccactagaactccccaatttgggatttcccccaaatcaatcaagaacaccgagcggtgtgacctcaccgtggtcagctcgtctctggtccgctcatgccct

SEQ ID NO: 143348 - DNA, 366 bp, Zea Mays
ccgccgttggctccagccagggtggcctggtttatctgaagtatacttttcggttcagaaaccagtttgatgaaccaaatgatgattagttggatgttgatacatggagcatactctaaggcagaagatgaaactatgacggttgccttcgacactcgtggcaagaagaggttgaatagagtgtttgatgtgattggattcgtttacccagactactgctaccccgcctagaagcaagggagcaaaaggaaggccgctgcgtcggcatctactagcgtgtcgaggtcaaagaaaatcaaggttttgacacgtagacccaggtgcatcgagatggccgatgtgctgaagttaagtgaaagggtggaa

SEQ ID NO: 143349 - DNA, 529 bp, Zea Mays
tgctattaacaaattcactaagtggatagagtgcaagcccattgcttctctaactttagctaaggcagtggaattcatacaggacataatattcaggtttggaataccgaatagcatcataacggacctgggatccaatttcactagttcagagttctttgatttctgcgaacaaaaaaacatccagatcaaatatgcatcagtggcacacccaagggccaacgggcaggtagaaagagccaacggaatgatattggaagcactcagaaagaaagtcttcgacaagaatgaaaagttcgcaggaaagtggatcagagagttgccatatgtggtctggagcctaagaactcaagctaaccgagctttgcatggaaacactcccttctttatggtctatggtttggaggcagtgctacctgctgatctcaagtttggggcaccaagattgatcttcgaaaacatagctgaagctgaggccactagactggaggatgttgatatactagaagaagaacgattgaatacagtg

SEQ ID NO: 143350 - DNA, 334 bp, Zea Mays
taggaatcaagaattgttatactatatgacagtgtagaaacaaccatgccatttgttttgtatgatctgctctcaaaagcacatcaaccaaatttttatgatcctgaaatcactgattaaaacgctataagagatgcttgatgctttcatctttagcatgaggatatctaattagtaacacataattttgtccaaactgagtagctgataacatggtatccggtgtttattgttaaattctaatgcttcaaaattatactttgtcatcaccagtttttcatctccttcattcctattgtttgagtgctataactcagttgttacctataagttt

SEQ ID NO: 143351 - DNA, 443 bp, Zea Mays
ctatatgtccttgctagctctagtagtttgcatttgatcaataatcccgcagttgagtagcctgaggggagaggggagtgtaaaaattgtcttccaaagacattcccaagaaaatgctgaatagagcagctttgtctcctgacaaaagagaagaggttggggaatgacaatttgagggtgaaattgttccaaacatcatgccacaggaggatggtcctaccatcaccaacctaggtcatagagtgacctctataataatcaaccaatcttataacgtctttccaccagaaggaaccttttcacttgagaagcatgagggacccgacctgaggcacaatatgaattccagacgagatcaacccaggggatgtcatgcttgccttagaacttatgcaagaacttaagaagcagagatgtgttctgaatcttcaagttgagaacac

SEQ ID NO: 143352 - DNA, 511 bp, Zea Mays
ccccaaactgatgggcagaccgagaggaccaaccaagtactagaagatatgttaagagcttgtgctcttaagcatggtggtagttgggataagagtttaccgtatgcggagttctcttacaataatagctaccaggccagtttgaagatgtccccgtttgaggctttgtatggcagaaagtgcaggactccacggtattgggatcaaactggtgaaaggcagttctttggacctgaaattatacaagaggcagaggaacaaatccatcaaataagagagaatttgagaattgcacagtcaaggcagaaaagctatgttgatacccggagaagactgctagagtttgagggcgatcatgtctatttgaaggtgtcaccactccggggtatgagaagattcaaagtcaaagggaagttgtctcctcgtttcattggacccttcttaatcctaaagcgagtgggagaggtggcatatcaactggaactacccgatcatcttgcggatgtacatg

SEQ ID NO: 143353 - DNA, 752 bp, Zea Mays
aaataatggttcttggtttggctttttaaagagaaaccctaggtgacactggggtgtcacaaacaccgtcataatgtcaaaatagcgaaaaaacgtgtgttagagcagtaccattttggtgagtcatggcttcagattactattccagcaaaggcagatgatgggcgtatcataatgtcaaatatctcatgcgacgactagtatacaagcagaaactaggtgtaaccttgcaaacgagcaccatgagcctttagatggagatccaaccgtagaaaaagcttttacacttaaatccctccaccagcacacaaaccattacgaaaccctccctgctttccttacctgctacactggcaccacccttcccctccgtagaaaaagcttttgcacttaaatccctccaccagcccacaattcctcgcatgcacaagcctagagctctactacagacattctgcaggcacaagcacaagtccttctcctgcttttgcctcttaacacacgcacacaagttcatacccccgtggcagaggcggacctacataggcccgagtgagggcctaggacctcactcatttctcctttgaaagtagtagagtctaatttttttactatgaagtcccttgctcagcgtcgcttagatgcccctgctagagtattttggtgccaatccttgcaaatatgcccccactcattttgtcctaggtccgccctatcccgtgggcctgtccttgctgctcacaccgcacaac

SEQ ID NO: 143354 - DNA, 490 bp, Zea Mays
ggaagttcgaccaccactgcccctgggtcggccagtgcatcggcctggtgagtgctacggccaggctccttgcatgcgtttagctgacacttgcattgagacgtctgctgtgctgacgacgttcgcgacgaccgcgcatgcagcgcaactaccgcttcttcttcctcttcatctcgacgtccacgttcctgtgcctctacgtcttcgtgctgtcctggctcaacatcgccgcgcagagggcgagccacggcgggtcgctgctgaggtccgtcaccggcgagccgctgtctctcgtgctcatcgtttactccttcgtcgtcgcgtggttcgtcggcggcctcaccgtcttccacatctacctcatgagcaccaaccaggcacgtactccaattccaatccgtcagaccaaaccactgctatgcatgcaatgcaattgatgttcatgtccatccgttccggtcctctgcgcagacgacgtacgagaacttca

SEQ ID NO: 143355 - DNA, 348 bp, Zea Mays
tgacgattcctctcaacctggcctggatggctgcgtccgctccaacggccgtcgtgtactcgtttcgttattccgtgagtttttgacatgcctcctactattattcttcgattgtaattcaattttcctattttgctgtgagttttgtgagacccagtataggcgcatacgttcgtaaatacatatctttgtaaacatgttcaaaggactcgtgaattttgacattcactaatagtgtgtttggtctggcggtttggctcgtccatcatagtctcgctctagctagagctttccaacggtttctcccggaatagtcatcttgcatgctaacctattattagaataaca

SEQ ID NO: 143356 - DNA, 374 bp, Zea Mays
aaacggatgtagtacaaagttgcatatcggtttgagctttatattttttttgttatatctaggatttgtttcattccacctgccgacttcgtataaaaaaagttataacctttttacgtatgagatactgactttatatggaaaaaggtcgttataatctttttatataagagatactggtgggtcaacgccgcaaagattgtatgtatgaacttggtttcatgcgacatcactttctcgagtgtgtagtatatatattcatgcgcggcgtgaaagttttaatatgacaaaaaaaggcgcgaaagctgcccgtgccatacctgcatttttatttgttgattctcccgcagttgtttcactctgcatctctgatg

SEQ ID NO: 143357 - DNA, 824 bp, Zea Mays
agcgaaggctggactcgacctcgatcgagtttctcccgactacagttaaccatatttggacgcagggcccgcaacacccgaagacctcgtctagaatcgatgacgagacttcgcctggaatcgacaacaaagcctccgaccacaacgccctacgagaagatggggaatcattggccactggtgcgaagtcggctacgggtgatgactcagcacccccacggcgtacggggcccaaggccctggcgaagacaccctcgacggtcgccgaggggtgaagggtccgatatgcgagcgaaggcttcaaacactcgagggacccatttcctcttagctagggcctagacccacttgtaaaccccttggaggggtggacttttagatgtgtttgggtgtgcgtactttgttgtgtgtaatgaccccgctgctggggaatattccaggaatgcagtaggtaaccgggggcataatggtacttgggaccacctactcgcccggttacctataaatatccccgttctgtacacgcataacaagatgctatagtttgctacctatcgtttgtagtgcacctgagccctatcaacttccgagtttttgggtccgcccgtccacgtgttggcaaatccaaaatttggcgcccaccgtttgtgctccgaaaaccaacacccacgatggctccaaaaaagtgactactagagctagctcctccatggacgaggccacgaaggcggccctcgtcgacaagaaaggcaaagcagtactcgcagatgacaccctatctgccacagttgaaaacaatgagacgggggcagtcaacagcaagc

SEQ ID NO: 143358 - DNA, 403 bp, Zea Mays
ggccagacatcctccacctgatcaaaggcaactgctaggagaaggaccatcccggtggccatactgctataggggctcggactcgcctactctccacattacgacaaccctggcactcctgggttccctacttgaggctataaaaggaggagtccatggcttccagggggcagaggacaacacttcaccatttgccctccacgatcgatattgacactagcctcaatcacacacagagacttgggatccactccctctcttgatcaacttgtatcccatactacaagcacctagctgcaagataatataaatctcattccccgttggaagtagagccttctattgcctaaagcatgataaatcttgtcttcttacatcacccatatggtctgagacacgtagc

SEQ ID NO: 143359 - DNA, 396 bp, Zea Mays
gcttgttcttgcacaagaatgccaatatgtttcttatcttattgtaatgaaaagcttgttttgatattattgagttgttcaagtttttgaaaaggaacacaaaaaaggagtcgacaatctagcgtctgggttatatggaaacatagaaatgcttgtgttttttagggggcttctgcttcggttaacacaattttgtgtgagcttaagaacaagcagagtctatggtgcatggctggtacaaaggaactgtatgagctaggccttacgattgcaaccatcaaccacagttgagctaggtttgttggggaccttgagtctgtgtaatagcctcactaatatttggtccctgtatgagtgaggatcctgttggggatcaccccatttctctaatacaat

SEQ ID NO: 143360 - DNA, 495 bp, Zea Mays
agtaggcgaatgcccattcaaatatcttggcatcccgatgcacttttgaaaactatcgagtgtggattggagtatgattgaacaacgtatgagaagaagctatgtaattggaaagcaagcatttgtctataggtgtccgcctggtactaattgattcggtactgactaacatagctatgttcatgttatccttctttgatatacctagaattattcttcaaaagttggattactttcggtcccatttcttttggcagtcacatgagcataagaaaaaaatatcgtcttactagatggagtgttatttgccagcctagggatctcggggggctgggagtgaaggacctatatgcgcaaaaccaatgattgctaagaaagtggctatttaaattaccaattgaagatggcatgtggtagaggatgctgcagaggaaatatttgaaacacaaacatataggccaggtccagaagaaacaaggggattcctaattctgg

SEQ ID NO: 143361 - DNA, 319 bp, Zea Mays
cctagttataagatatggtattaacaatcttcatacgaaaaaagtagccacaagccttgagatcgcaggacgccggttccatggaatcaaaattccataagattattgcggggtagaagtgacaacgatcgtccaaggatccgaggatgacatgctagacatccctgggcccaaaggtattgagacacctgtacatgctatcaagaatttcatcctttagccacgacgggatgtccaattggctgatccaccaatgtcatcgtcccatgcccaaaacccctaacgcaagagtcatcacatgcagatcctattgcgaaat

SEQ ID NO: 143362 - DNA, 393 bp, Zea Mays
tctcttcggtggcaatcatcttcacaacacttgcaagatcaagaggcatgccaaatgattcaagtgtggggtcttcttccacggcttcattgttggttgccatagtgaagtgggcctcaggtttttgtttgtgcatgttctttgccttgtatgcttctatgacatgctttggtgattggcatattttagactaatgtccccacacgccacatttgtagcatgtttggtcttgaagtccgtatggcttatgttgtggcttctctttgcttgttttctttctgtgagcattgatgggattgattgtggtttctttctttcccttgccagcaccatgcttgcctctatttctctgataggctttcttatcttgtacgaggcgacattaacttcagc

SEQ ID NO: 143363 - DNA, 512 bp, Zea Mays
tccagggatggctcgccacctcgacgctggcctggcaaggagaaggttgatgaaggcgacctagccataggagaatgggacctcgggtatcagaccctcgagcaagtcctcaaggacatcgtcactggagactccaactctggtgatgacgacgaccgccgctagaagctattcgtaatgtatggcagaagctgggagctcacctctcgtaggaacgtgaagtccctacgtcgtgaggtcctttcggcgaccctaggggtcctgaaggtagccccccatcagtggtggtagagcaccactatctccttcagggcatccgactgccctgaaaacatggcaggggctagtatactacatctcaacaccgcccctatcatcgtcaacatgaagctgcatcatgtgctgatagatggtggggctaggctcaatgtcatcagccacgatgcgttcaagcagctccagatcctagggtcccgactagggccctcacgcccattcttcggagtgggccc

SEQ ID NO: 143364 - DNA, 289 bp, Zea Mays
gtgatgttcgacatgtgacgagcgcattcatcacattcagtctcgtcagacaccacgacagaagctctagcagactcaagcttcctaagcatggactcatacttgcacttgtattctttcctctcacgagcagcagcctaagaaacttgtcctgactagccaaagcagtcatgagctcatctacctcaacggtagatcatcggtgaaaagagatacctcattagtgcagtcattcccattgtacttgttatcattgcccaccacgccctcaccaagagccatggtgcag

SEQ ID NO: 143365 - DNA, 976 bp, Zea Mays
ggttgcagcaggcctgcaggcttttgatgttcggccttcgttcactgacaggtgtcacaccgggctacatactgtgctatttcctttttcatccctttccaacaatatctggctttgaggtctaggtacatcttggtggttcctgggtggatggagtaagcggagttgtgggcttcattgagcaggacttcccgtgcctctcccattggtacacacaggcggttcttgaaccagaggactccttgctcatctgtcctaaggtccagaagttgctccttgcgagctctctccataagtctggctgtctctgcgtccaggcgttgagccttgcgtatgggatcttctagaattggcttgacttctaggctaccgttgtctcccagacatgcatttagctgagctgattctttcttccaatcttctaaaaagttggttcctttaatcccgaaaggttttcggctgagggcgtctgctaccacgttggccttcccggggtggtagtggatttcgaggtcataatccttgatcaattcaaaccatcttctttgacggaggttgaggtccggctgcgtgaagatgtacttcagactcttgtgatcagtgaagatgtggcatttgttcccaatcagataatgcctccatattttcagggcgtgaactatggctgccaattccaaatcgtgggtagggtagttctgctcgtggggcttgagtaagcgggatgcataggcaataactttctcattttgcatcaagacacaccctaagccttgccttgaagcatcacagaagatgatgaaatcctggtgtatatctggcagtgtcaaaactggcgcggttctaagcttttccttgatgatctggaaactttcctcacattttggagtccacacaaacttattgtcctttttgaggagttcggtcataggttttgctatgctggagaatcctttgataaagcggcggtaataccccg

SEQ ID NO: 143366 - DNA, 505 bp, Zea Mays
tgttttcaacacttctgggtccgtttgattggaagcaaggtgggatggagctgctccattctatgtttgtttggagagcgaatggagcagttagagcggagcggttgtatatcgggaatatttccaccagattttggacgagctcgttccaaataaaacggtggcatcccaccgtaccacttctctcgctctctttgcggtgggcccaaacaaaaaatagaactatttcacaccgctctcaggatctagaatggagtcaggtcgctctccaaatctagaatggaaccactccaaccacatgggtgtgggtgtgatcatcgtgccaacagtacatcccgcattgaaataattcaaatttaacacccaataggctccatgacaatgtcttagcaaatgtgtacgctacacactagcatatttatcacattcaactaagatagcatatgagtagaacattataaatcatttatgttagataatgttagacctacattgatgtgcagcg

SEQ ID NO: 143367 - DNA, 684 bp, Zea Mays
atgccagaaggcctttggtactgtatgcttcttcattggtacaaaagacctaattcaagaacatatagcattcagggtatggcctcttgcagagaattgggagatgccgaaggaagctgtcaccgagtctagcgaaggtgacctggttcgactaaaatacaccttcagatatggagataaatttgatgaaccaaatgacgactggctgaaatgtatcgaatctataagtgatgaattgcttgggtcatattccaaagcagaagatgatgcattatccatatccttcgggggccgaggaaaaaagagattgaatagagtttttgatgccattggttttgtttaccccgactactgctacccgctgcagggacggggaagaaagaggaaaaccgttgcttcggccaagactgctgcttcggccactccagatgagcccgcgccgaagagcagaaggttgaaagtccttacccaccggccacgctatatcgagccggccgtggtacccaagtttggtggggaaacttcttcagctactgaaccaaaggagcctattcctcctacacagaaagctgaggatccggctacgatgccgaaggtaccttcatccgtgctagatgagtcaaaagccgatgaaaataaggtggaagaaccaaaaattgaaggaacagaagtgttaggaatttt

SEQ ID NO: 143368 - DNA, 422 bp, Zea Mays
aggaccacacttctctctctttctctgtcttcaggcatcaaagattgcagctacctcccttttattttgccagagctcctctttttgctaaactgatttcattggtcgttcaaatagtccttgtctatgtcttttttttaccggttcatctgattattatctgtttctgttgttccttaatgacttgtagaccggtcgtcgaagcggagtagtgtggacagaatccgaggagggaaaaacgacttggatgcggcacgcctcacagaacttcagaattataggtaaagtgtgtgtttttactcttcatgttcttctttgccttgtgagcttagaagccaagtggaatgcccagacgaactgatccgttgtgtgctagtggtaatatggtagtgtgcatctcagattcatattgcttgtagtta

SEQ ID NO: 143369 - DNA, 273 bp, Zea Mays
gttgattagtggattctacaggggctcttttacaaaatcaaacggcgaaggggtatcggatagtactggccgtccgatcagaaatctagggctcaaattagatcacgcgttatatgaatcggtattggataacggccactggatcaagatccgagggcccgagttcaatgaagccgaaatcaatctcctcccatcgatgagcgatcaacggtccacgatgctcgatgtcaagacgccgcccagatctaatcgtgtgcgtacactgcggatcca

SEQ ID NO: 143370 - DNA, 494 bp, Zea Mays
caatgaagaagagcagttcagctaccagctttcaggtcttgaggatctcccttctgacgattcggtgggctattttaacgacatcattatccctcagggagtccagctccagcaggaggaagccccggcgccggctgaagcggttctcgccttgcctgctttccctcctaacaacataaatttggagggaaacaatgtcgagggacaggacgacatgcaaattgaagataacatcaatgtgggcctcatgttgcacttggatcgaaccatccctgatcctgcttttgaagatttcttggccagaaagcgttcctcctcttgggctgatttgttccctgacaatgatggctcagtttctgttccaaagatttgggctgctttcttcatgggccttttaatgaggccagattcgtttgattgggccaggaaattccttttgtcgggagctatctcggcattcgtcgcacccagcatggacaccatttcaatcaaaa

SEQ ID NO: 143371 - DNA, 351 bp, Zea Mays
aactggaactgtcaataaatctagtggcagtctggtgacaaaagctcatacagatacatgtaatgttgaatgggataagaaaatcaatataggtatgatagatacttcgcaagcattgagttagttcaatagaggacaactgtcattattcatacattgcaacataagggaacagatgagaaggcagaacaacagacttacggggtagtccactataacgttgtcacctttgtgagcttgaatgctgcaagatttcagcttatactccattttcaaatacccacgcaatcgtataagaacatgccaaaatataggtacgatagatactcagcaagcatcatccaatgtaga

SEQ ID NO: 143372 - DNA, 593 bp, Zea Mays
gggcagggtccatagcctgaggatgaggaggggcagcactagaactcccagcctcatgatcatgtgagcgtggaggcataggaggcggaggcggaggaggaaccccaaaatcatcatcatcatcatcatcattagctgctgtaccctgagtgtcaaactgacgaagagctgcatcctcggcctgagagtcaaacacaggagcataagctggcactggaatctcaggagcaggacggtaagatccaaatacaaggcgtgaggcctcaagggtgctctgaaaacgaggtggctggatcagctgcgcaaagatgtggcataagtagtgagcatagggtagctgccgacgagcacgaatcccatccagaacggtgtcctcaatctcacagatcagaaagtccacaacatcaaactcagagtgggataccagggcaccaaggagccaaagctgaatatgagtggtagcctccctgtatcccatcctcggcaggagtgtccgtctgatgagctcataaaggtactttgctgctgtagtgaagtctgctggagaacgtcgcgacccatctgagaaaggcgggcgaaacagagccgcgacg

SEQ ID NO: 143373 - DNA, 492 bp, Zea Mays
ccttaatataaacccaaattcgctgaccaaatctctggcctgagggtagtgccaatctccagtaagatatgtaccgaccaggccttgcaggggcaaggaagtcaacagctacgtcagtctcttcacatggatttatcatcccgtttaccgaaatctgcacgtgcataaaatctatgtgaggctcgatgaatttgcatcccatcctgcactcagtttatacaaatgctaaattcaaattcatatagcacatgtacataccggtgatctgactgtacttgggggagctaagtgaccaccatcccagacaagcttggtgccatacggccacctggtagacccattgttacgtacccgccaaatcttggtaaatgggtgtgaaggtgccattgttgttccatcaggtacagtaacatccttgaggagagagtttgtttttgccacgggagcctgctcagggtcaaacaacgtaaggtgaaatgctatcactcttac

SEQ ID NO: 143374 - DNA, 782 bp, Zea Mays
tgctgataaggttgccgatgatcatcgcgtacagcgcctgctccgcccacacctgcatcggccgaccacagcgatcagatagataaataactgtggctagtacaaggagcatgattgtacttgggcggagtagctaccaaccccttccgatttggcgaacttcatgttcatggtgtcgacgtggcccttgacgttgagcagtacgctgtagcggagcgcgtcggagattgggatgttgaggtacgtggaggcggccgtggcgccgatggccttcgccaccaggccgagcagcgtcagtagcaggccgggcacgatgatggcgccggacatggagttgtagtcgagcctcatcccgatggtagcgaagtagaagggcaggaccaagccgttgacggggggcataagcgcgtcggcgacggaacgcgcggcggggccttccctcgggaacgccatccccagcgcgaggctcgtcggcatcccgtcgaaacccagcagctgctgtatgttgctgatgaaccagatgcccaggagtatgatcaccaggtcgcggctcctgacgtggtgctgcccaacgttgcgctggttgatgcgcgtcacaacggggcgcacctgccacacagcgacgcctgccacggcgagcgccaggaagcccttcttgatctggggcgaggtgtggtacaggtcctggctcttctccttggccagtgccgtggacgacaggacgctgtcgccgacgacgcagatgaggttcgtgatgatggccgcggcaacgaggagccggc

SEQ ID NO: 143375 - DNA, 829 bp, Zea Mays
gtgctcccacggctgccgcggccgaagctggaccattgtaagatttcttagttcattgttgcccaggtcgttcgtatggatagggtttcttattgcaattatcgtgacagattcaaatttatcaagccaacaagagtgcctatttccacctggatatgcggtagtagtgaagacttttaagttcgctagagactgtggcaatgttccagataagttgtcatttgcaagatccagaaactgaagggcaagaagccttgttatctcgactggaatgtggctggaaaaggtattggaccttaatgctagaatttccaaaatttgtaatctctcacctatccatgcaggcaagtttccagtgaacttattgtgtgatagatcaaggacaagaagatttgcgcagctctgtagcaacaatgggaattctcctaaaaggctgttgctacttaaaagaagtgtacggatattcaagcttggaggagtcacgggactagaatgaggcatggaggtgctagaagaattgccttgttttgcaactttggtgccacaattaggaagctcccctgcaagtagattgtctgatagatcaagaactcgcaactgcttccactgacaaatctgattaggaataagcccagtaattcggttggggtagagaaccaccagctggagtagtggggcttcaaaattcagtgacagtggtccattcaaagagttcctcgagatgtcaaacgtcacaatgcttcttggcagtcatggtaccgagccagtgagctggtttgacctgagctgaaggattccactgacatgaactccaaatcacaaggattcc

SEQ ID NO: 143376 - DNA, 558 bp, Zea Mays
cggaagagagatgaaaagaaaaagaaaaattaggtggtcccactcaaaccagtgacatggcaagtttcaacatatttgcaaagtaatatatacagaaatggaggagatgagtttttttgcttcctatattatttgagaacttgctaaatctaggatttaggtagtgcaattatacataactatttgagctgccctgaaagcttaaaaccctcataaaaatttcatagaaaaaagtctacttaaacccctcaactatggatggttgtctacttcgcccctcacctataaaatcatcttattctatctctcaaattattggaaaccgtctaaataacccatgaagtggtttcgactttcgaagatgtttttgttgatgtgtcatttctagaaatatatataaccccctaacatatcaagagtctatataaccccctacctataatattgcaaacagcagcagaaaacaaaataccggatcatccacccttttctcaattattttctttgctttgtttgcctttagtcaattgaatttaacaggatatcaacaaactaaat

SEQ ID NO: 143377 - DNA, 2502 bp, Zea Mays
gcagagtagctaccattcgaagataagctgaaaatatgtctatcctcagtgttaggctgcagcacaaaatttgcgagaatattccagaggtgtagataatctacaatggcaccaactgtaagagctcctttgatgtctgcaatccatcgtctgttcaatagggcctgctgcacagttcttctgttaataattctttttggaataatgctgaataatcttggagcaatatcagatacccttttgccatggatccatttatctatccagaacatggtgttggtcccattccccacctcagagatcaacaccttggagaagaaggaacgggccatgctaggaacttgaatggacaggctagaccaagggcgtcttgggtcagttttttgcaaccaaagccatcgcatgcggagggcccagcagagctcaggaaggctagcaatacctagacctccaagctgcaacggacgacatacttttccccaagccaccaagcaatgccctcctttcacctcttttcttcctcgccagagaaaaccttttcgtattttatcaattgcttcaatggcccagtgagggagatcgattgccattgccatatagaccgtcatgctagtgaggacatgctgcactaaaattcttctccctgctctactcatcagatcggccttccagcttggtaggcggtctgcaattttgtccacaaactgctgagcctgattcctggataacttgtgtaaagacaaggggagacccagatatctgcaaggaaaggttgcaatctcacaaggcagccagctccggagttcctcaatagtctcctcggggcatttgatagggtacacatttgatttctgtggattatagcaaaggcctgacgcatcgccaaaaagctggaggatgtcaagagaagttgaaatatctgtagctgtagggtgtaagaacaacgccacatcatctgcatccatcgagactctgtgaagccttttccttcttgatagttgctggagtaggccagctccctcagctttggaatacagaaggcccagaacatccatagcaaggataaatagcatcggggagagaggatctccctgcttgagtcctcttctatgcgtaatcagtttacccgggacaccattgagcaacacctgagtagtggaagaggctaataagccacatacaatgtctcgccagatatgtccaaaacccatttgctgcattacttcaattaggaagggccaagagacagagtcgaaagcattggttatgtccaacttgaaaaacagtcttggcatgttatgttgatggaacaaccttgaggtttgttgcactaacatgaagttgtcctggatgaaccttccttttataaaagtgctttgacttggggaaaccatcgcattcaatctttttgccaaccgattagccagaattttagtaatcagctttgcaaaactgtgcacaaggctgattggtcgaaagtccttaacctgatcagccccatctgtttttggaatcaatgtaatgtatgccgtgttgagtttactgaaatgatcaaacttcctgctccaaatagcagccaaggcagccataatatcatcttttatagtgctccagcagaccttatagaaccgtctagtgaacccatctggaccaggggccttatctgaagggagctcactgatggtttcccaaacctcatgctcagagaaaggagagtcaaggtctgaaagcgcatgtcttggcagaccaagggcttcaagatcgattgtcctttctctgatcccattctgaccaatgagagtggagtagaagtcatccaccgccgaagctttgtcagtatggtttacaaggatgcgatctccatccaccaatttagtgaccagattcttccttttgcgatgccttgcgtgcacgtggaaaaactgagttagcatctccttctttaagccatgtgattcttgatctcagtcttgccatagttcgcttgaaagaagcaagcagcagggtctgttttttcagtttatttttgagccagacctcagccggggagagggttctaatatcctgcgccatctcaagcctgtgtaacaactcctttgccaaagccaactgagatcaaacatgacccacccgcttctcactccagccctgcaaccgtttagctgtcaccttaagtttcttgtcaagtgtcaggaaagaagaattgtcattttccaccgagtcccatgctgcctggacagtttcctggaatccttcgattttggtccaaaaggactcgaaatgaaatctacgtttcccaaacatgttatctttaagtcccaagatcagggggcagtggtctgagtccagagaggctgcactctgaaggagggcatttgggaacattatttcccaatcaactgagcagaacgctctgtccagtttaaccaggacaggattatcctgttgataagaccatgtgtatttgcgtccatgaagagggatttccttgagagctaaatc

SEQ ID NO: 143378 - DNA, 464 bp, Zea Mays
ggagggctcaacaactttggctgttatgctatcttttctgattcaagctcttttaccggatttaaactagctttggttgacatggcaggagctgattctgtacttgaggggatagagtcggcactgtcaataagcgtcgacacctcggtcgtcccaataggcttcggcctacatgtcaggaccttcgctctatttggctttggcgcaccagaagaggtcgaagtagcaactttccttttacctccttgtcttcgggtaggaaaacagtaatcaggataaacaaacccaattacattaaaaaccctattcagtcttcttttccccaagcgccaaaggcaacagtcatggcctcgtcctcttcccttgtgtaggctccaagtagctcatcgttggtttcctctatagaatctagccaatcatcatttggctcatcaaattgacttctataccggaaggtgtaccta

SEQ ID NO: 143379 - DNA, 517 bp, Zea Mays
tccagtttgtcgtacaacaacaaccatcaggccagcatcaaaatgtcaccgttcgaagcactgtatggaagaagatgccacacccccctaatgcggtccaatgtaggggaaaggacacttgaaggacccgactttgttaaagaagtcgaagagaaagttgccttgatccgcaagaggttacttgaagctcagagtcgacagaaaagttacgcagacaacagacgaagagaactcagatttgaggaaggagattttgtttatctcaaggtctcccccatgcgtggtgtcaaaaggttccaaatgaaaggaaaactagcaccacgtttcgtcggcccctaccccatcattagccgagtgggacccgcagcataccgccttgagctaccagaatccatgtcagacattcacaatgtgttccatgtgtcccagctccgcaaatgcctgcaagtaccagaaaaccacatcgaggcagaggcaattcagattcaaaaggacctccagtaccgagaaaagccag

SEQ ID NO: 143380 - DNA, 516 bp, Zea Mays
caacgatcgatgaagccgctccgtctcttctcgtggtcggttctcatactgacgtccatggtgctgctgctggcggacgtcgatcccgtcgtctcctccaccatccctggcagggcatacgatcttcagcttcggcgactccttcgccgacaccggcaacgacatcgtcgtcttcgccgccaactcgctggccaaccccgcggcacggctcccctacggcatgacgttcttcggccgccctacgggccgcaactccaacggacgcctcatcatcgacttcatcggtaagcagcagatcgagccagagaaaagtctgtccacatatcctgccaaattagtctctgttggtttgtctaccgactcagtcgtgaaccgccgtgacagctcagaagctggggctgccgctcccgccgccgttcctgcagccgcagcagcagcacgacggcagacaaggctccaacttcgcggtggccggcgccttcgcccgcgacgccagcttctatagggacatccccg

SEQ ID NO: 143381 - DNA, 636 bp, Zea Mays
cctgctcttcttcagcatccctgacatcttctatagctatccttggcactttgtagtccacttttctcttccccctcttcttcagggagtgtgtgagtcttgccgatgcatgcaaggctttattcttcagtgaccgcatcctggtgtgcctcggctcgtcctccgagatcttggcatatgccctattcctcctctcatcgttactaacagatatcaggatgctatccacattactctctgcaacagagcattgccgacgccagaacgttagctgcattgcatgaccgactcgttaaaactgaagcaacgacaacgagcacctggctatacctgacattctgtacaaaaccagctccgatgatcaagcgttccctctttgtattacactgcccgatcattgattcggtgcacaaggcagccccaacactgccattcaacggatcataaatacatgtcagaattcacagagtttgtgttcgcatcaaattcggagtgtattacattccagagcggtgggcggataaaacgagggctataagaggcttagttgaacacccagataaaatcgaaaagttggaccaaatcacctacatcagtacgaactccaccacgcagcaaacaagctgccaactggat

SEQ ID NO: 143382 - DNA, 555 bp, Zea Mays
agatgtcaccctttgaggctttatatggcaggaaatgcaggacacagctgtattgggatcagactagagaaaggcagttctttggacctgaacttattaaagaggcagaggaacaagtgcgaatgataagagagaatttgagaattgcacaatcaagacagaagagctatgttgatacccgaagaagactactggagtttaaggagggtgatcacgtgtatctgaaggtgtcaccgatccggggtatgaggagatttaaagttaaaggaaagttgtcccctcgcttcattggacctttcttgatcttaaagcgagtgggagaagttgcatatcaactggagttacccgatcatctatcagatgtacatgatgtatttcatgtgtctcagctaaagaagtgcctcagggtacctgaggagcagttaccaatggaggaccttagtgttcaagaggatttgacttatgctgagtatcccatcaagattttggacactttgactcgagttacaagaaataaggtgataaaaatgtgcaaggtacaatggagtcaccatg

SEQ ID NO: 143383 - DNA, 413 bp, Zea Mays
tgtgtgcactaggtatctcaagctgccaaccagtcttctgtactgagttggatttacttcctttgctgtactttccttgctcaatttcagcctttcttccatgggtgtagtggctggattacaacctgccataccaccaagttcaagtatcttcttagcataatgggtttgcttcagggtaatgctcccctctgattgtcttacctcaattccaagatagaaagacagaagacccagatcactcatttcaaaggtttgcttcatctttgccttgaaggattcaatcttctgctgattgactcctgtgatgatcaaatcatcaacataaactccaattaccagtagggagtcacctgatcccttcctgtacatagcagcttcatacacattctgctcaaaacccatctgcttga

SEQ ID NO: 143384 - DNA, 500 bp, Zea Mays
gtcgtggatggcctggaccttcgcggggtccatagcaacgccagccgctgaaatgacgtggtcgaggtaggcgacggagtcaacaccaaaggagcacttggacctcttgacaaagagtcagtgctggcgcagggtgttgaggacgacgtgaaggtgccggaggtggtccgcccatgaggtgttgtatatcaagatgtcgtcaaagaagacaagcacaaaccggcggaggtaggttcataggacgtcattcatcaaagcctggaatgtggctggggcgttgcacagcctgaacgacatcaccaggaactcgtagaggtcgtcgtgggtgcggaacaccgttttatggacgtcctcctgccgcatccgcacttggtgataccctgaccgcaggtccagcttggtgaagaggcgtgcgccatggagctcgtcgacgaccggaatcagaaacacgtctttgatagtgagcgcgtttaacgcgcggtagtcaacgcagaagcgcc

SEQ ID NO: 143385 - DNA, 799 bp, Zea Mays
atcttttctgtgtggtcgcaccagaccggtccagtgcaccaccggaccaagtccattagcccaatccctggtatcctgactggcgccttccttctactgctagtactagactggtttggtgcactaccggaccttgtgccacatcagctagccgttgcgtcacccattggagctagagagagccgttggaccctagcggtccggtgcaccgaacccaaagtttggtaattttgtcttccaagaccgagaccaaccatttccatgtaggcgatccgatgtacatgggtccaaggtccagtgtgccagaccatgaagtccttttctggcgtctctgatataacactctagtgcattaggccatcgagtccgaagaagtcctgtaaaatagccactgtacacaaggtctagtgcatagggacccaaggtcccactgcaacagaaactggctgaaattgagtaaagtagggcttttcttcttcttaccttttggacttacttttattatgtttctatgacttaggcaaacatagttagagtatgttcatcttgtctaagtcacagattcatacctttagctctttcttcaactcagaaacctattctttcttcaactcagagttagtacccacacacaagttttagcattcttgtgcctaggaccagcatgagaagaaataattttgctagatttgcaagataatacataggatgcataaaatatacatatgataagcaacatatggaccatttgatgcattcctattgttaacatgaacaaatttagcatgagaagcatgat

SEQ ID NO: 143386 - DNA, 294 bp, Zea Mays
ttttgaaatacttgacttcctgactctgtgaaaacaaagacaagatatgtgcgtcaatcttttgggtttaagaggtaaacctatgtggcatttcaaatgtatggatatggttgacaaatataactacttgagcacttatttgtaattttcatgcacaaacaagcatgctgacgtatcatgtatttgtatgtactttgtgcactaaccttttcttgcagtttgaaattgactatggcctctttcttcaaaaaaacctgaaattgttcagtttaccaaaaaatagtttcatggttg

SEQ ID NO: 143387 - DNA, 473 bp, Zea Mays
aatccagcagggcgtctgaggaaagcgccctccagctctcgtggacctgctgctgccggaccctcgcgtccatctcctggtcgcggatctcccacaccacatggtcgtggtcgtggtcgtggtcgtggtcgaggtcgaggtcgcgggatgggtgcgcgtctggcccatggtattgcggcattctttttcatgtgcagaaatatatctttagatgtgcatgagctggctcggcagcagcgggagactgacgacaatcttcgttgtcaagcttcctctatgggtatgccatttgcccctcgttcgcctgatgtgcctcttcatcctcctcctctggaaatcaatgagtggcaccagtaggcatatggggtgcctttcatgtctccagaagataaagaagaagatgaagaagtttttgatgatcgtgagcagtttgtcccgcctccccaccagggggatccgggtcaatcctcttc

SEQ ID NO: 143388 - DNA, 286 bp, Zea Mays
agctagaaagtggcagaggaaaaaacaagaactagggtttggagctcgagaggacatcagcagaagtacgagttggcacacgaagtccggcgcaaaggggcatgccgataactcgggagagttttggttacagcaaaacaacatcactcgggcattacctttaaatgctagttagccgtcagacacaagagcagagcacgcaacagtagatcgacacgaaagcaggttttcattcaccagtcgagagatctttacaaaattgagatcgactcgttatgagtcggcc

SEQ ID NO: 143389 - DNA, 722 bp, Zea Mays
tctgaatcggacggagaggatcggacataggggaaacatgcggctgtgggggtccgagccgttcgatctgaatcggacagagaggatcggacccggggggaaataggcggctgcaagggtccgagtcgtttgatctaaatcggatggagaggatcggacccaggggaaacaggcgggtgcggggttccgagacgttcgatctgaatcgaacggagcggatcggacccggggaaatcagacggttgcgggcggcgccactcctctctgcggcggtgaggtcaccggagttgaggttggcgcgagctagggtggcttcggggtcaccggagatgggcagagagggagagggcaccacggcaaactcaatggcggggaagaggccatgaatccacgggcagagaggggagaacggcggtgagaaggtctcgggcgggtcggagaaactccggtgagccattccggcaacggggaggggacttaaggcgcgctaaggccttggctaacttcagcagaggcaggggtgacacagggacctactccggggaactagaccgggctaaaccggttggccaccgcgcgagcatggcggaccgccgcagccgagtaccggcgaaggcaaaattggccgagcacagggcgcaataagggaaattgggcacggggacgggtgtctcacctcggggtggagctcggggaggcttggagcggtctccggtgagctg

SEQ ID NO: 143390 - DNA, 390 bp, Zea Mays
gttcttcaattttagcaaggattgactcatgaacgctactcacctccaataattattgggctgcgataacgctcatataaaacctctaatcgatcaacaagacatttatttatccaaagggaatggaatgcaacaatttataaagctaagcatcgatctgtcatacaacaaaaatcatgacaacaccgacagatactatccactaaccgttgaaaatttaaacttacttctcgcttgccactacatcactcctcaatcacacaaccatcacgagcatccttcacatgattatataatagcaacgtaaacgtcgtgttacacaatacatacatccttcctcgccgcgagtataaccatattacggcatatacccgcacacctcaaataaat

SEQ ID NO: 143391 - DNA, 541 bp, Zea Mays
gatatttttgtggtggcttcgaccgtggctgctgatgacgattcatttggctctgtgtctaagtgttttgagtctgatgattctgggagttcgattgcgtggacataggagtcttcagatgaggacttggattattttgcggtgttggatgtggctgcagcggagccttcaccgtgcgcggagggttccgaggaactcccaggcgcgagtactgggtataggcggcggagggcggtggcaaagcggagagtgagtgaattgtcgcgaagtggtaggcgttatcgtagcgaggtggagagaggtcgtcttcgcgtggatggggctgggaagcgagaattgttgtcctcgctgattggggtgagtgtaggtgagggggagctgcgaaatctgttcgagggtgaggaactgaggataatgctgttcaactacagggagatgggtatcatcctgaaggttgagccaatgtaatatgtgatgccctcgctatgtgtatgtaaccataattttgtgtgatgaagctgcgcgctttcgttgatcaggc

SEQ ID NO: 143392 - DNA, 809 bp, Zea Mays
ctagttcaaaggagtatatctgcagtctgctagtagtaggtttgtaatgatgtgtcaatatcaaacttaaatgctactaaatgatgaccatattcttccttcgtggagttagccaaatgattttttgcttttacatttatccttgaattttgcaaatgaattttactgtttttatctttatgccttttattttgttaacaatcattatatgactgaattagatagccaagagcggcaaacctgtgctgttttattcctgaaatattttatggttttggccaagctgttcttcttctgctcattaaatgataaagcaaatccaagtaatgatgtgttctcaggtcactgtgctgccaaatattattcggtagctgcaataatcttctattgacagttcgaataaaatcgtctattgacttatcagtgatatgctgggcagcaaaaggtgtcctctagagattctgacattgacaattaactacttgtcataccaactgtgatccatatttacacctttgtgaatctttctcttagtgcttctttagagaaaagagatttggctactccttaaaccaaaggtcacttagggaatctatattctatatctctgtccaataggtgattcttgacaattttcattagtctgtctgtgggtgaatacttctggattatggtcgaacttatgcagatgcgacaactgaacttcctatttcagaacatcttcaactgcatatgaatatctgctatgtgatttctccttgtgcttgtcattttgtgtagtgagtgagatttagatactaaagatagtt

SEQ ID NO: 143393 - DNA, 872 bp, Zea Mays
aaaataaaaaggaaataaaataggaaataaaataaaataagagagagcctacctgggccggtttccccctttttggcccaactcagaatcacttctgtgcggcccacctctgcatcccacacgacgtcgactcgctgcgcggtggggcccgtttggcagcaagtagcgtgcgtgcgtgtattgactcgactgactcgctgcgcggtggggcccagtgaccagtctcaacgtcgctgtcgtcttctcctccgcgaaggtcgcgcggcgtgaaccgacctcgccgccacgaccgcgcaatgctcgctcggaccgttgggggttgaccctataaacgctagcgctcggtgccccgtgaccactcttcgccccacctagccgcatccacgccgccgtcgggttctcagtgtgtcgccgctagagtgaagctccgctgctggctaaatccatattgcgggggtgtttggccgtggcgaagcgtccagggtgttcgtgggggacctccagggttgttcgtgacacattcaggcgatattgtccatcgacgcgctcctaattgctcgtcgtcgttcaatcaccgtcgcagaaccgcgttgccacgtggacagagcagtcgccgatccgattcgaggtagatctacccccatcttccttgattcactcttcgtttcacgtaaaacaatagtaatcggagtttaacgcccttagctgcgtggccggagatctctggcgatggcgcgccaccgtcgtgctctggtttggattcaccggcgtccggccagggggatgtcggggttcggccgttggatttgataggtgcggtcttgattagaacatggataccggttcggcctgggttcatccccaccgtccgc

SEQ ID NO: 143394 - DNA, 614 bp, Zea Mays
gcgttggttcctaaggtagctggccctcgactccgcaactcgtagtctcggtccgtcttcgctggcagggttataccccctagccgtcggcttgatagggaaaagaggaagaagactggatgactaaattcttgcttaattccctcaagtgccggttacagatatatatagccttggcatgcaaccactcccctaaactttaggatctaattccttatctttctattctagcaactaatctgtttctgaaacaaactcctaaactttaggatctaacaaactcctaaaatttaggatctaattccttctctttttattctatccaataatttgttcctaatttccttcctgggcgctggacctggacgcggcgcgctcagcggcccatcgaacatccctggtgcgccgtcttcgggtgtaggggagaccccacatgacatctctcccccctcgacgaccaggtcgtcctcgagctgaaaggacgggtacttggcggtgatgtcgtccaggtcttcccatgtagctgcagaaaccggctcgcccttccagcgcaccagcacttgttgcacgtcacgagccacttggtagcgcaccgcatgctctggagcaggcac

SEQ ID NO: 143395 - DNA, 372 bp, Zea Mays
ccacacggcggtaaccccaactctatccgctaacatctcagcacggtgaacccgccactcgcagccctcccgtctcagatccagtttgattagttggttatttgtgcagatcctacagtttgattagttagttatttgtgcagatcctaaccaactgtgatcgctgctgctgcggcttgatcagagcgcgttctctggtgacatacctctggagattgggcggctgcagcagctctaaggctgaccttaacagcagcaagtttgaggacaactacagttagccaatatgttttctgtctatgtcctcgcgaagtactagagcagtagctacataccgtggtttgtccatatcctgttgttagatgatcaagg

SEQ ID NO: 143396 - DNA, 299 bp, Zea Mays
ctaagatgggtgattgcgaacgtgccaagcgtgcagtgccaatttaaatcagcgtcaatttaaaccgactgctccgctagtagggcgtagtggtcaccccgagtttagataagcgtgagcatgtcgcaccgccttaagtcattgtctattgctccgttagtagggcatagtggtcaccccgagttaagtaagtgtgagcatgtcgcaccgccttaagtcattgccgacttaagccgattgctctgttagtagggcatagtggtcaccccgagttaagtaagcgtgagcatgtcgcaccg

SEQ ID NO: 143397 - DNA, 985 bp, Zea Mays
agccgagggggtctttagaataaatgccaaggcgaaggggtatcctcacatgatagccgcccgatcgccatccggcggcctagattagattcgcgaaagggtatgctctattctaatctggtctctacacccgagatccgatggtcgagattcctataatgcctgatctaatactggccttgcgatcacgatccaagggctatcctaccatctaatctacatcgtccaacagaatatcaacggcacacagccatcctaaccgtccattccgagatccacggtcaccagctttctccctcgcctagcacaggtcacggcggctcaccccagagccacggtgggagttcgtcggcgtgcgcacgattctccgcccaagcgtccccaacactaaaattgattgctactacgcgacgaggaggatgaggcgagtcgattggatgggtttcttaccgacggaatgaggcacagttgcgtggccacggcgatgggcggaagttcgacggtggcggcaaattgggcgcgctccggtcaaggattcgtcaaggcgaggttctggaactctctggcgagctatggcggactcttgcagtaccacaccgacgacccaccgcaacagttgacggtggccaaggtgtgacgcgatggtgctttcctggcggcgcaatttatcccgatgtggagctcttgttcacacagcccttggactgggtaatgcgcggatggggcggaggtcgattggggttttaacccccggtttgttccggtcagcggcgcttttcacgggtccgagcgggtccgcatgagccgcgccacgatcggaggtagttgatggttctgacagacgggtcccaggtggaagtcacttgaggggcgagagcgtggtgctgcacggtggatccacgagccagggaaagggaaggggagacgagcgcggtggaagagcctgtacgtgggcccgcgctgtcggtgcggccgcgcggaggca

SEQ ID NO: 143398 - DNA, 385 bp, Zea Mays
ccgagtcagaagattctccagccaacatgtcaagcacaacattcatttctgcatcatttggactcgctggcatctcaaaatgaacttgcctctcatcattgggaagatcacaaagagaagcaaccaagacctcaatatcttcgggagagggtcgcactctaagacccagaccactatcatcagcaggaggattggacacgaaactgaaaaaggacttaggaggtggcaaattccaagcagagttggcaacaggagcaccaatatttgatactttgcctctcaagatcatgtctagtcggctcaccaaatcctcagcaggaatcctcatattggtaacccgggtcgagtcggtgacaccactatacaagtaagctgggtatgctct

SEQ ID NO: 143399 - DNA, 376 bp, Zea Mays
cacatttagcagtgacatgagtttctttcctacaaatctcacaccaaagaggcttgaaacaatccctggcgtgatgcccttcatcgccacatttttggcaaaaaagacgacgaccaatatcaagatccatagcagcaggatgcgtagggggatttttgttacctggatcagcaccctctcccgatgaagagatctgagaatcattcttgatctccgtcttcacgtgcgggggtctcaaacgccaacttaaatttctgtgccttccccagggaggtgagttttgtctctgcggcttggggtttgggcgttcccacttcgtgttcttccctttaggatccattacagccaagtctctagggatttgggaaccaatccc

SEQ ID NO: 143400 - DNA, 768 bp, Zea Mays
gcgaagagacacactaccataggcggaggcgcactcttcacgcgtcggtttgccttctccgcacacagaaaccggcgcgctaggtgcatgacatgtgggcctgggcccccatgccaaaggttggaccgctggttgtggcgaagacgagggggcacactaccgtggggcggtagcacgctccttgtgcgacggtttgccttcttgatcgttggtcgcggtgaagatgaaggggtgcactaccgtgggacggtggcatgctccttgtgcgacagttcgccttcttcgcactcgaagaccagcgcgccagctgtttgacttgtgggtcgggcccccgtgtcataggatggataccccggtgtgcatcgggggagacttctcgtgatgtttcgaggcgggagcgggggagtctgcctttaaagaggggttcatcccttgagtagcagccatgccttgcttctctcccactcgcggtgccctttcgccttcgagctctctacgcccctttgccttcaaggtttctgctttgtgtcgccatagtttaccatggccttgtaagttcatctcgagcatgcccagactgagtgggtgctcaacatggtgtgccgcctacttggatgggatgctctggcgttcggcggaaggatttgcgccggtgccatcctccctggcgaacttgccgccagagagttcgtgctctttttgtcttcaacctccccagtgggttggtgccgccgatcttgcctttcctctgctagaggtgcacggccc

SEQ ID NO: 143401 - DNA, 487 bp, Zea Mays
catggcccagattggtgacaaaggtgttcaagtcatcaaagaaatgctcgaacagaaggtggataagtacaaatgcttccgtcaggacagcaagggaattcaatggtttggagaccgattggttgttcctaagaattctgaactcaggaagaaagtattggatgaagctcatctttccaaattttccatgcaccccggcagtaacaagatgtaccatgatctcagatctttgtattggtggaccaggatgaagagggaaattgctaagtatatatctgaatgcgacacttgccaaagagtcaaggccagtcatttgaaggtagcaggtaccttacatccccttcccataccatcttggaaatgggaggatattagcatggattttattgtggggttgcccaatacctcccggcaccacaattctatttgggtcattgtggatagattaaccacgacagctcatttcttgccggtacataccacccac

SEQ ID NO: 143402 - DNA, 937 bp, Zea Mays
gtttttatataagaaattcattttataactcattttctctgatttcccatttccctggactgctcctcaaataacagttaagacaaggacctctgcgcaagaattcccgtgactcagtgcccacagcgcaggactgcgggttgaatatgaaaaagagaaggggctcattagaataaatgtcgtggcgaaggggtatcgggatatccccaccgtccgatcccatgcggatgacccagattaaatcactctcacacgaaccggtacatcgcgccgatcactggatccagatccaatggctaacacgtgcccacgctaccaccaaacgccagccacaggatcaaatcgaatggacatgattttaacatagcagatggactcccatccgttagattgcaatcgagcggcccctggtgttttcatcggaaccggcatgttgtctcagatctgggccacccaattgaatccgatggtataaaatctcccgctccctcgtctattcaccgctgtccatcacgagatcgacggccaccacccttcttcaccccgccgccccgcatagcagtcgcaccaaactactccacacggcggaggcacgccggagcggcggccacactccgccacggcgcccgaactccaaaatttactactcatactcgcaccgcgtgaggtagagaccggatttaggtcgttccgacgccaaatcgccgcagtaaggaccctacccacggtatccggtgacccacggcggaactgcgaagtccgacgaggcattccacccaagctacggcgacacaactccaattcgaaggcgatctaccttcccgactacgcgatgaactaaaagaaactatcacataccggtgctcacgctgtggggggtctggacacggcgcggattgaattggcggcgagggcgtgactccgacgagtagttaga

SEQ ID NO: 143403 - DNA, 733 bp, Zea Mays
aaacaataacaaattgctagagcctagagctaaactcctacacgcattagatgaattatgaatagatgattttgagcaattacctgtttctctcgccttgatgagtgccttagtgttgtacttattggtgctgtgtagtgcaaattaggtcgtagggacacttgggcaggggcccgcaagcagcagccgcccggtgatcttgcaggattgatgtcaggggaattgtgattgagaattaggaggagcagctcagcaggggaccaaagcgaattgggaacgacaggatttgggagggagtgagggactcacacagtcacgttgtcagttgtcacacgcctgaacgcaaccagcaagcggatatgtactagatagtctactagagaaaaaattttgtgggtctcctgttcggacgaactgccagcacatgcctttggcgcgggcgtgcgtgtatagctaggcatttgcgcatgtcagctcgtttatttggcaccatggaaattggagaactgaggagtgaaaaaggtggagagaagcccttcggatcctaggaaaaaaactagaatttcattcacgacggagagatgagccacaccaatcacgaccatgaacccctgtcgttaacatcgaacttgctacagggcctgtatatataccgaacggatggaacaagtacaccatactagaagtatggtaccacacgaccctacggatgatgttggttgatttcaatctc

SEQ ID NO: 143404 - DNA, 539 bp, Zea Mays
cgcatgaatgcggaaaaagtgcgcataaaagactagtgttggtcattggggacagtataaacctataaagctgccaggagtgatgaccgccaggtccggagtggctgaggtgttacagatgaatactacaacaatatgatgtcaatgctgcttcaattacattctaagataattgtcataagcttgaaggagtggcaaccacaacacaatagcagtatctcttaagtagcatgaagatgagctaggtttatggtatctagtggtctcttaacattgttcagtagaggtgacgatagagagggaaaccctgtatcactaggacgctaggaaatgtgaaacaaaaacaatcaaaatttgacctctctttggaataatcacaaattatatttgcatttttttgtttacacgctattattgatgtacaaaatcattctttcctcagatattccatgtatagagacgactaaaatagaaagttcagagtattaatagagaaatccactaggatgtatggagataattccggacggcttagcgta

SEQ ID NO: 143405 - DNA, 568 bp, Zea Mays
gccgtgactcccaagagaaggaggatggccaacgtgctggatgctgtgctggagactataaaagccttgaggcctgctcctacaaagaaaattgttgaagctgccaaagcgcaagccgaagccaaaactgggcaagcagaagtcgaagctacgaaaactcaggctgaggccgaagctgggccttcagtgcccgtcgtggtgaagcctgccgcgcctgaggaaaaatagcagggcagattgcacctgaaaagatcgagactcctgctcccgaagctccgatcgaaaatgttgactacatcattcgacacgcttcaggaaagaaattgtccgaagaagaaattctggaagccagacactatgcgcaaaagttgaaatatctgaagggagctttagtgtttaatggcactaacgatgacgactgcttgtactgtctctcggacaattaagaaatatctgtttgccgggagataggtaaaagcatgggattcccgaagctggaagatggcctttcaattttgtcgaaggatgatcttgccgacagcctagcatacaacagtataaaggtata

SEQ ID NO: 143406 - DNA, 566 bp, Zea Mays
gaatcatccgaatcattttcagctaccacggtcgaagccgccacaaaattagcattgtcagtagcggttgcgtgcacaggcccaaaaccctgaacttgcgtagcaaccgaggttcagtaacgcgtagacaaaatttacaaactcccctgcacccatttaactacttagccacctgcgaaggcacgaccgcggccatggggtcttcgactccggctcagccaccacctccggggcaccttcgaccgtcggcgcaggggccgacacagggtcttcgccggccatagcaggcacgggcacggccgaggggccttcaccggcatccgagggcagcaccggattgacctccgcagcctcgagcggtgcgccgaccagacctctaaggtcctcgacgtcctcggcacgctccatctgcagcaacaacacattcactcagcaaaaactacacatacccacacgcaaccaaccacacaaaaataataaccttcacctgctctctcgcccggtcggatcgctccctgacagcctcccgaccatgcgccccccacatcctatcaaaaagtgccccc

SEQ ID NO: 143407 - DNA, 326 bp, Zea Mays
aaggaggtgggcctctgctttcttggatggttgcaggaggaactggaggtcctaccgacgatcgtggcgggtctcatgtcctttgcttcactcatcacctgtgagggagctgcgaatgccttgtcccgtgagggatgtaggcacttcgaagtctttgatcgatccaacgaatacttccaacgtgaaatcttccaagtggaagacgcggtgctaaagcagtgcgctggggcactttatgataggatgtggggccctcacggccgtgatactgtccgggaaaggtctgaccaggcgatggagtaggtacggattgttattttacttta

SEQ ID NO: 143408 - DNA, 398 bp, Zea Mays
gcggcagctaatttacagtaaagtgatgcataagtagggcagccatattacgatgacgtagcgaatctagttgagtgattcactagcctagttaattcgctgcaggcttctagatcgtgagtttgagggtgtctgtacaggttgcccatcggaacaattccgtggctctctctctagtagcttgtttgttttatatacagatgaccatgttgcgaaacgtggatatacgaaaaatgctagacgaaaatgtgtgttcctgactaactgctttgtaggatatgaaatagattgaaacaacaatacaaaattgtgaggtgtcatatagctgctacactcaaaattggccaaaagagaaaaacttggaccgctttggaacaaataatacactaagcctgttc

SEQ ID NO: 143409 - DNA, 411 bp, Zea Mays
gcccacctcactcactcggccatgcggcccagctaccagcccaccagcgcctcccctgcggcgcggcaaaccctagccgccaggctccacacgtcgcgcgcgcccttgtgccactacctcgtgggtcccactgcgcagctccttcttctcccttttcttgtaatcgcacacagaatcccggatcgcattcccgagctcccttcctctcatgccgatggccgggtccgcccctccccgtcgagctccgacaggattggtcgttccaacctgacccccgacagcggactcccgtcggtcgattgcgaccccgcgctgagcacggtttccctagacgtgtggggctcggctacagatactcctatcgaacaaagcggcgcagcggttgttgtaacaaacgccggtcagttggga

SEQ ID NO: 143410 - DNA, 622 bp, Zea Mays
gctcgcccgcgcccacgctggcgacttgcacagaggaccccggctgttcgaataactagtaaagaacccttggcactatttcactgtctctctgatgtttgcactaaggccctatacttctatttcttcacaacactcggtccacgacggtgcacggcagcgagcgcgccctccggcgaacttgtatcggccaggatacaaaactaccggtgccctaacttggctaacaccgaattcaaactttggtgacctactgggacacactaattcaacccgaacaccactcaagggcacggttcacgcatacccgcggagttggagacattcttaacgcgttcctaatgttctagcgcagtataacttaatcggccaggccaacaagcatcataagcatgcgggagtagtgaaacacggacaacgcggacctggaaatggctggccacagcgcgaggtcacactacaatgcggaaaaccaatttgggggaaattgcgaattgaggagctacggtggacgattggaggcgaggagcgatgcactgggcacgtaacaacctaacggagcacgctgaacgctcaatttatagtgtccatgaacggtggctccgaatttgaggagagaagc

SEQ ID NO: 143411 - DNA, 871 bp, Zea Mays
tggggtcgccttgtaagtcggattgactccacgtacaagcggcggctgcgtcgtgtccgccgagctgtcgcatggggccctctcgtcaggcttatccctctcctcaacaccccgctcattgccccgggatttccgagctccgtgaaccatggcgtgatccccgcgtggacttcctgacctcggtgcataagaacggatccgcacccgcccctcttccatccgctcaccctgttccaagccatggggcactgtgaatttctcgtcgttgatgaatctctgccaccggtctgccctgcgccatggctggccctgttcccgccttcttcatcggtgaggcctcgctcgcgcttccctatggtcctcatgacattttgctctaggatccactaggaatcgaacaccggaaccttggtgcctgctcatcggccatggcgccgccggccctggtgaacgccaccgccggtgtctgcgacatgagataggggatcagcgtcagtcgttggatcgtaaccaacggtcacgattaagacagtatgcgtaccgcttcgagtaagtgaatctggatcatcggttggattgggcggccaagattgaccccgtggcgtaattgaatcctatccgtccgtgcggatcgaacgcttggatggagtctctggcggggggtacatcacgggccattaatcttcaatcgtgtggtctgcacaggttatgggctcgggatcgatctgggccatccagatctaatcttgtggctcacaaacagccataccccttcaccaggataacttacaaaagaacccctcagtttttgtaaaaccaacccgccatccaatacaggattaaaagcattacaataaggtcatataacttg

SEQ ID NO: 143412 - DNA, 375 bp, Zea Mays
gcgtcctacccgagaacgatgggcaggtatgctatcatgacgtccttcgttgcctaggcggccagggcgatagtcgtatagacagccaaccagccacccaggtcttgcttgggctcattcttgtcgacgtttgggcggccattgaatcgcctagagccgagggaaagggctgagattgtgcacgtcctccgggcctccagatggtcttcccgaacatgtttgtgatgacagtccctaggatgcgactgacgtcaagggtcacgtagcctctcccaagtcgatgtgcctggtactgtgttgtttgtagagactgccactgacttcgtccgcgttgtgcaactatgtgttggaccatcgtgatccagatcatattct

SEQ ID NO: 143413 - DNA, 584 bp, Zea Mays
cttcaactaggcgagatggtactggtactatccgagagctctctgcatacgactttgtgtcgtattggttttagatactttctcatggcttgtcttggacaaccaaatgacgacgcaggacgacggtggacggtggaactatagagtaatggaagactacgagaatagggaaacgagaataaagaataaaaaaaaagagtactaaagatggtgcatttaagtggatggtttggtttcaacgcgagtagtctgtgcacgtcaggaaccagtggcctgcttccatgggagacctggcccggccgacgtcgcattcccacggcacgcgtcggtagggatgaaagcgaaaaccgtaatttttgaatactgggaattgtttttgaaattttactaaaattttagtctaaacagaaacggttactaaaaatacggaaacggaatcgatagaaaaactcggaatcggaaacggtttaggtctctttcgaccgtttccgaaaattaccatttttattcggtattttaccgtcggtaataagtttagtattttttagaaaaatattaaatttgaactgatctttataaattca

SEQ ID NO: 143414 - DNA, 798 bp, Zea Mays
aaagagtgagatgtctacctggaaagctcacacgagaggtgacgatccaggcaggacgggagacggcacacggtcacacagggtcactgaaatgacagaagaggtgagcacgtattagtcacatagtcataagcatatgaaatgtgaataaatacatacacagagagatatggcacgagacaggacgatcaataagtcaaacgacgggaaaacggcgtttgatagacaaatagagacataggatgattggaatttgaattgaggcacgaaatgatgtgggattgagccgatacttcacgaataggtttatataggtcaatatgagtgaagtgtgtgcttggtttgaatttaggcgaagaaatagggtttggggcactcggctcggaaaggatcgcgcaaaacgggaattttggtgaaatttaagcctgggatctcggattggcgtgaaatttggcaaggatgttgctggaagtgttgtgaaggtgcctgaaaaatttgggttcaattggagcaagtttggctggtttgggcatttcaccgagcacgtggtgtgcggggatttagggtttcggtgaaaagcgtatttggagtggaaaaaccctcccgaaggagctagaaacctgcagagacacacaatagagatacttgaacttatttcaccaaatggatttgcaagattcacaggaaattgagagatggtcaaaaggggggggggaaggagtgccacacagcctttcacaaccgagagcagtgagagagggaagaggagtaggtgctcaccgaggggaagagctcggg

SEQ ID NO: 143415 - DNA, 503 bp, Zea Mays
cttttttccttcaacaaattttcaagttcttcaatccttttctccaagccactgataacaaactcatttttctagtcttcgtcaccttggtgcatcttcagagctttgctcagctgtaacctttgagttaaaggatgaagttgagttagatcttcattaatgaaatgctaaaactagcccgacgaaggaaaaatagtagaggaatcataccttaaaatttgagtagaataaactgcctataacatgttgtcttctgtaacagctaatgcctttttctaactttagaaatccaatactctttgacagcatgctcacaattttttctccaacacgatcacggatacatcctaaaactcttcatccacgccgccgaagagaacggaaccatgctggtagctgccagatatagcaaattccttcaattctgatatatcctcttcggaaagctgttggccgcccaggtgatgaagatcgaagcttctgtcttctgaagaggcttcttc

SEQ ID NO: 143416 - DNA, 661 bp, Zea Mays
ctattgttcaagttatggtcaacccttttccgcacacatgcccaagtgccgaaagaaaagtgacgcagagggcagccaagagcaggtggtgctgtgatgcagtgttacagtgggtgacagaaaatccttttattggtccaaccgcacttattaagaagattcatgagaagcataacattcaagtgccttacatgagggtcttctatgggaaacaaatggctcttgataaaatctatggtccatggaaggaaagttttcaactattgtactcatttaaatccgaagtggagaaggcttgtcctggaagtgttgtgcagattgacaagcacaaagtagtgtacaatgtgaaaggtaaaactatggagaaggaatgctttcggagagtatttgtttcattcaaggcttgttggaagggttttttggatggttgtaggccatacttggcggtggatgcaactgttttgaccggcaaattcacaggacagttagtggctgcttgtgctatagatgggcaaaattggttgtatccagttgcttatggtgtcttggaggttgaatcatcagagagctggacatggtttatggagaatctgcgacatgtcattgggtttcctaatggattggtcatacacacagatgcttgcaaaggtttggaggttgc

SEQ ID NO: 143417 - DNA, 355 bp, Zea Mays
taagtcaatggtgaaacatccacactagatgaatgtataagaagatcaaacacctcacctcacagcaccacaaaacaagtagatctattgaaacaaaactcctaatcttcctaaaccttgttcttgccataatgaaaagataatcatgtaatctaacatactttggaccccaccaaaagggagaaaatctacagaactaatggagcaataaagccgacaagaagccaataaaatcttgcgcgacacagttcatcgaagaaatgccaaaaactctacatagagcactgacagcccaacaacaacacaatacttgcttaacccatatcactatacttcattcagaatctcaactaag

SEQ ID NO: 143418 - DNA, 331 bp, Zea Mays
gttaatgtcttctgcttgtactattcttgctatgcaacacattagttgttgccaaacatgagataagtttgttcaatcctcattgtgcattgctttcagtagcatgttgcccctcttgtgtgcttctaacatcatagccacaccaaacactacatcgaaattggtactcaaagaggtatgtagttgtgcacctcaaggatctacactcatcatataggtctgatgtgcactcattcagaagcaacagataccgatacaataatgactagttcataaactaactgttggtacatgcattggatgtgtcttgtgcaaaaagttggtgtgcgcc

SEQ ID NO: 143419 - DNA, 734 bp, Zea Mays
aaaatattagaactccagcaaataaacgcacaaccccagtcagaaatattattattacatgttccatcgcctggccggtcctctccttaacaacataatggtcatgcggaccctacattcgctcaaatagggcaccagtaggacgcttaaaagacaggtccttgacatgaaaaacttctcgatccaagtctaagttgctctgctcaaaagttttgaagtgcttacagccttcacgacatagtgcattgacaacgccctcacatgtgacaagggaggcataagccatgatccttgtcacgatcaagggaagacttgctagctcctcctgcaaccagccaaggaaacgggtgaccagccccttcccggccctgtcaaagggcgtcgtctcagcaccaaagtcgtgataagcttcgcagaataacgcatgagccctccccatgccgacactcatcacaatctccaccctctctcgaccggccttcactgttgataattcagactctagtgcggcaacacgctcgtgggtagcctgtccctcggaacatagcttagcctccgtagctttcaactaatctagctggtggccaaggtcgtcttttttcttttaaagcctactgaccatctctaggaggcgccagctctttgactccatagctgacttggcttgcatcctatcggtactctcgaccagcaaacggtcaatcttggcctccaactctaccttcgcagcctcc

SEQ ID NO: 143420 - DNA, 367 bp, Zea Mays
ccaaattgcggctggggaaaggttcacgggttcaccaggggttaggtacacactttggtttgggcagaataagaaccaaagagcgggtcgacagagggggtgtcacgacggcgttctacagagcaggtgcgtgttccggtgaaaggcttcggccgaacttcaattggtcggtactgagagcaataggaggctacaaacgagctagagcagggagcaattgggaagttactaacccgaagagcgctgagcacggtgaagttcttcatggcggagttaagaacatggagaaaggggatttgtggactgtgtgagttctccggtgaaattgaatcgagtgcttagtcgctgaggtgcgggatgtggtgaa

SEQ ID NO: 143421 - DNA, 501 bp, Zea Mays
gtatgctgaaggatatgagtcataaaagcacggtgctcagccctgtctaccaagagctgctgctgtagagtgtgctaacggtcctgaatggtctgaaacatagatagcattcgctcggacatctacaacaggatagttgcctgtcgagactgctcgactgtcagatgagcccactactgtgtaagagactgaagtatcgcaaccagagcgggaccaatggcatgaagggcagcagaggcagcactggaactccctgcctcgtgatcatgtggtacatttgatgaagaaaacgagcttgcctctgaagtctaaactcactccgaggatgttgcgttttgcacggggcaaaaggagcaaagtggatgagtttaaccgccgacttaagtgatctacgaccacgacatgaaaggaccaatctccacttgaaaatgcataattctctagctgaaagtttgatctcaagttagaactgaaagtgaccaaaagtaagctagggctcgg

SEQ ID NO: 143422 - DNA, 494 bp, Zea Mays
cgcgccctctctctccttccactcggcaccacctttactgctagccgtttcccgcactcatgtcgtgccattaatagtcatggtcgagctcctccgtcggcatcctctccactcctctcgttgcgtatatctgcagtgccgcaggttcgcctcactcttctccctgctcgcccttgctgctctctcctcgctcttcgctctccactttgttgccgcgctcgccacccgcaaactgccgctgccgaagctctctgctccttcctagccgccaacaaagggcgtcccattattccctagcgctctcagccatctgctcagccccgtcgcgctgaagatggacattgagcagtcgtctcgccatcccctgctgtttgcgcacagcgatactcgccgtcactagcgcctgcacatcgctggagttcactgtcacgacgtcactagaacctctacgcccagcttgtcgcgccgaccgtcatcatcattctctgttccac

SEQ ID NO: 143423 - DNA, 701 bp, Zea Mays
tgtaatcttgcctctattcttttgaatccagtaataattcagtaagttagcagaggggaattgagcaaataactgtctcaaatatttaagggttaagtttttagcagtctactgtgggtttaaaaaaatttaggaaaccattttttacagcagccctcaatataaagtttttgggaataatttttaagcagtctgttggagttgccctaaaggatgtccgtcccggtacagctgaataacggggaaaaggagttaaacgaacatcagtttattttgcagcttatttttttggtggggagaaattattttttattttaattttctgtttggttcaggtccttgttcttcctgatttagtattcaggtctttgttcttcctgatttagtattttattccttcacatgggacactgtcgatgacagctggcgcatgctgggtcacagcacacagagtatcggcgtgtggcctctgaacatggacggggccggtttgctgtcgaggaagccaagcgaatgaagccgggcgcgatgcatgggcatggcatggactgatggaccctcctttttcttctttctccgtggtggcgactggcggttgccgtcgcgggcgggcggacggggaccgcgaccacgcaaccgacaggaaagattttggcagccgcactcgttccatccatcccggccagggttccgtttccagt

SEQ ID NO: 143424 - DNA, 410 bp, Zea Mays
cagaagtactggtggtatgggctgaaaagagatgtggctgcacacgtggctatgtgtgatgtgtgtcaaagagtcaaggatgaacatcaaagaccagctggactactacacccattaaaagtacccgaatggaagtgggaggagattggtatggacttcattgttgggttgcctcacaccccgaaagggtatgattctatatgggtgattgtagataggctaaccaaagtagctcacttcattccggtcaagcctacttataaaggttctcagttggcagagttatacatggctcggattgtgtgtttacatggtgtaccaaagaagatcgtttctgatagaggatcacaattcacctctagattttggaaaagctttcacgagaatatggatacaaagttgagcttcag

SEQ ID NO: 143425 - DNA, 456 bp, Zea Mays
gcaccaaggctggtattcgaaagcatagctgaagcagaagctaccaggctagaggatattgatgtgctggaggaagagcgattaaacacaataatccagttagctagataccagcagaccttgaggcgctatcatgataaggctatactacatcgatcctttgtagtgggagatttggtccttcgccgaattctaacgggggaaggatggcacaagttgtcaccactatgggaagggccattcattgtgtcggaggtcactcggccaggatcatatcggcttactcaaatggatggtacggaagtggggaactcatggaacatagagcatcttagaaagttttacccttagcaagacctcaaaagctatcggatcaacgttgtactctgtaattggaaaatacgccatcaataaaaaatttcattctcaaaggcattcaaactgtcagttatcaat

SEQ ID NO: 143426 - DNA, 914 bp, Zea Mays
tatggaagtatttgtatcactgtcgacctgggatggctggggggcagcaccagctcgtgggtggtgcaagtctggagatgtgccgcgggggaaaacagaataccttgacatttctctcaaggacagcattaaagggtggtgccttgagtggtttattgtggaaaaccatggcaagtccctcccccctcggtcggggagacagccagatgtgcgcactccgagttgggttgagtctcctactgccttggaggtaacaaaagctagggttctgcttgctgatatctgtctgctgaaggagagaggtctggccgccgaggctgtggttgctgactttgtttttaagaatatccagcccttgaaggacagagcatacccagcttatttgtacagtggcgttactgactcgactcgggttaccaataggagaattcctactgaggatctggtgagtcgactagacatgattttgagaggcaaagtatcaaatgttggcgctcctgttgcctactctgcttggaatctaccgtctcctaagccctttttcaatttcgtgtccaatcctcctgctagtgatagtggtctgggtcttagagtgcgaccctctgctgaagatattgaggctctagttgcttctctttgtgatcttcccaatgatgagaggcaagtttattttgagatgccagcgagtctagatgatgcagaaatagatgttgtactcaatatgttggctgaagaatcttctgactcggcccctactgaaacaatggttgttgcggttataccagagcttgacaaaacagtggatacccaaaagcctgagggtattcacccaaagcgtcctcgccaagtcaaccgcccaactgtgcatgttgaggaggagaagaagaaaaagagacggcttcggcgactgtcat

SEQ ID NO: 143427 - DNA, 577 bp, Zea Mays
ttatcgcgatactcgctgactgacatacttccttgctttagcgacagaaattccttcttcttaatcttcatcaatctagctggtatatgataattccggaactgtgtactgaactctgcccaagtgatagtatcagcagcatcgtgggcagcagtatatgaatcccaccagtcagcagcaggacccgtcagtcgtccagaagcatataaaaccttctcccgatcagtgcattgtgcaatattcagcatcttctcaacggacttcagccaatcatccgcgtccagtggatcaggtgagcttgcaaatgtaggtggcttatgactcatgaactccctatgcttgtctcggggtggaactggtggtggtggtggaggcagtggtacttgttgctattgctgctgctgctgttgttgttgcatttgttgttgcagctgctgttgttgcgccctcctttcctggcgtatctcctctcgctcctggcacaactcctgtcgtatatcttctctttcctgacgcattcctggcgttcttgctgcatctgggcacgcatatcagccatagtgtccgccatttgctg

SEQ ID NO: 143428 - DNA, 560 bp, Zea Mays
gaaattgggcggctctggtagacaattggaggcaagtgctggtgtgttggatgcgtaattacctagcggagttctctgaggcttcaatttatagaactcaacgttggtggcactcaatttggaggagaagcgctggcgaccggggagaggggaggttaatggcgcaaggaattcgtggctttcaccgtggcaagttctcgggtgatggacaggcttgctacaccggttcatggcaacgtgctaagcttccaagacgcgtggcgcatgatcgttaagcggctaacgccggtgaggatcatcccggccagccacagtccaagtgggtacggcggccacaacggtgagcgagcccgaaccaatccgagcactaagatctttccttctctccgttatccacttgcgatgggcacgaatcacaacggccggcgcgaatccaggcgctcaatcaccggcgacgaggggcggtgaccttggagatctttttcagtactataccatggcgattaccatcagagtgtctgatggagggatttcaggagccaggatctttgaatttcatg

SEQ ID NO: 143429 - DNA, 317 bp, Zea Mays
tcacggccttacgccacgtatcgggacacgtccgtcgtgttgccatgactcactataaccatctgatcatcgccggtgagcgctgccatgattgttgccacgaatccactacgccagtgatcctcccactctccggtcgccagcacttctcagccaaattgagcgccaccgttgttgcgctctataaattgaagcctcccagagctctgtaggatcatcacgcacccagccaccaagtattgtcctcgggtgatcaacagtgagctccaatttctaacttcccccaaatcggttcgaatacaccgcaagaacacctc

SEQ ID NO: 143430 - DNA, 446 bp, Zea Mays
ggggcactcactgagctagccttctcaagcaaagctatcctagcgtctctttctgctagctcagtctgcaagccaggacaaacggtacacgcacccaacaagctagacctagatctcaactcgtcgcgctcatctagcaaggtagcgtacttggtctgcaaagtggtgatgttcgacatgtgtagggtgcccccatcacattcagtctcatcggacaccacgactgtagctcgagcagactcaagttccctaagcgtgctctcgtacttggatctaaactctctcctctcatgagcagcctgcctaagcaacttatcctgactagccaaagcagtcgtcagctcctctaccttagcggcgagatcatcggcggaaggtagtacctcagaagcagtgtcgtcgccgatgtccttgtcgttgctggtgccgaccgcgtcctcaccaag

SEQ ID NO: 143431 - DNA, 317 bp, Zea Mays
gatggagggagatgaaaagatggggaaattttttagcgccaggttttcgcggctgcccagctggccggagcgccttttttccgaccgactgcgggatgtcgcagaaacttttaccgacccctctaaagacgctataaacaaaacaattaccgacactcagtgagttgttaaataaggctttagcgacccacagtctgtcatcgcgttttaccaacacaccgaccgttgataataagggtcggtaaaagtgttctgtggtgtagtgaggtgtattttttgttagggagaaagtggctcttggagttgcaagtcctgct

SEQ ID NO: 143432 - DNA, 2648 bp, Zea Mays
cgaaatccgcggatcccacacgcgttccttggactggggttcccttgtcgagcttatataactggagccatacccctccccttcctccaccaattcgaagccaactccgagccattgagaacctcgccgaataccgagggagaaaaagaggtgctcgcgtcgccgctattgattcaagctcctatggtcgttcggggcgcgaagacagaactaagagcttcgccggttaccctgggacctgtttgatgtggcgccggggacgatgatcgacccgatggcggggaatttctcgccgttgaacaacctccgccatggcgctgctgtacacagtcgccaggactcatcccacctcggtcgcggtaagatgtccatggccgagttctctatatcgtatattttgttttgcacgtttgctaccgatgattggatcgccgcgtgttagcacgtgtggaggagaggagtagcagaggcagagattagaggtagaagaagggtattggggagacggcggcggccaagacagccagcccccaggtactcgtattatctttctgttgtttgatgccctctctgtctcagcgttccccggtttatacgccttattacaactcagcccaacagacctacacaacccactccggcccaaatactttcacgctacgacgctttactcgttgtggacgcgcaacggcttcctcctcggactcgccctccacgtatttgtctgcacgaccgacgtcctggctgttggagctgacattcccccggtcttgaaacgccgcttgtccccaagccggcgcgtgtggaaacctgtcctgtaatgctttcaaatcttcccaggtagccaaggaatcatccatgccggaccataccactttgacttgtgccacggtcacgcctcccttttgtatcagtcgactttgtaacactttggtcggtatctgaagagcatccgtttgagcaggaagggaggcagccaccacctggttgcggctgattgcggctttgagctgtgagacgtgaaaaactggatgaatttgggctgaatcaggtagatagagtttgtacgccgtggcaccaatgcgctggataatagtatatgagccaaaatatctgaaggcgagcttttgattgccgcgccgtgtcactgaagactggacatacggttgtagtttgagatagacacgatcacccacagtgaaaaccctctcagatcggtgcgtgtcagcatacttcttcattcgactttgagctctgaggagatgctgttgtatgagcttggagatcacttctctttcctgcatccactgttccagatctgtcactagaattgccgaattttgatgcagcccaaagtgcttaggaggatgcccatataacacctcaaatggggatcgatccagagatgaatgtgaattggtgttgtaccagaattcagctacaggcagccactgactccatttgcttgggcaggcatgaacgaagcaccgaaggtatgtctcaatgcattgattgacccgttccgtctggctatccgattgtgggtgatacgatgaactcatgcagagttgtgtgctagacagtgcaaacaattgttgccagaaggcgctggtgaaaacacgatcacgatctgagacaatattgtctggcataccatgtagccgatacacttgatccaagaagagcttggcgactttaggtgctgtaaaggggtgagacaaagccagaaagtgtccatacttggaaaaacgatccaccaccaccaggatacagtccgctgcaccagacttcggaagtccctcaatgaagtccatagagatggagtgccaggcatggggaggcactggtagaggtgccagcagtcctggataacgggagcggtctggtttggcctgttgacaagtgctgcatgactaaacatacccacacactgcctgtttcattcccttccaatagaacaattgcttaatgcggctgtaggttactggaaaaccagagtggccgccaataggggaatcatgaagggccgaaatgatttggcgttgaatatctgccgaactccccagccatactcgtcctttatgtcgaatgacaccctgagatagtgtgtacggggcaacagcatccgcggagacagccagttttgtcaaaaggtcctgtgcttgtggatcatccctgtagcttgcaacaatttcttgaatccacagtggagtaccctgagatatgtgcatggcttgcccttctgtcgggacccgagaaagagcatcagcagccatattgtcacaaccctttttataaataatgcggtattgcaaaccagccaacttgacatacaatttctgttgccagacagtatggagccgctgttcatttagttgcaccaggctttgatgatctgtgtaaatatgaaattcagccaattgtaaataggaacgccactgcgtcacatcgatcagaatggccaaatactctttctcatatgtagaaaggccttgattcctgggtcccagagacttgcttaggaatgccagagggtgtccacgctgcatgaggactgcgcctatgccagtgttgcaggcatcagtaaaaatacagaaaggcactgaaaagtctggcaatgcgaggactggtgctgagcttaaggcctg

SEQ ID NO: 143433 - DNA, 290 bp, Zea Mays
tgcatcgtggataggttggtagttgtatcgctatgactgcttaggggcactaccatgtctgtgggaggacaaaaaagaacacgagcaccatacgagtgatggaacgaaggagcaccatacgatccataacccaagtccaacagactccctctctgcctctccatttagcgtgacacacaacctcttcatcaacagtctttagtttgggtcctccaacagtctccacatctcactccatatacacatgtagtgtgtgaggttgatggttggtaactgtagcagggttttta

SEQ ID NO: 143434 - DNA, 413 bp, Zea Mays
ttgggataaaagtctacgttatgctgagttctcatataataatagttatcaggccagtctgaatatgtcaccttttgaagctctatatggcaggaaatgcaggacccctttatattgggatcagactggagaaagacagttctttgggcctgaattgattcaagaagcagaagaacaagtccgtataattcgagagaatttgagggtggctcaaaccaggcaaaagagctatgctgataatagaagaagaccactggaatttgaagaaggagattatgtgtacctcaaggtgtcaccacttcgtggaatgaggagattcaaagttaagggcaaattgtcccctcgctacattggaccattcttgatctttagaagagttggggagatggcataccaactcgagttacctgcta

SEQ ID NO: 143435 - DNA, 424 bp, Zea Mays
gggaaaagggctttggcgcatgacacagtggcctttcaccgtggcaggtgctccggtgatcaccggacatgcaccacatgattcaccgtgacgagagctagcgctaaggcacgtggtgcgcaacagcgacaacacgacggcggtgagggttatccgagcgaccgacgagctggggggaagtacagcatgcttagccgcaaccgagcttgagtggatcagacgtcgagatctttactgggttgtgcttatccatggccatggcgcacgaatcacggcaagcaatcgatcaacggcgacgggccaccggcgacgagatctttttggcgctggcggtctgatcctcccgatagcactgtaccatggaggagttcagttaaatgaacctaacagccaaatttgaagccaagttttctctcgatttccg

SEQ ID NO: 143436 - DNA, 417 bp, Zea Mays
ccttggtcaaggcatactctaccactttcatcacccaaagatgccaatttgaatatcaaatgaaacgccacttaacaccaattgaaggctaaaagaaaggttgactaaatacaacaatgcatgcctcagtggcacctaagccaattggatactcacaggaagtctaacatttacacgcaacttagacatgcttcatacttaactatcattggagcacatataccaattgaaagacaacacgatcatgtcttaagcatatcatagttaagaaggttctttaggtacaccaaaagaaacatcattttaaggcataagtctcctaagccacgatgctaccaatgaaaagcaagaacacagctatgattactatcaatggaatttcaagataatcaataaaattgcacaattccattttcc

SEQ ID NO: 143437 - DNA, 791 bp, Zea Mays
tctggatcggtgcggcgccacgaccgagatggaagtgacaattccaatggcatctgtattggatccaattaatgaatacaacaaaattatagtctcttaaactttgtagcatataagtaagaaagtctacatgtgtagtactccctgttgtcgacacacaaatggagctggtctatcggtgtgagtgagtaggtaagcacaggaaatgctggtggaacctcaacaacctcctccaattttgtccagtttgtaaaggtaatcatgttctcattgaaaacaggcttgtacaaattgttcgaggctctgacccggaagtatgtgatgttgtagacgactccttcttttatcagaggcttgaacttttgtatgactggtgggaatattgcagcatggataccgtttccctgcacaaagcagcgatggaggaaacaacaacataataaaaattaatctcataccaatgccaccttccctttaccaaatagataagcgtgcagatgttgtacctcttcgtcaagcagcaccatatcacaatggagcaactttgcttcatcctgaggatcacagaaatcccataaacgagaaacacgagcgcatatggtcacagaagtgtttccacgctggagctccaggatcaacacgtctcccatctacaaggtaaaacaggaagaaaaaacataagagcaaggacatcggaacccatgcatgaaacagcatgtgcaaagcatgacaaaaaaacatggctctcgtaccaacctatacatagcacacattagcagcagcaaacgtag

SEQ ID NO: 143438 - DNA, 425 bp, Zea Mays
ggacatgagcataagtttttctctccgtatgtgccttaggagaatggcattgttgatcacaagagtcggacccttgttgagatggccaggacgatgcttgatgagcatatgactcccaggagcttttggcccaaagcggtcactgctacctgccatgtgtcgaatcacatctttctttgagctttcttgaacaatacttcatatgagttgcggtttggatgacagtccaaggttagtcatttcaaagtgtttggctgcagatgctttgtgctcaaacagggaaatttggacaaatttgagtctcggtcttctgatggggttttcttaggttatgcattacattctcatgcttattgtgttcttaacctggagactaaccgcattatggagacttgtgaggttacattcaatgagactgcaccttg

SEQ ID NO: 143439 - DNA, 292 bp, Zea Mays
tgcaaagtcgccaagccaaaagggtatcagacaatggacaccgctggatgcaggatcaacggcgcagattacacgtgcttcattatgaaccagtacacgatatggaccgccagatccaaaatcaatggccacaattcaaaacctccctgatctaatcctacgcattcaccagacatcccatggtctggatcgactcacgcgaaggggtatgcctcgcttaatcctggccgttaaacagaagatcgacgatcaggggcatccctttactctctcctctctcccctgttcactc

SEQ ID NO: 143440 - DNA, 330 bp, Zea Mays
gttgcacttgtctagtcgataaatgttgtcataaataattgtgcaaaaattggtcacgagaatgtcgtgggcacgtggtgtgtttggaagtgacaagtagattggaagtgtggggtttgtcgaagcgctgggatgtcgaatgtgtatatcgaagtgcattgtagtgataattgcgttaagttaatcggtagtgtctcgagtgcacgccacaatatggttgtatgcgagacatggtaaaataaggtgcgctcgatggggatgttcagtcgttgtaggtggaaattgtctttacttaaatagagaggtggtgacatgccgaaatagtcatcg

SEQ ID NO: 143441 - DNA, 389 bp, Zea Mays
gggcgcacgcagaactggtggtagaacgccctcttcatcctgtcggcgctcacctcaggtcggtcccgccccagccaggcaacgacggcgtgggtcgagagcctctctagctctgcctccatgtccggtggaagcagcgacggcgaaggtttcactggggcgcgtccctggatcgcctggtcaaggcatggtggcttgaacgagcggagggaagtcgtcgctgtggagtctggggggcggttgcggggcagccgtattctgggaggtcttggccttgggacagagccaagctttatggcctgggcctccgcatccgaaacaacacagagggtccctgcaggaggaagcatgatgtcccctgcccaaacaacggaagcatttaccactca

SEQ ID NO: 143442 - DNA, 461 bp, Zea Mays
gattattccactttatctaaactatctcccagctgcatgcctaatctgttcacgtttttttgcacacatactgtttggaaaagcaaccaaggactggggcggtatggactgaaacaaacctggtgacgctggtggagacaccacagatggggaaggctcggcctgtccattattgtaggaatagctagccgcccatgcaagttctattcagcctgccttttcatcgctctgaccaccatgtcctcatctgcgtgagatgtgctatcaatagttggacacaattcgtcctcaagctacgacggggacagtttgacattaccagagagagagagagagagagagagagatagagtgctagcaataggaggggatgcaaaaacatgtaccacctcaccgttctgtcgtacttccctctgatcaacttcacaacgttcaaatttaggcaaggcgctgtggctgaa

SEQ ID NO: 143443 - DNA, 369 bp, Zea Mays
aaatggggggatggatgtgataagctctatggcaaattcagcttttctctcaggtggcatgcctggtaactcctcgggaacacatatgggaattttgatactaccctgatgacctcaagcggattggcttccttactatcgacagatatttggtgacagcttcccttccttggttccgacaacatcaactccaccaatacttcttctcctgacaaggacaccaacctcatagccctcttatcagagttaaggcctgcttggtactttgtcgaccaattcatccctaggatgacgtctatgtcaacatcccgagtacccattactaccatatcagcggggaactctaccccccttatttcgactcttgca

SEQ ID NO: 143444 - DNA, 540 bp, Zea Mays
agcgagacacggggcaagaaagaacatactcatacacagcatatctaatgtgttcaataaattacacgtatgcatcaaaattagctatacatataccctaatgtcctttttacccatcggatactgccactaccaggaatcggtacaaatatcacaagaaattgacaaaagatctaaaaaatagttacttgaattctgattaaaggaggaaagaagggatcgttaatgccctgcaaccgcaacttccaattttgggtcggactcaaaagctaaggaaactggctgatgcattatcgttatccatccaatttcgggtcggtctccaaaggcctgatctagatgcagtccagctgcttaaatccaacgccctcctttccattcccttctcctggcgcttcctctagtgcctactccgtgctcgctcgctgtcggcttccgcgatcaacccagtctctcttctcctcgccgatcgaatccatcccatcgacagctctcctccgcccgcgatggtgatgcatctgtattctcgctcctcttccg

SEQ ID NO: 143445 - DNA, 278 bp, Zea Mays
accagatgtaggagctgttggatgggttcttctccaatcttttgggggctgaaattcagagaccattcactcttaatttgccaaattgccacagaagtgcagttgatctaagcgctttagagtctcctttctccgaaagggaggttcaggatacgattgcaagccttcccaacgataaagcacctagtcctgatggattcacagggaggttctataaatcttgttggcacatcattaagacagacataatggctgctccggaatctcttcgttttgga

SEQ ID NO: 143446 - DNA, 610 bp, Zea Mays
gtgagcatgttgcaccgtcttaagtcgttgccgacttaagctgattgctccattagaagggcatagtggtcaccccgagttaagtaaacgtgagcatgttgcaccgtcttaagtcgttaccgacttaaaccgattgctccgttagcggggcatagtggtcaccccgagttaagtaagcgcgagcatgttgcaccgtcttaagtcgttgccgacttaagtcgattgctccgttagcggggcatagtggtcaccccgagttaagtaagcacgagcatgttgcaccgtcttaagtcgttgctgacttaagccgattgctccgttagcagggcatagtggtcaccctaagtcaagtaagaatgcaggtcaatcatgaacaaattgagtattcttgaagcctttttattgatgatatatttcccagtttatagagtacatcgtcgtccctatagcttttgaaatacagctaggggtaaaacttcctgaggtgttctatattccatgagttcccaattttcgtgccatccatctaagtgagacgatatgatcccggtcgagtgacttttgatactatgaatggtccttcccatagaggtgacaacttatgtcgtcc

SEQ ID NO: 143447 - DNA, 358 bp, Zea Mays
ttcgaggggtactggtcggttcacttgtcgagatttttaattagggttctgggaaattatatccgtaagatgccccttggtgagggttgtgggatttccttgtcggattgtgccattgtgccctagcaattccggaattagggtttctggtggtggtccgtgtaatttgggcccataggatggtggttgaggtatttttcgttggtgtggaattggggtaaagggctttaaatggggatcgttgtcctgtttgtcattctaatttgactgcagtggatgattgctagttcctgtatggttgagcatagtatggcgcccttaaaatagggggaagctcatgctgttgcttgtttgtcat

SEQ ID NO: 143448 - DNA, 609 bp, Zea Mays
cgacgattctaagattgaggctgttctcggtatgttggctagagagtcatccgagtctgtgtgggttaacttggggtggtgttcccgagcactcgagtgcattgagaaaaagagttaacggtcccgaaggtgcccatcgcaagcgagcatgccaaatggactcttaggctgagtttgtcgaggtaaataataagaagaaaaggcttcgtcgctcgtcagacctagagccaatgactgcccctatcatgtcgagccttaacaacaacgtaatgaatgttgatctggaggatgttgtggtgggctgcagtggtgtgagggctagcaggtacgtggtggaagaaggggatgacgatgatgttgaagaaatgctcccctggtccggtaggaatggcaaagtaaagctatcggcgatacttcaagccttgcttccgctgggataatgaatatccgaggcctgactatgtccgccattgatagcgtgctggaaaaagctattcccgaggatcttttgcttgaacttccagagatcagagttgtcgacgtccgtgtagagtgcccagacgacgcaccttctgctggcttgctggctgggccagagataagcctgcc

SEQ ID NO: 143449 - DNA, 347 bp, Zea Mays
gttggtaacgtgagccatattgatgtatgcgacttttatgatgatatatatgttatgtgtgttgttgtgtacaaattggatgggaaattgagactaatagggttgctggtttgcagcagtataggataatccccataggcttgaccatagccgacgggtataagcaaaagttgggcgtcgccaaataactctcgtcggctcgatagttgctgacagagattaaagctagtaactgcccgacggggattaatgtttcccatgggccatgggcaagcccacgagcagtacaatccccggcgggaattaaacaattcctaattagaaattcccgtcggtcgagtaccgac

SEQ ID NO: 143450 - DNA, 479 bp, Zea Mays
cggagggagtactacaccgctcaagatgcgctcgggagtcgagactcgagaatgctcctttcgatcgccacccgcgccgcctcttcccagacgacacaactcactgactccatggtcaacgacagtgggtccctgcatgcagttggttgggtagcttgcgttgaaggtgatgactgatgaggcccacgtgcccacttttgcgagagggtacaatacaatcaataatgaaagggcactgttgttggacactcgtcctccctccctctctgccagaacatggggggcaatgaatcaactttaggatcactgagaaaatagggacgagctcgcatctcgcatgtaaccgttgttaaagttgtctcgggcttttattgagtggatttggatcatttgtggtttggatccgatttgatgtggcttcatttgttgatcatctgagcgtaagcatttgatgaggatcaggaggcctaggactctct

SEQ ID NO: 143451 - DNA, 593 bp, Zea Mays
gttagaggtggttgagattaaagtggcacctaagtctataaaggagctgttgtagtttgtattagggctcatcaaagaaaattttacctggccggtggagcttccttggtcatcctggtgcaccttgcgccagctgacagaatcagctccccctctggccgatccccatatccactgagatcccttccccagtcccaagccttgttgcaatcaccactgcgcagtcctaggtgcccacgacatatcaatttggtattagattcctccgacgcatcaaccaacatgtccagcattgatcacgatcctgcgaaggacctcctccgactcagccaagttggatcagatattggcgcagctctccaccatcaactcatgcctcgaactgcatggacagtggatcacgcttttagagaagcgcccaatcgaccagcagctaccggaatcttcagaaaaccggcccacgtaccgtagcgcctctcagggtcatgcatagcataggatctgctcctcgtgaccgcgtcgacaatggtggctatcgaagacccaatatctcctttccccactacgatggtgagtctgaccccctgccgtgg

SEQ ID NO: 143452 - DNA, 734 bp, Zea Mays
aaattattcttaacataaaaccactcctccatacaggccccgggccatctttttcggaaagttggaaccaggtaacttacattggggtggggcacaaagccataacaaccaaagttgttgtgatactgctccttgccagtagccttcgtctcatacaacagctcgtgcatgttgcaaaagcattttgcgcttggctccagcccctggcttctcacggcccagataaaacccccatcctaataatggcttcgggggtaatttgatgtaggaaaatttcgaaggtcttcagtacttcgaccaggaatctgcttagtgggaaacgaagccctgccttcataaaactcctgtaaataaccacctcatcctcttcgggagcaggtgcagcgctatctcctctagctctcacaattgaaatatctcggaaatatctccctttcatagcgtcaatttgacttcacttaatggatgattttccgaagatagtgtgacttggtcgccagggccaattttctgcatcttcgtcttcactttccatatcaaagctcccactgtcatcagaatctttagacaaatcagctagtatctcgtttgtaatcttttgtgtttgtttcttccatggcctcgtaaaatccagccagggcaagatcagcaaccttcttctcgtcagccatttggtgggaaattgaatgaaatgccgaagctcacaaaacaagtgaaatctgacagcaagaaaa

SEQ ID NO: 143453 - DNA, 441 bp, Zea Mays
caacaaagtctgacactgacacatgaaatgaaaccttgctcgtagggaaggaaccaaaagcactggaaaaaaaccattctgtgtccttgaaatttcagacatcaagctaggtcatctttcatgtttgattcctaactgcctcgggggtcacattttctgtagctataatagcttgctatcaaaactgcagtaggtaaatgataactgggttcagagcgcataaagttattttctaaatgaataaataaattcatgtcacctgtactgcctccatactaaacaatcgagctgtcgatgatcacactgaatatttagcgacagaatatatcccatgtaaagacatttacactttacattgttaagaacttgttctgctttgaaatgtcagactaacaaaaactgacaacctgcgcctacttttcttctaagctcatattcttg

SEQ ID NO: 143454 - DNA, 383 bp, Zea Mays
gttttactcaattagaagtttggttgatatggctaggaaatttgtttcggcttgggtaatgaagtggtgacgtgaccaagtagttccccccgttatgagtcgggtctagatgtgttatgccttcgccgtgatacccatcgcatatgctaatttgatgtatatgaaaaatgaaatagacacattatatgatttagtggtgctggtattgtgatctaagtatattatatatgtgtgataaatgttgggcttgaggattgtctttcgggcaaggaaggtgtaatagacttatatgtgtagaatgattaagctagtaatacaaaatgacatggataaaaattagtgagtctacttgttagtcctcatttgattattttaactctaac

SEQ ID NO: 143455 - DNA, 874 bp, Zea Mays
ctttaataatatgcatatcttggttagtaaataatcttactacatgctgctacaccttgatagtcctaacattctactttggacagattaatgagactctagatgggggatgtccatctctttgcaagtgtcatgcactaggaaacacagacaattcagaaaccagaattcataccatgcacggataaagataagcagaaaaaaattcagaaaccacaattcagaaacacaaaattcagaaacaaagacaattcaggaaccaaaattgtatgtgtaaaggtaagaattaacaatttcgcattgccagaattcaccatcaacaagaatgtaaatgagggacaaccaaataacataccatcacaattctaatcaagttataaacaactgacatggacaaaaacaaattaatgcgacaacactgcaatagctattatcctattacattcatgttttgtaactacaaactctcctcaaatcacaacatatgctaattcaaatttgatcagacacgcttaacttacagactaacacagtaacatgaaaatttaacagtacatgtaaatcgatggaaaattgtaaagtttcataccatgagcagctcagtcaaaggatgtagagaagccatcgctgcttccaaacgtggacgatgcaaatggatcttggacaaccccggaagggcctggcaacaaagggagcgatggtcctccaccttggtttcttggtcgcaaagcttctccaccatcgcaggtgatggatccgtcgccgaccatatgcctttggggaatccgacctccggtgcaaggcgacggcggaattgaagaaccagcacgtgcgatcggcatcttcccccgccttggccaccagcgcagaagcc

SEQ ID NO: 143456 - DNA, 821 bp, Zea Mays
gcaatctattaccaaaggtcttttgtccttttttttgtcctgctgtttattttggtcgtctctcggccaaatgcaatgtaatggcccaaggctgatgaactgccaaatccaaacctcatcattgcatgatctggcaccatccaccaccgtcgtctcatgtgccctgctgcaacgcgcgcgaccccattcattcaattcggaaggttcaggtccaggtccaggcagcaggcaccggcagccgagatggctggctctggctctgggcgtctggagcctgctcatccatgcatcgtgcctgttgcctcgccgccgccgtctccggtaaactagccggccgggtagtaagcgcgtgagagcacggcgtgcagagagacagacactgcttgccggccgtccggcacagtatctcctgtgcactcactgttccatgtaaaccagcacgcgcttgcaacagtgaacgcacgcatcatctccatccatgcatgagggatgaggcaatgagctgctgatgcaagcaagcaagggaatcggagcggggcgctgaaagagaaagaaaagccatgcagccgcgcgcgcactgcccgaggccggctgcttgcgaccacgcccgcgcctacctacctacctaccacctctagggtagggtagcctctgctgtgtcaagggcagcatacaactccaatcaactagtacctgttagagcagcgaagtttctaacgtagtagtgctgaatttgtagaaaccatcaaagaaactggcatgtttcaataaactaatctgagctcccgcgcaagggaatccttgttgttgcatcaattgcg

SEQ ID NO: 143457 - DNA, 461 bp, Zea Mays
gttccgccacaatatgattgttataagaaagaaaagttcaacctgatagttgtgtattggctgattcatgattttctagcttatggtatctattatggatggaattgtcatggaatttggacatgtccgttatgtgctaaatacaatgattatttatggcttacgtttggtgggaagatctcttactttgactgccatagatgttctttgcctaaggatcacccatttaggttctagagaaatgctttcagaaaagacacgattgtgatgaggggatcactcaagcgtcttagtggtccagagaatcttgcgagacttaatgatttggaactagtttgaaggtttcggaatcgagcataataggactcataaatgtggactgtgggaccttccttatgtgaaggattgattttgatgcacaacattgacgtcatgcacctagaacaaaatgttagtgaaag

SEQ ID NO: 143458 - DNA, 681 bp, Zea Mays
gttgtgtgtgtgatgtttgcttaacgtacacatggcatttagagatatgggttgggctacaaaagtattctcaccgtttgaaatatatgacactgcggacaatccaattaatagtttgttgaactaactggcttgccatcgccatacttttatatttaaaaaacggagggattgattaattggtttgtgatcaaaatgattttgtatcaaaatgaacttcatggaactagggaaggcggcgacaagagcggctaagaatgaagtacccaactctgtagaatgtcagataagacggactccttaccgaagatttgctcctgctccgccaatggttacatgttgccaaaaccatcgaagtctggtaagagtagcatgatttctattgcatagagcggccccgtttggacagcacattttagaggaaccatacagaaattggaccaattttgcgtaaaagcatagtaggaattaggaaactttccaaagcagaccccgcactatcccgtccccgtgcccggtgcccccctgttcccatccgctgcaacggcaagcacgcagattcgcagacacgatggatctcccgaccccgtctgtcgccgtccctgggatgctcagacctgttatcccggccgccggcaaggatgcgacgtgaagccactccagtcctctccctactcccgc

SEQ ID NO: 143459 - DNA, 1355 bp, Zea Mays
ggacttggtggtaagaggccttgaactgctgtagcgtctcccaggtagcatcagtcacctgtaatccgttgcagtgaactagaacatgccattcacctcttcggagttgagccttgagtaccttttctggggatggtagcagccgaccattttccatagctggtagggtaggagaggtagtacaggtggaggccccctgtatggtttgagaagaacaacatggaatacgtcatggatgcgagctccaggtggaagctccaaacgatatgcgacgttgcctcgttccgtgacatggaaagggccagcgtagcgtggacctaactttcctttgggtctgctgatcaaagactgcctggcgattgagcaagcggagccaaatccagtcatccacagagaattccagatcccggtgacgtccatcataaaaacgtcgagcgtgcttctgtgcttgaagtaatttatctctgacttcagcaagaaataagtcacactcttggagcatgtcatcaactgcctgtctggatgcggtgcctggctggtaaggaagcagggctggcggttctctgccatataccactctgaatggggtggtttgcaaggctgaatggtaagaggtgttgtaacagtattccgcccaaggtagcaactcaacccatgctcgagggcgatcccctgtaaggcatctgagatacatggcaatagttttattgaccactttggactgaccatctgtctctggatgaaaagctgtgctcattcaaagttttactccagatagtttgaacagatcacgccaaatattctctgtgaagaccgggtctcggtcactgactatggactttggaaatccatgtagtcggactacttcaaagaaagactgagccactgttgctgctgtataaggatgacttaaagcgatgaagtgcacatatttggaaaactgatcaacaattgtgagaataactgacttgccatgtactttagggagtccttcagttttgtccattgatatgtcagaccaaatctgagaaggcacctctagtggttgcaacaataggcacctctagtggttgcaacaatcctgcgggatgtaaggcttccattttgttctgttggcagattgaacaagagcgtacccaatcccctattgtgaatgatatagaaatctgcacgtaggcgttgcagtgtcttctggatcccggtatgccctgctgcgtgtgctgtgctgaggatggccggcaacagtgatgaagtggctggtacaaatactcggcggccatggagaatgagatcatccttcacctgccatggggcggtcagagtaccctctctgatctgattgcagaggcgctgaa

SEQ ID NO: 143460 - DNA, 512 bp, Zea Mays
gtggggagctgtgtcatggcaaagcgagttgcagaaatgtgtttcattgtccacgagagtgaagctaaattcattgcagcgatagaggcaaacaaagaactgaaaaggtttgttagtgaactttggtaacaggagctttcttgggtttgatcaagacaataataatgtgcgatcggctgctttcttggatgtcttcgggcagggagcttgtgataacgcccatacggtgttcgattgagatggaatttggtcagtgattaggggacttaaaaggttgcgtttgtagttgaggccaaagatttacgctggtcgctgcaacagctaaactgttcggcgtcaacgacaattagtagtagtattaaatttgggttgagtcgagaaggattctgtctcggtctcctttccatccgtgatctgttgctgatcgatcgagagaagaagcctcgcagtttttcgataggttgagttgacccagcatcgggtgatcgaactttgaccatcgaggcatcgac

SEQ ID NO: 143461 - DNA, 375 bp, Zea Mays
agatcaatctttacttcatctgtgaacacgttgctgtcagggacattcatgttcatcacgttgtaacaagctcgtagtttgctgacatctacactaaaggctttctctcatcgttattggagctttggtccaatatcaacatctttctgtcttttcttttcggtctaaatgtaatgggtctatagctaagctcagggcttccgataggcataggaagccctagccaggttagtggtcacgcgcgtggtcaggtcgggctagtgggacgcatgcatccacgcgattatggggcacatttatgcatgtgtaaatatgtgttatattttgcgtaaacagaatgtgtggtggggtcgagttgggatggacgaagctggg

SEQ ID NO: 143462 - DNA, 545 bp, Zea Mays
gaaatattgtaggtcattacaaaaaagtgaagaaatccttgattgagaaaattgatattttggataaaactagtgagacttctggcttatctgaggctgacaggtatttgaaattagatttggaatctaacctcaggaagattgttaatgaggaaaacattagccttagacaaaaagcgagagacaaattcttattagaaggtgatgagaattctaagtattttcatttactggctaaacacaaaaaaaggaaactgaaaattgtgtcgctttctcacggtgataatgtggctcatgatgatcttggcattaatcagttggcgacttctttttacaaggatctctttggtccttctcagggatcgaatatttctttggctaatttggacatgaaacagcttgaggagggtgatagagatcttcttaccagccctttttccttggaagagattaaagatgtggtgtttgctttgaaacacaatagtgctccgggccccgatggcttccctgctgaattttttcaggagttttgggatgttataaag

SEQ ID NO: 143463 - DNA, 417 bp, Zea Mays
atcagatatagaccatttctaaagacctaaaggaagctgtaagtgcatgctgcacatatgaagcagttaagggtaactttgtgacacaaattggcttcgaagttgataagctagttgaattgcttgatcagacttcactggaacgccacatggcattggaggatactcttacaacagatgattcaaatgatgatagcgaactattggagaaggtcttcttttggcaagatcgaatgcattgcttgctgatgcttcaccttccaaacagtttgtattactccctccaacattatgagctgattcttcttccctttgatcaaattcaatctcatcctgactatgcaaacccaggtggatatacaatgctcgttcacttataacatcttgtctaccttccttggtccacctatcttcagc

SEQ ID NO: 143464 - DNA, 376 bp, Zea Mays
ataaaactaacttgggattagaaaggagaatatttggagtacatttttactgccctgagaagagaaaggagacaagtttggagcctgttcctgggagatgactcagctgctggtctgctttgttgtcaacaactagagccctcattcttttaccccccgtgtccagcatgcaaaggcttacttcaacttgttcctgtgcttggggctggtgtgggttatggtgaaggtgtccacgtgcatatattcatgcactagctgggcctcaagtccacccctcctgtgaacatgtggaggccaatagagtttaccctttttacttcttgccaccaccctcaactcccataaagggctacttcagtctatgctccttgaccac

SEQ ID NO: 143465 - DNA, 392 bp, Zea Mays
ccgagggctcttgtgcaaaaacgacagggcgaaagggtatcgactaatccaagtcgtgagatcaaccagggacgactacgattagatctgatctcccgcgaagcggtatgcgatagcagccgtcagatccaaatgcaacgctcccgatttaataacctaagatcttatcctgtgcacacgatttagatcggacggttccgtgacgttgaaccgaaccggtatacgcggcctgatctaaaccgctcagggatcatccaatggcccgcgatcgtcttctccctctggacacggacgacggcagcgccgccctcaattcacggcgaacctcgccggtgaaatcccaatcaagtgctccagtgccctaaactccatcccgacaggtgctacgcgcg

SEQ ID NO: 143466 - DNA, 514 bp, Zea Mays
atcaaatgtaacagataaattgtatcgttacccatatgaaaaacatgaacatgtccaaatgcaacataggatattgagtaaactgaagatgaggtaacacatgtacacttcgaatcataaaaaaaacagacagatgcaaacttggcagttctacttatcagtaaaatatttgttggcaggtacatgggaatgaacctgccaagaacattttatacacatttcaagcttacgaaaataattgccacagaaatataaaggaaacatgtcagtgcagagacaaatggtagaggtaatgtccctagaggaagacaagtttaagtctgaaacattacatatcctggcacagtaaacaagtgatttagtattgtcggttatattggtggatactcatatagtgccaaagggtaacattgcacataaaaggcacaaaaacaatgtctcagttcaaatacatgaaggacagtcgaatcaacagcactggatggcatggaacataaggtatggtataccaggc

SEQ ID NO: 143467 - DNA, 378 bp, Zea Mays
aatgtttcaagataaaagacacatcagaataaaatgatgaactgtacgcgtgtgtaaccttcatccaacaaacgagtgaaacattggtgcaatacgaagaccatgcagatccatcattaagcaaggctcaagtcaatctcgctctggtcgttgcagccatgtgcatgcgatcgtacgtcgctgttggaacagtgctcttgtccgattcaatgcatgaaatgcattccgttctgttgcgataatctaataattattagattctttgccggcctgtacgtatacgtctcctccaggcttcagctcgagctcgaccctaaccctaaccctagctagctagctggcgctatatatatgcaccacggttgatgcagacattca

SEQ ID NO: 143468 - DNA, 381 bp, Zea Mays
caaaatagaggatgcacaccatatgaaggaggagcaccaaacacaagagaaaatggaggagaagcaccatatgcatatccatataagtacggaggaggatatgaataagtgaatgttggaggaagaggagtgtcatggtaggagcttcaatgtgaggaggagcatcattaatacaattatcattgcaatgagaagaacccatggaagatcagtacgaatacgaagggggaggatatgagcatggaaacagaggttgcagagtgatggaacgaggacagacaaaaatatcctctcgacgatgttgtatgaaagaaagacagaaaggccatagaaaatgactctcacactagtagaggtatcatgaagccgtggagattggtt

SEQ ID NO: 143469 - DNA, 348 bp, Zea Mays
ctcttcgcttggctcatcatccacaaccgagtttggacctctgataggcttgcagctcgtggatggccacatagtccctcttgtccgctatgcaagtggcacctcaagacagctcatcacattattgctggttgccgctactcgagaagaatttgggaggccctcgcatcttggctatccatcggcccttcttcgatcaagcagtggtggttcatggttggctcattcgttgtgccaaaaaaggggacgcgctccctgcttctgctggtggtctgacaaatttggctagaaaggaacgcccacactttccaaaggcgatagaggcgagtggcagatctctactagcag

SEQ ID NO: 143470 - DNA, 285 bp, Zea Mays
cacatcatcaacataagcttctacccgcttgccctagtgatcggctaagcatgtttgaatagctctctggtaagtcgctccagcattcttgaggccgaacgacatggaggtatagcagaaagctccaaacggggtaatgaatactgttttttcctcatcctcttttgccagactggtctgatggtatccagagtagcagtccagaaaggacaacatagaacatccggcggtcgaatctaccacctgatctattatagaaagtccaaagggatccttcggatagtg

SEQ ID NO: 143471 - DNA, 272 bp, Zea Mays
ctttctccttactggtaagattgctaaagagaacaggtttgggcgaagcctctttgagagattaagtggacttgatttcccaaagcacatgctaaatattcaatatagaatgcaccctttcatcagcaagtttccaaatcaaaaattttatgaaggaaaaattatagatggtctgaacgttaaggactataacaatatttatctcgatgtgcatatatatggtccttattcattcatccatgttgaagatggtttcgaagaaaacaataaac

SEQ ID NO: 143472 - DNA, 466 bp, Zea Mays
aaacagtcgaggtaccccttaaaactgaggcttctccccgagagtctcctgtctcgggcagagctccgcctcgcccgaggttgccaccactctgtccgtctcacctgagctgatcctcggcagataagacaaaagcgcccgaaaacaggaagggaacatgcacatttaatgcgcatacctaccccacgacgcggcatcataagcacagtggctgacaagacatcaatcacactcgggcgcgacaacatgattacgcctccgctacagcacgcacacgctgcctgccatccctccgatgggacacctaatacgacaggcaaagcaaaccggccctgggcgcaaatctccgtcttgcccgacgccgagtccggcccatgggcgcaatctccgcctcgcccgacgccaggtccgtcccttgggtgaattctccgcctcgcccgacgctaggtccgtccctcggatgaat

SEQ ID NO: 143473 - DNA, 359 bp, Zea Mays
tgcgcagtcaaaggactgctgtgctgcaactgctgctatcctgcagcagtcaaaaggttgctgctgttgctgtcctgcagcagtcaagactgcaactgctgctgaccacatgacttattctatcagttattagttgtcctgctaccttttacaaaacgtaggtcacttgtggatttgcaactctgatcatgtgtactacactaataaacaagtaccggccttaggagttagaaggcaataataacgagtcccctatgaagaatatattgcttctgtcatcattgttaatgtatgttttcatcagtgcatttttaaacagttcctttaagatgtgagcatgcctatatcttcatgcccct

SEQ ID NO: 143474 - DNA, 682 bp, Zea Mays
cgtggatgtattaattgtttgttaaaatactccgtcgtaaagcagtgtgttagatgtggtaaatttaataaagcgtaaagcatgcttggtggtttctgtagtcggctaatgagttagtctaagataattatattttatgtattaatcgttggtgtaggttagagtaggttaaaaatataaattatgtgacatgttattggtatttgaagacgagatgtgcaaaggatcagtttggtgtttcgcccgtctagtctataaacattgtcataaataattgtgctaaaattggtcatgagaatgcagtgggtacgtggtgtggttggatgtgacaagtagattggaagtgtggggtttgtcgaagcactgtgatgtcgaacatgtatatcgaagtgcattgtagtggtaattgtgttaagttaatctgtagtgtctcgagtggacgccacaatatggttgtatgcgagacggggttatgcgcatgatgggtttagttaatatccatcggtgtcactcgtgttaagttgaggtttattgtgcgtggaaagtaataatgtgtttaatacttaggactcttagtcgatagtagaaattgttttgacttatatagagaggtggtgacatgtcaaggtagtcatcacttcctctatatttataagttgagtcaatacaccttatgcgtgca

SEQ ID NO: 143475 - DNA, 367 bp, Zea Mays
gccgtatgggtgtgcttgaagtatggccgtatgctgtgttgtcctgggctcctggcgacatgtgctggacagctagagtgtataagtgtatttgctgttgtgctatgtataagtgtatttgctggtgtgctagatgtagctatatggttctatggataatcactgttggtctgtatttggtgccgtactgccatgtgatgtatttgatgttgtgctatttgctgcgggctcactgttggtctgtgtctgtgtttaattgtttattagtgcagtggactactgggcgtctgggctgccttaatccttatgcccttatgtatttgtgtgcacttgtattctcgtggggtgctttatatatttgtaattt

SEQ ID NO: 143476 - DNA, 604 bp, Zea Mays
cactggtggtcaatgtttggtcaattagggggaaagcctggctacccaaaaaaggtggcggtttaggtgtacatgacctcgagctccagtccagctgcagtgaaactgcttcatcgagctcacaacatgagtgactctgcttgggttgatgccgagtttggtggtctgttggatgctccatcctccaattccatcgacactcactaggtgttggggcaaaggcgcaacgcccctcgctcggtcgtctacacagcaaaaacaaaacatgttggaggaaaagcaaaatcaagcgaagactggaaaatgagagccccatgacgaagtgagcgcatagaacgggcgaaggcttaggcgctctccatctcagcaagggatggcaaagaccaccgcgactacgaaggctgagtgcatggaacgcgaagactatgtgtcattacccgctcgccattgtaatggggtgacgtgtgtaaccgacccgtgctgcagggtcccacttgtaagccactgtgtgggcagagttgatagtgtgtttgtccatgatggccttaatcacgttgtaatgacccgcaataacccatgagaggggaatattccagggataacg

SEQ ID NO: 143477 - DNA, 470 bp, Zea Mays
gatagatccgatgcgtcgggtcgatttgttccgttgcggcgttatggttgcggtattactgggtgcagcggtcattgtcgctaatgctaaccttagcccgtgatttatttctcctggtacttgtttcctcaccaataatcaatgcaaataaataaaagtaaaaaccgggcggtcaagtgatggttctgtctgtgcgacttactgcgggataaggcttgttggtccatgtagtgagttattagatgcccaatccttatggtaggagatcttctgtttctgccagtctcaaattcttgatgtacgacttttactctcattataatttataattttgtgtcatcttattctgcatgtttatgtttcatagtttgtgttgtgcagattggcatacaaagtaagccgcattttggcacttgattgctggctggctggttaagacttcttttggctaagtgctaggcgcattttct

SEQ ID NO: 143478 - DNA, 437 bp, Zea Mays
actctctccttccttctacttactccctcgtgttctgagatcccgtgccctgctccgattaggcggattccgggtctcatgattcgggggggcgcgggtgtcattttagcccagagatcagtcatcaggttttgctgcgacggcgtgtcctctctcctttaggatcagggtttcgacgagcggcgatatgtgattggtcggtctgccttgatttcggcctttggggtgcacctatttagatatttgtggagtttaatctgaaaaaaggttccagtgacacccgagtgccatatgcaccctccctcctatagctatagattcgtgctgtccagagggcaaaaggtctattcatgctgtttgctatgtgtgcatctgttggaaaccaatacctacttaagtgaaagtggcttgtaacttctaacagatttttcatgtct

SEQ ID NO: 143479 - DNA, 647 bp, Zea Mays
agaatttcaaaatgcattagatcaggtcctttatatctggtatataacagattcataactcactcaaataaattaaaatagattacatttaacgataacatagagtccaattcccatacatattaaattagtatacacattagattagttgcaacgcaccgcggaatttgctagtattaactgattaaccaaaacgtccgaggaagctgccatggtttattttcataatatcgagaacctaaatcagtcagaatcgggaatcaatagatcaaaaaccaaggatgtggacacgaagagaaaagttcaccttcctgttgcataaatcagctagcacggcaggcaccatcaacatggaagttggggatatgaatggatgatcaattgtggcgcctatggaggtacatgttttctatttccccagccacaaggagttaactaattaaaggcccaattgtctagtatcctaaagctgcgcatataccacatttttgccataccaaccctaaggctaaaaaattcttcaccagcactctgaatacccccaaagaccaatgtatcctaaactgagatttggcgtggtttgaagtaactcatctaatttgactaccttcaagcgtgccaacatgtgtccactaagcaagcattcc

SEQ ID NO: 143480 - DNA, 694 bp, Zea Mays
acgtactcactgacagatcttccaccttgagttagttaccgaaattcatcttccttgagctgaacaatcccttggggcacatgatgctctcggaaagcagtttcaaattctgcccaggtagcatctctgacgacagcgctgaaggtatcccaccatgatagggccatctcggaaagttgatgagcagccaattgaacacgctgattctcagggcatccgatggcttctaacttcctttttatcgtgtgcagccagtcatcggcatcgaggggattgctggatccagcgaatgcgggaggcttgagcctcagaaaatctcccatcttgtcttgtggtcttccaccattcgtgcgctgattctccagacttctagtgaggacttcaatgagtcgggtttggttggctagaacttgggctaaatctaatggcagctccagaggtgcggagaggtgggtctcactcccttctccaccggcttttccttcagctcctaggggaaaccctgctccaatcccggaggcggtaggcgtggttttatccgaagccatctgccagggggagagaattactactatgcatatgccaattttttttcaaccatgttattttattcatcacaccagttcattacaagcattcagttaccacaagtcgcactacacacagcgctttctaaggtacttccgaactccct

SEQ ID NO: 143481 - DNA, 449 bp, Zea Mays
taacacgctctgtccacggtgaccgtgcgatcaacggccaatccaacgcgttcccggcgatctaaggggtcctagcttaattggtgaggtcgaggagcatcaggggcacacaagaacactaaaacgagagaacagggagcatgaacagacctggaattcgctggccacagtgagagttctaccacggtggcggaaacagaattgggggaaaagaggaattggaaggctctggtggataatctgaggcaaggatcggtgcgttggatgcataattacctagcggagccgcgggtgcgcttaatttataggctccgggggcggcggtgcatgaatttggtttggcgcggtggcgttcggagatgaaaaggggtcactagcgcatgagcttagtggctttcaccgtggcggctctccggcgatcatcgggcatgcaagacgcgattcactgc

SEQ ID NO: 143482 - DNA, 529 bp, Zea Mays
ccatctcgacgtcgtccggaatccaggatcgggcttggggatagcgcgctatcttgaggagcgttccacggcgagaaatttggagtagaaagctatggttgggcagcaatttctcgccagacagggagtccgccgccgtgtatccgcctaatcccgtgggcggcagtgtccgcgctacagcacaggtaacaacctaagctactaagctcgcctcgtcctcctcgtcgcgtagcaccaatcaattttagagttggggtcgcttgggtgatgtatcgtgcgcgccggtgagcttctgccatggctctgggttctgtcgtccgctccgccgccgttgtccgtgaaggtgcatactagtggctgttgtctgttcatcgggtcgtggacggctaggattagagctaggtatcgattcagtcgaagcaatcggtgaccgttgatgcggtatccggtggtggagattcgatctagaattcattaaactgtgaccgttggatggagatcggacggtcctgaacccacgatacctctt

SEQ ID NO: 143483 - DNA, 870 bp, Zea Mays
gggaatttttgttgctgcttccgatcgttttttcgacatacaaagtctcccgtctacgccacacactatttctgctaacattgtctttagagcggatggcacttgttggacaatttcttcagtttatggcccacagacagagcaagacaaaataaacttcctcgctgagctctcctcgcttaaaactacagtaaaaccggcttggttgttacttggtgattttaatctaatttgctcggcgcaagacaaaaacaacaatagaattagcatgaacatgatccagcggttcaatagaactttagacgacctgcaagttatggagatcgctctcaacggcaaacgattcacttggagcaatgggcaagattcacctacgttgtccagaatagatcatttctttgctacaacagagtggcttgatctcttcccaaattcagaccgtcaagtgatagcgtccatgggctcagaccattctccattattcctacagggtaatgttaattataacttttataaaggttttcgctttgaagcattctgatctacccttcccggtttcttagagatggtgcaagcatcttggagccagtcagtagatacgagagacgcaatcctaaggctacatattaagatgcgacgtttggccacatcaataaaaatttggaaagcgcaacaagttggtaacattgagctacaattagccattgttcatgtcgtccttctctgcttagaaaaagcgcaggagcggagacagctctctgagattgaacttcacctgccccgctccttgaaggctaaatctttggggctagctgccatgcaaaaaccaagagcgaaacaacattcgagattgaaatggatcaaacaagg

SEQ ID NO: 143484 - DNA, 316 bp, Zea Mays
gtccgatcaaaacttacatgcaggtactttacagaggaacctactggtgtcgtttctgggcgcaacttcaaaggcatgaggaagacgccaatgttatcagggaggcctgcaggaagcttgagacgacagtgatgcagatcttcgcttttcatgggtggcagtttagtaataggatcgctctgtgagcgttgtttttactttttgctgtccacccaactgcgtttggggtttgtatcgccgcttgtggctctttgagttggatctgttggttttgtgttggcatgacaggccgtcatcttcgtgatgtaggctggga

SEQ ID NO: 143485 - DNA, 453 bp, Zea Mays
aaagcccctagaaaatatcaaggtagtgtgtgaatacccagacgtatttctggaggaattaccaggtatgccacctgaccgtgatatagagttttctattgaattattacccgaaactgcacctatctcataaagatcttatagaatggatgtcaaagatttagtcgaactgaagaaacaaatagaagaattactagaaaaaggtttcattcgcccaagttcatccccttggggagccccagttctatttgtgagcaagaaagatggttcgagaagaatgtgtgttgattatagaagcttgaatgaagtaacaattaagaataagtacccattacctcagaatgaatatttagttgatcagatgaaaggagctaagatattctcgaagatagatctaaggtcgggatatcatcagttaaagattcgagcagaagatgtacccaagacagcctt

SEQ ID NO: 143486 - DNA, 447 bp, Zea Mays
ggatgccttcgacttgacgatgaatggaccctcccattttggctccagcttgccccgtgattctgtccgggtggtccggatgagtacgatgtctcctttgttgaactctcttgggacaaccgcgttgtcgcgccaagccttggtttgagcctgatatttgttgagggcctgtagggcgaggacacggtctccatcgatgagatctttggacgttggtttgtcgacatcgggaactgctaatgtgcttgtccggggcgacccatgctttatctcttgcggcgtcatggcctcggatccatacaatagatgaaatggtgtgaatccggttgcccgacattctatcgtgtttagggcccagaccacttcaggtacttggtcggcccatttgccctttttgtcatcgagaagtcttttcttgatggcagtgaaaatcttgtcgttggcacg

SEQ ID NO: 143487 - DNA, 451 bp, Zea Mays
agtatgaaattggagcttgctggtgatcggctgggagcaatactagacgtgggggtgcgcaacgatattgcgaagctagtcacgggctcaatttataggcagcttcgtcggtggtactcaatttgaacgaataatgcggcggccggaggtgaggacgaacgcgggtgcggtgaatacgtgtgcaatgtcgtggcagtaattccgatagtcgacaggaagatagagggagtcacggcgatgcgatggcaaggttgggacacgcggtggccaacggcaagggcacggcggcggtgagcactttacccgcgggcggtgagccaggagagatgaactacgactagccggagtggcttccaggtcacgggcggtgacgatcttttaaccttgcgacgttattcacttacccgagcgtgaatcatgacaccggcgacgtgaatcacggcggaaagcc

SEQ ID NO: 143488 - DNA, 853 bp, Zea Mays
ggaagttctgccagtttcttgggcagtcatcttatgggagtcatgccgggggtacagttactggccaagccagtgagggtcaaggtggctgatggaagaacttttgtgagcaaatattgggttcccaattgcaagtggctttgtggtgggttgacattttctactgatttcaagattttgcctctgggtggttacgacataattttgggtatggactggttggagtgtcacaatccaatggaagttcactgggcagaaaaacggttggagtttgactataaccacagaagggtgcagttacaaggagttcaacccaaaattcagacctgctacagtctaacttgttttcaactggggtcattgatcagacaggaggctgttgagcaacttttggagttacatggagtggaaagtggggatacagctgtgacactggttcctgagtcgatcaagcgagtggtggaccaatatcaacatcttttcttgaaacctactggtcttcctcccaagagagcagttgatcatgccattgagctcttgcctggtgctccaccttttaggcttcgaccttatcggtatactccacaacagaaaaatgagatagagaagcaagtcaaggaaatgttggatagtggtgtgatacagcagagtttcagcccttttgcatcacctattttattagtaaagaaaaaagatggtgaatggcgtttgtgtgtggattatagaaaactaaatgcttatacagtcaagaataggtatcccatgcctatttttgaggaaatagtggatgagctgcaaggagcatctatattttctaaattggatcatcggtcaggctaccatcagatacgca

SEQ ID NO: 143489 - DNA, 429 bp, Zea Mays
tgggggagaagttgcagatctacaaaatcagtcttacatggccgattctaaagatctcaatggtgcttcttcaaacagcaacacaaggctgactaatttatcggccgctgagcataaaagattagaagatgacatggagaaaatagacgaggaggcccatcgacaaaaggatcaggtgctcaaggtggcggataagtggtacctctcgcacttcagggtagactgccaccagaagaccgtccaagagagggagataaacgccgagtatatgttagccgtgctgcaacagctccccacaataggtgatgccaggtcagtcgatgatattccatctattaaaatttcttttgataatcggattaaaagtatcacagaggatatagaaaggatggcgcatgcattaggaaaaactcacatgcctagtttttt

SEQ ID NO: 143490 - DNA, 431 bp, Zea Mays
gccaggacgcagggactgggtggcggtgaagttggcgccacggtgttgttctaccatcgagagtagacctggccaaggaagtgaccagggaagggtaaggaggcccagcgagcgtggcagggctagttgaagaagtaccaccggtcgttgctaggtcgacaggagtgcacatcccagcggcgagcgttgatgtagagccgatgggagagaagcctggtggagcgccggtggtgctagacgtcgaagaacgccaggaaggtccagcaggagggccggctgaagtggcaggcccaatgagcgggactaccggtgttcgggggttgccggtgtgcccagtcgagtccgacgtagaggcaaccggtcgaagaccagagttgttggtggtacctgcagtgaagaaaggtgacagctcgaatggaactggaaccgtg

SEQ ID NO: 143491 - DNA, 567 bp, Zea Mays
ggcgcaggcaggttgctcaccttgagtgtgaactccggagcgcgtggacgacgatgaaggtgcggtggaacctcgggtcgatggcggcggggctccggctgcgtaagaactgctccggtgagcgcggagcgggcaaaccagagagggggagggcacatcgaagggtgtcccgagcagctaacgatgaggcagatctcacctaggcaacagacggggcgcgggcgcgacggtgatcgcagaacgtacaacggtcgacggtgagcggtggcagagttctctggtcgcgcgcgtagagcgagagagagagagagcgagggggctcggctgagagcgcaaatgagcgaggggaggtgggcgagcagggcgcggggctcaaaaggggcgcatgcgcaaggacgtggccggagaacacgcggacgtgggcgcgtccacgacgggggatcgtgggtgggaggttggggatgactgacaggtgggctcggcgggacagagagagagagcgaccgcagggaaaaggaacgacgcgacagatcggccccatagagcagcgcgatagagagagagtga

SEQ ID NO: 143492 - DNA, 568 bp, Zea Mays
gttgcgttgctatatcaactccgatccaaattttgacgtgccggaatcagagaaagacgacatattgatcctcgagaaatttgttattttgccacttttatctttggttctctgttattatgtcattgcgtgtgtatggctggtgaaccacctatgtctataatttgtgagcccgccgaaacccacaaatatgataatgacaaaattaccaatggcttgtcgatccttaaggtgctaccaatcacaaatggtgcccccaaaactctctcatacatgtctctcttctttaatctccatgctatgccatcatatttgtttagatggcatgtcatttaataagaataaaacttccataaagctctcaccggggaacggctttttaatgcagtgatacggacgctaaaaaaacttagcatagatagatgttgaataattgttttttttcccggatccttaagaaaaaaatatatatccagaaaagtctaaataacataaaatttagaacaaaataagccttgttccaacgatgggtggtcgcttgtacctagctagctcatatctacacggg

SEQ ID NO: 143493 - DNA, 493 bp, Zea Mays
ttcagttggtgctgcatccgaagaaaccagcctctctgtcgaagatatacccggggcactcaaatgtattgaaaaggaggttgatgtccttgacgaagtcataaccggccatggagacttctgtgcgctggtagcttctcgtggtacagttgtcgccttcataaaagccggatgtaatcatgcgagagctgtcaataagccgaatttcaatctttcatcatcggatctagttgacattccaactaaagcctgaagcataggaaatagatttattactcaaatttgggataagggcgggcgtgaattagctggagacgaagcccaaaagctgcttaacatagtatggaattttacctttgtttcttaccgtgatcttcccttgtcaaatttctgattaccttgtactttgctactctgtagaatgatggcaccgaaggtcgataagccgaagctaattctaaaatgctgaagaagaccttaagatctgcttttg

SEQ ID NO: 143494 - DNA, 287 bp, Zea Mays
aatggtgaagctgggctactttagtgaggcaaaaaaggagctggttcgtttcggcggggaggaaactattccgaagccagaaaagaatgaggttgtggtgttcaaaagcttctttaaagctggcctaagattccccctgaatgggatgattgctattgtgttgaagaagtttggggtttaccttcatcagctgacccctaacgctattgttagattaagtgtttatatttgggccctttgtagccagggagtagaaccgtttggtgaaggtttctgccgagtccatg

SEQ ID NO: 143495 - DNA, 728 bp, Zea Mays
caaataggagacttgctgttgtgcaaaagaacatttggagagcttaactttccattgatcctgggctaacaactcgaagaccagctgtaagtgatgaacatgctcttccaaggaggcactgtaaaccagaatgtcatcaaaaaacacaagagcacatttccgaagcaggggagctagggtgtggttcatagccttctggaatgtaccaggagctccagtgagaccaaaagccataactcgaaacacatagtggcctgtgtgtgtctggaaggcaatcttttgtgactcttctgctttgagtaagatctggtggaagcccgctcttagatctaatatggagaaccaggaggcaccaaacagctcatcaagtaactcatcgatgatgggaacatggcacttggatttaactgtaagggtgtttaaatgtctgtaatccacgcagaaacgccatgaattatccttctttttgaccagcaacactggggatgagaatgcactgtcactgtgttgaatcaaaccactctgcaacatttcggccacctaagactccatctcatctttcattgctggtgaaaatcgatatggtcggatgttgactggtcgcgctccttcaatcaaagggatagcatgatcacacgattgagtcgggggcagggcagacggtggctggaacacatcctgaaagctgcgaagcagtcgcatcactgcctctggtaactgcaagtctt

SEQ ID NO: 143496 - DNA, 346 bp, Zea Mays
catgacacaaggttctccttcgacgtcaagaccacctttgacgtgcatgacacaaggttctccttcgacgtcaagacgttcgttcccctaggatcgtgtatatcgatcttttcctccgcacccgatgtcctctgtcctcgaccctgtcgccagacaggtccaacgaaccaggcctactccacccatgacccctccacaaaggcagctctgatgcgccagatgaccaagccttctcctttgcagttgaagtcctcgacacttgaccccgtcgccaagcgtcggatggagctgtgattacttccaacttgttacgttcgatgaagctattgtcaattgccaacgttca

SEQ ID NO: 143497 - DNA, 618 bp, Zea Mays
ctgcgagtggagaccggaagctgatgttcggtgggtgggcggtggaggctagagctttgttggacttaggtctgcgtgatgcggtcgaggctgattggcggaagagggcggggatcgagaggacaacaggatgtggctgggattatcgaactggccagccatgggcgaatggcgaagctgaactgctgaaggtttattgtcacaacgacgggtgacgccatggcgacgtgtgagagactggctactgagggatgtcggctgcttggggtggactggtggagacgtggagttgtggtcttgtgagaattgggctacgtattgattaattttgttttcaaagagggtatggctcaggctataataagccataataggccattcgcctctgctatgaattcctttatctccctccatacgtaattttcacgatactcagattctcctcacagccagattgccacatcctcagaaaagcttcttagaaaaaagccgaaacaaacagacccattatagctagcaagctatttggcatccattctttgttgtgtattactttagggatggcaatggatatctaatacctggtacccgataggtaaaaatcctgttaggacacag

SEQ ID NO: 143498 - DNA, 821 bp, Zea Mays
gttaggctgaaatacaccttcagatatgaaggtaagtttgttgagccagatgatgattggctgaagtgtatcaaagttacaagcgatgaactgcttgggccatattcaaaggcagaagataacacattatctgcggccttcggaagccggaagaagaaaaggctaaatatagtttttgatgctattgggttcatgcaccctgattaccactacccgccacgggggcagaagagaaggggtaccacatccgggaaggatgctgcttcagctgctccaagcgagcccgcgccgaagaggaaaagggtgaaggttcttactcaccgaccgtgcttcattgaaccggccataatgcccgaatttggcggtgaaacctcttcggctactgaagccaaagaacctgcggttacgcagaagactgaagagccggttgtaagaccgaaggcatccttggtcaaattagctgagccgaaagccgataaaattgaagagatagtggccgaaggaacaaagatattagaggttacaagcccttcggcagaagtgacagtgccaaaggcacaaaaaggtcttaccgcaacccctaagagaaaaaggatgatcaatgtgctagatgtgctggagacaataaagacaagctctactccaaagaaaactaccgaagctccaaaggcgcagtctgagacaagactgaccgaagccgcagctgcaaagagcaaggtcgagaccgaagctgggccttcagagcccgccaaggagaaatccttggaaaccgaagagaaaacggaaaacgaagctgcagaacaaattctgtctggaaaaac

SEQ ID NO: 143499 - DNA, 483 bp, Zea Mays
cctcaatgaaacgccgatagtaaccggccattccaatgaaactcttgattccttggacatcttttggtgctttccagtctagaatcgttgctaccttctttggatccacagctagtccatctcgatttataatatgacccaagaatagaacttcgctgatctagaactcgcacttgctaagtttggcttacaactggcaatctcgtagcctctgaagtactttcctcaaatgttcctcatgttcttgctcattctgggaatatataagaatgtcatcaatgaacaccactacgaacttgttgaggtagtccatgaacacactgttcatcagatacatgaagtaggctggtgcattcgtcaaactgaatgacataaccatgaactcatatagcccatacttagtgatgaatgatgtcttcggtatatctgaaggtcgaattctaagctgatggtaacctgacctcagatctatctttgagaaca

SEQ ID NO: 143500 - DNA, 808 bp, Zea Mays
gtggcagcttgttcgaggccgtcacaaaacagagaaatctgagcggcacggagaactgcagtttcgttgtggccaaccttcaatgcaaagattgccacttatctggcccctttgctctgcaaattggcttcatcacctgtttctttgagctttctaaccaacaaaccaattgaaagcaagagatcaaaaacaaagccgcactaattttcgctccatgacccattcgagggaagaaagaaatatgccaatgtcagaagggagataaactcgagaaccatcagaatccattacatttgacctcaaataaaattcagtccgcatcatggttggatcggcagacccacatcatctagttctccgagatcactccacagctccattaatcaaacgcaataagatcagtgtcacagtaagcagcaagaaaaaagaaaagccagggagacaataaagaaatcggatgtaatcacaaggctcagacgaaaaatgggtagaagtccgtttgtcagcccaaagagaggataatcccctcattcagagtggtgcatgactttgcatcatcatttgcccttacagaggaagaaagcgggataacagaggaaatcaagcgataaacacaggacgacggcaaaaggagagattgaaggcacgagacgagacgtcgtttcctagcggcggcggcggcggcggcggacagaagagatggtggaagtagaaacgttcaggagggccgtatttatagcttgcccgcggcggcggcggcttctgcttgctagggttcctttctccggtttgattcttggcccagcaa

SEQ ID NO: 143501 - DNA, 367 bp, Zea Mays
ctgtcgccttcactgtcgctacacttgccatcgccaccgctgccgcccttgccatcgtcaccactatcgccatcgccgaccttgctgctgccaaaccttgccaccattgttgaccttgtcgtccttgttgccctcgttgtttccctcgtacctgtcctcctcctcctcagagtcatccgagccatcaagcactactcgctcgatgacctgaatgtaggctctctccaccccatgaagtcatctgtgcagacagatgatggcgagcgaggagtcagtggcagggtcctctcatcctcggaagagatttttttcctccgagtactcagagtcgtcgaagtcctccgacggcgcgatcggaggttgcttc

SEQ ID NO: 143502 - DNA, 510 bp, Zea Mays
gatgactcacttgagctgcttttccgatgagggcgaggaagacaggagacgagagatggatgagggcgacgatcttcggtggagacaggaaaccctagttgcctttctagccttttccgatggtggagggtctgaattgagaggaggccacatttgcagggattgaaattagattgaaatggtcaattcaattccacagacagccaaacagaccaattcttggaaaatgattcaattcaggccaattcttgggagccaaacaacccattgaaatttggctaggtaccactaaaagatcacattttgggaatatacaattaaaagatccaatttttacagtgtacatgaaaaggttgaatttctttgacggctagcattttttacgaagactgcaataacatagacaaatatatacccataacttttgtaacatagtagcatgaattctaaaaaaacaacttagagcttgttcggtttgatgctaatccatatgtatttagtgagattgag

SEQ ID NO: 143503 - DNA, 311 bp, Zea Mays
gccagctctaagcaaaacaaggcacgtggccgcaatgcaacggcgcatggataactgaatttcagcaaagcggcaaattttggataaccatcgcattcaccaatcaggactggaagcactgaactcactcggccttacgtaccatccattcaaacctcaacttgcctaatgcacgtggggcacagcaggcgtggaaatccttctgctcccaaggactaacccaagcttcggtcaccagaaactgagctcaattttcagccatcgatgccacgtccacctctgcgtgtccctccaaccttatggccatgcac

SEQ ID NO: 143504 - DNA, 571 bp, Zea Mays
ctgagatggatcctccgcagcctccaccagccgaagctgatcccgcagttactgcccaaatgcggataatgcagcatatggcatataccatggtggacatgcatgcacagatgcggcaggaacgccaagagatgcgctaggagagagaggatatacgccaggagatgcgccatgagcgagaggagatacgcaaggagaggagggtgcaacagcagcaagcaccactgccaccaccaccacctccatttccacctcggggcaagcaccgagaatttatgagccacaagccgcctaccttcgccagttcgctagatccagtccatgctgatgattggttgaagtcaattgagaagatgctcaacatcgcccaatgctctgaccgggagaaggttctatatgcttctggtcgtctgactggtcctgctgctgactggtgggattcttatgttgctgcccataatgctgctgacactattacttgggcggaattcacaactcagttcagaaactaccacattcctgttggattaatgaagatcaagaaggagtttctgtcattgaagcaaggcaa

SEQ ID NO: 143505 - DNA, 289 bp, Zea Mays
aatttgacaaaactggcacgacgtaagctgtttctgaggctaaaccctcagtttttgccgaagcaagaccttcggagactgcaccactaatcttagaaaaagaaggcgcccttgagaagtccaagtctcctgttcccgaagctcctgccgaagagctggagtttattgtgcgacatgcttcggggaaacaattattggaggagcagattgccgaaacaaggcaatacgccaaggatttgaagtattcgcaaggatccttggtgtacaacggcattgatgaggatgattt

SEQ ID NO: 143506 - DNA, 422 bp, Zea Mays
ccggggcaaaagggtatcgtgggatgtcggtcgttggattagatacaggcggtacgtattagatccagaacgcgacgatcggttgatccatgtgggccacagattccgtgatgaacgatcctgatttaaaacgacctaatctattcttccgaaccagatcggaatcggacggctctcggtgtttccaactgagacaagccaaccgccaccgattttggcagtcaacccgatccaacggccagatctcttccccccttaccctctcaccacgccagccagcagccggagccgtcaccagccatggcggcgccaccgttgacatcgcctgactctgaagatcggtgcccaagtgcgaccctaacatggtgtacaggccactacgaatctatttgtaggctcaatttcacctttggaaccccatg

SEQ ID NO: 143507 - DNA, 519 bp, Zea Mays
aggagtgtgccatcccggcctccctaagagacctcgaccatgactcagacaagtctttctcctcctcgagcgataaggagctcgagaggcatattaaggacaagctcaatggactatgtttcctcaccgacaccgttggaggatttttcaccatggccgttggtgaggatgcagtgggcagtgacaggaaggatcttggcaacgactccacctatgagttatttcgttccgctgatgatctcgccactaaggtagaggagctaacgactgctttggctagtcaggacaagttgctcagacttgctgcatgtgagaggaaatattacaagagcaagtattagggatcttgagtctgctagagcttctgtcgtggtgtcccaccaaacagaacatgacgagtgcgctcttcacatgttgaacatcatcacattgcagaccaagtaagccactatgaatcatctaggcccctaagcgatgttatggtaattaatgataaccatatgtggactaatgaaattt

SEQ ID NO: 143508 - DNA, 420 bp, Zea Mays
agttgttatgatattgttcttttctggtcgcctttgtctggtaagatagctcatgaatgttgcagaagcatctggcatccggctgcagtccctgactcctcatggcccataagaaaacccccactttgataagagctaccagggtaagttgatgaaggtatatctcgaatgccttcaaaacctcgaccaacattttgtggagcagaaagcgaagcccaactttcatgaagctcgtgaagaccaccacttcatcaccttcaggaaggggaatggtgctttctcccccagtcgtcactatggaaacatcatgaaaatatttgcctttcatcgcttcaatttgcccttgtctgatagttgacttcccaaaaacaacatggcttggcctccacggtcgatcttcgacgtcttcgttcccgctct

SEQ ID NO: 143509 - DNA, 694 bp, Zea Mays
tgatgcatgtaaaacaacatgcaagtcagtacgagaaggttataccataagatatgatgtggcctaaattgataaaagcaaatacagactaaattggcaagaacctagatgctaagtggcagagacatggagacatggatctaaaacaatttgttgattttgtaagtacgaaactgtcaggaactcagtctgtgatatacatccaaagctctactgaatctgagtttctgtgaggaatcggcaatgttgtgcattgacccaaggttactgagcgatgataaaaaatagctataaggattaaatgagggttagcgatgcccaaaatcagggtagcattcccaaaggtttggcagagagtctaaattttgtggaattgccaaaaaaatgtaccgactagaggaccactccactccagattgtacaaatcaaggaggacttaccggacctaacagcaggtcgtggagcctcgtgcgccttgctccgcggcacgtcctggcgacaaggcgtcttctgactctggtgtccacgcacactcctctctcttgtggttaggcaacgggaactcttctgactccgcgtccgcgcccgctcgagcacagaggcagggagtgaactaatctgatttgacaagaacaaaagagatactatgtttggaaagaaaatgttacctgtgcaatgctatacaatcttatta

SEQ ID NO: 143510 - DNA, 519 bp, Zea Mays
cagtgctgttcgcagcaaagtttagttgagtttgcatacctgcaccaaaagtttgccctgccttttttaaacaagctttgaagtgtcaattcaaatgcccagtgccaccagcagaatctacactcaactcagttttacaatagtgacatatagcaatataactttttataccatcctcgataatctcccgcttatccatatgcttccagcattctgccctacaaacagatggattagcaccctttactggcacatcaacaccaatatcccccatctgctggtaaggaactagaaccagactcagcccctctactaccatctactggtactggtaaggaaaaggaactagaaccagatacaggctcagtgccaccaccatctgctggtactcgtaaggagggactacaaacaggtcgagacccagggacttcaatggtaggggagaattcgctagaaataggattgctggaatcatctttcctactactacaaaaagcttttctacctgctaccctcttc

SEQ ID NO: 143511 - DNA, 1206 bp, Zea Mays
gctttctcttccttttatacaagatatgcaaagagtgtatataagaggaagatttaggtacatatgtaaatgataggaattagttataccctttttgtacctttacttgtatacgctctctccattgtgcttatgtccttggtcttgtttgcttaagacctatgcttaatgacagtgtgtgaaaatattttgcacaagagagagttcttacaactagtgatcctttttctaagacatggttaacatatatcaagtggatcacaaattgcataaatgaatcatgagttctccttttaacttagtgcatatcaagagagatatcgatttgaaagagtatgaggcactaagtgtcatttgatgttattctatgatcaaacaaacaatggatgtgatcaagagagtaacatattggaatatgaattaagcttaaaatgggagaatccaataagcatgctactttagcaatgaaagcaacaatccttgataaaagcgacattattttaacaagttggattgatgtggagtagcatagtatatgagaaacattattcttattcaagagactatatggaattactaagataaagcaatagtctcaacataatcaagatataagaatagactccccctaaaggtatgcaccaagtatttgaaagaattgatttagtgcacttacttttaaagacataaaaggagacccattatacatcttgttcaaggctcataaaatttgcaataaataacttgcgccttgcattctcaaaatgaaagggataagaatgcttacaaccacaccattgattatttttaagacctcatcctccaagttggtgttgttgtccttgatgttcttcctttttcatttgagtgtcctccctttgtagttatctctttttccttccaaactcattgaaaatactcaagagagatgttaatggcgcaagggagtatatggcgaaggatgatttctttagataataaatatgaacaattcatcatccataagtcaaatagacatgaagtaaaatccttaacattagtgcactttacttggaaagaggaatatgcacccttttgatattggatcaatcatgggaattttactttttcatattgaactcattatcataactttaaaagcatatcaatatgagaacagatatagcaaaggcatgaattagattctaatggacaagcgcatttatg

SEQ ID NO: 143512 - DNA, 346 bp, Zea Mays
atcatctgattcctctgtgggggacatgatagaggaattcagagatctcgataaactaggacaggggtttacatcggctgatcctttggaggagatcgacataggaaatggtaaaactccaaggtcgacttttgtaaacaagaccctagagaccgatcctagaaatgaaatgatcggtctattgaaggaatattcggattgctttgcttggaattacactgagatgccgggattaagccgagagatcgtagagcatcgactgcccattaagtccggtttcagacctttcaagcaaagagctagaacatttcgtccagatcttctcccacggatcaaggacgaaatc

SEQ ID NO: 143513 - DNA, 723 bp, Zea Mays
actctcatattttttatgcctacctttatatcctaaggtatgtttaagatatttcattttacatgcgcttgaccacccttgtttcttgatgatccatgagcgatcattttatctcgcacattattggtgatctcgttgcttccttaacttcgctcggtaaggaatctttacatcaacccttctgttggaaccttacctatcttacccttgattgtttcctccacttcgtcgcttcacaagtcttgccttaactatatcctaggttatgcttttaattattatcatatgtacccttgacacctgtatatcctacgttgatgtttgtccatacctgccctttaaaattgcccctcttccgtctaataccttctttctcttggttgtatcctcttctttggctcgagggtttgtaaccccatcctttgttgtgcttttgtttcttattgcctttacccttctcatctctcgatcttaccttggtgattacgctatgtccgttatctaaaatctccaatctcctatcccaatttgagagcggtgttttacttatcctacccttggcaacatcctcttctttaccgcgtgtaagcttgggcgcaactccattctttgttgtactcataccactggctctttaatgccttcatcttttctctcatacccttgtctgttatcgcctttgacccttgcgatattgacgtcttccacctaaatgctcacctt

SEQ ID NO: 143514 - DNA, 322 bp, Zea Mays
ggtacgctcgacagctagagttactcgtgacggagacgaagccgaagctgctgaaactgctccgatctccgaagttatgaggcggtcgggattgattgtgactgaaggcgctgctgacgaagaatcacccgctactgaaaccgggcaagcagatattgaagagggtgatgctaatgaaggagagattgattatgatgttattatgccatcgaagcccagccatctggattttgggaaatcaactgtgtctgaagctgatatgactatgatgacgaagctaggctacttcaaggaagccgataaggggttggtttgcattggc

SEQ ID NO: 143515 - DNA, 490 bp, Zea Mays
acggcgcgaggctgcgagggtgggcggagcaccgagggcgtgctctagcgtcgacagggcgtgtcgaacacgtggccgtgttcatctgcccgagttcttgcgcctgcaaagctccaaaatgtgtgaatctcgccaattatcttgtgcaagatctcttcctggcacctagtgctagctagtttgtgtaagttccaatggaagatctgccctagcttgtgagatatgtgggcgccaagtcttgtttgtctgcactgttcaccagcgacaaaactgatgccaaaccatgtcaaacgaccatggtttgatttcaaattttgcaggtgggtgccttgggtaatttggccactttttgttatttggtccaagtggttttggcgccagcacaagggtgaacacatctgatctttaggctaggatgagttttgggacttagagaattttgaatggccctagtgtgctccccacttggtgaattgtcttggggtttttg

SEQ ID NO: 143516 - DNA, 454 bp, Zea Mays
gtctatcaccatactccttcaggttgataggatagtttattgaaataagctagatgcgatagacgataaaacagtgtcatactataataataacaacaatgtgatggtgatgtttgatatgtttgagttggatttttgtttgagtgcaatggtctgatggccataagagcattaaaaaacataaacttcagaaattcccctctagaatcttttctactcctcacttttctaaggacttcacctcctaaccaatcagatggtgaacgctcgtcaaggacccaacaacaaccggaaccagcgcggtcaacaagtactaccaccaccacctaatcccaacatggagcagttcattgccgcccaaatgcagattctgcaaggactcactgctgcggttcagcaatacaacagaaccaacagaatcagcaaccccagcagcagcaatatgcacccccgg

SEQ ID NO: 143517 - DNA, 568 bp, Zea Mays
tttggacgcgacgatctcgcaacaagctccgctcggccgtagttctcgggtagttgtaaccatgttgccagttgttgatccctatccccgagtataaagctaggctcgcccctcggccaactccatcaagcttcgggttggaagaacgtcgtctctcgcgaggataccgaagactggggtaatggaaaatcgtcgtcaaggttcgaactcgcgaagtgccatcgcctggggctcgaggagttgtgcagtcgcgtcgcgggggcgtgttcaagctgatggggggaattggaaggcagtactaaacctctagatgaccttaatttctcgacggtgtgcgcagatcacggagaacccgcctcgcctcgcaaaccagccacaccaccatctccaaccaccggtaagtcgcttggaacttgctctattggacctccgcctcacatatccgtagtttcagacgccggcgttccgggatggccatcaccggtgtgggcaccaccgtgggcgtgtgcgcgccgccgtgaggttggggtctgaggttggggatggtgtcataaccgttggatcgatc

SEQ ID NO: 143518 - DNA, 594 bp, Zea Mays
gcaaataatagacactagctaggagagtttagttgcattgtcagcataataatgggacatggttgggcttatatgatatttatgcacttattgatgcaaattaatggtcggtttttaaaggatggttgagaaggttaagggtttttaaaggatggttgagaaggttaaggattagttacttctaagtgtcaatagagttattgctatttggacatttagattagtgatagaccttattttccttttaagtcatacatgtctagctaggtcgttgtcgctacctcaccggccctaagttgagatttcatcgccctaatgacatattcagcaaaccccaaaggtagaatcctttgtgttctatgcatctagtagctaggaaactgaaggattaaataggcaaccagaggaggataaattgagggccaataaaatttgttcacacttaagcaatctcggcttagttgacaaaatctcaatccaaacctctaaaacaccaaggctctgcaaaaggcacaaatcaggaacacctcaaccaatttacggttagatgccttgaacaagtttttgaaatgaatatctaattagcaaaacaat

SEQ ID NO: 143519 - DNA, 423 bp, Zea Mays
ggggaacctatgtggacattggtcatggtagatggggatgaggaaggatctttggccacacctacacttgactaggtgatggggcagatgtctctggagggcttacatgtgaggtagtgtgtggggagatattgtgggagattcctccaaatattctaccatgaaactaatacatataggggatcgtttgtaaatgtctcatagtgaaccctgactcacatccttggaaggggtgtatggatcttgcaaaccctggcagtcaggtaatacaacttataggtaaagttgtacaacctctacagagtgtaaaattgattaatcagtcatgctcactgttaagagcgaccttgggatcctcatagatttttgtttacaaacgcaaaacatcgaggagctgatgcacgtgatggtttcaaaaggttc

SEQ ID NO: 143520 - DNA, 355 bp, Zea Mays
cgtccaaggaatactcaagatgttggagaagaagatggtagttatcatgatgatgaagatggtagtgatcatccagctgaacagtcagtacaaactcaaggagaagtggatgaggaagaagaatctgagtcaggtggaggggctgctagtgatgctgcttttcaattggatgaggctctactgctttaggtcaatagtaagtctgtagttctattatgtacttgcctacttggcatttatatactagtaagtctgaattctgaaatctgaatttctatgatgttctgaaatatgaattgtccactctccagtctccattttgtccagttctactgttctattattcatatttgtt

SEQ ID NO: 143521 - DNA, 505 bp, Zea Mays
cttcctcggagtctaatcgccggtaaattacccatccctatcctcgttattctatcggctttgtattgcaccagctaggataggtaagggtctacccgtgcgcgcgattgagttactccggcgagaggccaccgtgggtgcggggcggcgccgacgtcgtcaggctcgttgggggggaagcaccttggccgttgattcgttcacggagggtcgtgattagatcgcgcataacgattcggttgggtgccctcgctgccattcgatcacgatcggacaggcgggcgatggttcgaagtaattaaatctagagcattaagattcaatcgtgcggcttagatcgtgtaccggttcgagcgcggatggacctaatcgtggccatggacttataatctgacggtggtgaagctctggtacccattcggtgcgacatatttgcataagagacctcccgtttccgttaaaacaacccgcaatccactaggactctagcctgagtcttaggaag

SEQ ID NO: 143522 - DNA, 358 bp, Zea Mays
ggaatggatttgatcacggattgaagtttatcaccgtgcctgtagccgttgcgacgtggccggaccgccagcgtcgccgtggaagctccggtgacctcgattgcgccatgtcgtagcttgttactgtgcggtagtcatcgtggcacctttaggagtataatccctgagccgttgcaccggtgaacgccacagtcacagccacccgtgttcttccctatctccagccgccagcacgtcgtgatcaaattgagagccaccgccctcggagcctataaattaagtgcgccatcggcttcgctatgtattcaggcatctagcgcacccacccgtacctcagatcctccaccagagagatcca

SEQ ID NO: 143523 - DNA, 278 bp, Zea Mays
tacatctggaaggagtatctcgagaacggaatgggaaaatgctctatggcagtctacctgggagaaagccgaaactatccgaaccacccttctttccaagtcacttttaccggataccgcttcccagatacttgccagaatgttgcccgaacatccctccgacaactatgccagaactacaacaaggtgatctttgaaactccccttcgctactttccacccagcaacaagaataccccacctggaggaaaagacttcaggccctgtcaggaggagat

SEQ ID NO: 143524 - DNA, 457 bp, Zea Mays
gcttgcacatcattcccaagtgcagtggctggtttcctaatcccgaagcgagaccatatagggcgttgaataatccctatcacatcctccctctgacttaggtcattctttacgtaaaaccattcctacatccaggagcccggccacctctttcaaaacttaggcactaggtagcttgcctcagatcgaggcacgaagctgtaacaaccaaagttgttgtgatactgctcctttccggtagccttcgtctcataagacaactaatgaatgttgcagaagcatcttgcatctggttccagtccttggctcctcatggcccatataaagatccacacttcaatgatagcttcgagagtgagtttatgaaggtaaatttcaaaggttttcaaaacttcgaccaacaatttgtccaaggggaaccgaagcccggctttcatgaagcttctgaaaaccacca

SEQ ID NO: 143525 - DNA, 545 bp, Zea Mays
caggatttggcggttaattgggccgtcaactcatgttcggttgcttgggaccgcgaagcaaaagcttgagctcatgtgactgagcttagtgcggccctcgacagtctacaagtatactgcaatactttacatgaggaagtacatgtattgtatgatcgactgcacccgaacgtgcctcccgacgctgctgcattgggagccggaccatcgggaacagcaaacgaagggctggatgaggagttgaacctttttaagccccctccttccatgaaccttgctgacgaacggtctcctgcggcaggaaatggagcgacaaaggatgatgaagactagaatagtatagtttagatactacacctttgtaaaataagtaatgaagtcatgttgtacactggagtctgtataattacatttagttaatgtaatatgatggtatatgctggcatgttatatttttcccaaatgtctctttgcctcagatgccatcacggactcgcgcgcacgacggtgcggggacttctcgtggtcgggaagatactcccaac

SEQ ID NO: 143526 - DNA, 585 bp, Zea Mays
gacggcctggtagcactccctcagtctctccacatcgctgacggctgggacccgcttgtcaggagtcgtcttccccaacggactctccgcattttggggcgacagacggcgccagcgctgctcccaccgcgatttcctccgatctggtagccccgtccgaggtataaacgccccagcgcgtcgccatccttggggtctatccatccgcctagtcaaccagggttcatcccctgtaaagataagtcgggagagagagagcagaagcaccgccgccggggattctcgacctgggcatcgctctggtctcggcttgcggttgcggatgctcgcttgtgtcgtccacacgtctccatgtaccttcccgaagaggatgtcctctgtgggtggactaattgcttgccagagaaatactcggccgcggatttgcagctcgccgtggaccgttcccaccactacacccttgctggtaagaccatctccgcatcctctgcgtcgtccttctcgttgcgatcgcattcgtgggttagtgttttaggcggcgggccatcgaccgaggcctcgccggcggccaacgccatcgtggga

SEQ ID NO: 143527 - DNA, 602 bp, Zea Mays
aatcaatacacattctcatacttccatctttcttagagacgaataggactggtgctccccaaggggatgagctaggacgaatgtatcccttttgctgaagatctgtgatttggagcttcagttctgctaactcggtaggagccatgcggtatggtctctttgcgatgggtgtcgtcccagggatcagatctatgtagaactccacttctctttccggtggcattcctggtaactcttctggaaacacatccatgaattcttctaccactgatatgctttctgctgttagattgaacatcatcgggtcattggcgggaggctgggcctgacaagagactgactttccttggtggtctgtgaggaggactgtcttgtctgcgcaactgatgataccttttgtgtttagttaaccaatccatccctaagattacaccaatcccctttggatggcaagacggttaagtctgccaagaatactaccccacttaaaaggattctgacttgggagcatttgagctggcatagaaggtctgaccctagggttcgggtgaccaatggaatctctagaggagtagagggaatgccatgcttttccacaaaac

SEQ ID NO: 143528 - DNA, 516 bp, Zea Mays
gcaccacgaagggacacgaaccagcaaccagacaaacgctgggagaagaggccccgcgaggaggtgcacaccgccgagccacctgccgctcgagcccgcggcgcacctcgtggtggggtacgaacactgaacgagatcctccattcccagtgtctgtatcacaaagacatgcggcacaccctgcggaactgcagggacttcaaaaactccgtcgggcacgaccgaccattccagccactgccacctcccccgcctcgaggagagcctaatgagcctaggcagcctcaacagtaagaaggggggagaggtgggctttcttgcacgttgacagggaggtcaacgtcatattcggaagccacggagcacaagaaagcagaaggcaacaaaagcttaatgatcggcaagttctagtggccacaaatagtgctccggctccttaccgatggttggagcacacaatatccttcagtcgaactgattcagtggcttaacttcgatcacctcggcaaatatccg

SEQ ID NO: 143529 - DNA, 478 bp, Zea Mays
gcgagctagatgcaaggagcttgctgtctgctggtggggctgaggttaccctggatagtgcccttcagatcgttccttccctcgtcaggtcatgactcaactcctcctgccctgggtctagcactgttcctctccaatctttaggtgagtcggcctcttgctttatgttgttcatattagcgaattatctttcttctactcatctgtctatgatcacaggcttttgttgatggaatatctgcccagctgagatcatgcggtgccgctgttcccgaacaagctctgtctctgatgcagtggaacccattgctgctctagaaacagatcgacgacttgaaggcgtcaaatgctggttactgatcttgcagcttatctagttgtttttattgatcaacttgttcttagctatgcatcccctttcagttgcgttgtcggatatggcccaacggtgctctgaccctgaggagaaatattctca

SEQ ID NO: 143530 - DNA, 901 bp, Zea Mays
atttaacatgagttggctaatcacggtagaagacctagcgaaccattttagacatcataactcaagaacatgggttggagccgattgatcagtgtttctcaaccattactcaacttgaattagttaacacacaagtcacctaaatagcacatttttgaggtctatcgtggaggcatttacacacggcgtaaaactccataagactacatttgctattggcatcaacattacctaccgacctattatttaccatacgaacgcagttacacgccgcctactagtttttaacataatcctcatatagctcggaattccaactactcactaacaataaatcacgcacgaccactaccacctcgaccggttaatttatttggacaccgcctagcgtaccacgagtaccccgcattttgactcgacatataaacatagaggaagcgacgactacttcggcatgtcaccacctctctacaggccaaaccaatattaactacatcgatcgagtcttatatcaggcaacacttataatttattatctcaaatacaaccatatcccggcatgtgcttgggacacttcggttccacttacgcaatcactactacaacgcacttcagcacacatgtttaataactcacctttctaaattaacctatctcaccttccgacaccaattaaatgtcacttaatttacattttcacctcatttaacctacaccaacgatgaatacataaatataattatcctagaccaactcattagccgattgcggaaaccaccaagtatgctttacgctttatcaagtttaccacatctaacaccctgctttacgacggaatattctaacaacaattaatacatccgcgaccaatccctacgttgcacaaaaagaactatcgcag

SEQ ID NO: 143531 - DNA, 781 bp, Zea Mays
ggcagggcgggcaggcacacatgcatgtgaacaacagccttgccactttctgtgctgtgctgtgccgtgcctgtctctccgcccgattctttttcgctcgcctagtgctccccctcactccataaaaatctatttctggatagatagatacatggttggatacacatatttatagcaagtgggggttgctgtgtcccctgcttttggagtcgcgagttcgtggtgggccgtggggccggcatatcattcctccccctccgaattccgatcgatccccccgcactccgagctgcgtccatcccggccgctctgcgcctttaaaatagcagcaggccgtggagtgtccagaaagctaagtgcccctaaccctaccctcctcctcctcgatccaacacagagaacgtcccaactcccaaggttttttcgatcccgataagcatccaagtgagaagatgtcaaggtatcatctgaagcagttcgagaaggagcgcatgaagatggccatgctaaggcaagaagagacgttcaggcaacaggtaataataagaatcaagcaaaccaagcagctagctagcagagagccagcctccagtcctagctcacgtgcatgcgtttctcaaaccgcgcgcccggctccgatccctaaagcaacctctaatgctgatcgacgtacgtttccacaccaggtccaggagctgcaccggctgtaccgggcccagcagctactgatggccggcgatgacgcggcgacgaacgaggcaacaagatcggcaacggcaac

SEQ ID NO: 143532 - DNA, 444 bp, Zea Mays
caataggaaggcctaaaatttggctaaaaatgatacattattgttctctgtgatcatttgaagactggtatttacacttcctcaaatatacagtcgttgcccgcctgcagttcattaaatactagcattgacatgcatttttttacttttcttgcccctttatagattcgcctcgagaatagggttccaatcaataatggcatattgtgcttaagcgcgaaaaatgtgactgttattgggggggctgtccaatcattgtatgaagaatggcagatgaaccagaaatactctggcttatcccgtccatcattgaggttgtctccaagtgatgatggagttgggcctccaccatttgagaagttagacattgaagcacgcccctgcagggaaaccaaagttcaagcatatcctggtaatggttaataccctcgttttcactcctgc

SEQ ID NO: 143533 - DNA, 285 bp, Zea Mays
ttccgggatgtatggagagtagcacgaagtagtatacaagacctgcttcagctgattctaccgtgcctcggcttcagcaatttccttttgcttttgtatcgtgatttggcatgtccttgttgtatgtcccttgtccttgccatagaaaaggaagaacaattttctgggctgattaccgtaccttccttcgccaaagcttctcccccctctaccttttcggggctggtggtttgtaagaagtctgctgcatgcccaaagactgtgagctgtgctaactgctctgag

SEQ ID NO: 143534 - DNA, 1101 bp, Zea Mays
tgtacagaatttggacagattcagttactgaatttgtaaaaagcataactcctaaacgatcagacttatgactgtcaaattttaacaccagcaagataataaagttatctaccacttttctatagaacatatctacagaaaacacaatttagttcatcaaacatacagtacggaaaatcactgcgtgcagtccaaaacaacaattaataaatttcagctcctatacaattcaagaattgccgcgttctagatacttgaattattctaacactttgacaattgttagagttaaaataaccaagtgagaactaacaagtagacttactaatttttatccatgtcacttcgagcactaaaattaccatactcaaacatcacatgagcactactacttttcatccgcaaccataaccatacgcatttagactacaacaagtaattcatcgtgactacgagcttaaccaaagccatctaacaagatgattaactaaagcaacaacataggttcgctaactaacatacacgtcggctagcctattattgtcgaaatccgagacacaacatgtatataacaatcacttaacgcaatcgactcctgcttaacacgagttgactaatgatgtgactatttcccaattaccaacatacaccacctttcgccatttttggataacctgcgcgacacacaactattgtaatacatctcaagttcattcaaccccatcagtagagcactagcacatttcagaaaatttcctgagactacgatgacaaggcatcgatcttatcatgcacatcaaagcatcacaagcgtgtatacggaaccaatcggttaacttgatcgacacactacccatgttctttgcctttcaaaatttatcgcacaataggtatcatccccatttgccaatgacaccaacaatacctactgatctattattcaccacacgaacacagttacacgccgcacactagtttctaacatgattcctgcataactcgtacttcaactactcactaacaataaatcacgcacggcaactaccacatcaactgatttatttatttagaacaccgcctgcctagcgtaccactagtacc

SEQ ID NO: 143535 - DNA, 291 bp, Zea Mays
tatttaacaagcataaaatcatggacttctgagtaccctcatggttgtagctataggagtacaatttgtccagactccagacattattatttgtctgattgagatgtagagattgtctaggaccaagggaactttgcatttgagacttacagacttcaaaatgccagttccagattcctacttaccgaaaatatcttatgtacattcagtgcacacttggcaatatgtttctggtcatactagtacaattcatagagattaccaatacttagctaggatcaagggaacctg

SEQ ID NO: 143536 - DNA, 520 bp, Zea Mays
gtctcatgaaacaagcagatgttactgtccctaccttacaagaccgtattagttacgatgtgatttatcaaccgaaagttcgatagtaggatggctttatcaggctctaccactattccgtggtcctgtcatacagtgaaaggtacaccgacaaatatcggacacaacgcaatcgggttgcttgtttcattattcttcatgcatcggagaggaggtaaaatggattccagaaattaagttgtaaacacggagctaaaggatctaggctatcacttcaccttctaccttttcaccaaaggtgaaaaatgtatcattttgatcgaagtaagtaccatgcgatgcagggtggagccagaattcagatatgggtccggatatagggggctcactaagtgtcgacaaaaaatatatagcactagactttgatgttggcttgaaaaaactgatataataaatcatctttaagcttttcatcttagaaaaatgctattccctatattatcctggaatatatagtgca

SEQ ID NO: 143537 - DNA, 457 bp, Zea Mays
ggtaccaacgtcctgatcaaagctggatactcgccggaggcgtcttcttttcttcttctgctcatcaacagaaggatcaggctgattggctcggcaagggcgcctcgggcgagtactgacaggtttctgagcatccaaagtcgtatcaacctctgggaggggcaccactgccgacgtcccagcaggagcagcatcggatgaatcttcagctagcaaatcaagcatagcgcttatatctgcatcactagggttcagaggcacctcaaaatgaaccagtcgttcgtcatcaggaatctccccaagcgaagcaaccaaagcattgacttcttcagcagagggtcgcactctaaggcccaaaccgccatcagtaatgggcggattcgacacgaaaagagtgaaggctttaggaggaggcaagttccaggctgagtacgccactggagcaccaacatttgac

SEQ ID NO: 143538 - DNA, 816 bp, Zea Mays
cggccgtctgcctatatattcctttctttccttcgtctcccgcgtctcagtctacctccagcgctccatcaccatatgacaacaaaggttagttgtgctgcctcatggaacacagctttttttttattatttgcttcgcctttgtttgattgcttgctgctgctacgaactaggattccaccttgatccttgaagtggacctccagtgcgagaaatgttacaagaagatccagaaagttctctgcaagctccagtgtatgtagatctccatcaagtcatacttcatttgaatttagaacatatggcttcattcagaaattcgacttaatttgcatgcatggaacatctacatctctgccagccaaggagaagatcaacaagatcgactacgagaacaccaagaacaaggtcaccgtcgtcggcgccttcgaccccaagaagctttccaagacgctgagatgcaaggcctgtgatgtcatcagggacatcaccatcgtcaagcctcccgaggtgaagaaaccggccgcggaggagaagaagaagccggaggaagaggagaagaagaagaagccggaggaagaggagaagaagaagcccgcagaggagaagaacaagggcggcgaggagaaggccgccaagccagcggcggcggcgccaccgtcgacgacggtgaacctgcagttcaccaacatatgcgggatctgctacccgtggccgtgcagcgacccggcgcaccggggcggtttccaccacccgcagcagctgccgcagccgtggctgccgtgcggagggatggctccagctccagctcccgcg

SEQ ID NO: 143539 - DNA, 271 bp, Zea Mays
cccctgttactgaagatgttgaagagggcgatattggtgaagaagaaattgattataacaccgctatgccatcgaagcccagccatttggattttgggaagtcaactatgtctgaagctgatatggctatgatgacgaagttaggctacttcagagaagccgataaggggttgattcgttttggtggggaagagactatcccgaaaccagaaaatgatgaagtggtggtttttaagagcttcttcaaagcagggttgagatttcctctgca

SEQ ID NO: 143540 - DNA, 1132 bp, Zea Mays
cttctcttctacactacaactgaaatattgtgtctccaaataggtatcagattggactgatgtaaaatataccatggctatgtcaatggcatacaataaattgtggcattataaaactgtggttttgaggaagagttcccaaacaggccctcaggagtgtgctacaattgttgtacttcttttctgtttcacatctttgtagttcgtcacatattatgtgtgatatccataatgcaaaagtatgtgtgatatccatatttccatacataatccaggctcatgcatcacttaatttccaaacatgtttttttgtcatccatacaagcacacaaagaggagtgtctcttttgtgacagaataatatcttcagtgtcgtaattttttcaagaaaacgaaaacagaagcacctggagtaactctgtcctttcctatgaatgatcttgcctcaccaacaatatcatcatctctgacaggggtgcatttgaaagaaacaaactttccaacagcttcctttgtaacacagtattgtagcaaaccggttgcctctgaaagtggagtgccttcgtcatcttcagcctgtcaaacaatatataccagtgaagtggctaagaaacaagaaatgcctgatcagagcaatggcaaccagtatatctgcaactgttatgtatctttagaagcatcatacacaatcagtgattatttttaagtatcagcaggaattgacaaccaagaaaatacaatacatacctcatgaaggtgccagctgtataaactatttccttcatgtcctccgatatacccatatgatgctgttaatatctgaccctcagagaattcaccagtgactgttaagaagttcaggctgggtggtagtgctgcaacaagaaaggtaagaatgctgtttaaagatataaacgacaaaaggacttgcaaaatcacaagtttgtgcttcgctaaatgatggttaacagctaaaaacaaaaggactatgcatcacttctgcagaaagggaattgcttattatttggttcagcccaacaggcctagttggtccacctgactgcccataacatcttcaaagaatttcactcaaatcagattgcaaaacatgaaccataaaactctttatttc

SEQ ID NO: 143541 - DNA, 526 bp, Zea Mays
ggaccataaccatcctattttggctaactatacatggtgccattgatcttctagtatcgatcatagaatcattgtaaatacaaacagtaatatgaaaaaaggattaaatagcatatcacaaatatcatcaacaaaccaaacgtgttgcataaatatagtgatcacaatttattcaaacaattttgctacgatggttatggttgtgttcacaattgaccagattaattggatttctgggtaaaaactctagagaagatttaaggagatcacttagacatggaatgatctacatatgtctaatagatacaccattgagagaagaagaacaacagcccctgccaatggcaacgaccccacatgaaaattgcaaggaggcaaaaaagagatacttgatgtgttgtgacctccttcaataggtgttgtgaactattacattatagacacttttgaattattttgattttgaaaccacaaataaaccagagaagtgcatgaaaagtacaagaaaatctgaaaaatagaagct

SEQ ID NO: 143542 - DNA, 571 bp, Zea Mays
ggccagacgccttaccgccttaacaactatgctcctaatagacacactacgttctctagagcgcactagcacataggaactcgtaccttgtccaccacgtgttcgtcctatcacgtgtaagtgggtttataaggttaagacctgttgtaatggttctcttgagcgctataaggctcgattggttgctcgtggtttccagcaggaacatggtcgcgattaggaagagacatttgctccggttgctcacatgacgactattcacattcttgttgtggcctctgtttgtgagtggtccatctctcagtttgatgtcaagaatgtcttacttaatggtgagctgcgtgaagaggtcttcatgcaaccgccgctgggtattctgtttctgagggtatggtttgtcgttttcgccgctctctttatggtctcaagcaagctccacgagcttggtttcagtgcttcgcgtctgtggtcactgtgtttggtttttctgccagcgctcatgatcctgcactttttgtgcatacttcatctcgttgcctgactcttcttctttatgttgatgatatgatcc

SEQ ID NO: 143543 - DNA, 481 bp, Zea Mays
tagacacttggggaaactagtactcaggtgcacgacaagacaatgagtagggaactgtagagtgttgttatgtgtctctcgtctgggtacaatgcgtgggtatttatggtaaccgtgtgggtagatgggtccccaaatacggttatacccccggttacctgctacattctcgaaatattcccctcaatggggtcattacagtgaggtgaagtacaatagcatgaacatactatagaatctaccccttaatggggcttacagatggacccaaaaaatggcatggcggagcctgagccccactacgttcttgctcagcctttggttgcactctgcaccttcgaccctatggagttgtgccttcctgatcctgcaaagacttggacctcacgatctaggagagttcgtgccgtctgggcgtatgcgcggggaaaaggcgagccccccgtcctctagctattgaggcccttcgctttatcccctt

SEQ ID NO: 143544 - DNA, 318 bp, Zea Mays
ctggatggtgtctttgaatggtttagtgggctcttgggtgtgatacttgacttcttgatggttggattgctccttgatcttttttgtcttgaatttattcatcttccccttgatgtgtgcgttcatcttgattgtcttgattctcttcttgagttggggtgaagcttgagtagagtatgattgatcttttcatgacatggctcttgtagacaaacattctcaatggaaatattccttaatgtggtgtgtggagcctccttatcatctaactcatcgagatgaacctcctccacttaggagccattagtctcatcaaac

SEQ ID NO: 143545 - DNA, 405 bp, Zea Mays
gccaaggatagcagggcggacgcggtgcatgcaggaataggccgaggcggtcccaggtcgggagctcaccggagtggtggctcagagctagacgacatggtgctacctcgcgcatggaggctgggcgacggggtcagtgttgccgggtctactagccgacggaggggagaagaggtgttgtggagaacttgtgcaggggcttgcattggaatgggcaggacgccatggtgctggtgcttaggcgcccgacctgcagggacaaggacgacgcgcgtctggcatcgcgacacgacaaagctccttggctaacgcagcggatcgaaagcgagcgaccggagcaggtgcataaatgacacgaacagaaatcgaaaacacgagagaagaagaaggcctcaccggggggca

SEQ ID NO: 143546 - DNA, 452 bp, Zea Mays
ctggctctttcgcttgggcgccatctcaatctcgccggcgaactgagcggaagcgagatcaaagggaaacagaggaggtctggaagcggaaagtaaggctagggctcagaaagcagaggcatgcgacggcgcggtacaaatggggttttcccgggccaagcaccaattctaaaagtgcccagtcatcactcggttgttacttctaaaacaccgacgtgactcgatataactcagtggttatttctaaaactctgacgtcaccggtcttcactcggctgttacttctaaaacgccgacatggctcgatataactcggttgaagcgctgacatcactggtcttcacttggctgttatttctaaaacgccgacatggcccagtataactcggtcgttacttctaaaacgccgacgtcacccataatcactcgaccgttatatctaaaatgccgag

SEQ ID NO: 143547 - DNA, 480 bp, Zea Mays
cggaagatgctatgaaatagatggaagcatgtttaagcgtgtcgcagccatgccgatcggctagaaccaatgtgctagccgcgttgtccacatggagtgtccttgcaaggatgtgctcgcacatcgccttgagcctgtcaatggcatatcgatccgcggccgctagcaaatgctggaccaactctctcgtctcgtccatgcccatatggctcatggccggcaaggagtcggtgtagatgaaatggagcaacgccctgaaagtgtcaggccgcatgtcacctaccacgacagtgcgcgcgtctgtcgtctccgcagtgcaagtggagctgtagagctccgcctcaaagaccggcgaccgtgcggcgaggatgatcctgtgagctgcaaatgcctcgccatccacaccgaaggtcacgtccgcgccttccttggacacgagcagctcgccgatgtgcaggtgcaggttgcccccgggcaccc

SEQ ID NO: 143548 - DNA, 358 bp, Zea Mays
atcatgagtcagggatcctttcccatgacttctgctacggacgatgtacgcacttggtgtgaggagctcgctcatgccagggtggatctggagcatgcccggtctgctatcctctagctccgtgatatactcgcggcaaaggtggagtctgaccgccgatcagtggcgccaacacaactgcaagcggctgcacgtggcttcgtagcgcggcgtccaatgcggtaagttgcggcagcggcgtggctgtaggcagtggcgtgccgtcttcaggttgtggcacgcgacttcttggcacggcgtcaagcacgacagcggcgatacggctgcaggcagcgacacatggcttcttagcgtggcg

SEQ ID NO: 143549 - DNA, 699 bp, Zea Mays
ccggtaagtcaccacaatcattgtatgatttcaattctacgaggtcacgatctaatccagagcgttggttatggatccaacgccatccaactagagtgcctaagccccagcccctatctgattgctaccgttgatcaccggatcaatggtggatggagtctcgtcttccatacggctggcaacggcggcggcactgcccagcacggcagcgccatggccgatgaaagtgagatttccgattccctgcccaagctttgatgcaaacggagctactctctacggcagtgatggcgaatctagggaaaggattctcaccgggatcctcggcatcgaatccactgcccacaaaaagagaaacaatcttgtggtggtgatgccttgccgatggtgaccttcgcctgacggaatggctcccactgcccaccaacgcgacgccctagaagtgcgtcgatgagctcaacaagcgcgagctcgccgccttctccgacggaaatcccagacctcccacgagactaccggtccttgtgacggccgcacgggatacgaatatacgatcccatacctcccggtcggagtcccagaggccgcacggaaaccccggtcggagtccgagaaaggccgcacggaaatcccatacctaccaacattgccttaatataaaggaatgagtatcagatcatcatagatcaacaaagagat

SEQ ID NO: 143550 - DNA, 731 bp, Zea Mays
tcttcaagtttcacatgacaaaagtttagaaattaattagtttagactataatataaaaagtcgacttgaacaattttcaccgagccaaatagccacataacatgtatatcactgtcatcttagtcgattttgtagtgggtccacagctgaaaatattttaaaacttatctagactccaacaagagaattcatatatgtttctttgccaactcgacgagaggagcacaatgattcaatctattattttatttgagcaagttaaaaaaattcggtctatctagtttcggaaaccggtcgatttcactggttagctctctaaaagttgttttctttgtttggacctcaaataacataacataaatatattttatgtatgtcttgacgatggaaacatgatggcaaagtctactatatgtgttaaccaattttggtttctagcagaattcgaagtatgtatatgtctactactatagagcacaagtttctattgtttccaccatcgtcatgtgtcacgtgcgaagcgcttaggtctgtttctctccctcgcatctcacgtctagcctaacaacacacccacacatcgactatgcccagtcaacctcgcctcctttctacctactgttcccccaatcacatgccactccccacaggaatacctacccaaattgtcgtctcccaatcaatgcccttctcgttgcccctaaaccctaccccagccctacccctggag

SEQ ID NO: 143551 - DNA, 536 bp, Zea Mays
agaatacaagccaatcgcctctttgacatcagcagaggcagtggagttcattcaggagataatattcagatttggaatacctaacagcatcatcactcacctagggtctaacttccccagctcggagttcttcgacttctgcgagcagaggagcatttagatcaagtacgcatcagtggcacacccaagagctaatgggcaggtggaaagagccaacgggatgatactcgatgcactcagaaagaaggtgtttgacaaaagcgagaagcttgcagggaagtggatcagggaactaccatatgtggtctggagcctgtgaacccagccgagccgaggtctacatggaaacaccccattcttcatggtgtatgggtcggaggcagtgctaccagccgatctgatctttgggcgcccaaattaacctttgaaagcatagtcgaagcagaagcaaccaggctagaggacatcgatgtcctggaggaggaatggctaaatgtggtaattcagtcggctagataccagcagaccttgaggcg

SEQ ID NO: 143552 - DNA, 1291 bp, Zea Mays
cctccccaacttcttatcagaaacaggcgctccaaatagttgcatggaaaagaagccagattgcactgcaaaatgttacaattgtcctgaacagtctgatcatcacaactgagagggatagcacaacttttttttttgcaaattcacaactaagcccgaggcctctccaaagcaatccaggatcattttgacacaaataagatcttcaactgcaggcttgacaaaaagaaccacatcatctgcgtaaatggagagcctagatttcatgtttctgatggccaggtcatgcaacaatcctctttcctcagcatgcttgaataagctactaagcacatccatcacgattatgaaaagcataggagataaggggtcgccttggcgcagccccctccggtgtcgaatataatcccccggagttccgttaattaacacttgtgtggaagaagtggataacaaattgaacacaaggccgcaccacctgggcccgaagccaagatgagataacacttctaggagaaagacccaggacactgagtcaaaagcttttgtaatatctagctttagaaataggctagcgatcttcttcctgtgaaaggcattgatagagtgctgaaccaacatgtagttgtcatgaatggagcgacccttgacaaaggcactttgatttgtagccaccagattatgaaggtgtggtgctaaacgattagccaagactttggataccaatttggcaaagctgtgaataagactaattggcctgtaatctccagctgtcttggcatcaaccttcttagggataagtgttaggtacgcagagttcatcatccacaatttgcgcgtgttaccttggtgcagggtgataactgccgccatcagatcagccttaattatgtgccaacaagttttataaaaccttcctgtataaccgtctggccccggggctttgtccgagggaaggctagcaatagtggcccggacctcctctgtaatgggaaggtccaaagccccaagatcaacatcagcactgtggcaagcctccaaatctagagtgaactcacgctgcttcgctacacccaacaaattggagaaaaaatcaaacaagacctcttgtttttgctcttgagaggtggcgatctggtccccatgcactaattcagagataaagttccgctttttccaatagcaagcctgtagatgaaaaaaggaagtgttggcatctccctctttcagatatttgatccgcgatctaagtctagcaattgtcctttccagagaagcaagccctaggcag

SEQ ID NO: 143553 - DNA, 796 bp, Zea Mays
taaaaaactaatgattgcaggataattggatttacgagcaggcagaagatgcctcgaacaataatagaaatggacactactacagtgctagcattgcgttgcgtggtccgctgcaaatcacaggacagtcaaacacacacccacatggacatgcgtcgcaagttttcaggcgctcgagaatcaaaccatacttgtcaatatcgttccggccgatgttctggtttgctcactggaatgcaacgtttgggtactggatagtactggcgcaccattccggaaaacaataaatataacaaaaatatatttacaattaacaataacatgtacctgatataagcatgggggctgcgtattgaatgcaacaagcctaaaacaaaaaaaactaatgaaactaataggaggttctggttgtagattgcagaaacacaccctacgtcctgcagtatagagcttggagcagtgacacagggagagaaaaagtaggtccttgctgcctttgctcattggagggagtttgttgcaggagtagaggatggctttcaggagtcactacacattacaagagatgttgtggcagactgccagggcaaaccaagaaccggaagattccacccagaacagctggaacaatcgggaaagtggccagagttctggccggtacaggatactgctttggtcgtgtcagtctcttcactgttacgaagcattccagccatcctggctggtaccggaacaatatttacatgcatggtccaaacaggctcttgtacaccgactgtaacttcttattgcagcc

SEQ ID NO: 143554 - DNA, 299 bp, Zea Mays
gaaggcccccaacagggatgacttcactgaagtcacagaaaaccgtaatggtaagaaggtgcgcattgcaggtatttgcaaattttgcaaagttcggttgagtgctaattctaatgctggcactggacatttgcttaggcaccataaatcatgtaaaaataagtctgatcatgctgctatggttcaaactagactagctttgaaccctgatgggtcttttagaaactgggaatatgatcctcaagtggctagaactgagctttgtcgtttgattgctagacttgatcttcctttaggga

SEQ ID NO: 143555 - DNA, 330 bp, Zea Mays
cttggagccaaatgccaattgtttttgcaatattcaccagatcttatatctgacgaaggctactgggaaggagcagtaccacaacaactttggttgttatacctttgtataccggtcggatgtcaggcatccagtgccaacatttcggcaaaagtggtcgggctcatggatgaatcaatggttttacgtgaagaatgacttggtcaagagaagtgatgttagggatgtgatccagtggcctatacgatcctgcttcaggataaagaggcaaatattgtaaatacagataagtctcaggcttgcttggtggctttcaacgctatatgtagc

SEQ ID NO: 143556 - DNA, 436 bp, Zea Mays
ggtaactccggcagccacgaaggagtcgacggcgtcgcggcttggctctaattggaggatgtcgtggtggccccgatggtctccagtccgccgccccgcgccccgtgcagcttcaatgattagctgcagggaccaggtctcctgcttccctccgcgttaggcagcgagagatggaggcaaatacacaagaggcgaggggacgttgcgggagcaaacttccgctccgtatgcccttcaccatgacttgcacggaagggggctaggggaggggaggacggcgtggaacaacggtggcgacgacgtctcgggtgaacaccgaacagcgttgctgctcctgctagcctcttacgcagtggggaacttgggccaggagtgctgtggagggagtggagcagttcagagggagatcgtgggggattgcagggagagctggtgc

SEQ ID NO: 143557 - DNA, 665 bp, Zea Mays
cgaagaccgtcgatgtggtcttttttgacatgttgcatcttagtttttgcgggggatttttgcaggtatattacatggctccgcctcgttaaaaacctcaccccccggaggaaaagagtgcgggcctgaataatactgtttggtgaattacaagggtgcgtaggccctgaggatttaaacaaaaaatttgcggagattgtcaatataccaggaatggtctaggtcttcaccggatggcgttgttagcctgtatgcgctgggggacaccttcgacttgacgatgaatggaccctcccactttggctccagcttgccccgtgactctgtcctggtggttcggacgagtatgatgtctccttcccccccattctcttgggacgactgcgtggtcgtgccaggcctttgtttgagcttggtatttgttgagggcctgcagggcgaagacacagtctccatcgatgaggtctttggacgttggttcgtctatgtcggggatggctgatgcacttgttcgaggtgacccgtgctttatttcctgcggggtcatggcctctgatccatatagtagacgaaaaggagtgaatccagtcacctggcattcggtcgtgtttagtgcccagactactttagttagttggtcgacccatttacccttcctgtcgtcg

SEQ ID NO: 143558 - DNA, 344 bp, Zea Mays
gcgggcccgggccttcacgctgacccaccggatgcgatgaagccgaaagggtgcacaaccgtggtgcggttgcacgcctcttgcatagcggcctgccctttcgcccgttggtttcggcgaggatgggggaacgcttataaccgcagggcggttacctgcttcgcgtgcaacggtttggcttcttctgtttccggtctgctcgcatgacgtgtgggacccagcccccgcgtcggagggtgggaaccctggagctcgtcggtggagactttgctcgtgacgcttggaatgcgagtggggagagccgcctttaaaaagggatcgatcccccgggcagtagacatgcc

SEQ ID NO: 143559 - DNA, 478 bp, Zea Mays
accgacataataaatgtgctagaccaagtgcgcaacgcccctatggacatagccagatgcgcgaaggcacacagcctcatcattcaaactatagtcacacacgtacagcgagggcattacaccttacattggttcaaccttcggaatgattcccatctccctatagttaaataacattatcctaagctcctcaccctgaaaaagacttcgcaactccccttcacctacattcgccccaaccggcgaggacaacaattcccgcttgccagccctgcccacacgaagccgaccgccatccatttcactcactctacgcttcgccaccgcccttcgccgcctacgcccagcactcggaccaggcaaaacttcagcatctgtaacacgcggagaagcctccgccgcagccacatccaaggccacaaagtaatccaagtcctcatccaaagactcatccgtccactcaaccgaactcccagag

SEQ ID NO: 143560 - DNA, 376 bp, Zea Mays
aaacaatttagcaaaatatggcatgagaggccatcttcgctacacttggaaaagtgcagaaggttaccacatgtgaggcaatgtaaatcatccatgttcatcatcatctccttgaagttgtaggcttgttaggtttattttctcctttattcttgccgaatttcctatgaccaagtttgtagtgaactggacttagcgtccttaccattagaatcttgccttctcttcaacctcaagtgacactatcagactggcatactagtcctcttgtgtcttgagaagttttgatattcgtcgctgagggaggctactttgctattacgcaactggcgacaaggatctagtatgacacattctaggatctcaatggcttgac

SEQ ID NO: 143561 - DNA, 524 bp, Zea Mays
atttcccagggggctctttagcaacaagtacccgcgaaggggtaccaaggatttctgacggttggatcaataggcgacgcaccagattaaaaccaggcgctcaactcacccgcgtactaccccgaccgacggatccgagatcgatggcctataacacactacgctaggctccaatctctactggacgatttgcatcctatggtcaaaatttaatgaagtgaagagttatcgtgacttctaatcgcagccgaccgagaaggatcggactgtcactacactgtctcctaccccggtctgaagcgcgtgactattcccccctgacggcggcggcgacggatccggtgagcacccaaatcgccgtgccagggcccgaggctcaaattgatggctacaaaacgaagcacacagcgctaggaatgaaataggacaaaggttacctgcgaatgtaaggcggtgctgcttggctacggtaccaggcgaatccgcggcgagcttgaatggccggcgagcaattcccaatcctg

SEQ ID NO: 143562 - DNA, 725 bp, Zea Mays
gataaagaggagaaagctgctagggcttatgatcttgctgctctgaagtactggggtgccacaacaacaacaaattttccagtatgtatatgtaggatgcggttttactttactgaagttcatatctcgttatggcctacaaatatgtatcaaatgctgtacattagctagtgatctggagtgaaggttctatagtaaagtaaacgctgtgtgcggagtgcattagcgggaggtctctcttttattttctaaaaaaatggacattactgaaattgtacttaaagtcgtttttttgtatttccaggtgagtaactacgaaaaggagctcgaggacatgaagcacatgacaaggcaggagtttgtagcgtctctgagaaggtcggtctaacagcattgattaatcagtaccaactctactgaataaaatctgctgctctttgttaaattttgagcgaggtcaactgcatatttgatcttattagaccactgtatatgaatgcaggaagagcagtggtttctccagaggtgcatccatttacaggggagtgactaggtatgaatccatatataatagctaggaacatcaacaaacacacatacacttgggttgatgtggcagatgcatgcatggattgaaaatgtgtgcatggtgttttacttgaactgtctgtaattataggcatcaccaacatggaagatggcaagcacggattggacgagttgca

SEQ ID NO: 143563 - DNA, 345 bp, Zea Mays
caaaagtccaaatccacgtacgtacgcggtccaattccagcgtgctgacactcggattgccagctactagtgttatctattgtcatattgcatcatgcgtgcacccacaccgcaagcgatatgggtatggcgaagaaacaaagagtacgtacaatgctcacaaaaagtcacatgtgtagagaggaaaattaaaagcagcagcagcaagtcgtgggaactgggatgtttcttagttggcacacttggcagtgatatactaatagttatgcaacaagttcacagacaacagttttattcctcccaatccctagaaacgaaaattaagcgtatgtcgctgtcgctgtc

SEQ ID NO: 143564 - DNA, 600 bp, Zea Mays
cagcagaaaagagcaattccctattttgttcacagtggttctaaattttcctgaatttacatttgattactaatgcctcaccaattccagatcattcactccgacagaagtttaccttcagtccaagacatttgttagaacaaggatgaaagggatatttatagccctctccaaaccattttgcacaaaaagacagtatggtaataaagaagagttgcattggatgattcaataactggcagcaaaaccatctgcacgggagcatagtttagtgtaagattcagatcatgagattggagaacaaagatgtgcaactagaacagctgttgggtaggctggttgatatatgctagattgctagtggaaggaacagttgacttcagcgttcttgatacttcacgacagcttggtttgtttctcctgcctgctttgcgttaagcatttagaatctgaatcctgcaattccaagatgtccacatgccttccaaatttcatatgcattggcaccttaccatatgctgaacaactattaattgcaagtgcgaatcacatggcttgagttggcatgctatcagttaaaggagcaagatccactttgtt

SEQ ID NO: 143565 - DNA, 1109 bp, Zea Mays
gcctgaatagcgatttatgcgagcggcgacgcgggcgaacagcgtgtgaattagcacgcgcgacgtcacgtgaaacaaccctgcggcacgcgcgaaggagcacacggacagcgcgcatgacaacacgttaccatgtgcgactaacgcgtgacgacgcgtgcgaacaacacgcgacaatacacgaaccatacgtgtggcgcggacgcgcgaacgaacgacgccgtacaagctgcacgcgaatgactcacgaaacagcatgcgcgacatgcgagaaaagacaaacagacgtcacatttacattaaagaaatattagttgaaacttcaacatctaagttggcactaaccacattaatttgtatttataaaatcaccttttaaactatacattaattttaattagaatgtcgttcaaataaacctcggataagtgattaactaaataattaatgaaaatatatgttgcgacaaagcaatatttctaacatgtagttgaggttattatgaagttgatacgactggaatgactcaaaatgggtttacaacacattatatgttgaataactaaccattcgcgcttaataaatgactcgacatatgagaaccactaaacacgcgtcgcgattacactaagcaagtactgaatcacaatatttgcattggtattaatcatgttaacatacatttatagaagcacaacttataaattaaattgtatttcagctaaccataggccaaacaaatgattgattaattgattgaaacatgtgctacgacaaaattatattttaacaggtacacaactttattataaaattaatgtgactggaacgatacaaaatggatttttaacgtgaaatatatcgaataaataacaatctcgtggattagacgatgtggtgcatttctattggctcaagatttgccacacaaaaggttataaagaacataatcgcagaagatcccaagggtgggatctcgtgtggccactaccttctcctatctctccctatcgcatgatctggcagttgcacgaaagaaaaaaaaatccaggagcaggggaacggccatcgttggcctccaggggttggggcacgccaccggtgagccg

SEQ ID NO: 143566 - DNA, 322 bp, Zea Mays
gaggaagtccccttcgacgatgtcgaatttcccttgcaatgtgaacgaacaaaatgtaagccttaataagaagggagcgaacgacaaacacctagtcccaagagagatcattacaagaggttaccatgcaaagaggccaagggcttgtcctctttcttggttcagccattcagctcttcctccagagccgtgactcgggcctcggtaactgctttccctcgctccaggatgcgaagatgagagttcgcctttgcactctcgagatgggcaagggtcaccgactccgtgtccctcctcgccgcaccaaccaggttttcgtaag

SEQ ID NO: 143567 - DNA, 401 bp, Zea Mays
atttttttttgcacaacaggaatcatcccacttgctaatgataccaacaagacctacttatctattattcacaacacgaacacagttacacgccgcattctagtttctaacataatccttacataactcgtaatccaactacccactaacaataaatcacgcacgacaactacacaacaaccagttaatttatttggacaccgcctgcccagcgtaccactagtaccccgtattttgactcaacacataaacatagaggaagcgatgactacttcggcatgtcaccacctctctatttaagcaaagacaattttcacctacaacgactgaacatccccatcgagcacaccttattttactatgtctcgcatgcaaccatattgtggcgtgcactagagaca

SEQ ID NO: 143568 - DNA, 375 bp, Zea Mays
cttgcagaagcgaacaggcaaaggttgaggagcagctggaggaaaatcttcagctggcattgcaaatgggcgagccattttatcgaatttgtctaaggtgatatacgatccaacttcctgcaatctttctggctccataatcggcattgtgtggtcatcaggcagcaaagattctttgcctccaccctgcatgggtacataagaatagtgtgatcatgcaaatattcatgtaagtcattagaaatattgaaacgaacaccttccaagcatttgaaatgaataacctccaaggaacttatatctgcaccgcgactaaatgtcatctctatacggaatctctttgggtcttccaaaggtacctgagatggatgttcc

SEQ ID NO: 143569 - DNA, 361 bp, Zea Mays
gcatgcactacgctcatcattacttgcacgttaccaaggaagcagctgtcacgtatcaatactgcgtggactgcggatatcatggcgcctggaggttgctcaggcgttacttgcattagttactcctataatgtattccttctattatgctcctgggcccatatgtcggggctcaacatccttatatgtgcctcccttgagctataaaagggaagctacacaacgttacaaggcggacccaactcaagctcacacgctcactagctctcagacacacatacgcaatacagcatacacagtggtggtagggttttacgctctggtggtctgaaccactctaaactctcgtgtgttcttcccg

SEQ ID NO: 143570 - DNA, 440 bp, Zea Mays
tgcccatgcccagtttgcaaggaagctcttaggtttatttggttgaagaagggtggtaaatattcgtcattcgataaacatcgacaatttctccctcctgaccatgcattccgactagacatcaagaactttacgaaaggtgtctggtgacagaccgcccacctgcaatgatgactggtgccgaagttcgcgaatagatagatggtctcgtggccaacccagaaggtggttttgtgggatatggtgagcaacatatgtggacacataaatcgagcttgactcggctccctattatgatgacctgctccttccacacaaccttgacgtgatgcacactgaaaagaatgtcgccgaggcactttgggcaacagttatggagattcctgataagtcaaaggacgtaaagccaagagtggatctggaagagttatgtgatagac

SEQ ID NO: 143571 - DNA, 283 bp, Zea Mays
gactatccgtgcaaaagtcgcctaagggtgcagccggactagcacaacaagtgcgcaaaatcgaagtcttcttcaaaaagactatccacgcaaaagtcgcctaagggtgcagccggactagctcaacaagcgcaccaaaacgcaaagcgttacatccgtgcaaaagtctacaccaagaaactgtccgcgcacagaccaactacaaggcacagccggaccaacatatgaaatgtgatagaccaagcgcacaatgcccccatggacatagccggatgcgcgaagg

SEQ ID NO: 143572 - DNA, 583 bp, Zea Mays
agaattcgaagcagctttccgtgagcaccacgtaccccaagggatagttcaactcaaggaggatgaattccgggagttaactcaaggcggaaggtcagtcagtgagtatgtgcacaagttcacagaactggcccgctacgcgcccgaggatgtcagcaccgaggccagaaaaatggcccattttctgaaagggttaagacccgagcttaaaaccatcctcgccagccaagacttccacagcttctctcacctctccaacaaagctattcaagtggaaagggcaaaagaggaagaaaaagggcacatcaagaggaaattccaagtcctccgagcgcaacagcaagaacgtcaccagagagctcgaccctttgggcttccacccaggggtccaagcttcaataaacaatctagacccactccatcacgctacagtcagcagagtcagagctcccttcaggcaccctctgttgcaagcaaccagccgccagcaaacgcctgttggcattgcggagaccccagtcacttcaagaacaactgccctcagttgaaggcacccggaccaacttactccaagtcggtgaat

SEQ ID NO: 143573 - DNA, 315 bp, Zea Mays
ctcgcacattcggctatgctcgtgaaggcgttatgtactcggtctttgcgcggacagtttggtgtggtcgttttcgcttttgttatgcttcgtccggctgtgccttcgggcaactgttgcacggatagtctccgtggtagacttcagtttttcgcgcttgttgtgctagtccggctgcacccttaggcgacttcggcacggatagtctgcgcggtagacttcgatttttcgcacttgttgtgctagtccggctgcacccttaggcgacttctgcacggatagtcttcgcggtagactttggtttttcgcacttgt

SEQ ID NO: 143574 - DNA, 362 bp, Zea Mays
atgccaccaggacggcgggttctaatctatgattcccgaggggctattgtgcaaaatgttgcggcgaaggggtatggatgaaccagatccgtccgatcgtgaacctaaggctcggattagattgggaattataatgattcggtatgaaacaggaaccgcccgatctggaatagacggcccagatcccacaacgaagcggtacacgacagattcactcacaaccgtggatatgccaatcaacggtgcacaatggttaccccccagatctaatcctaggcgctcctttccgatccaacggccaggaggccttctcctatctctgcaccgagtcacggcggcgcacgccggtggcatgaaatctc

SEQ ID NO: 143575 - DNA, 401 bp, Zea Mays
tttctgcttgatcacgtcaagtgaagaaggaaaaaccatgtacaagttgcagattttgactgcatatagacaagggttcatcatgcatgttgcactgcatgtcttgttacgcacatagcaaagcattctgtcattttggtgtttttacattggttggaagtctttatttgtaatacttattgcatatgtaatgcctctctgaatgaaaagttgcttgtccatatataggacctcgggctcccaccaatccctattactattaagagtgaaatgttgataaccttattcatagttaatgcctatgttatgcattccaataatgtatatcattttttcatgcattccaataatgtatatcattttttcaggcacatagataagcattttttcatgcattccac

SEQ ID NO: 143576 - DNA, 978 bp, Zea Mays
ttgggccaaatctagtggtagttccggaggtgcggggaggtgggtctcactcccttctccgccagcttctccttctgctcctaggggaaaccctgctccaatcccggaggcggtaggcgtggttttatctgaagccatctgccaggggaaaagagttactaccatgcacatgccaaattttttttaacaagttactttattcattacacaagttcattacagcatacaactatcataagttcattacacacgagtgctatctagggtactcccgaactccttctctaaagtgtccccaaaatccttgagaaggtcatcaaggctggctagggacatttcctcggtgtcggacgagttccctattctggtaggaggtagggatggaggagcttcttccttctgctcagtctggcatccttggcttctggtcttcttgcggatttttcttgcgggggcgagcttctttagcttcttgtcgtaatccatcttcagagtgcagtaggcctcacgggtgttggtttcctcaccttccgctatctcgagactctcttgaagggacacattttcccttgtaagttccctgacttgttgctccaggctttccacccgggagtttaggtgagtgcagtgggaggcaaggtcatcatattggttatcgagagtgtggaggtatccatccatgtagacgatggtgtggtcatcctcggtagggtctctgcctgacagggcctgaagtcttttcctccaggcgggggtatttttgttgctgggtggaaagtagtgaaggggggtttcaaagattactctgttgtagttctggcatagttgtcggagggcttttcgggcaacattctggcaagtatctgggaagcggtgtccagtgaaagtgacttggaaagaaggatggttcgggtagtttcggctttctcccaggtagactgccatagagcacttctccattccattctcgagatattc

SEQ ID NO: 143577 - DNA, 575 bp, Zea Mays
atgctaaacatccctgggcccgaaggtatcgagacacttggacaagccataaacaattccatacgttggcctcaaagggatgtcgaattggttgatccaccaacgccgtcgtcgtcgcatccccaaccatctctgcctcctcaaactttaatacctattgtacatccataatcacctcctcaatattcacatgctgctctcatcctctttctaacctaccgcctccgccacaagcatcaacatttaggactccaccttctcctcatcctcttggagacccgctgtctacgccaccagcaagggatccaccttctccatagccatcaagggattcacggccatcaaagaaatctaaattccctataccaaaattgttgtccatgttcgagaaaaagaagaataaagctactattgctagcacagctcgatttttgaaacggattgcacgggacctcacgtcacatactgttgatttggccgagcatgaggggtctacaaaaaaggctgaggcaatgacggcaaagataaagatcccaactaaggcagattataaaaatgtgcctaaacaatatgtg

SEQ ID NO: 143578 - DNA, 281 bp, Zea Mays
gaaaattattaaaatgcatgtgaaggttatattgtgtatactcaaatcgctctaaatatttgtgttgcgttgagcttttgggctcacgtcgagcgattaaataatatagtaggtactcagacacgtcgatcagactacatttttaattggctgagctatggcattggctaagccctggcaacacgacacattatttgtgtcgtaagaacttggctgcgtcatgtgattgctatgttgtactctcgcttaatcggaccactcctgttgagttggatcggcat

SEQ ID NO: 143579 - DNA, 476 bp, Zea Mays
ctcggtgagttccttgttgaatttactcccgctactgtgctttttgattcgggagcatcccattcttttatagccgctaagtttgtggaaaagcatggcatcccctctacacccctagctatccctttggtcactcgaaccccgggatcagacctcctatgccaactcaggtgctcccaagtcagaattcttttaagtggggtagtgttcctggcagacttagccatcttgccatcccaagggattgatgtgatcctaggaatggattggctaactaagcgcaaaggtatcatcagctgcgcaagtaagactgttcttctcaccgatcaccaaggaaaggcagtttcctgtcaagcccagccgcccgccaacgatccaatgatgtttaatctggcagcagaaaacatgtccgtaatcgaagagtttgaggatgtatttccggaagagttgcctggaatgccacccgaaagaggagt

SEQ ID NO: 143580 - DNA, 1035 bp, Zea Mays
tgggaaggggcgccgggttaggaaatccatctaggaagttgaagtccgcagcagtgggagtggaggtatgctcggcaaagggaaaaacggactcgtcaaaaagaacatgacgggagatgatgattctattggtggtaggatcaagacatcggtatcccttgtggtgagcagaataaccaaggaagatgcagagggcagagcgcggggcaagtttgtggggagcagtggccgacaaattggggtaacacttacagccaaaaacacgcagatgatcgtacgacggggcactgccaaagagagcaaagtgcggagtggaaaactgcagtgtcttggttggcaagatgtttaggaggagagttgcagtgtgcaacgcttcagcccaatatgaaggaggcatgcttgcctgaaatagaagagagcgaataatatcgttagtggtacgaataatccgctcggcgcgaccgttctgcgaggacgtgtagggacatgacatgcgaaagtgaatgccatgtgtgaggaagaaggtgcgcatgctggagttgtcgaactcccggccgttatcactctggatggccttgatgcgtgcgctgaactgggtggacacataggcgaaaaagttagacagggtggaaaacgtgtcagatttaagccttaaaggaaacgtccagaggtgatgagagcagtcatcaagaacaactaagtaatatttgtaaccagagacactaacaataggagaggtccataagtcacaatgaataagatcaaagttgttggacgctcgagacattgaagaattaaaaggaagacgaacatgtcgtcctagctgacatgcatggcacaaagactccaagcttttattacaaccagggatagccgaagtgagtttggagagtgcctcgcgaccagggtggccgaggcgacgatgccacagagaggtagatgtggagctggcaacaagggagtgagccacgggcagcttcagtgggtaaagcggcccggagctattgcacctgatgatcacgttccgcgagagaa

SEQ ID NO: 143581 - DNA, 450 bp, Zea Mays
cgcgtcgtcggccacccaccgaggctaaaactctagcgcgagtgagggttcaccggcggcggcaactctccctttctctctcccgtgcacggtcatggcggcgtctaagcctttgttcccagcggtggcttttatagaggcaggggggtgagtccgcggaaggggagtagaagagttgtttgttgcgatggcgcgacccggcgtacggtggggcgagatccacggacggcagcatgcgcgcgagtttgttgcgggaggtggtcgcggcagggatgacagggtgtccctacggcctagtgacacagcgtcggcgcccagagtccgagcggggtctgcagtgcgggcccacggtgtcagcggatgagaggctcgcggtggacgacgggccgcgcgggagaggaattactgggccgcgcgatggaagcagatgggccaaataacagtctcgtg

SEQ ID NO: 143582 - DNA, 272 bp, Zea Mays
gaacggctcaaccttggatttctcaataatgtagaagcaacggtgatggaagtcaaatctactttggaagaagagattcgtaaaggacaagagtccgatgagaagattaaggaaattaaagctttgattggtttgggtaaagccccagatttcacggaagatgaacaaggcacaatatggtttaagaagagaatgtgcgtaccagaaattgagcacttgcgccaacttattttgagagaagctcatgattcagcttactctattcaccctgg

SEQ ID NO: 143583 - DNA, 419 bp, Zea Mays
gaaaaatatatgtatgtaaaaaacactaagcatatttgtgaagctaaacatgatgttacttaagaaaatatgttgttaacagaataagattaatattgaaatggaaacatatgtaaattagaatcatccgacaaagctaagagatgtccatgctttgagaaccttctttagatcacgaccacagaagtagctctccaagactcaacgaaggttgccgcaattcaacaaatacatggcatgcatgctcatggctgtcatcgccgccataagcacggacaactcaattccccgctccatcaatttagaagcgaacaagcaagcaaccgatcactcaccccatacgcaccaatctgactcccaaactccgttcgcatcagtaccgccagcactccacctgcagctaccaattgagacctccc

SEQ ID NO: 143584 - DNA, 374 bp, Zea Mays
agctcccactcaaccatgaccacctcccactcggcacactcaaccactcgagactccaagtcccaatcgccatccgaatcgaaactaactctatcctccagcttcgttcaatctggcaatcctccattcgcgacctcgcggacgtggaggcatggtctagtgttcccacttcctaggtcgtgttgtcgtctaaccacggacgccccaagccgcaagacgacgtcgtccctagacctcgacacctcgttggcagttgtcgcacttcatccctccacggctccattgactataggttcgtcccaactcctagcccctctttcatcgtccatcgttgactcccactacatgtgtgcttgggaatggctactgcccgc

SEQ ID NO: 143585 - DNA, 369 bp, Zea Mays
gggagaggcagacacgccaaccctaaaaggaaccgcccccggtcgaaccctgcggcactgagccaaggtcgagcgtggcggaacctgacaagggaggtcgggcgtgtcggaagggaaccactcgagtggatcccgcgcccgatcccatactgacctaccataaatagtcagccacatttaaccacgtctggcaccgagccacagcacggcgtcggtccgtctcccactcatgacctacgaacatctcagtctgcatagcactcatgacctacgagcccccaactgcaacgcattaatgactcacacgctccttggcatgcacgttcacttatggcctatcggactaggcctcaatgcgcagacctcttg

SEQ ID NO: 143586 - DNA, 513 bp, Zea Mays
ggctagctcgcagtgtgtgcagaggcaggctaatgcttgccacgccattgccgagtaccacttcatctatatgttagcttctcggtacgatctgtgtctaaagtattcgtgccaagtgcatgcatgcccaagtaggccgggagcagtagtgtgtgatgcatacatgcatgaccgcaaatggctactatggtccctactctcgcctcagacgattaagtagtgatcactgatgatgaagcaacaacactgctacgagtaattatatgcatgattagatgactgagtctctgagttctagaagcgcactgttctctcatggtgcgcgcgcgtgcagcaggcggacaacgatgacgatcgatcgaagccctgctcatcgaacgcgcgccggcggcggcggcggcttagcgtgtgaacgattgtttactcagcttttttgaacgtgtcaaagggcacatatattccgatgaggcactgccaagagtggagcgcatgatgggaaactgaagagggtcc

SEQ ID NO: 143587 - DNA, 323 bp, Zea Mays
tggatgaagtgaccagcagattagagacaaggttgcgccatctagccccaaaaccaaggtgagataacacctcaagaagaaaggcccatgagactgaatcaaaagctttagtaatatcgagcttcaagaacaggctagcaacctttttcccgtggagggatttaatggagtgctgcaccatcatataattatcatgtatggatcgaccactgatgaaagcactttgattcgccgcaaccaacttctggaggtgagaggccaggcggttagctaggatttttgtgaccaacttggcaaaactgtggataagacttatagtccta

SEQ ID NO: 143588 - DNA, 547 bp, Zea Mays
gcgcgaagtcacctaagggtgcgaagtcgtctactagacgcaacatttatccatgcaaaaattcgcctaagggtgcaaccaaatatgcacaagcagtgcgcgaagtcacctaagggtggaattcatttgatagactcaacatttatccgagcaaaaagtcacctaatggtgcaactggatacgcacaagaagtgcccgaactcacctaagggtgcgaagtcatctgtaacgcatcactcatccgagcagaattcgcctaatggtgcagctagatatacacagcaaaacacaaaagtcaaacataaaaaaatgtgcgaatacattcaaaagctgaagacccacatagtcgttcctcggtgaaggggggcgagggcagcgtttgacttaaattcgtcgagccacgacaatacaaatcttctaaggattacaaaggctccactttcgggattagaccaacctcccaaaaattaaacaacataagcctaagctctttgccttcaaaaagcgcactaaggtccgttcttcaaaacctcgctcagttgttggc

SEQ ID NO: 143589 - DNA, 692 bp, Zea Mays
gttcgccggagagaaggtgcccggtgccctggtgctcaaatgagcaccctgacaggctctactcgatgaaccgaacgtaacgaggtccactagggcattcttaccttggattagagggatgaaaggtctgtccacgcgatgaggcgggtccctctatggtgcgaacgacgacgagcaattgctcgaaccccgcctgttccctcggctttgctggtccatggacatgctccctgggtccaggtgaatccccagacccacaatcaaggtcccggcaaccccgcagatggcctgcccgcgatggtgcgcacctccgcggcgcaagacgaagcctggtgaggaattaccatcaaccgagtggttccccccttccgcgaaggtgaccggcagacttaggaagacgaagcgaagctccctgcccaaggaacccgacgcgggcgcctacgtgaattcacagcggcggcggaaatccccgcacgattgcaatccctcccatatctttcttgcttcgatgatctcttattctcccatagcttgatggcgcacgacttttataccccgagaagcgagatcaaccggccgacctggttgcgaggaaggagatactgctgacattgtggccccacgtcatagtgtgatgcaagcgatgatcgtgcgcaaggtgactggcctaggggcccgatcgtcagtaactc

SEQ ID NO: 143590 - DNA, 450 bp, Zea Mays
gtggatcatttgtcagcttacgaggctaacgcagacccattgtactacacaatgcgttttgtggatgggttgagagctgagattaagtctgtcattatgattcaacggcccacaaacttggatactgtgtgttctctcgccatagtgcaggaagatgcggtggcagctggacgtggaacttatgaagagtcgaggaccaaaccattcattaaggtgtcaacaacttcacccaagtgggacaaaggacctgaggcgtctaaggctacttctcatcctgagaagtgggcatcggctgacaaactggactctctgaggaggtatagaagagctcgaggactttgtgatcgatgtgctgacaaatggagttatggacacaaatgtgcagctactgctcaattacatgcgatggaagaagtgtgggatctcttgtctgaaacaaatgaagacaat

SEQ ID NO: 143591 - DNA, 730 bp, Zea Mays
tcgactgactgaaggaacgccatggtacagtgctcggatatggataagactgccagcaccggatgttcaccgccggcgacctctttgccgggattggtgccgcggccgtgtggattttgctcaccctgaaaagatctcaccgtggataaacttggagcacattggccactcggtcactcctccacttaccggcgacgtggccgcacggccatcaccggcgtgccgccgttctttgctgttatgccacgccgtcggtcatcttaccacgtcgcagtggattaccatacgccgtccttctattacctaaggccttgccacgacgttcgccacctatcgcacgcaccagtgaactctctcccctccggccgccagctcgccgtgatcaaattgtgagccaccgcccccggagtctataaattgagtgcaccatcagcttcgttatgtattcgagcatctagcgcacccttctgcacctcaaatcctccaccataaagcttcaatttgaaatttcccccaaaacactcaggaactccgcacagcttgacctcgccgtggtcagcccgattcagatccaatctcaccctcggtttccttgtttcaacatccttgcttgctcttgatgctcaccgaaccgttaaatcaaactagaccaccccaatccgcgggaacgtgtgctcccatgctcggtttccgccgtgcacgtggaccggccgttctcggggtgttcggg

SEQ ID NO: 143592 - DNA, 545 bp, Zea Mays
gaaaaggtcgtcatagtggttgtcaagggtgtggagatatccggccatgtagactatggtagggtcgtcttcattaggatctcttcctaacaaggcctggagtcttttcctccaagcaggagtatttttgttgctgggtggaaaatagcgaaggggtgtctcaaagacgtacctgctgtagttttggcatagctggcggagggctttttgggcagcattctagcaagtgtctaggaagcgatgtctagtggcggtgatttggaagggagggtgatttggatagtttcggctttctcccaggtagactgccataaagcaattctcaatcccgttctcgtggtattctttctagacgtactccggcttcttgcggatccccatgcaaagcgcgcagctccgaagaaggtgagggaatccttccacctccgagcagtaggatgtcctaatgacaaaggagccttccatctggtagcaagagaagaagggttgttaatatcggggaaagaagagacggttcttttagaggttaagaggtcttttctttt

SEQ ID NO: 143593 - DNA, 445 bp, Zea Mays
ttctgtctccaacatggtacgttacagataaggcgcttatggctctggcggcgacaaacactcaattagttgagacgttcatttccaccttggaagtcgacgatatgataatcaagaagcggggaagtggttaggctaagctaagtcgctgattgctagctgagggactgacgcatgcatgacgtctcggattctgaactgtgataccaggaccaggagctatagcgctgctgatgtttgagtaacacagtagtactacgacagtatatattactcccaaccgattaatcacacaggacagttagagggcggaggagctagcttagctacgctatcacatcaaatgatcacgatcaccattaattggacgttttctgttggaggttgacgctgtaacctgaaccttagtatatgtacgtacgtatagccaccactactatagcca

SEQ ID NO: 143594 - DNA, 381 bp, Zea Mays
aatagagtcattagttttcttgatgggaatgcggatataatcaaatatttatggccgaagaagatgcttccaaaatggccttcatatgtccaggctttattggtttgttcgagtgggtcgttatgacatttgggttaaagaatgttggtgccacttatcaaagggctatgaatttgatcttccatgagttgctaggaaatattgtggaagtgtacaaagcctttgatatagtagtcaaattggctgcatttgattcccatcttgccgatttgtacaaagcctttgataagatgtgtaggtatgggctaaaaatgaacccacacaaatgtgcctttaaagtgtcgactcggaaattcttaggatttatcattcatggtcatg

SEQ ID NO: 143595 - DNA, 512 bp, Zea Mays
attttttatatgtgcttacctttatatcccaatatatgtttaagacatttcagttaacgtgcccttgaccacccttgtttcttaatgatccatgagcggtcattctactttgcatatccttggtgatcccgttgtctccttgtaactccacttggtaatgaatctttacttcaactcttatgttggaaccttacctatcttacccttgattgttttctccacattgtcgtttcgcgagtcttgtctcaactatatcctttgttatgcattttaattattatcatatgcacccttgacacctctatatcctacattcatgtttgtctcatacatgccctttaaaatcgcccctctttcgtctcataccttctttctcttggccgtatcctcttctttggctcgcgagtttgtaacctcatcctttgtggtgcttttgtttcttattgcctttacccttctcatctctcaatcttaccttggtgattacgctatgttcgttatctaaaacctcc

SEQ ID NO: 143596 - DNA, 933 bp, Zea Mays
aaaaagaaaaaaaaaggaaaagaaggaacagtattgggctgaaaccagcccaaaccggcccatcaacaggagaaacacgcccgtgcgcgctcaagcgctggtgactttgcgcagaggaccccagctattcgaataactggttaagaatccctatgcactattcatctgtctcactgacgtacacacttaaggccctgtacttctgtttcttcacagacccaggtccccgacggtgagcggcggcgtgcacgctttggcaaacctgtaccgaccggaatacgcaatgactagggttctaacttgtttgacacctaatcccacccctgacaaccctaatccctccatcaattgcacaaatccggcccaaaattcttttgctcacgacgatgacaaacaccgaggacaaaccgaggcgttcccggcgattaagcgtggtctagctcaaacggttgggtcgatgagcaacgctaatagctaagatgcttaaacacatcataggagggaacgaacggacctgagatcggctggccacgacgagctgcctcaaggcgacgagtttgacagatttgggggaaatcgcgattgctcgggctatggtgagtaatcggaggcgaggagtgagtcactgggtgtgtaacaagctaacggagcatgctgagcactcaatatatagtgatcaatagcggtggcgcccaatttggggaagacatgcttgtggctggagagagggggaagtcactagcgcgagctaccgtggcggtcactggctaatgagctacggcggtcactgctgagttcttatggctggcaacaatgtggtgaaagggtcacggagtggcgcaatcatgacgaatggtgtccacctcggtgatggccgcccggccacgtcgccggcaagtgggtacggcgtctaggcagaacagtgccccgact

SEQ ID NO: 143597 - DNA, 1120 bp, Zea Mays
atgcgaaccgcgtggctcaaaggaggcaaaagcccgcccgtgtagagctgaacgcgttgggcctcctccaagcgtccggcacgcggaagaagggcttggaaacgatttgagtactccacggtgctcgtgcggcggcactccgagagttcgaacatcggagcagaacggaggggaggtccgaatcgcaggttcaggagatccttgaaacgtccccatgttggtgtgccgtcgtcatcctgcagttgggtaaaccacatctgggcgacgtcgtccaggtagtacgacgccagtgccacgcgctcctccgccatagttctgtgttggtggaaataggcgtcgcatttgtggaggaagagcatgggatcggtcgtaccgtcgaagcgaggaaaatcccactttctatgtttgtggtggaagtcttgatcacgtaggccttccgcacgtcgggcagcaacgttgccgccggaggatgaagacgtgtccttgatggccgccatgtctgacttcaaggtcgtcatctccgcggtgagggacttcagctgtgccatgatctcggcgagggagggttctgccatggtgttgctgttggtgtctgaggcagtggatggtgggctagcgatggcagcagctgcggtggaggagcggctggggcgggtgggggaggatcggcgtgacctctgataccaggttgtcaagggcagtggtacccaaggcagcaggaccccggctacgtagttcgtagtcgcgatccgtcgtcgccggcagggttatttcccccacgccgtcgccgactattgtcaaccgggttataccccctggttgccgacctagagaggaagggagaggagataggctaataatacttgattgatttatctcctttgcggttacagttttatatggccagaggcccaaccgaaaggagcaacaaactccataatctaaggaactccctaatctaaggaactgaataacagcaactccacaatctaagggactggataacagcaggctatcctatcctatcccttagctgtcctgcatggccgctgcttgctctagggcgcggcgcacgtcacgggcacgacgtcgcctcacatacgtgcgcccgaccatgaca

SEQ ID NO: 143598 - DNA, 521 bp, Zea Mays
gccgctcaggtacgcgttgtagtaccgggtgaccatgccccacacgtcgttggtggggtgcaggaggtaccgcgacaggaggtagaacaccgagtccttgcgcgggaacaggcggtccagctccccctggtgcgtcgggttgaagaagagcccgggcaccatgtactggtccgtccggaggatcgcccactgcatccggcgcaggaacgactcgtcgtcgtcgcagtacacgagcctgttcgcctgcgacgcggcgtggtcgaggtgcaggtacacgaagcgcatcccggagacggagccgctgcggttgaccgccacgttgccgtagctctccggcgccgtctcgtccaggtcccggaactccttgtcgagcgggaagtcgagcggcagcgcccacgtcgtgcccgggaacggctcgcagaagaggtccggcagcgtgttgccgtagccgcggtccacgaggagcacgcggcgggtgagcagggcgtagaggaacgccgaggtgatggccagcatccggt

SEQ ID NO: 143599 - DNA, 272 bp, Zea Mays
ccggtccacaactaatatggcccaatcagcctgctcatcaaaatcttcagaagttcagacttcatttacctacacttgcacaccgtcttcagagttgaggcagaccacacatatcacagagtccggatggtacaccatcccacccccactcatttgaatttcgaggctcgatcgaagtgtcgcggtgttctgcagtttattttgtagagtttctgtgactctgtgaggttttgatgggttaagtgtagtgtttagaagaaccgttcgtctgt

SEQ ID NO: 143600 - DNA, 349 bp, Zea Mays
gaaatgtttaacagatctaggtcctggtaaaccaaaacagattgatatcaaccgccacataaagtgagcaacatgacagtcaataaataaatgctgattggtttcatccaaattacaaaagccacacttactgctaccttgccagttgcgttttgctaaattatatttcgtcagcactactccttttaataagtaccacataaagattttaatcttaagtggcagtttaagtttccagatttccttatgattaaaaacattcccattattaataatactcatatacatagattgaactgtaaactgcccagaattagttaaactccatttaaaaatgtccctatcgaca

SEQ ID NO: 143601 - DNA, 584 bp, Zea Mays
gtcgtctacatgcaacaacaaagtgggagggagaaagacaattgtagcaccttccttggagatcttcaggggaccattgacgaggaccaagtgccgcgtgtctagatctcctacgcaccacttcccgccacctgtcttcagaacgggtaggaagcgctggcgcctaactttgcagcaccgggcgcacacagactatcttcttcaccgcttgcaactggtgggcacccctcaactgagaagaagcagcaacacacaacggagaagaggctactctcccatcattggagagcacacctttataagagtaaggcacgacacatgagcctccagaaaacgagggggtaggactgtcgtcactccatctctggaacttagcccgccaagactaggaagccaaaacgatgtttgctgtgggccctgatgcaggaagaggggggttcgtggaggtgttcgccgggtttggagtgaggtccggcgaggggttgaggtggtggacgttgacgccaaggagggaagtgacggggctggggttgggagatgatggtctagggctaggggctgagcgtgaagaggccattctctac

SEQ ID NO: 143602 - DNA, 472 bp, Zea Mays
agagaagtccacaatatggatcttggtctcctttaggctcactacaagctgttaatctattgttctaacctaatccttatgttgtcattttattattgaagttacattacattatcagactattattcaagtctgcagcgcccattcctgaattctggtatcgtggtaaaatgtgtattgaaaaataacttcaagttctgccctaaaactcctacctcatgccataggattgtattattacatcaagagcaagtaaacatcgaaaagcaagaatggaagctgatattagttagccataaaaaaaattagcaaccttttttcccattacagtttgttgctcaactaatctcgtgtgaagatcaaccactaacttatggaacacagtggcaaaagaatgaaggacagaatggctagcaaagcaaaatggcagttacggacataccatcaagattcatggtcaatgattcataag

SEQ ID NO: 143603 - DNA, 471 bp, Zea Mays
caaaggaaaacaattttgcttaagagtgcaagccatgttcttgtgaaaaatctgaagataatcatgcctaaagtctggctgtcaggctgttaaggtttgaattttcagacagacagtgtgaccactgagactttaagcatgaattcaagtttgaattattgagaatttgaccaaggttgctatgacaaaattgtagctggatggtcaggctataattttggtacagagagctagcttagtcaccacacaaatttgggagaaataggagctccaaagtgctctgtcaaccgttctgaatggggatcacgatggtacagtaaccgtgtggatcaggacgccagcgcagccaccttaccaccggcgaccgattgccgtcgtgattcgtgcgaccgccggcccactttgtgctctggatggttggatagtgtcgcggggtcaaatatcttcgccgccggtgacctggaagccact

SEQ ID NO: 143604 - DNA, 406 bp, Zea Mays
cgtgaagcctgattacttccttcatatacaaggggaccaattctgaagctgaattggtggtcttcatgggaataaagtgcaaagacttagtcaagcgatccactaccacccaaatagcatccctgccccgaggagaacgaggtaagcccaccacaaaatccatggtgatatgctcccacttccactctggaatctccaatggcttcagcaaacctgcaggctcttatgctcggccttcacgcgctgacatacttcacaggcggccacgtacttagaaacgtcaaccttcatccgcttgcaccagaagttttgctttagatctcggtacattttggtttcgccagggtaaacggtgtaaggcgttttatgagcttctctcaatatatccatcttcacctctgatttc

SEQ ID NO: 143605 - DNA, 700 bp, Zea Mays
aactcaattgtttcatttatcaaaaaacaattcagcataaattcattgttaaacggatacacaaatttatactcttcaacgtctcacacgtttatgctctaaacaataccgtgttatgctgttttgttgacaaaattatgatatataggtcaacatgttatgccataaacatctcgccatacatttagggccagtacgcacgaaatagccagcttatacattaattggatgttgcatatgagcagaatttttattgctccattacgttttatatgtatatgtgttgtttgatttggcaggaacatcatacatgaagaacgtagactgacctccatctaatccaaagcggattataattcagtctactcaagagtgctttagtgtcaacataccccgtgttccggcgaaaattgttagacacaaaccaatgcaggctggtgatgaggatgatgactttatgccattatcgaagaagcgtaactttgatgacagtcctccaaaagtcttgaagaagatagttataaagcggaggaaagtagtggatcccccccacaggttagaattgatggtcaatggcaatatatcattttctgcgtgaaattatgttgttttgagatttgatttaaacattgagttgcgattatgcggatgtaaatgtttacgctattcattgtatacattttttcagcagaggcttaat

SEQ ID NO: 143606 - DNA, 418 bp, Zea Mays
tgataaatatagggttgtagtagtcggcaaaaataggttcatacaaaaatatatagaaaatatattagttgacaatgtctccagtgacattatatttatcagcataagtacctctttatcaagtctgtttgattttatagcaggagataacaacatgtaaatatgtgtaaaaggggtcgtctcctactgcaaatgtcctagaagcataatggacattatagaaaagataatatgtacatattacattcagatgttcaccacatgtcacacacaaccgtagtcatcattccttttaaatatttatattaaagttacacttttgaaaccaataccagaattaaagattattgttagctaatttgcttgaaacattagaaatacaatataaagcacaagggccacactatgcatccatgtc

SEQ ID NO: 143607 - DNA, 725 bp, Zea Mays
ctcgagtcgaagtatcaagaatcttgataggatactccatgtaagtcaaatcaccctgaacactgagctcttccattggtaactgttcctcagggacacggagacacttcttaagttgagacacgtgaaatacatcatgcacatcagataaatgatcaggtagctccagttggtatgccatctctccaactcgcctaaagattctgaatggtccaataagtcgaggggataatttgcctttgactttgaatctcctcattccacgaagtggtgacaccttcaggtacacatgatcaccttcctcaaattccagtggtcttcttctgttatcagcatagctcttttgcctagtctgagctaccctcaaattctcctggattatacggacttgttcttctgtctcttgaataagtttaggcccaaagaattgtctttctccagtttgatccaaatatagaggagtcctgcacttcctgccatataaagcttcaaatggtgacatcttcagattggcctggtaactattattatatgagaattctgcatatggtagactcttgtcccaactgcctccatgctgaagagcacaagctctcaacatatcttcagcacttgattagtcctttcagtctgggcatcagtctgaggtgatagcccaaactgaagctcaactttgtatccatattctcatgaaagcttttccaaaatctagaggtaaattgtga

SEQ ID NO: 143608 - DNA, 373 bp, Zea Mays
caaagtgtttaattgatagacatgtgactatgaactctggtgataaaacaagttttggagggattgttgattggacaaacaacctttgtgtcacatgttccctgagttgtttgagatctgtgaatgtaaggatattctggtgaaacatgtggtggaggaaaatgtttggctatctttcagaagatggcttcatgaggatttgttaaaagattgggaaaatatttgcaagaaggttgctagcctcaacatgcaagccacttcagataagatcatttggaaatgggaaaagtaaaaatgtttactgtcaaatccatttattcccatattattagagatggtcaaggtccatatatgaagcatatatggaagagta

SEQ ID NO: 143609 - DNA, 503 bp, Zea Mays
ggcacattcaagtcagagcaagacacaaaaaacattttggtcgctgacgatgacgcttcaaagagcgttcgaattggggcaactctctccgacaaacaagaaggcaccctcgttaaccttcttcaagccaaccacaatgtctttgcctagaagcccacggacatattgaggatcccaagagaggtcgccgagcactccctaaatatctagcctacgacaagaccagtcgcccagcgactccaccattttgatgaggagaagcgcaaggccattggcaaagaaatcacgcaactcttggcagccgagttcatgagggagattcaccacctagtgtgggttgcaaaccatgttctccagaagaagaagaatgggaaccggaggatgtgcgtcgattacacggggcttaacaaggcgtgtacaaaggactcttttcctctcccacgcatcgactaggttgtagattccaccgggtgtgaactcctctccttcctagatgcctactc

SEQ ID NO: 143610 - DNA, 579 bp, Zea Mays
cgacactgaagatgccgcccgggagggcgtacaagatgccgtagaactggtggccgaacgcttccagcgggatcttgctgatgatgagtagctagatctgcagagagaaggcaagggtcccgctgggaagcggctttgtaataatttttggttttgtaagatacttttgagtactatttatcaagcagtattagcacttatctgtatgctatttgtccttgctgtgtgtggcgttaccaactcctccctggtacttggcccccctgggatgtaggctctacgtgccgaggctagataccagtatacctaagaaagagttggtgacccggcccccaggagttagtctcgactgggacctggacctgtacacagcttcggctaggaagtgttagtagcacacccataggacccatcgtctggtatctgccatcctttgattcatgcaacaggacctgcgggatttagtctgggagccaagccgtatgcccggacctacaaggtggaggctccaaatactagggcatccgttgcagagtggtggaggtgcaggcttagggtacgggaccaggctaagcggct

SEQ ID NO: 143611 - DNA, 521 bp, Zea Mays
gagagaaacagggcgccgtggggagcggaccgagggagagaagtggaatccgtcgatgttgtccgcctgtgccttcgtaggattctcggggccaggaattgggagcttcgctgtattcccctgatgatgcttgtggcctcggtttgttgctcgcggggcagacactgcgggtctgccgtgtgctcgtagggcatccttgccgtcgagcgcgctcaccatcgaccgggctccgggagaagtcatggtgcggttcgtgcttactggtggattttgggggcatggatgcttgggtccatggcggattgctcaccgaggtccgcttcgtccaccgccgggtgtacccacaccatagtcaacaggcgccagccatttttcaccggtaagcaaacctcctccgagttcgcctctacccgctccacgtgtagaacccatccatgttcgattccgccccctcgttcgtccagttctcctgctcaccgtcgcggtgccgcgaggcgctgtggacggactgtcaccgcatt

SEQ ID NO: 143612 - DNA, 491 bp, Zea Mays
ggcagattgatctgctcgaggccgtactcgatccgagtgacatgaactccaagctcccaaacctgatcactgtgtcgagcctcaagcggtggtggaagctagccatccgtggtcttgatgggaactagatgtcttacatgcgacgaacccctacctggcacgccaactatcggtgtttggacccgaggacctaaccaactagtgatataatgttgcatgcccctaacccaaatggtgatgcaagttgacacaagtcttttatcctggtttgggcaaggagaggccttacttctagcagagggggatgggacttatattactcacacctaagtgattgcagtagggagcacaagcacagtgggagagagaaggctcccaagtccccgcggttgattgaggcaagtgccaataccttgtgggggagaaaacttgtgaagtttttttgcccctgtcctcctgaagccgtgggctatcctatttatagccccaag

SEQ ID NO: 143613 - DNA, 663 bp, Zea Mays
gtttgataccgacaacgtactacagagtgtatcacgtaatgtttttagtaggacagtgaagctcgatggtttatgctagacgcgacggaatacgacgagttatacagattcgggccaccgctaggcgtaatatcctacgtcctgtgagtttctggtagtcatgttgctatgagttcgagggtttacaggtgggtactgagggtaggagatgaaggtcgtctagcaatctagcgggatctaactttttgtagaggtaccatctcagccttatatagccgagtgaggagatatccttgtacagatcaaaataattatgcagtttatccactacttgttatgattgcgccaagtatttcggcattaagttggtttattccgcaaagctcgcgcccacctgcatgtgcagaccgagtcttgcggcattctgttggcctctcagatctagtgcgtgggagtttaagtcggcttcagttacctcctgtcaaggcccacgatgtgtcccttggacgacttatcggtgacattcaagcagcccatgaagcgagttcgcgtcttgatgacccgggatatccatccccacaagccctcgaggctcaagacaattttggtagaattggctcgagactctaaaagcgaaactggggttgatgaaatatatttgct

SEQ ID NO: 143614 - DNA, 292 bp, Zea Mays
ctttgaactacaactctcctctaacagtggattttaccctaaggggctatttggctcccaagaattggtctgaattgaatcattttccaagaattggtccgtttggctgtccgtggaatttaattgaccatttcaacctaattccaatccctgcaaatgtggcctcctctcaattcagaccctccaccatcagaaaaggctagaaaggcaactagggtttgatacttcgatgcccacaccatctccacctaggactgtcgccctcatccatctcccgtctcccccgtcttcc

SEQ ID NO: 143615 - DNA, 486 bp, Zea Mays
ttttgaagtctcggcagttttccctggagtagaactcgaagtttttattgtttccagcacatctagtacactggccatccttttcctcttatgggtcgttgtaagacctttttgtgccttcggcactgccacttctgccgaagggcttagaacttctaatattttcgtcccttcgactcttgtctcttcaatattatcggccgaacacttagcatgggaggagcaggttctttcgcttcagtagctgaagaggtctcaccgccaaatttgggcacagtggccagttcaatgtagcgcggtcggtgggtaaggacctttagctttttcctcttcggcgcaggctcgcttggagtagccaaagcagcagtcttcctagaagttgtaccctttcttttctgcccccgcggtgggtagtggtaatcagggtacacaaatccaatagcatcaaaaactctatttagccttttcttttttcggctcccgaag

SEQ ID NO: 143616 - DNA, 393 bp, Zea Mays
gcaaaaaaaaggaaatttgacatcataattcatcatgcacccatatttcatcttccccatctccgatttgttccgcttccatacaatgatcaatgccctaaactagtctagatgggaaagtgcctagacaaggcacttaggtgccaagtgagctggtgagtaggaccacctttcaaaatagaggctgtaatgatggtatactggtctgtagcaaagtagtattatgtctgttgggtttgattatttacagtttgcaatttatcagcacacatgatgctagtaatagtagtattctggtaatatggaattatttcatctgtttcagtgaccgctgcactgtaccccattaatttatgcatgttcccttatgaaggacttatgttttaattcatg

SEQ ID NO: 143617 - DNA, 322 bp, Zea Mays
gtcgatggcggtatgcagcttcggcatggcaagcaacccttagccctagccaaggtaggtcagtcgagccgccccgtcctgttccgcggtccagacgttcgattccacttccaccgttccacgccacgttgaacataatgcccacatgttccattccattgcactcagccacccagtcgtggagccaccactctctctttcgctgaaagcatagtagcataccagtctcgccgagtgaccacaacgatccccgcacacggcgagcgagtgggaaacctccctgcctatatttacacagtgtgggctgggctctcgtgtcttg

SEQ ID NO: 143618 - DNA, 394 bp, Zea Mays
tgaggagaagaagattgtggaccctgtcctagctgggttttacgaagcaatggaaaagacaaacatggaaaagattacaaatgaaatattagctaggttgtttgaggattctggtgatagcgatgactttgatgtggaaagcgagaatgaagatgccgaagatcggccctggtggccaagccataccatcttcggaaagtcgtccatcaaacagagtcagattgatgccatgaagggaagatactttcgtgacatgtctattgtgagggttgggggagacagtgccgcccctacacatgaggaaaatgaagttgttgtttacagaagcttcatgaaggcaggacttcgattcccgttgagcaaatttttggttgaagttttgaatacatttgag

SEQ ID NO: 143619 - DNA, 753 bp, Zea Mays
gttgaattgttttttttcttgagagcgagggattatttggtactacaacatttcaaaacgaaactgtttcagataagataatgacatgacatggattgtactcatcagaatttgtacttttgtcagggaggtaccatgatgggctcacttgtttaatagtacgaaatgcatgggcatggtcttgtcaagaacaaaggaatcagatctgtgcctaattctgttaaaccagtacagtgctagctgagcagtagcttcagatttcagaagtaaataccagggcagcttatttggatttgcaaagaagcaagcagggaagcacctgctggtttgcactccagcagcagcgcaggacagacttcacgaaggcaagtgaaaagaaggaaaggccctcccccctggaccaggggtaggcaccacaagaatgaatatactgtggaaagggcgttctttatcagttaccatgaccagtcaccaccagtccagcactggtaagaaaacaagaagccaagaggatgtgccaggcagtgcgacacgcccgaataatcggtcatcacagcagccaaaggcactgtcagcttgcacacacagtgaaaagatcacccactaaacaagtggagatgagcccacaagcacaaaagtttgcgagcatgcaccaatcaccagatgtaggactccaagcaggatacaacccaaactctcatggccattgcagcaactgagaatccaggagcaattcagcatagcaaatgcaca

SEQ ID NO: 143620 - DNA, 1040 bp, Zea Mays
ctataccggccggagggggcaaagaccgacgctaatctttagtttacaccagattctacctctaaggagtatttcccctcactcaatttggctaacgatcaactaagggactctggccacggtggccgtgaaccttacgacaatgccgtcgtgttcccggcgactagagggtctctaactaaattaaatgggttgtcgagcatcaccgagctatgagaagacttaaacaatggagaaaaggagatgagctgaccgggagggggctggccgcggtgaggtcgagtttcgggtggcggagaatgaaattggggcgaatccaaaattcacgagttctagcgaaggactgctagcgattagcggtggctgggtggatgatgaggttacgcggctaggggagggctcaatttataggcagcttcgacggtggccgggaattttaacggcgacgtgtggcggtcggagataagtaaaaaccgtggcgtggtgattgcgtgtccagtgtcgtggcaattgctccggcgatcaacggagagcttaggagaggtcacggcgatgcggtggcgaggttgggacacgcggcgggcacagagatggcacaacggcggcgagcggctttatctacggcggtgagcaaagggaggaggatcgcggccgaccggggtggcctccagctcgacggcgacgacgttctttctaccccgcagcgttatccggttaccagtgaacgttaatcttaacacggcggcgcgaatccttgcgcgggggagggtcaccggcggcgatcacgcgatgctggcatcctgatccattttgactactgtaccatcagaactcccataagagcacctgacagtccatatttggggtcgattttctccaatttttatgtggcgactaagccaaccttctgtaacaaagttgtaaagctatagttaatcttcaactttgccacaatgcttaccatcaaatagtcactgaattccattcaaaatcgagctcaaagttcatctcatcacactgctactgaaagttcagtccag

SEQ ID NO: 143621 - DNA, 1167 bp, Zea Mays
tgtgaaacgcttaccactctcaggcaaggctaagataggagcattcaccaacttgttcttcaatgcctgataactgacctcgcaatcgttggaccagacgaaaagaacacccttctccaagagtctagtcaatggcttagtaatgctggaaaaatttggcacgaaacgccgataatatccggcaagccccaagaaacttcggatttctgagacactagagggtctcttccactccacacaacattggcattcttggggtcaaccataatgccatgctgattaatcacatgacccaagaaagcaacttcagacaaccaaaaggcacacttcttcaatttgccatagaattgattcttcctaagagcacccagaacgagacagagatgtcgctcatgctcttcctccattttcgagtaaatcagaatatcatccagaaacaccaccacaaagtcatccaagaactcatgtaacatcctattcattgcttccataaaagcagcagaggcattagttaagccaaaagacatgacgataaactcgaaatgcccatacctggtgctaaaaggtgtcttctcaatatccccctcgcgaatcctcaactgatgatacccagagttcaaatcaattttagagaacacctgggcacccctcaattgctcaaagataacatcaatacgaggtagcggatatttattcttgattgacacttgatttaaagcacgataatccacacatagcctcttgcttttatccttcttctcaacaaacaatactgggaaagcccatggtgacctgataggcctaatgaaacccttagccagtagatcatccaatttccgcttcaattcaacctgctcctttggagccatccgatatggggccttatgaatcggatgcgtacccgaaatcagcttgatttcaaaagccgcatcgcgctccgatggaatgcccggtagttccactggaaacacgtcggcataatcacacaccacacggatgtcctacacccgcaaggcagcctcactctccaccaccatggagtaagagattcccgacttctttgaccgacgatccggaagtaattgggacaacaatgagagagtgagctttggagaacttcccaagattaccacctccctacctgacggcgcctgcaataacactgtc

SEQ ID NO: 143622 - DNA, 575 bp, Zea Mays
catcatcatgatccatctagatgcaaaggaacagagccaagtatcacataaaagctcaccagtagtaacatggtgcagtactagatcataggcatggcaacaaaataagctcagatctagggaccaaatcataggcatggcaacaataagctcagattaattgctataaaatcacaggcatgacaacttaagctcagatctagtgctaatcaatcatagacacggcaacatataagctcagatcattcaagaaatgaagggggggaaggggaggggaaggaatgtcgtctgttataccgaacagcaacaggaagaaggacgaagcgccgagaggaagcagctacaaggcgtgaggaagcagcaatccggatgccctgtcaagaaatcgaaagggggttagaaaccctaggtcgtgaaatagaacaaaaaacaaagctccaaacctacaaagcacgaatccaccacgaatctgaaaagagaagaagaaatagggggaggatgggaggaactcggcaccaatcaccggcggcgatagcagagcagtgcggtggagaaaggggagggaggtgaagcag

SEQ ID NO: 143623 - DNA, 484 bp, Zea Mays
cgaacacaagtagatcgacagtccatggtcgttcttcttccttcgccgaccggacaccgccagctggactccttgcggcggcgcagccaccggcgtaaggcgaatccacgaaagaacgacaccaatctcaaagccctatttcccaaacgatgcggagcccccgtcgagcatgataagggtacccacatgggcccccgtgcagggacacgccccagccacggcgaggagggttgaggggaacaaattctacttccgccgagcgattggtaagctaccagagccctacacgatccccgcacgatcgcaatagaagagaagcacaggacaaagcaagggggagttatctcaccaagtgtagaggcgtaatttgcgcaaggcacgacgggcgacggaatgtaccccggaactccgatgaggaattgggtaaccgcaggccggtcggtgttgaggaaatccactccgacgcgacccccggtgacacgcg

SEQ ID NO: 143624 - DNA, 676 bp, Zea Mays
agctactaaacagtgtacaattgctatggactaaacatgttttgagtgaatagctgtctgcaaagcaacatctaccgcgtctccgacgaaggcgttgtgttggtctctcatcgttgtgtgtttagttatctgttattagtctgttttgtgctagtaacaagcatccccacttttgggtatgactaaacatgcaaacttagtgcacagttattttagtttgagctcttgatgatggtgatgaatagattcaatttctgctaggtgtcctgcttagttgtaatcaaatgtgttgattttgtctaagacttgggggttaggaaaattgagctccaaagtcatacaatgtagacttttcacatatgaattggatcatctaattcggaggctatcttctgtgccaatttgattcattgatgctgaaagtattaggattgatgcaaaaactaaaggtgtactcaacaggttgacatccaagtagcactcacattcttgatttctctcttagggcacccgtatcccgtagtgcttgtttgaaccaaaccaaactgcgctgaagggccccttcatgtagtagagatttggttacaggttcaatgcctctagaagtctatagtcgtgtgtagttcatgaaaatatatgttgactgctggtagtgtaagatggaattggagaataa

SEQ ID NO: 143625 - DNA, 939 bp, Zea Mays
ccattttattcattacatcagtgcattacaagcatatggttacgacaagttgtactacacgagagcgttccctgaggtactaccgaactctttctctaaagtatccccaaactccttgagaagatcatcaaggcttgctagggatatatcctcggcgtcggaccaatcatctaccctggggggaggtggggctggaggggtcttcttcttcttcttctccatttggcaccctcggttggtggtcttcttctggattttcttcttgggagcgagcttctttagcttcttgtcatagtccatctttagggttcgataggcttcacgggtgttggcctcctcgccttccgctatgtcgagacactcttggagggatgccttctcttgcttaagctctctgacttgccgctccaggctttccacccgggagtttaggtgggcgcagtgggaggagagatcatgggcgtcgagggtgtggaggtacccgaccatgtagacaatggtggggtcatcctcggtggggtctctccctaacagagcctgaagtcttttcctccaggtgggggtatttttgttgctgggtgggaaataacgaaggggttcttagagatctcttggctgtagttttggcatagctgtttaagggcttttcgggcaacactttggcaagtatctgggaagcggtgcccggtgaagttgacttggaagggagggtggtttgggtagcttcggctttctcctaggtagactgccatagagcacttttctactccattttcgtggtattccttccagacatattcgggcttcttgcggatccccatgcgtagcgtgcaactccgtaagaggtgagggaatccttcttcccctgagcaataggatgtcctaataacccaggagtcttccatctggtagaagaaaagaagggtctgttaatatcgg

SEQ ID NO: 143626 - DNA, 317 bp, Zea Mays
ggacaggggtttacatcgaccgatccgttagaggagatcgacataggagatggcaaaactccaaggccgacttttgtgaacaagaccctggagaccgatcctagaaatgaaatgatcggtctattgaaataatattcggattgctttgcttggagctacactgagatggcgggattaagccgtgagatcgtagagcatcggctacccattaagtttggtttcagacctttcaagcagaaagctagaacatttcatccagaccttctcccgcgaatcaaggacgaaattcaccggctactagaagctaattttattag

SEQ ID NO: 143627 - DNA, 952 bp, Zea Mays
tgtctaaaccttggttgatctgtacctaaaatgtgctgaactggagatcggttctatcttatttgttgctacaggcactaatatattgagcttcacggttcttttgactttccagtgaaattgataatttgttagttgaaatgcccttgactccttgcaaatgccctttacatcctactggcatgccagagttactggttaactgttcgagtgtaaaagcgcaggatggatcataagtataacttttgttgaagaaacgacatctaagaccaaagggaaaaactgaccataaacccacacacatctagatgtcactcttctaaaggatgcaaacccaccttaactgctctatacgcacgtggcacccaagtatcgaaacaaagtaacaaactgtgtgaaccaaagatgcagtatgcatagcctgtccctcacaaatccaggtatctggaacccatcccaacacagacacacgcaccaaagagtaagaatccaccaaccacacatggattctataccggatgaccgacggtaacacagttgttgcaaagaacaaacaccctaacgcagcaagcaccaacggagccgaccctaatgcagatgcagacgacatgagggggtctagcagagcaaacgtggacttacggagtcacagacaatgtctacggggtggcgggcagcaggagcagaccacacgctcccatgacgacggtgggtgcccaaaccaaagtggcgaacaacgacaaagacgggctggagaagctatcggttctaggacctaataaggcgaacatgaattgaggagagagggaagaaaatattaaaagggaggaaagtactcaccgtcgtgcagcacagagcgcggtgttgtttcagccatgcctgtcactggtgaggcatgggagcgagggagatgactactggtatggcgacgacagctacacggacacctgct

SEQ ID NO: 143628 - DNA, 381 bp, Zea Mays
gaggaaccagatgacaaaaatgcagcggaacgaattgcaaggtagtcagctcattatactctcatcggggaaacactatacagaaggggcgcatcaggagtcctcatgaaatgcattctctcagccaccggaaagcaactgctagaagaggttcatgctgggcaatgcgggatacacgcagcatccaggaccctggttgggaaggtcttcaggtcgggtttctactggccaacagcgaagagtgatgcagtcgagttagtctagaggtgctaagcctgccagtacttgtcaaaacagcaacatctaccagcgcagcaactgcaaaccatacccataacttggccgttcgcatgctggggattggatatgattggacctttc

SEQ ID NO: 143629 - DNA, 531 bp, Zea Mays
cacagggtgataaacaatattattacaaaattataggaactgaaatggatcaatttagagttcatataatttttctatgaattatacaagttttacaattatttttatacacaaaatcaatttctaaatctattttcctgttttatttaatacctggacggcgcctcaaatactgggaagcacaggggctaatctactaaaattcccgagactcaggtttctgtatactggacggcgggttattttccataaaacgcaggggctctttaagaaaagtgcacggcgaaggggtaagatttattgtgagccgttggattagacactaagggcccagatgaaatcctcactttaccgaaccggtatgctacctaggccgttggatccatgatcgatgattcagatttaattatcccctgatccaggcccaactgtacgatgcgagataaacggctaggatcaaaacaaggtgaaacggtatcgccaatctaatccggactgtcgatcgctcatccaacggccgagagcctttcc

SEQ ID NO: 143630 - DNA, 334 bp, Zea Mays
gaccgttcatgctcccgtagagagcatcgccaggtagtgcaccctagtgtttggctccaaatcgaagtcaacacactttttggtgactacgctgggacaagggcatttagattgcccaaccatcgaccccaatgtccggtgccaaggatcatgccgaagtctctaccagcaacatcattaagccgaccctagaggaactatcagatgacgatcaacaacgttttgaggacatcatgaagcaagatgaagaggaagtgttgcgacaaatcaacaaacgacacgagaaggcaaaagagaagtacatgtcacatttcacaagggatagccaacaaaa

SEQ ID NO: 143631 - DNA, 443 bp, Zea Mays
atagtatatatcgtttggcgtaaaatgttgagtcattgtgcgtaaatagtgtattagggatattagttttacattgacatcgctataatatcgggacggtttcagaagtaatgggaataccctggaaacgtggatgttgttacttgtatagtatccgtgatttcctttcatccgaaaaaacaccacaaaagcctgcataactatttggaggtggagatggccggctctggagagtcgccggcgatggtaggagatggcgttcgtcttgatccagagacagagggaggagttgatggtaacttactggtcacaccacctcctgctctactgggacctataatcgatgaaatgagcataggggaagatggagaacaaagggttcaacctcctatgtcaaatattagctccagggagatggatacgcctcaaatactacattcaca

SEQ ID NO: 143632 - DNA, 360 bp, Zea Mays
ttcatctgtgccattgaacactaaggcccctttcggatacttcagttctcgggcatagtgtttagcttcaaaaatctcttctttagataacctttttcccgaagtgtgtcgtacaatataatcaagtactttagaagatgcttcaggagtaggagtggcagttttttaggcagaatttgttctgcagcttctttttccgtttccttttctccggtttccaaggatttctccttggcgggctctgaaggcccagcttcggtctcggcctggctctttgcagcttcggcttcggttagttttgtctcagtctgtgcttttgaagcttcgacagttttccctagagtagagcttgaagtcttt

SEQ ID NO: 143633 - DNA, 429 bp, Zea Mays
cgctggtcgaggaggtatttgaggctatagtggtccgtcttgacgacgaatcaccgccccccagaggtacgaccgccagtgccggaccgcctggactaggccgatgagctcgcgctcgtaggctgccaacgcctggtgacgaggagcgatgggacggctgaagaatgccaccgggtgtccctcttgggtgagcacggcgccaaacccgtgtgacgacgcgtcacactcaaccacaaaggtctttgtgaagtccggcaaggtgaggactggtgccgaggtgacggtggccttgagggcgccaaaagccgccgctgccttgtcatcccaggcgaagccgtctttcttgaggagggtcgtgagcggtgcggcgaccgtgccgtagttgggcacaaacttgcggtagtagcccgccaggccaagaaacccgcg

SEQ ID NO: 143634 - DNA, 596 bp, Zea Mays
aaccctcctaaaagaaaaattgccaataaggcagccgatccaaaagtattagcaatagtcatgtctcttgctatagcccccatcatccggaaaaggcccaaagccatttgatggagagagaacaacaatagcataaagcgaaagaacctgtacatatatagtttgcattattatgccatgtccaagtacaacatcagtaatgactctacatctatatgagccgctagtaaggtattttttaatgaaaacagcagaggtactgtgctatattgttggtacctatcagcagttggttcaaagcctactgtgtagtaaacaacacatgaccacactagagcctcaataagagaatatggaattcttaatatccagttggggattgagaaagcccatgcaggatgaaagaaattgtctctctgcttataaaacactggaagccgtgaaatagtaatgggcaattctgtaaaaccattgaacatcatatgtacaagcccatagaacagacaagagagataaagatcgccattttgctcatcgacagggtgcaatcttgtgcggagaaagattgtgcaggtgattatcccaacaaaagcaac

SEQ ID NO: 143635 - DNA, 489 bp, Zea Mays
ctcggtatgataattgatccatgaaggagactatgcgggaggaagcagggttgctcttgagtagtaggatttttgccaagtgtataatgcttccatctgatggggcggtaaggaccatagtaccagaccttgttgggcatctattagtgggagttttgctcgtatccctcctctggcgtgagagtggatgtgacaagacttgtgatcgcttgttggtagatcgaagtggtattattgattttgagagtgaatccgactaggcttagaccgcaattatccaatggcctaaaaccccactcaaaagaattggttgtgttcaagttggactcatacttgtagttagaccgagcttggacgatagttatttgatgtcacaatgactagcttggaaaactttgccgtgtctacgctggacttgtaaaagaaatttcatcgaaattccgttaagtccttttaccatgtctcaacaatttgtcaatgaagtttggg

SEQ ID NO: 143636 - DNA, 445 bp, Zea Mays
aggcatttcaatgcaaaaacaaaggctccagcatttccagtatcagcaacagttagaatcaaatattataggaagcacaattttgttcgattttttttcataataggtcagaaattcccaataagtagtaacgtgtatgctgtgtgatacgtatccaccctgttgctagtaatgtgctggaaaacatatgaggatcaccatcaaaacatccaactcttgcacaattaatacaggagctttgccattgcttgtgttaagatcaactacaactacccccttgaagcatatgaaatatcaatggaccataagctacacgtgtttggactaagaagttgagctcagccatcatcaacattaacagccagatcgatcggcaaaggtggcattatatatctccccaaaccccccgatcatctattctgatgaccattggattaagcttcgc

SEQ ID NO: 143637 - DNA, 389 bp, Zea Mays
gagatggaggctgggcgaaatcaagggaggagagggactgggagtggctgcagaggcacacagaagaagagcgccgagagggagagaccatggcggggaaggccgacgacaatggaggacgaggaatggagggagggcgccgtgaaggagatgagacgatgagtgctatggaggagggctcgaccggctgggcgatgctggctaccaggactggagggcacgtcgcatatttgggaacaacggctggcaagcaaaatgcgtagagaagaatggatcaaatgcacatttctggaaaaggatgcgtacttgagaaatcctgagtaagcactgggagcttcgggaagcatgtgtcaccactcacacgcacaaagaaatgtgtgtgatttctc

SEQ ID NO: 143638 - DNA, 602 bp, Zea Mays
cggaatcaggagccagccagagtatgatggtcgtgaattcgtcgagcatggcacagagaagtgtgtcgtgactttatacattggatccagtccgcaccatgtggaatggagtgtcactgctggtgggcacagattcaaagacacctgccaagtcgtcgctcgcaaggcattgagggccctgtgtcagatctatgaagaagaagtggccgacaccccattcagattctttccgccctttcagagagaccgtcccgcttggatggccaggatgcgtgcattggaggaacagcagctgcttgaggacgaccccacagtcgtgtacctcactgcatacctgctcacccttgatacacagtatgatttcttggctcggcaccaccgtcagatgattgcccgagcagaagatgcagagaagcgcaaccgtcagctgcatgtggatctcaccacagctcaagcccgtgcaactgccttggagagtcgtgaagtcattgttgtggaagccctgaagcaagccaaggatgagcacgtccaaaagctgatggaggcctacttggtaacccataaccaacgtagagccctacggatccaagagcccgcctcat

SEQ ID NO: 143639 - DNA, 794 bp, Zea Mays
cgttttcggcgaatctggagctgctggagctgtcgcaaacaagtcatcaattaatgttatccatttaggattattatacttgttatggtgtttttctgctgaaacatgacttcttttgctcaaaagttatgtttgtaatgttggatcgattcacaagtgttttgacatacgagtttgagttgttgtgacacataataataatagcttgacatgtgggggtgttgtagattcttttgtgggaaggcattatgctaggcgccaaatttagtttgttaagaagtactaaaagttaggcaataattaaggaggcttatcctcccgggagagttattttatcccctagaaaatctgtaatatggttaggcacctaagctataaaggtggccttagattgtactaggagattatcaaagaagttgtgcctgtgggtgcggctgcttgatcaccctggcagaacctacgccatctggtgatcttagctcccagccgccacacaggataccctattccctgcgttcttctactcaatccaccttgatatcccacccttcgtggtgcactcctccccgccctgcgcatcgtagccgggttcacaacaatttggtatcagattccaaagctgcagcgacatccatgtccggcagcgacgaagatcctgggaagatgactgactccgagaagctggaccgtattttgggacagctggccacaatgaacaaccgcctggacgcccacgctcaacggctcgctctcctagaacaggaacctgttcagccgacaggatcaccgctagc

SEQ ID NO: 143640 - DNA, 430 bp, Zea Mays
atcaatccaaaaaacaacaaattagaagcgcaggggctccgttccatcatatttcggaaccaaacactacctaataattagtacgtttaattcttattatatcctacgacatgcttccggatgctgacaagaaccgcccccaactaattgacaccacaagtaccttgtagtttgttttgctcggtgcccggcccctacacttcccatagtcgtcaaaacctaactcgctgtacaaatggaaacacgcacagctacaactgcagtacgtctacaacacccacttccactaacctctgctgtcacacgaacaacaagcacctctacttctttccacgtcccacttgatgatgagctgatggaaaacacgacaacgtgctccgatccaagcagttcaggcccctgtccacgagaaccgaggcgctgttttgcc

SEQ ID NO: 143641 - DNA, 825 bp, Zea Mays
ctggaggacgcggtgtgaagctcggccacctgctcgccattgttgctcgccttcatggataacatcaagatcctgtcctggaatgtgcgcgggctgggggctcgtgccagacgcagtgttgttcgcacactcgtagacgacgtggttgccgacattgtgtgtatccaggagtcgaaactgagtaccgtcactcgtgacgttgtaatcgcaatgcttggtttgcgtttttcggattttgcctgcgtccccgtgaatggctccaggggcgggttgctcgtcgcggttcgtgggctagacatctccatcgccgacatgctggccggttcctactcggtttccgtcaagctctcgggccctaggattggggatccttggtggctatccacggtgtacggaccacaaggggtagccgagaaagagctgttcctggaggaggtcgccgtggcgcgtgacgcctgcgaagggccttgggtcgtcatgggtgacttcaatctcattcttgacgagactgacaagagcaacggcagggttaaccggcggctcatgcaggagttccggcattgcgtcagtgatttggagctccaggacttgcatttgcacggaaggttgttcacttggagcaatgagagggagtcccccacgctgattcgcctggatagggcattggtttcgctcgattgggatgagcgctttccagactccttcctccaagcgctctcctcagacacctcggatcactgcccgcttctgctccacacaagcagagatgttggtcgcgggggcaaaccgcggttccacttcgagagcttttggcccaaactcgac

SEQ ID NO: 143642 - DNA, 553 bp, Zea Mays
ggcagaggtcgctggccacggagaatggtgggtccacggtggagtgtgcacgacgacgagaaattccttccctgcagtcaacgaatcgcgcccgccgagggcaccacaagcaccggaatgccccaacgaaggccccgaccgccaaccgaggcgaaagcgacgaccaggtcgcgtattcacggtggcggcggcactctctcccctggtctctgattcttgtcggcggtggtctattgcgtgagtcagagtggttgcacacgggggaaagaaagcggtgcacgatcccttttgtaatcccgagcgagctgggtccgaatgtcgagttggagaggaaggtggggcgacggttgtaaccacgcgcggtgagtgcgtgcgattccatttccaactcgaagccgagaaggatggaggagctgacgaagatggcccgcgcggaagtggctagtgcgagggagaggctgtatcgtgggtcccacgcgtcggcgtcgtttacttgttctcatggactagcggaccctacgtgtcatactcagcgcgagcgcgtgagggcgcg

SEQ ID NO: 143643 - DNA, 603 bp, Zea Mays
gtaaatactgacctgaaaaggaagaattgcttcatgagaggcctcaacaaccggcttcaaagaaaaatggccacctgcatagatctcacatacagcagggctgttagcacagcactggcagtagaagctaagaatacaggccaaggaaaatcgaagggattcggaggtgacaggtccaatcaggggcctgaaaagcgatcaaggttggtaatccgacctttcaatcaaaaccgttcctcacctcgtccaccctcctacccatttaaacagcctgtcttcattcgccctgccactgcccccacttcaacaaatcagttgagtgcccttggtgctcgtttccccaccctccctagttcctcaactggctgcttcaattgtgggaagtctggacattttatcaaagactacccatattcgaggcagaacaaatccaacaatcagcagaactcagggagctcaaatcaaggcaagggaaacatggcaaataattcagcgggcaagaatatcaagaagactgggcgaatatactacactcaagtggccactacaccggagggagagccggttatgatgggtacatttcttgtggccaatcacccagca

SEQ ID NO: 143644 - DNA, 462 bp, Zea Mays
attctatgcctaatatattcatcatttccaccatccttttgtagcattgatcctaaatagcgaaaagactccttcctagccaccacttccccatcgagggtaacatctccatcttcatgtctagttgccttaaaatgcacatcatgtacccagtcttggtcctactaagtctaaaacctttcaactccaatatgtgcttccacaactctaacttcctattaaccccttccctactctcaccaactaacaccaaatcatcagcaaagaacatataccaaaagatatcgccttgtatgtccattacgacctcatccattaccaaagcaaatcaataaagactcgatgctgatccttgatgtagtcctatttttattgaaaagtcgctagtgtcaccatcacatgttcggacaaatgtcattgcatccttgtatatatccttgatgagagtaatgtacttagttg

SEQ ID NO: 143645 - DNA, 489 bp, Zea Mays
gcttcccccacttcgttgagtgtttcagctagtggggcatagtatgtgccctctgccctgggtttctgctgctaagccgactactttgttatttaggaatggtgtcacccttggttatgcaagcgttagcgtgtcgcaccgacttaggtcgtaaccgaattaagtagatcgctccgttagtagggtatagtagtcaccctaagtcatgtaagagtgagtgtgttgcactgacttaggacatttctaacttaagcctattgctcctttagtagggtatagtaatcaccctaagtcatgtaagcatgagtgtgttgcaccgacttaggacgttttagacttaagtcgatcgctccgttagtagggtatagtaatcaccttaagtcatgtaagtgtgagcgtgttgcactgacttaggacgtttctgacttaagccgattgctccttgagagtttgtttgcgtgtggacgaacacagaagctttattgataa

SEQ ID NO: 143646 - DNA, 515 bp, Zea Mays
gttcgctagaaggtgaagatcatgaacgtgagggatttggagcacgggaggcctcggtgacatggcgatttctcgccggagctcttgctcctccgcaacacccctgtgcaccgtgggtagggatcaccacagcataatcacaggcaatgtcacctccatggcattcgcccttctctccacaccacgtagaacctctctgaagtccgattagagcacctaagcgctgggttgatgaacgccggtgaacctccgatgcggttcgggggaggcgccaccttggtcggctgggtggagaggaagcacgtgaatcgttgatcaggggatagagggataggattagaaccacacacagttttggctatgggagtgttgtgtctgttggatcggctgtgagcggataggattagatcgtgcctgttttaaaaccttaaccgtagaactcagatcggatggctatgggcgtgtaccagttcagtaatgtgtgggatttaatctggtccgttggtgaaagatcg

SEQ ID NO: 143647 - DNA, 1158 bp, Zea Mays
gtcagtgatatggacctctagagcagccaccagcagagggacgaaggcaggatttagggctttagatagccttagggttttgacagaggagaggagaggcagaacttaatgttcctgtagatgggcaaaaaacattggtctgtagcccaacacaaaagttcaagcaccaacgactagaatctggaaaagtagatgattaatcgccgttaacgttgactagtcagacgatctggacaaccatgttccctaatcgagtcgtcctgttaatcggctattaacaggcgaccaacccgactaatcacgattagtcgaacaacgacttgcaaccattggtggctaggatgattgtggccaagatagtgatttgattagtgagacttcaggaggggtgattgttggaggtatggttccaccagaaatgaggtaagtgataactacagagttattgagtactcatgaaagaagtggtgatggggatcataatgatccaattattaatagtcaagacgagacagaggatgatgaagctgtgattgttggtacaatcccgtgttctattgggggccgaggtgaatgagaagtagagggagcaatgacctatagtgtactatcgaagactagctaagaagcagggggagcaaccactacctgaacagccacaacctgaacaagttgaagctccagtaccatacctctcttcagactcctctccaacaccagttggtaatgttgttccccttctaaacatgtagaattacctcttgcacaaagaagagatcctagagtcaatgctagaaaacctccttctcgttatggttatgaacatgacattgctaagtatgtctcacactctagtgtctctcctgcatataacatttgttacatctctacaaacattgtctatttcgaaggattgtaggtgtgctaaacaggacccaaagtggaaggatgccatgaaagaacatctgctttcccttcaaaagaacaagacaagggaacttgttcaccttccagaaggaaagaaggcggtggagtgcaagtgggtctttacagtaaagtagagtcctgaaggaaaggttgacaggtacaaagcaagactggtggcgaagggatatagtcagacatatgggattgactatgatgagacctttgcacctg

SEQ ID NO: 143648 - DNA, 739 bp, Zea Mays
gggatgcagagtctgttatttcttttttatcttcggcaaaagacatacattcttgcataacacatacttgcatcatactttgcattcatacaagcatccaccatagacattatagcttcatcacatcatcgcatcatgcacaaaaactttgacaggatttacccagatgagaagtaaagtttataatgctttgtcatgtacaaaaagaagggaaggtgttttctgcctttcggctcaaaagaagagtttttggtttcgtctacaacaaagcaaatggatgcaataaaaggtaacattacaagttgtttccatatatttacaaattattacacatcttcatccctcattgagttcaatatttttacaaagacaacttctcaagcatctattcaggactacgccctaaactgcagcttcatcttcatcctcgttgtcatcatcaacttgcaaacaaccccatattagttcagcatacttcattaagcagtgctcttacttcgtcacccgcaacctctctccctcctttagtctagatttgagtaacacatctatttcctacgtttattgcttcagttgacatctcggtcaggtcggccgaagaaatgtcaaaggtgggtttattgacagactttaagtgagtacacccaaccttctcgaagacaacatcggttccttgtgacacaacaagagcgcaaaagtcaccttgcccttccatcacttcgttaaaagcatcgatttc

SEQ ID NO: 143649 - DNA, 289 bp, Zea Mays
cctttggcaagccgtgaccttcgacatgccgttgaagaaaacttcttcagggctaggggctgcactgcagccactggacgtcgatcaggacatgttgcacgaagctcgaactcaaaagaggaaggctacaagtccaacacccaggaggaggagctggaccaggagataagggatctcgaagctatccatcaacaggtcgaaaggaagagagagagaaaatgcttcatctttccgatctacagaagaagatcgatgaagctgcttaagaaatacgtcatcttactcaaga

SEQ ID NO: 143650 - DNA, 584 bp, Zea Mays
caggactaccctacaggctacagtccaccttcaagtcaagcaacatttagaggtaaaagggtggagtcaagaaagttttgttgtaagattcgctacactcaaactaacacatttgcatagatgacagcccaaaaatacatggtgaatctgaaaggagcagcaacatagccctgtcatgccattctagctctatataccttagcaaccagcggcaccggtgcccaacaaaaacgctcgtaggctgtagccgcagctgctgccgctggttgagtaggagaagaaacactgttcctgtgtactgcttcagctgataaaaaaaaggaggaatgtcgtagcaagcctcacactgatcaactgcaacttggagaccctaatagattgtttgtcgtagcaaacctctcatatcaatatatcaaacactttatacttctacattctacatggtatcatactagatttaggattagggtttccccaacccacaacaggcgccacccacccccatagccagccactgtcttcctagctgctacccccgggagactcaaccctccctcctgggggcagggggcagcttcccttcc

SEQ ID NO: 143651 - DNA, 372 bp, Zea Mays
ataagtgcagcatttaggagcaaccctttgtttgtcgacgcataaaagacgtttatgaaccaaatcgataaaagcattggtgcataggggaaggcagcatatagcaggcgcaccacacgaatgaattgttgttataggaagtggtatggcaccgaacaatctcatgtaaggacacaacgatgcagaaattgagtacaagacaaggcaagagccaattacctcttcagataaacccgagatatgtaatattgtagcacgtactgcaatccgaaaacgaagaggatggctggtgtaataaacatttcaaaacacaatgttaatcctcttgttattctgttgcatgtcatcaagcaacgcaacacaatgcaagac

SEQ ID NO: 143652 - DNA, 604 bp, Zea Mays
cagagtcgttggattataatccgagggcccggattagatcttcatcacttattaagcggtatgacacgctaaccgtaggatcaacgatcgaccgtccagatttttaaacactaagccccattcacatccgtccgatccgagatccacgtacacgatgtgatttcctcgaagcagtcccagggatctaatcccgaccgatcagaccgagattgatggctcggatacactccggacgaccaggtacgctcaccaaatcccggtcgctagcttctcatccatcggccaaccaacgccccgcgtgtttcttctccctttcagccaggaacggtggcggcgccagataccgagcggtggcgaacccgccggagctcggctccgagccaacccgacagccccgcccaaaccgaagtccctacacgcactgaggatgacaagttgagcatgcaggtagccgacttacctgccattgaagcagtggagggagcctgaccaacgtccagcggcatcgctgtccaacccagcgacgaagcgacggagggctcactgtgaagctattaacaagctctggagattccccgatgccacgaagagatgccataggcac

SEQ ID NO: 143653 - DNA, 712 bp, Zea Mays
acgggatgaaccgaacaagaccttaaacggattagagacctggaattctggattaattagcaggtggtatttcaacttttgaagcgacacgtttcatggcgttatcctgattaggagacatgggaatgagatcgtctgtctcatctctgagctctgactggatctaagtttgccaggagaaggagaagcagcagaggtagaatgtagatccttgcaagcctagctctgacgtctatcaaagctcagcagatgtgtagcgtatcccagtgatttgataacacgactccaacaacggagtcgcacgttccggagggggcttcgtctcggttctaattgctctggttccatgacttttacagcacacaataatgtatagggcatttgacggtccagaggagctaactttagagtgtgtttggttccacacaactaagttcaatttacatcaaatgtttaaatagtaattatgaacattaagtagtttaattataaaactaattacaaacactaaaagacgattcgagtttattaaatctaattaaacatatatataataggcgtaattgatatccaaatatttgatacgagttcagtaaaaccaaacaccctctacgtgattcttcgatgcccggcacctgacgagagaccatttaccacttctggcgcattctcgtacctgactgctgccgcggcggtgcaccgattttttttt

SEQ ID NO: 143654 - DNA, 633 bp, Zea Mays
ttagagttgtggagaatggcccttaacgggaaggtggtcaccaccatgaccctgtgtgcctgaaaatagttgcgcaacttcctagatgcaacaagtatagcatagataagcttgtgcgtctcaaggtacctggtcttcgcctcatggaggactttgctgacgtagtagactggcttctggatggtttggacccctgcggttggtcctgagccctcaaactcttgaccttccatcaccatcgtggtggtcggaccaccaccttcttctagggtaactttctgacttccctggggatgttgtgctgtcctttcgacgaccagaaccatgctcaccacctgtgtagccgctgcaatgtataagtacaacggctcccctggctctggagctacaagtattggtagggacacaaggtgctgtttcaactcttgaaaggctcgttctgcttcctcagtccaagagaatgggctagacttccgtaatagcttgaagaaaggtagcgccctctcagcaagtcttgagatgaagcggctaagggcggccaaggaccccgtaagcttctggacgtccttgattcgggccggaggcctcattgtctcaattgctttgatcttctctgggtttgcttcaatgccc

SEQ ID NO: 143655 - DNA, 712 bp, Zea Mays
aacctacgcaaacggccctatgtgagccgcctacgccacatcacacgttttacacaaaggaccttgcaactttgaataatcgagtatgaacacacaccctattcttatgtctcactgacaactcatatcgagaccctgcgccttttcttcttcgcaaactcagggccccgatggaagcatcgatcgaacacctagctaggatgacccaaacacccggccggtgaccttccccagggagaatatgctccccatcaccaccccaaagcaagacagtctgacctagcccataacctggacaactactaccctggacctaccctgcccacgactacgatggagatcaaggtctggtgagctctattcctgacgacaaagtatggtagagcttgatccctatgcacaacaagctttggtgagacacaagaatctaagaacaatgggggagaggacccaaggaacatccgaaagggactgaccatggtgaggaggcttgctgtggtgaacttcgatgtcttggctggcgttcacgagcaacaacgacggtagagctcaaacgaacaacgaagtgagcaaaggagagatataaaggagctagaaaaagtgataaccaaggagaacaccggccaattaatccgagctagccacagtgaggtcatccacaggggggagttaataggacccgagttcatggctttattggagcaagcatgga

SEQ ID NO: 143656 - DNA, 471 bp, Zea Mays
ctcacacctaacctgactgagccatcacatcggggccctccgaaaccagagagtccctgatcatcccactcaagtggtgataagggtgataacccttcatcatacacattttgaaaaacatttctctcttgaaaccattaccatatcccacattttttgaagcaaaaaggtattctttaatgcaggctatcactcgactcacaatgcataaaaaaccatcccatatcccagcttaggtagtggtagaaagaataggtaatttatgcatcaagggtagaatgaacttgcctttgttgaagctctcttggcacgacagttctatttcttggaggtcgggctccttcccttcttccggagctatgggttccggaaagtcggacccctcttcgtcttgcaaaaataggcaataaacaatacatcaaacattgcttgctaagtaaggtgtgtcaagttcctagtcatcattttttg

SEQ ID NO: 143657 - DNA, 368 bp, Zea Mays
ggataacaaacatgggccaacatgtgtatggggcaacgttcattctatagggattgaacccatatgtggccagcacaacacgtacattacgagcctcttcggctttctcacggtgaatggcatcaaagtgtttccatgcttcaccatcggatgtgtgcaccatcttgtcaggattgtattgttttccatttgtgtgccgtatcatctgtttcgtggattcatcggtcatgtataggcactggatcctcggtatgagcggaaggtggcataggattgacacggggatgtcgagctgcctcttctgtccatcaccagattctacctccatgaacctacacgatttacacttcagacagtactttgcctcc

SEQ ID NO: 143658 - DNA, 551 bp, Zea Mays
acttggtggtgcttgctgaagctgaatgctgctgacctgcatacatggggtgttgatgtcttggcgtgctctggtgtttgtgtgcgagagggagagggagggaccgagcacgtagtccaagcatccatcccaaggacaacaaaccccatatgtcccattgggtaaaatggggtagggtatggtagggtggttgacaagctaggatcggagcggaggggagaagaaaaaggtggctttcttcttgatcatcgcaggacactattggaatagacacgtacgtagcctagctttgcaactgaaaccactactcttgctcctcctcgtttttcacttgtggtagcagtgatagttcctctctagatccggttggcgtcgaagcccagacacgtgtccgggcatgccgggtggtggctctgccactggttgaatgagattagatttttttcatcatcgtttgcgcgcgctgttggagaaaagaagggaaaaaacctctctatactttttggttgtttcaaaaacaactctttggggagactttttaaagggagctt

SEQ ID NO: 143659 - DNA, 922 bp, Zea Mays
ctccattttcctattgcttaatcaatcgccttcgcatcattggctcctccctcccgcctgttggttgcagcaccagcagcggtgacagagaattcttttcggcgcatattccccggttacatgattcggctcgcttgcttgggctctcgctcttctctgcttttctagaattgtggctcgtccgacctcggtgggtgcaaccgatcctttttcgttcccatgggtgctgttatgaccccaatgattggctggtctcctctcgattatatgctgcttgtgctagagctcagggttttcctgatccttgagggctgtgcgggcatacctggtctctccgaattgtccagttttttggtgtctgtccgccgggttcttgagctggcttggggatctgtagctttgagagcttcatcggggaattcctgcggcttgggggggttcttgcggttgtgttgagtggcctttcttgtggaagtgcaggtattgagctcaggctgctgaattcatggtcctcatttacctcaaaattcttgaacctttttaattaaaattcttgattttttatgtgggtgctcggggaaaccatccccacttctcaacctgggctcataattcttgcttaatttcttgaattcagcgtttcttggtggtgcttgattattgccgtctgatattgcacagtcctgagtttctagttgcttcgtcagcaaccggtagaggtgtcttttttgcgggatgatagaattgagcttgattgcggtggagcccttttggatttgcagccgattcttgaatcttttcttttctctctctccttggatgcctgcatgaaagccatgctcttaaagcacggttccttttcttttcttcctatcagtttactcatttcttttctggaggtggctcttgtgttggattactc

SEQ ID NO: 143660 - DNA, 475 bp, Zea Mays
gatatgctcgccggcgacagccgcctcccggccttgtgccgcgtggctcagcccctccaccgcatcgccgtgaacccttgtgcctcttcgtggctcgtcggagtaactgccacggtagatgccacgaattcacgtgcgccagtatcttctccacctccggccgccgcgcgtccatcgtaaaattcctggccaccgcttgcgacgcctataaattgagccctcccttagctgcgttagattatcgcgaacccagacacgaagaatcgttagctatcatcccccagtgagccccaatttccaatttcccccaattcaagcttccgccaccgtgaaacgagcttcaccgtcgccagccctttcccggttagcccccgtcccctgcttcctcgtttaagctttctcacatacctacgatgcttgctaacccaccaatttgaactgcgagctcaccaatcactgggaacacgatcaactg

SEQ ID NO: 143661 - DNA, 628 bp, Zea Mays
gaaaaaatgctgtaaaagatcacttcaaagacaaattcatctttagaaggtttttcaccatctgcgcgatagatcgtctaacaactgtatgcaccaagaaggatttgtatttctatggagtatagttagcaattaaatcattctagaatgaatcgaaacacccccttcataatcggaactaaatgactaataaacttaaaagtacggaggatatgtgatgaatgatggcagttagcattttgatacttttaataggagcataaagtgctcgtttttgtatttgcaaaagggatttaaatgaaaataatgaatcgatgcacctcttgtaagttggtacattagcatgatgatctactgcatttattggatgctacggaagtcattgttaacatggactacccggttgtgcgatgttcatgtgatatccttttttttatattttgctttgcttttaagcaagacactatgtgaacttcatatatacttcagtgatctttgtcaggtgctttcaaggaagcaggctgaaatatgcataaagtcgtactcaaactgtgcagatggagcttttgcttttctttgttgagatcatattgtcagaagactctcttttgtcagtatgacatactaa

SEQ ID NO: 143662 - DNA, 480 bp, Zea Mays
cggtccatacacagaagggatggtgttgtccccttttactgttgggactacactggggagaggatggatgggcaggcatcgcccgattgttaagacctacaaaaaatccacagaaaaggtgaggaaggcgccagcgacgaccaccacgagcaagaaccagtgtagaagaccttacctgacttgtgggcgacgacggcatcccatcccagtgggtcaccttcgggcatcggtgtccctctccacgtggtggctgtcgtcaccgtcagccgcctctgcctgtgcagcggtaaaaatcatcgtcacggcgagcagagcgtcgtgcacccggaccgcagcttcctcacccgccatcgtctccaccttctgcctcggcttccacgtccgccacatcattgccgcggggcacaaggttgagttggtgcgccagaccgagaccgctgccatgaagcccacagtcggggccacgagaggcgccccatt

SEQ ID NO: 143663 - DNA, 527 bp, Zea Mays
tggagttaaaaactcgcaagcgacaaggaagagaatacgaccaagggaaaataggtaaaatacaactataaaattgagatggaagagagaaggttttaaaggacgggtataatataaaaatcaagttaagatatagaggcgacaagggtaaagatgatgatcgtgaaatcataaccaaggatagagttaaggcaagactctcgaagtggcaaagttgataagacaatcaagggtgagataggtaaggtcccaacataatggttgaagtaacagaaattattaccgagggaagttatgaggaaacggtgagatcaccaaggatgtgcgaaatagaatggtcgctcatggaccatcaagaagcaagggtgatcaagggcatattaactgaaaggttttgaacagtcattgggatatgaaggtaagaatatataaaaatattagtatgcaagattccagtagtacgagtgtaccaagaccaagggaatagaataggctaaaaaataacggcttcacaacggaataggaag

SEQ ID NO: 143664 - DNA, 493 bp, Zea Mays
ctctaagaaaaatcttctctcctttccccaagattaacagacccttcttttcttctaccagatggaaggctccttggtcattaggacatcctactactcagaggtggaaggattccctcatcttttgtggagttgcgctcttcgcatggggatccgcaagaagccggagtatgtctgaaaagaataccacgagaatggaactgagaagtgctccatggtagtctacctaggagaaagacgaaactacccgaaccaccctcccttccaagtcaccttcactagacatcgcttcccagacacttgccaaaatgttgcccgaaaagccctccgacagctatgccaaaactacagcagggaggtctttgagaccctcattcgatactttccacctagcaacaaaaatacccctacctggaggaaaagacttcagaccctgtcaggaagagatcctactgaggatgaccccaccatcgtatacatggccggatatctc

SEQ ID NO: 143665 - DNA, 735 bp, Zea Mays
ctgactggtcgacttaggataaggcaactgatgggccttagcacgaaggcaggcatcacaaacatactccgaggaatctaagcctgaacacactaaattattatttctaatgacacgagcgacaatatcacgcgatggatgacctaatctgcaatgccaacgctcataggatggctttattgcggcaaggtcgtgcttctgggtaggtgtgcaagagatgtcaatgggtagaggccacccctacatggtccgcgcaccagcacttgcctcgtggcctgatccttaatcaagaaaaagaacggatggaactcaataaaggtgttattatcaagattgaaacgatgaatggaaacaagatttttatgggtatgagggacacgaaggacatgatttaggtgcagagggcggaaggaagtgggcaaaacagaataaccaatgtgagtaatctccatacctgcaccattagccgcccgaatctgatcattgccattgtaacgatcatgctgttagcttttccagctcgtcggtgatgtgatcagtcacaccgaagtcaaggtaccagtttggatcagcagcagtggaggatgatgccatggccgcaacccgatcatcaggagtgaattcttcataaaagcggtaccaacagatattagctctgtgaccgactttaaggtagacctagcagcgtggacaagactggccaccggattgatctgtcggtggaccggaactgcg

SEQ ID NO: 143666 - DNA, 474 bp, Zea Mays
ggaggaggtggagcagactgaactagaggaactgagacaccagactgctgtagcataagagccatgaatgccctgctctcagcccgatcctgaagtagctgctgctgaagcgcatcctgcctatcctgcatgttctgaaacattgagagcatctactcagataaccgggcctgctcgactgccaggtgagccagaatcgaagcaagagcagggtccatagccggaggggcagcaggggcagcactagaactcctagcctcatgatcatgtgagcgtggaggcataggaggcagaggaggaaccccaaaatcatcatcatcatcatcatcagctgctgtatcctgagtgtcgaactgatgaagagctgcatcctcggcctgagagtcaaaaacaggagcagaagctggcacaggagtctcaggcgcaggacggtaggatccaaaaacgaggcgtgaggcctcaagtgtgccctga

SEQ ID NO: 143667 - DNA, 576 bp, Zea Mays
gagacctttacactttaagggctcctttggatgatcaattctccacagggacaccttctcatccctaattatctcgggctaccttttggatgttgtgtgggccaaaattggcataagccttttcaccccttccctgttggtccacggggaaggaaaatactcctttgtccaagtgtttcttgttcccgtcacggctctatctctcatcttgcccgtctcactccgacagcagccatggtggctagggtttgcgctgccgacgccagccatcaccgctcactccatccgtagaaaacacgtcctcaccatccatagaaaacacctttccattccgagatctgctgctgccctccattcccacgtgtccacgctcctcgttgtccatctccatcgctgggaatcattcggttcgccctcttcatccatccgcagccaccttctctccggcagccaagaagaagaacagacactctatctgtgccataggaagcaacactggtctctccatacaccctgccaggaaacagccctcgcccctctccgatccatccgccaagaagcatcctcacataccca

SEQ ID NO: 143668 - DNA, 341 bp, Zea Mays
gttggccgcagccccagcaatgggcatcgacaagacctcgccgagactcctagctacctcgttatgtgacgccaaccacctcctcgctcaacacctgaacaatgagatgattatgtgcgtcggtgcagagacttgtgtagatggccgtagccccaggtttgctgccaacaacgacgatgagtttctaggtctcctccgcgccgagagtcgtcgcgtgcgctctgcctacacagccaccgataacgacaccgaccatcgacgtttccacgctggccctatttgcctgctgcagcatcccttccgcatcatcgccgccgagaagctccccggccttatcttct

SEQ ID NO: 143669 - DNA, 581 bp, Zea Mays
ttatcatggtgaatttcatctcgccggagtccccttcgtcggaccgtcacttcttcatagcgtccgaccactgcaacccctccccgagcccgaattcaggcctagagcatccctaccctctccctggaacctatgccggccacagagcgccagattaacccccaccgcagagggtattgctcaccggagcagccctgagttcactcgagagtcaccctccgccgtctgcccgcctcagccccgttcacgccatcctgacctcgccttagtgttcgccgagtccttcccaacctctctagcgacccagaccgacccatagcgccctaggagccctagtctacctcatctctagcagctgtgccgacgcgggcgcgtatggcaccacccctggccggccagagtaggtaaagccccttggcgcccatcctaaccgcccgattctgatctgacggaccggattcacggataacggtttgcacggttcgtggaactagcgccgtcgatctgcgatccagtggccagcaccccccgcgctcttggcataccgctgacccataggccccacgtgtcagtgcctcaac

SEQ ID NO: 143670 - DNA, 507 bp, Zea Mays
tctttttaaattggccattttgccaatagaaccgagagcggatggcatctagtttttttaacaccccgataggcacctcaaaaaaggacatcatgaaaatagggaggctgcttaagactgaattaatgagcactagacgacctccggaagaaagtaatttacctttccacatagctaatcgtttttcgaatctatcaataacacactgccactcactatttcgtaacctgcgatgggtcatagggattccaaggtatttgagaggaaaagaaccgatcccacaaccaaaaagacaagaataatccatttcatgatccttagctaacccatagcaaaaaagctcacttttgtgaaagttgattttcaaacctgacatctgctcaaaagcggtcaggagaagtttcacatttcgtgcttgatccaagttatgatccagaaaaacaatggtatcatccgcatactggaggatagaaaggccaccatccactagatgaggaaccacacccg

SEQ ID NO: 143671 - DNA, 496 bp, Zea Mays
cacaaactgaacaatgtttgacatggcataagtgcaatttagaatcacttgaaaagccccaaacatcgtcgcagcaaaactcttgctgccctttcgattattattttaattgagagccaaaaactaattacgcacaaagaggactcaaggcacaaccgaagagaataccaaataccacacgcgccctttggatagcaggatgcatggaacgacaacagttcttgccgataagtggcatcatcatatggaagaacataacaactgcacaacgtactacatgaggaagaagtgatggatccagagataccacacactcgaaacagatgcttgcactcatttatacggatcaaattatgtaaacaaatgggccaattaaaggtggacgaggaagaggaaccaatcaaagcctgagggagaggtccagctcctccgacgacctcttcctgttgctcgacgcggcaggcgcgggagcggcatcatcagcaggcgccttgtg

SEQ ID NO: 143672 - DNA, 371 bp, Zea Mays
caatcatgtccacatgtgaaattctgcgctaggttgttaggatctcgaataactggtgcataaatatgtgggagctacccctttccatcccccttgttatcccagccattgcaacaccaaggaacatccaccaagcaccaccatggtgaggatcgggccaccgtctagtcacgtgctcacaacatcgttgggggcttacttgcgggtctaagaactccaccgcgcctctaggattgagctcgaggtcttcgcaggcgaaggggtgctctggtccacgaccaatttctcatcggagtgtgcaccgctacggatccttacccaaccgtgggcagccctcacggctaccccatcaccggtaaggcttgtcttca

SEQ ID NO: 143673 - DNA, 753 bp, Zea Mays
ggcgtccgaccggcgaggctcacccatggcatccgagtgtccatggtagcctgctcgtcggcccctgcacgtcgccccatgcaccgccttgccgcgcgcccgtgccatctccgttgagctctgaggtgagcatcctccccgtcgcttctttcctccccctcggggatcttcttcctcgcacagcccatggcggacatggccagggagccgttttcccctgcacacgtcacttgcttcgtgtcccacgtgcttcgccggccgtgtgagccaccatggccgctgctaccgtactgcgcccgccctgctccatcgtggccgaggcgctgagtggcccctggtgtgccttgccgcagccagcgtgcagccatggtcacacgcctgtagcccttcgcttcctgttctgcgtgctactttgccaccgcgctcttcgcgcagcctggccgccgtcgagccctgccctacatggcttcgcgcgtgccagatttgttcatacatgcgtctaggaagggaaccacccatgcccctctacgttcctggctgcatgcagcaaaaatcgagaacctgagtgcgtctaggagagaaaaaaggatactgcatgcggttggccccaagcacatgcacgatagcctccacgattccatgcatgcgctcatccaataaaaatattgcctccatgccgtctaagggtttagctctgtcgaatcgtgttgtgccacatcatattaatacacagtttatcaaatacatgttaac

SEQ ID NO: 143674 - DNA, 476 bp, Zea Mays
tctatatcaaaataaaatttgttttgcttctttagtggattcatcatcatctagttgaatataaacataaaaaatcaagagctaaaacaaatactattttgaaacggatggagtattcgataagcaattgagacattagtttaacaatctaaatgagactagttgatagcgcatcgctctttgcgtatttgtgtctagaatagataggtttaacaggaaaaagtgttagcgtctagtggctagggggcctggtgcggccgcacccttggcacccccacaggtacggccctggtcagcatactgccatggtcaccacataggttggcaagtggggaggcaagtggaggtcaatacaaggcgatgaagctgttagcaagcaatcataagtggaaagggatgaacaagacaacagaaacagacgcgacagaagagaaggcacaagcgcaaccgaggagatcagagtgcgccagcccctg

SEQ ID NO: 143675 - DNA, 416 bp, Zea Mays
ttggaacgtgagggcaaagatgatgtgcgccggtgttggcgtcgtcgcgaatccagggcggcgccgccgcaggggtgtcgcgggttagggacgactttgggaccgtccgatttatgttgtgcggtggcgataagatgtgcagaagcgttttagcgatagcgatcgtggatcgttggatcttcggccaacgtgcaggattacacgagcgcataacgattcgagtgttgatctgggccgtgcgtttcggatcctacggccgttatggcgtaccgtttcattacagtaaagatctaatcttaaccatcggttggtgatccaacagccctggatgctagataccccttcgccgtgggagttttgcgtaagagccctcgtagaatcagggattcaacccgccgtcctagcattggtaggct

SEQ ID NO: 143676 - DNA, 404 bp, Zea Mays
gttcaaccataattaaataccacactgcggtactaggcaccaaagagcagttgcgattggaacgggccctagttaaccgttctttactgatctgctctgatttatccactcggttctttactgatattaactcgttctttaatgatgagcagtaattcatctgttaaaactgccgcttcaaagccaatgtcatgcgacacgtaatgtttagtatagttcatcatgtttgattttaactaggatggaaaaaagaccaaaaaccaaattggatcacagataagagaccatgtagcagattgttcgaggccgtcacaaaacagagaaatctgagcggcacggagaactgcagttcgttgtggccaaccttcaatgcaaagatcgccacttatctggcccctttgctc

SEQ ID NO: 143677 - DNA, 363 bp, Zea Mays
cccgagaccggaaagtccgccatcacaccaagatcatctgattcctctgtgggggacatgatagaagagttcagagatcttgataaactaggacaggggtttacatcggccgatcctttggaggagattgacataggagatggtagaactccacggccgacttttgtaaacaaaaccctggagaccgattctagaaatgagatgatcggtctattgaaggaatattcatattgttttgcttggaattatactgagatgcctggattaagccgagagatagtagaacatcggctgcctatcaaacctggtttcagacctttcaagcaaagagccagaacatttcgtccggatcttctcccacgc

SEQ ID NO: 143678 - DNA, 437 bp, Zea Mays
gtgcatgtctccgcctgtacatgtgagttccgcttactagggcagttatacacacgtgttggcgagtggagaccaggcttacaaaattcagtagctagtcctcctaaaggcttctttaattaggaggagattaaatcatttttccagtaaagtgtcttgggcacattccatggctcaatcgtggcttgtataaaaacaagaccaaaaaattagcagtcaaattagtgttggtcaaccaaaggacaaagaagagcaaactaacgacacaatttaatcccaatgaacaccataaactcaagctagttccacgcaatctcaccccacgtccgaattaatcaacaaaatcagcaaaacaacatcatgcgtaacaaactcatggtcacaatttcccgttttttctaaatgttgtttaagagcacgttcaacatgagtttaag

SEQ ID NO: 143679 - DNA, 419 bp, Zea Mays
gtagggtggaccatggagtggccatttggattgttcgctggaggctcgccgtcgtgaggcgtgcggctgccgtcgctggtgggggtcgaagtggaggtgatgagcgctgactgtagattcttggacggatggttctagttagatctaggaataccccttcacgtgattgaatcctatctgtctgattcgatcgaacactgagcgttcgtgttgacatgggggtcttgtgagccatccatctgtgatcatgtgggcgacgttggatactagtttgtaatacctaagatctaatcgtggccatcttttgataattcaatggcctagcaagactcgtacccctttcgaccgagaaaatgtgcaaaagaacccctataattttgcagaattaacccgccatccacatagtgttaggattgtta

SEQ ID NO: 143680 - DNA, 508 bp, Zea Mays
ctaactcaccacaatccggtgcaaaacaaagaggggacggtagagggattaatagtggtgatcataccgagaatcaggtcaccaagagctacgacaacggtgcacggcggagaatcaacaccggtgagaatttagccgttccattcgaacgccccgccgcctgtggtccgcccggttaggcccctgatgcccacaagtccgtactccgaccccgccttccgccaatggcacgcgacactggtgaatctgccggtcaacgacgacggactccacttcgagtttgcggcagcgatggtggcaatacgacacaacagacgtgggtgcgagtgggcgaggagaggggaaacggtcgtgggagctacgagtttatagtgccagggggaagaaatcgattccggggcaccagcaaccaccccccggaatccctggcggagatccgagcttatcggagtcgtgcgctcacgggaaggagacgagcctgacgcctggggcccacgcgccagtgaag

SEQ ID NO: 143681 - DNA, 1231 bp, Zea Mays
atcacagcttgttatacccttgttagttaatcttgatggcacggtttatatgctcagatagggcttgctgtctggacggtgtggtactagtcttgctagcgaatgtggcagagtaataatgtgtcaccactcgtcaccgtgctttatacttattcatcacagcttgttatatccttgttaattaatcttgatggcacgatttatatgctcatatagggcttgttgtctgaatggtgtgatactagtcttgctagtgaatgtggcgaagtgatactgtgtctgtgtgtcagcactcgccagagcttattgaaatgactttgaaattttgttaccaaaaaaagagaacaagctaaatttggttaagaaaaatgtggcgaagtgatattgtgtctgtgtgtcaccactcgccagagcttattgaaatgactttgaaatttagttaccaaaaaaagagaacaagctaaatttagttaccaaaaatgtggcgaagtgatattgtgtctgtgtgtcaccactcgccagagcatattgaaatgactttgaaatttagttaccaaaaaaagagaacaagctaaatttagttaccaaataaaaaagagaacaagctcagagtagcgagtgtcatctccacaaagttcagaagatcgcaccggacccaccagtgctaatgcatttcatcacagcttgttatacccttgttagttaatcttgatggcactgttttatatgctcagatagggcttgctgtctgtacggtgtggtactagtcttgctagcgaatgtggcggagtaatactgtgtgtcaccactcaccaccgtgttttatacttattcatcacagcttgttatacccttgttaattaatcttgatggcacgatttatatgctcagatagggcttgttgtctggacggtgtggtactagtcttgctagtgaatgtggcgaagtgatattgtgtctgtgtgtcaccactcgccagagcttattgaaatgactttgaaatttagttaccaaaaagaagagaacaagctaaatttagttaccaaaaatgtggcgaagtgatactgtgtctgtgtcaccactcgccagagcttattgaaatgactttgaaatttagttaccaaaaaaaagaacaaggtaaatttagttaccaaataaaaaagagaacaagctcagagtagcgagtgtcatctccacaaagttcagaagatcgcaccggacccaccagtgc

SEQ ID NO: 143682 - DNA, 881 bp, Zea Mays
ctctcgcaacactaggctgagcaccattaaagacacaatcattgcggtgcctccagatacaccaaggaattaaaaccatctttgaggtctttaggaacaagctcggccgatctgctccaccaatcttcaaaacacatttcatccagtcccggggaaagggcagccaagcgcccaagcccacatagcaagtcggtcagccgtccaacacctattatgtgtaaccaactagaggaaaaaacggcacttaggcggcgcccaagtcctccagattctcttgaaggcagccaaggaggtagaaccactgaacatcagttcataggcagatttggcagagtagagaccattgctagagaatctccaaaggtgcttatctggaaccccaggctgaagagcgaaattagtgatagcatctgtaagagtgaggaaatcagcaatgatctcccatgtcaccatttcacaattctgttaggaaccatactaaatacatgaggtgccaagtcttgaatcctctgtcccaatatccatctatcatgccaaaagagagtggaccgcccatcccccatctcagaagccattgctactgagaataaacactccaaaaactggtttgactggataggcaaatcagcccacggtttggatgtgtctgtcttttgcagtcagatccatctaacacgtaatgctctattcaaacattgaatatcagagataccaaggcccccccaattctttgggacgcgttaccttgccccaggccaccatacagtgcccaccattagcttctttgcgcactctccagaggaatccgcgacggattttatcaatggccttaatagcccacctaggcaaatccaacgccatcgtatgataaataacagtag

SEQ ID NO: 143683 - DNA, 530 bp, Zea Mays
cctccttccaattattttaacattacaaaaattgaattttattacctggttttcctcatcgtcactaacatcacatgactcattacatccaatgtctggctccaatcggcatagaacgccatcaagctcattcaacacatccattgctttgtcgtaccctgcttttgacatacacgcctggcgaacaactttcattgttttcgttagcaacattttctatctgtatgatttagtaactccatcctttcccctgaagctcttatcaattctttcgaacggtacatcttgtcttgatgagacagtgtacctttgcaatatatactttgaaggtatcttttctacttgtagatgcatgaaggctcttaaaagatgaacacatagtagacctgcaataatgaagaataatcattatattgttactgatatatattattctatataacaattaaaactaaagttattaaatatgtacttttattagtataatcatttaatgttcaaacctgtatgttcccactgtttgcactcgc

SEQ ID NO: 143684 - DNA, 308 bp, Zea Mays
ggtgtgattatggtcggtcttagcgcggatggtttgatgctgtcgcttctgcttttgttgtactagtttgactgcgcccttaggcggcttctgcgcggagtctttgcgagagacatcggaatttttcgcacttgatgtgtttagtccggctgcacccttaggcgacttctgcgcggatagtcttcgcgatagacatcggaattttttcgcacttgatgtgtttagtccggctgcacccttaggcgacttctgcgcggatagtcttcgtgatagacatcggaattttttcgcacttgttgtgctaagtc

SEQ ID NO: 143685 - DNA, 374 bp, Zea Mays
gccctgcttttttgcaacagcatggttcattatatatgagtgctgctttctttctagatagcatgcctgaatgaacacactgctagcatagtaggccaattcttcaggtggtgatagctattggtggcattcatggggcctgcattgtacagtttgggtaaatggtagggtgggtgatgtcgaagccacaagggggatgagagatgggttgttggtaacatgactatctgaaaataagcgctttggcttttttaagggggtgtttggtttctttagttgccctactaaactttagagactaaactttagtccctagagtttctctttgcaaggattcatttaattataccgtttggcaatttagggactaaaag

SEQ ID NO: 143686 - DNA, 512 bp, Zea Mays
ttccaagtgatttgagacttattcctagtaactgtagacatccaaatgcacaaatatcactcgattattagcataggtactttacatagtgctaaggctagttaaacttctttaactagtgcttgctctaggttttgtcgtagtgatttgaagtgaggtaaagacacctcttgcccctttgtgttgtgtgtgccattgtattgagttgtgttgggaggagcttgtagttttgcgatatcacaccaattgtggttgtagtgtggtcgccaccgtgtattagagaaaacgagacatgtcctattttagttgcaaactcgatagtgaagacgatagagagcgtctaggagagctcacactgtagcaccacttacacatggtgaagggccagggctatctacggagttatccggctaaaagcttggtcatccttgtgaggagctctaataagactgaattcaacggttcactcaatattttcccctctatatcccactcacgtgctacgtcgcaat

SEQ ID NO: 143687 - DNA, 530 bp, Zea Mays
cgggtgaccaagggaatctctagaggggtagagcgaatgccatgcttttccacaaaactagtggctataaaagaatatgatgctcctgaatcgaaaagtacagtagcgggagtaaattcaacaaggaactcaccgagcactactcccagagcttgctgagcctcctgagcatcgacgtgatttactcgtgcccttccttgatactgggtcttgttctgttggctgatggaggagggcaccttgggagcggatgctgaggtattcttggggccattcaccgagttggagtaggcaggtcctgatggcttcagctagggacaattgttcttgaagtgactgggatctccgcagtgccaacatgcattcgacgggggttgcttgcttgcaactgagggggcatgaaaggagctttgactctactgactgaatcgtgacggggtgggtccagctggtctactgaagcttggtcccttgggtggaaatccaaaggatcgagttttctggtgtcggtcttgctgctgagctcagag

SEQ ID NO: 143688 - DNA, 472 bp, Zea Mays
gtcaaaataattaaaattactattgaaataatttgaattattcccatatctgttattatttttgagaatattcaaatcactatttaaatgatgaaagggtatacttgtcgttttatcaagattaacaatgttaaatgcaactaaccgactaggggcgtacaatagtttcgttttaaaaaatctggggtgaacacgcaatgcctaaaaaacaagggcaaagctacagttacactaaaaacaaggggcactgacgcaattgccccataaatgattatgcatgaacacataatcatatcaacaccatttaagtggcaccaaaaatttcttcttcatgcataagtccaattttgtccatctagaaagtttgtctagcacctaaactttcatatttcatcgtttaaagggtcgttgaaccacatattttagtgtttacatgtctctaaccacaattttatatcatcattgaaactgt

SEQ ID NO: 143689 - DNA, 427 bp, Zea Mays
ctgtggagagaagctggtgattagaatctgagtgtttggatagccagattctgaaatcttagattcaggctgattttttttttaaaaaaaggcaaacatgcttactaatcagcacctaattgaaaattagcacatgcttttttcattacaacattctcgtttacattaaatttttaaatgaactcatgtctaactcatctgacgggctgctactactctcacctacacctacatcattaacatgcctagtgttgggtacaaactggtcgaagttgcgatcatatattgcactgtcccgaataaagttatgcaacaccatgcatgctataattatcttcgattgcttcctcaacgaaaatgaaggcagactaagaaggattcaccactttatcttgggcatcccaaatgatcgctctataacattccc

SEQ ID NO: 143690 - DNA, 376 bp, Zea Mays
ggaccgagtcccccacagaccaggaggtggctgaggcaggggctttgctgactgaagttggactgttgaaggagaggggtctgactgcagaggctgtggttgctgatttggtcttcaagaacattcagcctttgaaggatagggcatacccggcctatctgtactgaggtctagctgactcaacccgggtcaccaacagaagaattcctgctgtagacttggtgaaccagcttgaaatgatacttagaggcaaggtatcaaatgttggcgcccctgtcgcatactcggcctggaacctgcctcctttcaaggcctttacgcattttgtgtcgaatcctcctgctgctgatggcggtttgggccttagagtgcgacc

SEQ ID NO: 143691 - DNA, 626 bp, Zea Mays
gagtggagtttccacgtcactacccatagcaccctagttcgtctttgtgtgggtcctatagcgacaatatgctcacgcttcccgtaggcattcatgccctctttgagagcaatggggtgtacgggcgagcagcaacaacaatgcctgagtgcaatacaagtggcctcgtggccccaacaagaaggatcttgttcaatggttgttgaagacgtggaggacaaggccgagacactaaccgagggtaggtggcccctggtgtgacgtgcacctgcgagagtaagtggcccttgaagtcgacgcacccctacgaggccaggaggccccaactaggagatatcccagaaggggaagaggtagcacgaacgaggccgattcaagtcgttctcgtaagagggtgacatagcttggggacccctcccccacaagcatcaaaggcaagatccagagatccttttctcgggtacctggcacctattcaagtaagtaggcttctttatttcttctctttccctttttacatattcttatgacttttttagacctattgcaacatcagcccagtgtggggcactcagaccctgaggtcggcccatggcccgactcaaatggagtttggggcatcattt

SEQ ID NO: 143692 - DNA, 611 bp, Zea Mays
tggctgcccaaattaactaatgggcaagcattattgacccgaggcgaacctagaacaagctttaattgagttaatccggccctggattcacctacccacgatgacagcgatcaccgaggtcaaacctaggcgttcccgacaagtaagcgccgtctagctcatttagttgagccgacaagcatcacaagcctgcgaggatgctaaaacacgaataaggaggatgagtgtggacctgagagcggctagccccgacggggtgattcacggcggcgtagatgaccaatttggggaaaaacgcaaattctacggctatggtggctaatcggagctgagagttagtgtctcgggttcgggataacttggcaaagcagagtggggcatcaatttataggagcgttgagcggtggcgccggatttgacgaaattgagctggcggtcgagaagggggtgagtcaccgcggtgatcaaccgcggcggtcgcagggcaaggagctatggcggtcactgggcagtcactacgactcatgatgacgcgagaaatgtcctaaggcatggcactcccacggtgaatggcgtacacgctggtgatggccgctcggccatgtcgctgg

SEQ ID NO: 143693 - DNA, 319 bp, Zea Mays
gcactattatccaactgaaggagacacaccacgtgcagcatatccaattgatctgataggggcaacacaccttgcagcacaatgtgtttcccttggtatggcatagaaatccatttgtccttctagtggatcttcatagggctgtaagcttccaactagtccattccgagcaccacatcatacgcagccaatggaaaaattcgtaaatccgtcttgaatgaatacccctggactgtccattcagcagaaggaaacatgtgtgtacaagaaactcgactattgtctgcaaccttcaccgagaccggagataataaacgag

SEQ ID NO: 143694 - DNA, 391 bp, Zea Mays
attccacaacatgaattgagaataaattaagcacaagtttgaattcaaattcgaaattcaaattgaatttgggaatagaggaagggaaatagagaataaaaaggaaaagaataaaaggctatttgggcctcagacctccatttcggcccgctccaacttcccatccgcgcagcccacttgacctatggcgcgtgcgcagggctggtatgacacgtgggcccctggcgctaaagccgcgtgcgcttgtactgctgtgatgtgggcctgagtcgccagccactaaccaaaatcgtgcgctctctatcagtccgggcccgctcgtcagcatctccttgcttctcggtaacaaaccgagccgccattgccgctcgcccggtagactcgccagccg

SEQ ID NO: 143695 - DNA, 899 bp, Zea Mays
ggggagctatgtcatggcttgacaggggaagatcggcaggaacaatttgaagggcattgtcaggggtgatctcagccctgccagcagataacagacttcttgcatctagctcaccgacctctaaggtgacttgtttgttcaaagctgtggaagcatgcatcgctgtcgccccatcggaccgaggtggagacgacccaacatggacgtccatggaggtgtgggaaggagagcccacctgaacaccctcgagggctgggttgcagcttgcgctacccaccagagtcggatcactaccagcaacaccctcaggggctagataactgccagcaccaccgtcaggggctgggtcttctgcagtagccacctctaaggctgagggctcctctatcacctccatgggtgtcgggcaactcggagaagcatcttggcattgaagactgccctccaaagtcgatgatgcacgagacactactcgagatacctccagtccaacgtctggaacctctgaacaaacaaccatcacatcatcggcagtgggctctgacagcatatcctcagggaagacttcctcaagggcctgatcaaaatctgatattgacaatccctgaagactgacaaaagccgacagagctggagaaggaatatcactccccccctcactacctctgtaatgtcggctgttcttatggatcagcgggacttcttcctcttcttcttcttcttcatcaaatatacagacagcagcttgtgcacgatcacaacccttgacatcaacctcaggaaggacctctgctggcacttcatcacgaaccagagcagaaggaccggcaccctggtccaagcatgacagtcgccgaagccgcctctttttcttcttttcctcaacaggtgcagtcggg

SEQ ID NO: 143696 - DNA, 446 bp, Zea Mays
cattgagttcgccgaggcaccctctccctctctgcccaactccgacgaccctggagccaccctagctcgcgcctgcctcaacttcggtgacttcaccgccgcggaaaggagcggtgccgtcagcagcagtctgtttcccaggtctgatcccctccgtccgattcagatcgaacggcccggaccacggcatactgcttcgcgcacgcatgcctgacgccctggcccgcttgtcagcgccacccgcagccgctcatccttcccggtctgattttcccccgtctgatcttgatcgaacggctcagaccccttcgaaccgctccctatctgatcgtgatcgaacggctcggacccctcggactccttcggacccctccccatccgatcgtgatcgaacggttcggatcccctcagacccctgtagccgtccgtttcccctctggcgctgg

SEQ ID NO: 143697 - DNA, 469 bp, Zea Mays
gttcatcactcattaaaacatacttgaaagttgtacgcagaaatgttcttgtccatcctaacactgggattttgtagataattaattatgggtgtcctccaatcacttgtatcgactttcttaccagccgaatcaattaggagaactttcctgttaacttcggacggttcggagcctttactcggacaatccgcgacctggggaattggccctgtaccggttattagattttcggtgttgtgaaatttccctcgctttatccgataacctgatgcatcttgtgccaaattgttagccctgtgattctcaactctagagatgtgtcgaatgctaaattcatcaaaagaatgaattatgccccgacacttttcaaggtaactatttagagtaccatcaaaacattgatattcttctaatacctgttggacaaccagctgagaatcaccaaatgccttcacatgttttactc

SEQ ID NO: 143698 - DNA, 2247 bp, Zea Mays
gcgagatccaggtgctgttggcaaatttcgtcgcctctgcgcacgcgcggaccgtccggctcgtcgggtagaaaccgtagcctctgcgctaggtcgtggatcgtccgcgcctctgtagagagcactaccgccgatactcattgtagtgattggcgcccagatcggtgccaacagttatctagaagaggggagtccatgaactggatcagcttgtagaggtctctagatctgaggtcaccattgtcatcgatgagagggctcagtcgttggtcggggagatccgaggtgttgacattgaggagagcagcttgaagtagttccagatcatgtcttgcaaccgggctcagatgcggggggaggtgccttgtggtcccatcagagagaacttgatgcacagacgcagacggatttttggcatggcttgtgagggcaggaaggcgatctgtgataggaccaaaatcaagccagtcatcagaccagaaactggtagttctcccattcccaagcttgacagtggtgatggcggagtacaggaggagcaacttttggatttgattcaagtggtctccagatggtttgacaccgatctctgattgaacccaagtgacccaagaagaacaagctggctacaacatcttgtgaaccagtttcaacataagacaagtattatgagtctgcatgtgattcacacccaagcctccatgttgtctcccacggcaaactttgtcccaagacacaaggcatttcatcccagatgtatgatcgctacccggaccagaggaaggagcgacgacgtgcatctatcgtctcgataactttgattgggatctttgttgcacacatggcgtagacgagctggccgctaagaaccgagtttaccagctgagtacgaccaacggtgttgagaagcatggccacccattttacaatcaataagaaacaggtgtgtacggtgagaggggatcaccttttacaatcaatccaggggcctgggcagccatgaagcaatacatcagattttgaactggagagcatgtcattgatccactggcaccacagagtggggaagcccctagctgacataattttgtcgagagcactccaactcactgtgtcgaacgcttttgcaaagtcgagtttgataaccaaagctggtgtcctgcgctgcttgtggcaagtctggatcaattctaaagcataggtgaagtattctgaaatggaccagcctcggatgaacccagattgatcaggatgaatcacatggctgatctgatgttgaagcctggtggttagcatcttactgaggatcttcacactgcagttctgaagggatatagggcggaagtctgagggatccgaagcggtctctttttctaggataagcacaatgaacgatctgttgatcctgccaagatccgcaactctcgagtggaaagcttcagctagtgacatgacagtgccggcgatctggttccaagcagcaaaataaaacccaggaccaaaccaatatgggcccgaggtgctatctttgttcatacttttaacaacagtctaggcttcgaccccagtagggtattccgagtagagttcgtcaaacaacaagtgattggaagagattgcagcggtgcccaattttaatctgaagaagttggtgagcctttgtgcgaggtcatggagatgtcgtcgacaaccagacgttggatttgattgtggtgtagtctgatggagcatctggcatggaagtagtgagtgcaagcgtctccctgcttcagagctttggactttgccctctggcgccagtaggtagcatggtctaggacagcagaggacatgcatgattgtaaaaaagttaaggttctgtctagggtatgttcggtagagctggctgaagggctcttcaatacactaaaaatgtggttctcctggatactctaggatgaattctgaaagaagcaattttcagactaaaaatgaatctctgtaattctcatacatacaacgactgtgtatagtaaatccactgaacagtaagtcaagagatgatgctttttttcacacaccaagaattattatttttagaacataaacatatatgcatgtatgtatataggtgggtatataagcatttatgcttttggttgtggaaaaggagggagtggagaagatgcagcctagcaacccgaccaggcggcccttttcctcccctgtgcagtccaccttctcctttggctcggtccaatccattcc

SEQ ID NO: 143699 - DNA, 419 bp, Zea Mays
cctagactcagattactgtcgccgaggacggcgggttctattctctaaaataataaggtctcttttgtaaaacgtactcgcaaaggggtacgtggtgatcctagccgcacgattaaggttatgtggcccagattagatccgagcccggtaggtacacgagccacaggatctacgatctacggctcaaaatcgatcaccgaaccggtatgcagatccgaccacacgatctccatccaaccgcccaggttacatgtctgccgattagtacacacattcaatcctggcctctcgtttctaaatcgatggctcactagtcctcttccccagccgagacgcacacccggcggcaccacgatttctagcgggcggacctcgccggaggattccctttcgccacgctagtggataatccacgcccg

SEQ ID NO: 143700 - DNA, 739 bp, Zea Mays
gtcttgactgggctgtcttcaagttttctctaataatatgcacttgcttttcagcttcttggagaatttctggaccaaatacttgactttctccggtctgattccaataaagcggtgttctacacttttgtccataaagtgcttcaaatggtgccatttttagacttgcctgataactattgttatacgagaattctgcataaggcaaacttttatcccagcttctgccatgctttagagcgcaagctcttagcatatcctccaacacttggtttgtcctttctgtttgcccattcatttgcggatgataagttgaactaaaatttagcttggtatccatggactcatgaagtcttttccaaaagcgcgaggtaaactgggttccttgatccgatacgatcttcttcggtactccatgcagacaaacaatcctcgacatgtataactctgctaattgggctcctgagtaagttgtcttcacaggtataaagtgtgccactttagtcaacctgtctactatgacccatattgaatcatagccatcccgagtacggggtagtccaactatgaaatccataccgatttcttcccattccattcaggtaccttgagaggttgtagtaatcctgctggtctttggtgttcggctttatctcgctgacacacgtcacataatgcaccatgagtaggaacatctcttttcaatccgtaccaccaatacttttccttaagatcctgg

SEQ ID NO: 143701 - DNA, 515 bp, Zea Mays
ttgccccagtgattggctaagcatgtctggatggctctcttgtaagtcgctccagcgttcttgaggctgaacggcatggaggtatagcagaaagctccaaatggtgtgatgaaggcagttttctcctcgtcctctttcgccaggctgatctgatgatacccggagtagcagtctaggaaggagagcatagagcagccagcggtcgaatcaactacctgatctatactagggagtccgaaaggatccttcgggcagtgcttattgagatcagtatagtcgacacacatgcgctagtcaactttattcttttttagtacaagaacagggtttgcctgccattcagggtgcagtacttctctaatgaatcctatcgacactaggcgagctaactctgcacgaatagcttctcttttatcgagcatgaaatgacacagcttatgtcgaatcggtctcgcctaaggatacactttaagtttgtgctcggccagttctctcggaactcctggcatgtccgc

SEQ ID NO: 143702 - DNA, 532 bp, Zea Mays
gagggatccattgatgctgtcaggacatcggtggatacgatgcgttcggaattgttccgcctcacacaggcgctggaacgtggagtcgccaggggtcaggatgatccaagcatccttggaccgtatgagccagtgggggagcgccccgctgcttccaagttcgacaccgacagatccgacgggcaccgcgatgtttttgcttctcgggagtatgaaattgggaaattacagtttccaaaccatctcccaaacaatggtacgcacccccgtatataccacatgtacctgctatgattccctaccatgaaacgtttgatttgcatcagccttcgagtgttgggagtggggggtcataacattatcctgtcagagggttgggtagtttgctgaaacttccctttcccatttttgatggagaaaatccaaagctatggcaatcccgttgtgaagactattttcacatgtattcagtggatcctaggatgtggatcaaggtggcttctatgcaatttgttggacctgctgcactttg

SEQ ID NO: 143703 - DNA, 640 bp, Zea Mays
cctcagttgtgttcttcacccccgcgccttccatcgagtgctgacgccgcgggtttgactgtagcactggtacaccttcttcttcagccgctcaaggtctcggtcgagccgtccgcctcaccctacagctactggtcgagccagtcgctcgtcaccttgagctacgacagccgggccacaatcctctcgtcgccgtccacacccttgggctgtcctcgcatgcgttcctgcttccaccctccatcacgaatcctgactcgagtgtgtcctctaggaagctcagaaattcagattcgccctcctccacctcctctccctgctctttgatctcgccctcgcttcttcctccccggtcggccattagttccagcgactgcttctatttgattgcgaattgctctgtctatctgtgtcgtggatcgagttgcttccggaggcgacgcggtgatgttctgctcgtgcgcatgatgcagctgggagccctgctttgtcgactctatttctccttgcactgattcagtgagtgattctgttgttccctcttcactgtcttgttgacggctccttgaattctgtcattttctttacatagcagtactttgttcagatcatcagacaaaaacggtttgagttattacaa

SEQ ID NO: 143704 - DNA, 666 bp, Zea Mays
gagagagaagccgtgggccaccaacgtcgcgtgtcatgttcgcctccagtccaatcctggcgtgcgcatcgggagcttcaacgacaccaatggggaaaaccaatcagtgctgctctctggtgcggaggtgttggcggtacgacggggtttccccatcggcatcctccatggtgggagtccaccgcggaagggaccctttgagctacatgcttcggtgagctactcatgtttctcctccctatggtttctattttccttctatacgtagccacacagaggttgggtaatcctgggtcgctggtagggatttagcaagtgctccggtgagctctgtctgtgcgctaatggcgcggcggcattgcgtggacgtctgcgcgccaggggaggaagacggctcccggaccgttgatttgaacggaacgactccgattaaattgcgtgtaccggttcgatcagtttgcgtgacgaccatccgatcgagatcggatgatggtcataactctaggattcatgaaaccgtgaccgcccgatcaagatccaatggccctgtgaaaccctagcgctgtgtgtgagcaatttgcaaggaagcccctcggtttagttaaaaccaacccgccatccactcgtactgtgctctgtgtcttagaaaacttacaccgagaaccc

SEQ ID NO: 143705 - DNA, 490 bp, Zea Mays
ggcaagtgtcacaccggaccacgtattgtgctatctctttcttcatccctctccaccagtatctggttttgaggtctaggtacatcttggtggttcctaggtggatggagtaggctgagttgtgagattcatcgagcaggacttctcgtgcctccccttttggcacacacagacggttcttgaaccaaaggactccttgttcatctgtcttgaggtccggaagttgttctttgcgagctttttccataagtcttgctatctctgagtcgaggcattgagctttgcatatgaggtcttctagcattggtttgacttctaggctgttgttgtttcccaaacatgcattcagctgagctgattccttcttccaatcttctaaaaagttggttccctttatcccgaaaggttttcggctgagggcgtctgctaccacgttggcctttccggggtgataatgaatctcaaggtcataatctttgatcagttccag

SEQ ID NO: 143706 - DNA, 423 bp, Zea Mays
atgaactcccggtgcttgtcccggggtggaagtggaggtggtggtggtggcagtggtacttgctgctgttgctgttacgccctcctttcctggcgtatctcatctcgctcctgacgcagctcctggcgtatctcctctctctcctggtgcatctcttggcgttcctgccgcatctgcgcatgtatatccgctgaagcgtctcgatcctttgggactcaatgtgatactagtacggtgcccgtgcgttgcgacggcataaaaattattgaataaatgattgacactaaattgtttctcagcgaaaaaccgaatgtatggtgagttaattaaataccattagtaacaaagtttctattaggcaaaaactggacaaggtgatgtatctttagttacaacttttgcctaggcttttgaagatttttg

SEQ ID NO: 143707 - DNA, 532 bp, Zea Mays
gcagaattatccaagtgacagatgtgattcatcagacgccgccatcggtatcggcgtcaaaaattgttattgccgagactgccgaagccgaagccgccgcagccgaagctaccggggctgaaactactgaaattgcaactgccggagccgaagctaccggagccgaagccgccgaaactaccggagccgaagctaccggagccgaagccggggccaccgaagattcaaacctggaaaccacactggaagttattgacaatattcttctgaaaatggctgaagaagaagctgctgtggctgcggtgaacacggctactgaaaagggaaaagagcaggttgaagacattttggaggaagaaaattttaattttcaagatttacttggacaagatttaacaagtgctgaaaaagaagagctgaagaaatatgccatatcctgcggatataaaccagggtctatgctatttggtggggtcaacgaagggaagctaagatgccttcggaatcgcaccgaagccaaagttgttaggac

SEQ ID NO: 143708 - DNA, 321 bp, Zea Mays
tgacggtgctgaacgagttctcggtgcgcgtgaaggcggggagcacggtggcggtggtcggagccagcgggagcggcaagtcgaccgtggtgtggctggtgcagcgcttctacgacccggcgggtgggaaggtgatggtgggcggcatcgacgtgcgggagctggacctcaagtggctccgtggggagtgtgccttggtatcccaggagccagctctgttcagtggatccatcagggagaacatcggcttcgggaacccgaaggcttcgtgggccgaaattgaagaggctgccaaagaggccaacatccacaagtttattg

SEQ ID NO: 143709 - DNA, 525 bp, Zea Mays
tggaaaactagtgtctaggatatcggattggcgtgaaaattgatgtatatgttacttgaggtgttatgaaggtgttggaaaatctaggatcgatttgagcaagtttgactggtttgggcatttcaccgagcagttggtgcgcgaggttttggaattcaggtgaaatggctatttgaggtgatgaaaccctcccaagggcgctaggaacctgcacgaggacacaatgaacacatagggacacagacacatgcttggattcatagatatttgcacagatttggatagaagtttgaattggattccaaaggtggttgagaggagcacttcactggtaaagagaaaagtgatagaaacagagaagaggggaagaaccagtgccgctcaccagaggagggcctagggctggaggaagtcaccggagcacgaccgctggcgagggagatcgtcgccggtgagaggttgagatcgcccagagcgcaggaatagagagctcggctggagagaaaaaggcctaggcactagctt

SEQ ID NO: 143710 - DNA, 860 bp, Zea Mays
tcgtgataccttcgtagtgccttttggtacctcgccgaccataggagcgctatgtcgcgggcttcatccaactgatccagcgcgtcttggaggctcggcttgttgccttcatccgcgtatgccttcatctttaggccgccatactcgagatcagtggggagccccacatgttcttgaccatgatgtcgtcgatgtatgcttccatgaccctcacgatgaggtcgccaaagcatttaatcatgcactgctagtatgttgctcccgagttcttcagactgaacaacattgtcacataacagtacgaaccaaaagggtgatgaaagaagtggatggttgatcagattccttcatcgtggtctagtgataacatgagtaggcgtcgaggaagctcagtacctcgcacctcgaggtggaatcgaccaccaagtcgatacgggggaggggaaacagatcttttgggtatgccttgtctaggctggtgtaatcaacgcacaccatccattttcctctcttcttcctaaccagtaccgggttggctaaccactcgaggtggtgtatctctatgatgggccgagccacaagtagttgctgacctcttccctgacggccatgtttttttcttcatcgaaacggtttagccactgctttactggtttagacccaggcttgacccatagagagtgattggtgacttcccttggtatgcccctcatgtcgaagggttctcacgcgaagatgtccttctcttattggaggaagtcaatgagcacactttcctatttgggagagagcttggcctcgatgcgtatcattctcctgtcggcatgctcaggatccaagggtacttccttcatgtcgtc

SEQ ID NO: 143711 - DNA, 411 bp, Zea Mays
cgagatgggcgatttgcggggcgtctgttgcgcgtgcgcgagccgttcgaggaacagaaaggccgtttcaccttcggtttgaattccgcggtgggttcgggaaaagccttgggtggatctcgctcgggcctttatatacccggaagaggggtcggtggtggttctttaccctgccatttgcgcttgccttctactttggtttccgcaacctaagagagcagccagagaaaaaggaaaacacccacctcatcccttccgcctccaccacctccgttcggcgatggctgataaggtgaccgtcattccacctcgtgacccgtggcctttctccaccgtcgctgtggaggatctggagaccctcgttgccgatggtctgctccgtcccctctccgatgggccgcagccggagtg

SEQ ID NO: 143712 - DNA, 760 bp, Zea Mays
tgggctctgaacatataaataggagcctgcattgtgagtatttttcgtgctatttcagttgcttacattgcgctcgtcatttaaacctctcttggctcgttgagttcaattagattttaagctttggcattctagcaaccatcaaccaaatggctgatgaaaagaaggttgttgatccagtgctggccggattttacgaagctatggaaaaaaccaacgcaaagaagattgcaaatgagatgttggctagaatatctaaaaactccagcgatagtgaaagttccaatgtagaaagtggaaatgaagatgccgaagatcagccctggagaccaagccatgttgtctttggaaaatcaactattaaacaaggtcagatcgatgcaatgagggggaggtatttttgtgatatctcaatcgtaaggaccgggggagagaataatgttcctcttcccgaagctgatgaagtggtagtttacagaagcttcatgaaagcgggacttcggttcgccttggacaaattgttggtcgaggttctgaaaactattgaaatttaccttcaccaacttactcccgaggccatcattaaagtggggatctttatatgggctatgaggagccaaggactagaacaagatgcgagatgcttttgcaacatccatgagttgtcgtatgagacgaaggctaccggaaaggagcagtatcacaacaactttggttgttacagtttcgtgcctcggtctgagaagagctacccaattcc

SEQ ID NO: 143713 - DNA, 575 bp, Zea Mays
ggcttagctgaatactaaatggaaggagaggggaattcctaggttagtttttttatcatttacataatttcctttccatttgtatttagagggtcaaatagactttttccaatatctaaggagcgcacacatttatatgagaattacgcatggggcttattttggtcatggatccaatgctgctctttgttttatactactggagcagagctcatgtgccttaccgcaaggtaattaaattagagatgcatggtaaactgtcaagtgtgtgtttttactgcaagtgcatggagagcattaatcaaagagcaacaccaagtaatctttcactattttctttgttgtaacattactactcattactagcatgatgccaaccttttgatgcaattaacatgtccatgattgaatactttgcatgtgtgacagtggggttcatgtcatcagttgcttggacaattatatcatgagagtgattgatgagtctttgcccttgcaaggtcggctatctccctatactactataattcacctattgtcctttttttgtagcactagacattatgaaactctag

SEQ ID NO: 143714 - DNA, 452 bp, Zea Mays
gacacagtacaaatagcaatcatgtcgggtgtaggagcgtcggtgtcctagagtcttccttctccttcacctcctacttgcaggttaggaaggtgatcgggaccttaggaactatggtgattagggttagacagaaatatgaagtgttctcttttgtgacatccatgccaaactttgatatagtgcatataaccagggccacaaccaagggaaaatgtcatactcaattagggtgtagtggttaagatagggccgagcttggtctccttgactgagctagagaacacaactaacactccccattttgaccacctcgtgccccaacacttgctctactagcccagtaagagcacatcgcacccatatccccactcattagcttggatccggggccacatatacatcgacaccatgtgacggtgagccgctactcaccaatgttaaccacctcc

SEQ ID NO: 143715 - DNA, 673 bp, Zea Mays
ctggaagtcatgaatgagagagatcgagcagcgcaagggaattgggaccgtatgtttgaatctatggagtttgtgactagaagactgaaggaggtggagagagtccagcaacaattattgatgcagtcagagctggcggcagtggtggctgaacaagctgttgttgagaggaatgatctgtaccggaagttggaggaaacaggacgagaagtgtctcggttgaggttggaacagatgggaagagagctaggtgaaacatcaacttctactcaggaacaaggcggagatgtctgaaggaattaacagcagtctcgtggtgatcagaatcgtggaaaccaacagcgaggcatgagaggtgatccttgctagtatggtgattcaggtaatcatgcaatccccaaactaccttttccaaaattctcggagagcgatcgtgtggtatggttggaccagtgcagagaatattttacaatctaccgtgtgcctaagtctatctgggttttggtggcctctctgaatttggaaggcataacatcacagtggtggaagagttacaaattgagaaatggaattgagggttggcaggagtttgagggggcagtaacagataagtttggggctacaacatatccaaaggctttaaggagactgatgtcactcaaacaaactgaaa

SEQ ID NO: 143716 - DNA, 790 bp, Zea Mays
cccgaaccatccttctttccaagtcactttcaccgaacaccgcttcccagatacttgccaaaatgttgcccggaaagccctccgacatctatgccagaactacagcagagtaatctttgaaaccccccttcgctacttcccacccagcaacaaaaatacccccgcctggaggaaaagacttcaggctctgtcagggagagaccctaccgaggatgaccccaccatcgtctacgtggctggatacctccacactctcgataaccaatatgatgaccttgcctcccactgcactcacctaaactcccgagtggaaagcctggagcaacaagtcagggaacttacaagggaaaaggcgtcccttcaagagagcctcgagatagcggaaggcgaggaaaccaacacccgtgaggcctaccgaactctgaagatggattacgacaaaaagctaaagaagctcacccccgtaagaaaaatctgcaagaagaccagaagccaaggatgccagactgagcagaaggaagaagcccctccagccctacctcctaccaggatagggaactcgtccgacaccgaggaaatatccctagctagccttgatgaccttctcaaggaatttggggacactttagaggagtttggaagtaccctagatagcactcgcgtgtaatgaacttatggtagttgtattctgtaatgaacttgtgtaatgaataaagtaatgtgttgaaaaaaaatttagcatgtgcatggtagtaactcttttcccctggcagatggcttcagataaaac

SEQ ID NO: 143717 - DNA, 511 bp, Zea Mays
gtgggcagcagcccggcgaacggccagcagctcggccccagcacagccctactctagcccctgcaatggtgtttccccacctatttttcctacgtggttgcgttgcctgtgtctcgccgcggtaggccggccagccggcagcgccgaggctcccacacccctgctcagcggtgaaaccgcccaggctagccccttccttctctgccatagatccctcctcttgcttcaggttgaagaaccacccatggagaagaagcagcatgtgcagttgtccatccgtggagctgggaagagggagaaaagaactgccatagccaaatttgatccccattttggatcctatgtggttgtgctccccgtgacacttcgtgtggccactttgaggccagtaggaattagccacaccaccggtaacctgcgagtcgctatttattcaatgtattatgcgttgtagacccgtttcgacacatttcagtcatcgtcgattttgtactagtagcattattttacc

SEQ ID NO: 143718 - DNA, 798 bp, Zea Mays
ataattagtaatagtgcttaataatacttagtgtacctactgggcggttcgtctggctatctataatcatgaatactcgtgtgctcgtcaccggtcacggccaggagatatgacgacggctgttgttttcttctggcgtggggctgcgcgaagggatagatagagaggcatagagcacgccgcccgcggccccaggctggcgagcccatagtttttctatctatactttatgttttcagcacatttattcatggatgtatttttttttgaaaaaaatgagttgatcttgatctgtgtgattgcttttggccgagagttgatgggttgtttttgtttgttttctcaccgaacgtcactttaagaaaaacgtctgccataatttgctttctatacgtaaaaaatatgatcgaatcgaaagaaagccgccggtgcgccgcgggctgatttgcagatttggtgtgggtacggctgcacagattttttttttgtatttcagttttcttttataaattttcacgttttgtttagttctatcaaaaacttaatatcgtttttaaaccctttgttcggtgtcatgagctgtgacactgaaataacacgtctcggtgtcatggtctgtgccgccgaggtgcctcctctgctggctcgtcgtagtaaggcggcaatccatgtggcatttaacacggcaccataaatcctgacgtcgagctcagcgctaagatctatgataccgagctagacagtgttatcaattttcccttcaatggttgaagctacgtccgaccatttgtcccctcg

SEQ ID NO: 143719 - DNA, 467 bp, Zea Mays
tggatgtgtcattgtcctagatccatcgcttcgagtcacaaactctagaattgtcgaaggcgggtgaataccttttttccgaggaagtggagctgcccatcgccacagaccgacgacgatatcgctgcaatcgaagccaacaccgcgcttcaaattggggaaaagttccctcccacgacacctagggcaagaagtagagtgggctcatcatcctgggccacatgggcttgtagcttgctcctccttaccttggcaatccttggcccaattgtctttcttggcataaattttgcacacatcgttgcctcgttggggttggcatggcccgcattcgtcccgatctatgaaccgttgttgctgtcagtgccgtgtcctcggccccatcgctggagtttgacctgccacggctagacctctagtcctgcttcttgtagtgctcaatgtactgctcctccgtgagcaacaac

SEQ ID NO: 143720 - DNA, 549 bp, Zea Mays
cccgagaagaagtggtgaatgggagacgagtatgccggcctaactgacaagcatgacagaggccctcaaaatgtcccctactacatgaaagatctaggctactggtaatcttggtcatgacgtcaggtccgggatgtccgagacgacgatgccaggtgatggtggagaccagggcaagaggcggagacgcgccgagggtggatggctggaacgtgtagaggggccctgagctgtcacagcgggcgaggagagtcctgatggccagatccttcacagagaaaccagaggggtcaaactcaatggaacatgagttgtcagtggtgaaacgacgaacagaaaggagattatgagtgatgtggggggctacgagaacgtcgttgaggtagaacggtccagggaaaaccgaggcacctactgaggtgacgggcagagtggaaacattcccaaggatgagaggaatgggggggatgggagcgggagagcgtgcctgtagtgggagtggtgtggtaggaggcaccagagtcgatcacccagtcagaggaaggaggg

SEQ ID NO: 143721 - DNA, 548 bp, Zea Mays
ccatcctggtaaggcaaatgttgtggcagatgccttaagccggaaggcccagtgtaactgtgtgagtgtagattctaagattgccaccttgtgtgacgagttgtgcaagttgaacatagaagttgtttcctcaggtgccttaagttatatttcagtggagcccactttacatgagcaaatagtcatggcacagatcagtgacaagggtgttcaagtcattaaggaaatgatcgaacggaaggtggacaaatacaaatgcttccgtcaggacatcaagggagttttatggtttggagaccgattggttgtccctaaaaatcccgaactcagaaagaaaatgttggatgaagctcacctttccaaattctccatgcaccccggcagtaacaagatgtatcatgatcttagatccttgtactggtggaccagaatgaagagggagattgttaagtatatatctaaatgcgacacttgccagagagtcaaggccagtcatttgaaggtagcaggcaccttacagccccttcccataccatcttggaaatggg

SEQ ID NO: 143722 - DNA, 350 bp, Zea Mays
ggaaaaagtgatggtgcagctttcgaaagtggtattgatgagatcacatacgcaactaaaaagcatctttattgaggcataaagatgtctttgttttgttggctgatcatattcaaggtcgattgtttcagttcagatatattgcctgatatctctctagcttgttgataatttcgacaatgtttaattgtttataattttcttctccagtggccccttccagtttccctttttagaccaaagatcattggtacagcttactgcaggaagatctctaacacctaaaaaacacaaactaacttaatactcaccagaatctaaacaaccactatgcaaactcatctaaaaac

SEQ ID NO: 143723 - DNA, 538 bp, Zea Mays
tagcttcggcactagcttggcttgctgcagcttcaatttcagccggttttgtttcagattcggtttgcagtttcgaaacctcggcgattttccctgaaggagtggagcttaaagcctttactgattctaacacatctagtacatttgccatccttcttcttttgggagttgccgcaaaactttttccaacctttggcatggttacttctgtcgaagggcttaaaattcctaacacttctgttccttcaatttttggttcttccaccttattttcatcggcttttgactcatctagcacggatgaaggtaccttcggcatcgtagccggatcctcagctttctgtgtaggaggaataggctcctttggtttagcagctgaagaagtttccccaccaaactcgggtaccacggccggctcgatatagcgtgaccggtgggtgagaactttcaaccttctgctcttcggcgtgggctcatctggagtggccgaagcagcagttttggccgaagcagcggtttttctctttcttcctcgtcc

SEQ ID NO: 143724 - DNA, 347 bp, Zea Mays
catcaatcaactttcccttgaaagattttcccaagtttgaagcaaaatgcctcatgcattccctatgctctactccaggaaacacataatccactgcagtttctaaacccttgcaagcgtctgtgtgtatagtcaatccatgtggaaaccctataacctgccgcaaattctgtaggaaccatgtgcaactttctgttggctctgcctcgaggacaccataagccactggaaagagccaattatgtgcatcaatggcacaagcagctactaactggcctctgaacctcccataaagagctgttgcatccactgctagataaggcctgcaaccagctaagaacccattc

SEQ ID NO: 143725 - DNA, 300 bp, Zea Mays
cctgcactgcgtattcctatggtggcagccaggggtgcctcgtttggcagggtgggttgctcgacgcgaaacagccgcaaagcaacgacgccgactatgtttccgacgtagaaactcttcatcttcgtctcgctgcaacagagtttcagacatcaggacgcaggaaaagaggagtgaccatcggtgccgtcaccggtgcgtgcgctgctgccttggttttgctggcgctggcagtagcagtgatcatccgtaggaggaagaaaaccaagaacggtcgaggggctgctgccggtggtgggc

SEQ ID NO: 143726 - DNA, 288 bp, Zea Mays
gctcggtgcgcgcgctgcgccgggtcctgaaaaggagaggcgtgagctcgaagtcgtcgtctccattgtagccgtcgtatggagcgcaccggcagcggagctcgtgggctgcgatggtgagcacggttacagacggcggggagagagaggaccccaactctctcatctggagtgtatgtgagcttgaggtgtgtgtgtacaagggtggtggtgtgccctttttgcgtcgtgtgaagctgtgaagggcatatttgtggtcacggtgatggaaaatagaaagggcaggga

SEQ ID NO: 143727 - DNA, 461 bp, Zea Mays
ggattagggcactcggctcggaaacgatcgctcgaaacggggaattgagtgaaattgaagcctggaaactcgaattggcgtgaaatttggcaaggatgttgctggaagtgttgtgaaggtgcctgaaaaatttgggttcaattggagcatttttggctggtttgggcattttaccgaacacgtggtgggcgagaaattaggttttcggtgaaatagccatttgaggtgggaaatccctcccgaaggagctaagaacctgcaggagtgttcaaggaatacaggggaacacaaaacacaacttgattgcactggatttcacaggaattggagtttgggcaaaagaggtggaatggagtgctctgctcaaaaagaaatagagaggagggagagagagccagagcttctcacctaaggggggaaggagaggagcacggtgtcgccggagctcagtcgaagacggt

SEQ ID NO: 143728 - DNA, 311 bp, Zea Mays
tgggcatcgacgtgattaactcgtgcccttccttggtactgggtcttgttctgttggctgctggaggagggcgccttgggggcggatgccggggtattcttagggccattcaccgagttggagtaggcgggtcctggtggcttcagctggggacagttgttcttgaaatgactgggatctccgcagtgccaacatgcattcgccgggggttggttacttgcaactgagggggcatggaaagagctctgactctgctgactgaaccgtgacggggcgggtccagctggtctactgaagtttggtcccttggg

SEQ ID NO: 143729 - DNA, 612 bp, Zea Mays
ctatgataactaatttttagtcgttttgtaccgaaaatatagattggtcaagtcgtttagtaaaacaacatatcacacatacttgcaaattgttttcacatcataatgaattatatatccatatgcaaattagcaagtcaatttttagaatagtttatagccatcggttcagaactttatgcgaaagaatgttgctctatgtctgcttatacgaaagaatgttgtctcttccctttcctataggagggtgaaataagttttactagcagcgtcgtaccggaggtgccagtagcctcagtgtgccagtcgctcctcaagatggcctcactggcagcaaaatattctatgacgagttgactcgcgtgcttgactgggattgtattttatctcttctgtcagctaagctctggtgaattcctccgacatcaacgttagcacgatggttcgcccaaccgagcatgtccccggtccacaaaactatatagttggggaacctcacatgtagattcatagtagttaacagtttgcttaaacaaactgacgtggttgtttgatctatgcaaaagatggcactggttgttggttttaatagtgaaatgtcatcctaaccat

SEQ ID NO: 143730 - DNA, 333 bp, Zea Mays
aagcaaactaactctaactaagactgaatagactaagacactgaactaagcattattacagactccgactctatcgatctaaggatccaaatctatctgggtcctgcagtctggggtaccatagtcgaagcgaccacggggcagtgaacggtaagggtgctgaatctcgacaggggcgggagaaccaccatccaaatagtggcgtgctgcgcactcagcacgcaattccgcaacctccacccaaaccttgcccaactcgtcgagggcgtggtccaactctgtgttgagcacgacagccaagttgaccatgctgttcagcctgggattgccctc

SEQ ID NO: 143731 - DNA, 454 bp, Zea Mays
gattatgctcaaagttaaccaaatcaatccggacagaaataacattctctttagcatcatcgtagattttttaagtttcatcctagccttgcactgtgttcgtttcgaacatgtgttacacatcctgggatttccaactcccctttcagcattctttccttccattgaacaattcaaccatttacaattcttccactccctttatttcttcaacggaaatcctaccacatatgcatattgcctataaaaattatatgcctcgtccacattacaaaatgtcataccaactttaggtatcaatcttatatcaatattgtccggctgtgcacagaaatttaacatttatgaatcaatgacgaccaaatttactgtgctactgctacaccattacaaaagtatgtatgtaactgatattatcatcttagaggaacttacatggctttgcagaatgtga

SEQ ID NO: 143732 - DNA, 399 bp, Zea Mays
cacacccattgggttcagtagcaggcaggttgcacccactaggctcagtttcagcaaatgctggcactggcacttccttagcaacaggaacagaaggaccggcatcctgatccaagctagacacttagcgaagacgtctctttttctttctcccctcagcaggaaaagctggttggttagaacgcttcgggcgggcaccatcagtcctctgaatatccaaaactctactagcctctaggatgggcgctactaccgatgtctcagcaggggccgcgtcagaagagtctccagctagcatatccagcatggcacttacctctgcatcactcggattcaaaggcacctcaaagtgaacctgcttctcgtcgtcaggaattccttcaagtgaggcaaccaaag

SEQ ID NO: 143733 - DNA, 911 bp, Zea Mays
gcacaaatgaacaaaacgtgtttattaatatgacatagagtggtataaaagtagggagagcattaatcatggactcctcgaatgtaccaccactacaacagataatatggtttcaggtgtacctgctcttcagtggaaccattagcatatgcatctgggattttttcaggaggaagaatagcctatatgcaaaagggacaaaaacttcaataattaaatatgtgaaacttcaataactcaatatgtagacaaacaaactacttgcacagaagaaaaatagtaaatgtcttcaaaattacctgcaactgaatcatgaaaaatgtatacatcttcacatactgcacgttataaaaatcaccaaactgaagtgctgcaacctgcaaggtagctacatatatcagagagaattcaaaacagaacttctccaattggtcccaaacagaagcgtcaggtttgtgtaaaatatcataatatggtgtcaggttaatgtaacatatcataatatggagctcccaaacattgtataaaataaattattctcccatttgtccactgaaattacaagctatggctaaactagacacaaaaaatcctaggtgtcccttacctctgttaggcattgaagtgtaagattctgataagcagccatagggaagaacttcagtaatgtctccagctaaataaaaaataagaagaaaaaaggtaaggctcagcattttttgtaggcacggttggcattcagtcactcacaaagttcagccatcaacataccaacggtgactcaaaaatgaatccaattgggatccatgataagaaagcatggagtgtcgccaatgtagcacggatgagctgtggcctttgcgttgcagataagacatacaagcatagctcatgaatgagccggaattcac

SEQ ID NO: 143734 - DNA, 322 bp, Zea Mays
gtcaggttcaggaagaggaacaatgttctctcctctggccctcactatagttgtatcgcgaaaataattgcctttcattgcctcaatctgtcttctcttaataatggattttccaaatacaacatgacttggccttcatggccgatcttcggcgtcatcgttgtcactctccatatcaaaatcctcactgtcactagaatctccagacagtccagctaaaatttcatcagtaatcttttcaacattggtcctttccatagcttcgtaaaaaccaactaatgcggagtccacatttttcttctcttccgccatctcagcgttg

SEQ ID NO: 143735 - DNA, 777 bp, Zea Mays
ccaaaccttgggcctgccacatctgaggatcccacaggggtggggggaagatttggttacctgaattggggctggcagcaggtggtcgaaaaggtgtatttgagttgttcttagccattctggaatgaaatacatagatacattaagttggacaacagataacaaacttggagtataaaatacaaactcgaattcattgcacataagggtcacagaaaatgatcataaggatgcacccattcgcataaattcatataaaaggatgaagcattcgacataaggttcttacaaaaggaacattagcttcaagcagtcctacatcggttacacatgcatcacagacataacacaaaagttcctaatttatttggatgcatttgtaccactacgacaaaggtcgaggtaccactattacaggttccaaatgctatacctagtggacctgtccgagtcgtaggagtcattgtcactggcctcgtacaattctggtgaggaagggggggggggtgaaagtgaattgtctaggcgctgtctttgcaggctcagtaaggtgaatttattcctccatcctctccttctctgggtcagaccgtgctttgctctccagtgcatcctgctccatcatgtctacctccttacgaatagcaagtagagcattgagaaggtaatgctcgtcacccaaatgacggaaagcctcttctaaaaacgtcctaatattgaaagcaccactttccactgaggaagcaagattgaggaccaagttttgcagcactttgg

SEQ ID NO: 143736 - DNA, 503 bp, Zea Mays
cttattcttgaagtaacctcattcaaggatctgtagtcaatgcacatcctcttcgtaccatccttcttttccacgaatagcactggggctcccaaggtgaggtacatggtctgatgtagcctttctctaacaacccatcaatctgcttcttgagttccaccaattcaggtccggacactcgataggctctcttggaaataggggcggtgcttggtataagctctatggcaaattcaaccttcctttcaggtggcataccttgtaactccttgggaaacacatctgggaattctgatactacattgatagcttctgatggtttaatctcctcaatatgggcggcgacttggtgatagcttcccttccttggtcctgacaagaccaactccactaacacttcttctcctgatagggacactaacttcaccgttctcttgtcacagctaagactggcttggtacttggttagccagttcatccctaggatgacatctatagtcgca

SEQ ID NO: 143737 - DNA, 445 bp, Zea Mays
gctatggttggttgcgcatgcaagagataacaattatcttatttgtttgttaggcggtatgagggggagaaaaaacaaatctaagcgagggacacacgacacacgaagaaagtcgcacgaaaatggtgctttaaaaaagtagagaaatgattaggtgggcatggactatcaaggaattagaatattgctttttattctcattgtcgatgcatggacaatattcaatatatctacctctgcagtacttacggaagatttaagaccatctaagtagccatcacaattacgaattcaaaaatacgtctagctactttgatcctccatagtctacatataaaaattgaaaatggaataataagccaagcaattcgataatttggcacatcacaataattttggtacaatccaacacaatacaataagacctacaacttgcagagggcat

SEQ ID NO: 143738 - DNA, 272 bp, Zea Mays
atcgttggagatggataacatcgtggggtagggaaatcttcgccgccggtgagctggacgccactctggctagccgcggtacctctccccttgctcaccacccctcggacaaggattctcaccgccgttaagccatcaccattgtccgccgcatgtctaaccctttccaccgcatcgccataacctgctctcgctctccgttgatcaccggagcgattgccacggcgttggacaccaagccattgcgccagtgacctctccctcctccgacc

SEQ ID NO: 143739 - DNA, 325 bp, Zea Mays
catatcgtaagtgtgggggacagatatccccgagtccactagaaggcgaaagacccttgcatggggccacagaccggttacccccgcaaggtcgtctcgtcgtgggtcgggcaaagactacaagtgggatgggccgaccccaaggaggcaatggactcatgcccagattgtcggtcggatcgtgcataatctcaagaaaccgtctgttttccccgcgcctggcgccctcgaatgtcggagtagttcggggtagagtcggcgggtttttctggagtttggttgagttagttcgctattagctaggagatatgctgaaagaacgtga

SEQ ID NO: 143740 - DNA, 570 bp, Zea Mays
cggtggtacgggcgaccgtggggagaaggcgcgagctcgggtctgcacggcttgaagtttcaccatggtgagttttccttccctacctgttggtcatggtcacgtatggttcgagcgggatcgtccgggcggaagttagggctcggatggcgagcacggaactgctcgctggtgcggctatggtgttcggccgtgggggactagctgggaaagaaaagagagaagagagaggggaccagtgaggttgaagacgatctttggggcgtggatttcaggattaacggcttagattgaaggtacctgccggttggatcctaacccttggatcgtgatcgcatggctcagattggtttgggtatcataaaatcgagagcgttcaaataacatccgatggtcggcgttgcataccgtttcgttataagatacgatctaatccccatcgtccgctgtcgatccgacgtctcagattggcagataccctttcgctcagacacaattgcataaggacccccgagagaaacagaaatcaacccgccgtccttgcgccagtagtctgagtctcggtaatct

SEQ ID NO: 143741 - DNA, 934 bp, Zea Mays
gcgccaaataccagagagaacaggggtctcggtgcaataaatcccaagacttagaataatccctgctgtggactgcgggttattacccctaaaacccaaggtctctttagtaaaaggggcacggcgatgggtataagcagcccctggctgttggatcgcaagcctagcgcctagattagatttattacccagcgaaccggtacgcgattccgaccctaagatccaacatcaacagtgcagatcatatttgccccgaaatcaccctgatccgcacgatctgacctgaacggtcctgattcccttgcctccaatcgttacgccaggatccaattacagccgtcgatgaacaatcctatggtacccacgacttcttccctcccccgcgctacggacagaggcgccatgcccgcatggcggcggatcacaccggcgacatggtacggccgcacccaccaagactatacctaggtctgatagcgtctactcgaagcggaggttaaagcggattcatggatgcactacataccgccactgatgccgatgaagtacccagtcacggaagaaggggatccgcggaggattccggtcgacggcgagaaattgacgttgctccacagcctcacgacccaattgcttggcacatacggcttccccaggcgaagacaatactccaaaagccaactccgagagcagagaccccccagcgacggctatccctggcggcggcgcgaatctctctctctctctcaccggcgaggctctcagtaggcgatggcggctaggttttcggtgatttggaacacggcgagcgcggccgagggcccttccccaagttttatatgcaccaggaaaagccagcggattccaagggtgcgcgacgaaggttgttgcgcgaattctggcgagcgaccagggagtcgttgcttctaccgcg

SEQ ID NO: 143742 - DNA, 647 bp, Zea Mays
ttagaaacggacgacccggattaggtctcacatccccgaaccattacgctacgcgagccttggattaagatccaatgaccacaattttaaataggggatacgcaagacgtccgcccgatctcgattcaagagaccagattcccctaatcgaaaaggtacaccctagattgatctgaactgttattcgcgagatcgacgaccagtccatgttatctctcaccctcatcgctctgccaacggcggtgcccaattcctgtggtggcgccatggcagcagaaacgacgcccgcaattcggcggtctaatcgtcctaaggaacgcgcaaaacaacaattcatgctcacgtgaacatgatcgaaggtgtcttaccggatggcatggtgtggagggcactactctcggctcgcagcggaccgacgaaagaggttcagttctggtgagaaatttcggtgacaaagagtgccatcccgcccggcattgccataacgagcttctacgcgcctggagatccccgatgaccatgccacgcataccgaacgatggtagatgagcggaatcacgacgatggcaacccacgcaaaccctcctgctctcctcccccggtggtggtcgcgacatagctgtgaggcgcaggcgaatctaaccatg

SEQ ID NO: 143743 - DNA, 360 bp, Zea Mays
cgcatcaggaagtggacttggatgtgtactaatgcaagagggccgagtcatagcttatgcttcaagacaacttcgccggcatgaggagcactatccaactcatgatttggaactagctgcagttgttcatgccctcaaggtatggcgtcattatgtgctgggaaatacttgccatttatatacagatcataaaagtctgaaatatatttttacccagtcagaattaaacatgaggcagagaaaatggcttgagctgattaaagattatgacttggaaatccactatcacccaggaaaagccaatgtggtggcagatgcactcagtcgcaaagcctcttgtcattgtcttaccgtaagggc

SEQ ID NO: 143744 - DNA, 322 bp, Zea Mays
gcatgagcagaattaccccacccatgatttggaattgggagccatagtgcatgccttaacgatatggaggcattacctaatcggaaacaaatgccatattttcaccgatcacaagagtctgaggtacatattcactcaacctgatctcaacctccgtcagcgaagatggttagagctgattaaggattatgacctcgaaattcactatcaccccgggaaggccaatgtggtggccgacgctctcagtcgaaaaccattcggaataaaagggaccaactttctagaagactggaaggaagaatcagcacaactaaatgcatgt

SEQ ID NO: 143745 - DNA, 563 bp, Zea Mays
tcaagaccgaagacgaagcgggcgcaaatccggctccgtcgaggttcgtcgcgaccgcttggtttctttccccgtccgaccatcgacgccttcatcggatccgcaaaccagctgttggattcgtcttctccccgcccaaatcttcggatcttgaggtacgcccttcgacccatattgtttatgttaatcttgcgcacaactttgaacaacttattactacggcaatccagtaatcctttcaaccgtaagaaatttcatccgaaaagaaacgatgaatccccagttcacaaatttccgcggatctggtctgccttttagggttacacaattgtaaggtagtcacccgctgaatgtccttcatacttggtcgaactaaatttggttgtgcttagtattagggccagaggttcttcaccttccattattttgtaatccctacactacggactagcttccatactgccttcaagtgtagtcttctggaattaattttggatgaacactgtccacaacaacagctcattttagcaaatgtactagagtgattcatcgtagtgtgcccc

SEQ ID NO: 143746 - DNA, 485 bp, Zea Mays
gctacgtgagaaacaacatgtcgaccatattgacttaacaaagaaggactgagcttagagagaggcaaactgaggctcaacttcttactgcagagggcagggataatgtccatagacttgtggcatttatcctttgaacaaagaatctgtttgcagcagtaacttgatcgacaatgtgaagaaacaaactctgcctcatccaaaagctatacaaccacccacattttagcaaaagaacaatacaaaacaatagaaagtagaacaatgcaaaactaaaatatagaatctagagtaaagtagcaaaattgtttaccgacggcggaattggtcatcatcatacaatggacgctctatgaaatagtcctgcatcaagccatcctttgcggcttgacgatcacgcttgtacgtccgatgccccggaacagaacctcgtcgcttccttttattctgtaccgacacaataatcattgtggcctccatatctt

SEQ ID NO: 143747 - DNA, 756 bp, Zea Mays
ggaataattcgggcggttctgccatatattgccatttcatcgccaaggtaagaagggtaagtgtaagaccatgtagactaaggctagtcggttgtcctcatgtgtgggtcaccatgcatgttgtatagggacaggtagcatttcttaccgcaacttaggagggatagtggtagcttgtccttacttttcaattatcgttgtcacatcatggtgatgggctagaatgaacttttctgcaggtacactaacctcgatacgagtagatcgtgtagttgcgcaataacgagtgaactggtacgccaccgctaatgacgttaacattaataggtcatgaggtcgtaagttacgtgcatgcatttggcataaacatcatcttgatcattattgcatcgctctcctttagcttgggtaggagttttgtctgcacttataaccaattaaaaatttcttctgctatttctcatccaatataaccttgtaacagatggctcgccgcaggctcactgcccataagtccacgggaggacaggctccacgtcaccaacttgatgtgagtgtttctcgttgtcgcaacacctttctttcggagtacagtatacccaccctactgtggcgcattctttttgctttaggttacctagagggagaggaaccacattacttttgggaagggaggttgtgctgaaggtatctaggtgacagccgtggttaagtctcgggcagataatctagtgatgggtggctggcactttggat

SEQ ID NO: 143748 - DNA, 578 bp, Zea Mays
ccaccccggtgccacagaggcgaggtgcctctcgaagggcaaaggtctgttagggcgcgactagtcgggcaggggccttgtcggtccccaccatgtgattcccccctttgtttttagtgtgccacaactcctgatcccttctgtcttttccccagcagctcctctcaacttgttgctttcatgtcgcgcgtttggaaagtggtttcgaagaagaggaggaggatgcctaccatcagcgaggtggaggagcggttgcactgtcaagttcttccttaacgatgctttcatagggtgacaccgggggccgatgtcctaggtttgtttctcttgacgttttcgagtaaccctttcacagatctagtgagggcggatgatgctctccctttttcttttttgtagtgagctcgggggctaccttcatcgagacagtggaggtcacggctccaaggggatagcgttcctccttgttcgtggggagccccaaaccatgctaccggccctcggtgggcgggtgggtgtccagctcactccatactgctctgtagacggtgatgaccccctaaccctatgcagggagc

SEQ ID NO: 143749 - DNA, 360 bp, Zea Mays
cgacggcatgagtgccactgcggcggaatccactgagtcacggcggccgccggtgagtaactccggccgagcacaggagagggtgccacgtacgagctaccttttcccggtgttatccacccaagaccctgcacgattccggacggcgatcaacgacggcgagctgagctggcgttctgatccatccaaaacactgtaccatggctcatctatttgagtcgcctgaaccggccatgatcccacccgattatctctcgattcttgttaggaacaaagcgatccctcttaataaaagttgttcactaatcatcaatctccaaacttactataggattcctggatcaaaaccgaacgtattaa

SEQ ID NO: 143750 - DNA, 479 bp, Zea Mays
ttaaccccaacaagacaaatctctctctccagcgacgagtgagcaatctgcctttcacatattcccttcaccacatgggtcgtgtctccccaagctctcaataattccaaaggcatttccagcctatgtccatgcctcatcccaacctttacactctcataccgagctgttcttgcgctatcagtaatcagtaatctagtgcctacacaaatacctggaaaagttaagaccatcaaatccaatgcagcctgacagaaataaaatggttgaacgttaaagttgcaaaactgtaaaacagttagctatcctcaagaaaactgagcttattagcccatattaggtcacatgacaaactgaacatgaaaaaaatacatcatagcaccatgatatgcatctgtttggtctttacgatgcttgtctagatacataaaggaatcagtttgttttttttgtgtccagactctaaacatctatattgt

SEQ ID NO: 143751 - DNA, 479 bp, Zea Mays
ttgatacacatttcaaatgagcaatcaagtgaagagttcttcgctctctccatctccactcatactaacttggttttagctttcactaacactcattataaacaaagtttgtgttgtttagagttgatttttacatgatcacctattcaaccctctctaggtgctctcagtctcgccccgcgcatccaccgcaccacaccctcgcagccgttgttgagctaccgtcagccctgccccgcactcgtcgcatgctgtgtcgtgcgtctcgccatcatcgttcgtcccacacccggaagagccctacgacctcctcgtcatctgtcgttgcgccacgcgctcagcttgctcgtgcaatcaaccatgcagcagatgccgcgcctgcacacaccgtgtccgaatgcccacaccagagccttgctccgcgcacgtcaccgttgtattcactcctctctgtcgtgagtcatcgccgagatgagaac

SEQ ID NO: 143752 - DNA, 499 bp, Zea Mays
tgtgaaggatgctcccgatggtcatgtgactaaagggtgttgtagtggcaaagcgagaattaagtttagtatttttaaacggttagttgatagcatctatcggtgtcgtcatgatttttgttgtatgacggatcgatgcttcactttataaattattgcattccatgcccatcggataaataaatgtcttgttgatcgattagagatcttatatgagcgttatcgcagcccaagaattattggaagcaagtagcattcgtaagtcggtcctggttaaaattgaagaacaatccgataacatatgcacctaagtgctttaggtccttcagtagcaaatgtaagtcttatggagttttatgccatgtgttaatgcctccatgttaggcccccaagaatgtgccattttaagtgacctgtgtattaacaactttaagttgagcaatgattaggaaaagctgattaatctgctccaacccatggtttcgagttacaatgtcta

SEQ ID NO: 143753 - DNA, 1380 bp, Zea Mays
tgaatgctggtggttctagtttgctatagccaacttctagatctcatagtttggaagaacaatgcttacatttaactaaacacttttatttaactaaattcatactttgatatagctaactttgcatgtgtctgtttggaagaacaatactgaaagaatgaatgattatactgcctgttatggtggtttcacaaagagggtctatttcttccttttgtttgtggtgcacaggggtaaggatgtactgtgcaatttgatggacaagtgtgtggtatcaattattatttaggtctacactgcaatatcttgaccaggcattttttggtatcaagcttgtgtgtgcattaattaattattctgtgatgaaacaagtctacttagtgtgatgaaaaaatatgtatattgcttgttgcttttccagtgagataggttcataagactgttatgtaccgagtctttgaggacactttctcaggctcagatatatctgattttgattgaaaatgctgagcaaggaaggatacacttcttggtgtttgcagtttacctagcattccaacagtgtcattcatcactgaagctacattggattatttagtggtaactcaactatttgaaagttaggagtttaggaacaaatcttatgcaagtagcacaaatattactctaatatctaatgcctgcataagcaataagcatttactactcactttatcacactggacatgttttatttgtgcatcatgttggctaagccaatcttttggcctgtctaggatgatttgctatcatttggttacaaaaaaactggaatcccaaccaaatttggactggggatttatagaatcattttgctggcctcactggcgtggtcgggtgcgcaggagaaggcatgatgtggcagtagggtagtgtttgcacatgcttccggcatccagcatttcgtggttaaccatgttgaaaccacaatctcttagactatgtatctggtttgcaacataacattccctgatgattttgtcaatgaagcaacataaatactggacgtgttttgatggtagaaaattagtgtcatgtggacccatctttttcctgcaaatgtacaagatttggcatggcatggtgataatttaaacactacagtttttggtactacccacagattgtgttgggcacaatccaaatatcacttctctgcccttgctcagatttgttggtcacagccaaattttagttcttgttagtcacagtgctgagcctttgtatttgaatgatcatcatgcagtttcttataagtcatttccaagcattattctagaccaaattccagtttttgcctgcctttacatgtgtggttgtcacggttatgctgtccaggtg

SEQ ID NO: 143754 - DNA, 663 bp, Zea Mays
attttgatgagattaaaacccaactatataagtcacgtataagtatgaaaccaagtttggtgtagctagcaaccatggccatcatacatctattagttgcaagactatcttcaactatatactctatattttgctctatatttctcctttacagatttctctaaaatatccatcctctatatctcatcctcttcaatagtgtcctatatatctcgtcctctatacattaaatactcatattagaggcatattttgtgccatatttttatatgtatgtatttgtcataccatcaaatgtcttatacatattttagttttgcttaatctattatttaaattataaaattggatagagaaaaagaggtaatgtgtgtgtgtagagagagagagggagagagagtgagagagagaggtgatgatgatgatcctttaaatttagagaacactttatgtctcattcggcaagccgtgtaataacacagattgacgccgatgggggcctactctgccgaaggtcctcagaatacctttacttcaacatgaacaaatgtgttttaggtacatagctaatggcggacgaagctggtctttagccgaagtgctactaagaaaagccaaagcagtgcgaagagaagctttgactaatacatacgaatgacaagg

SEQ ID NO: 143755 - DNA, 553 bp, Zea Mays
gtgggaagtcaattgatggcttgacgaaggatcaccaaccggaacaacccgcaatgcatcagtgggaaccaattcagtgtcatcagcagaagccagaactctgtcatcaggtgcgctggcctctaaagcgactccttgacccaaggcttgggctatcgccatgcaaccagaatgtggaggagaagaccctacgtgaacatccatggaagtgtgggagggagaacccactcggacaccctcgggggctaggtcacagctcgcgctacccatccaagccgaatcatctccggcaacaccctcgggggttgggtaagcgccagcaccatccttgagggtcgagttctctgcaacagccacctctaaggctgaaggaccctcagtcacttccgtgggagcagtgcaatctagaccagcctcctgaccctcaagaccgcgctctaaggtcgatgaggcgcgggacgctgcccgggatgaccccaacccggcatggggcacatcagcacaaacatccatcacgccaccatctgccggctttgacaacagatcttctgga

SEQ ID NO: 143756 - DNA, 433 bp, Zea Mays
aatagcacagtatgtggcctggtgtgacacctgtcagcgaacgaaggccgaacatcagaaacctgtaggcctgctgcaacctctcccagtgcctgaatggaagtgggaagaaataggcatggatttcgtgaccggactgccccgaacgcagaaagggaatgattctatctgggtaataatcgatcgtctcaccaaggtggcccacttcgttccggtaaaaaccacttttggaggagccgcccttgcccgaatataccttaaggagatagtcaggctccatggcataccatggaagatagtgtcagatagaggaacgcaggtcacctcaaaattttggaaaggcctccagcaagaaatgggcaccaagttagatttcagcaccgcttatcacccccagtcagatggtcaaacgaaaagagtcaacaagatcctc

SEQ ID NO: 143757 - DNA, 346 bp, Zea Mays
gtttgctgcttatctctcttctgcgcttctgtatgcctgtttgtttttggtgggtgcaaatccccaaatccgatttggctccccgcattgcgcacaagtgccgccgctgctcccactgccgccgcataagcctgagtttccttggccatattttttctgcaacaaagatgggatggtgatgcgtgagcggatcttcagcgagagagtaaagatcgagtgctacaaacctgcaaggccgaggcaggcttagtttcagagaaaattggtcgcggaggcctcatcatgctctcgttctgttgtggcctgtggcgatgccctgtcctccttggccggttccaagcttgtg

SEQ ID NO: 143758 - DNA, 379 bp, Zea Mays
gatcatcgcgaccttttcgcccacgcctccaacctataaaagctcggcctcacgacctccttaggccatagactcgaaccgagctcgcgcaccttgtccagaaacataaaatgggggaaacatcaccgtgggtgagggaaaatcgggccgccatcgtgggacagccaccttggcgtcgtctggcatccaaaaatcgggctgggggtgtgcgcatcagctcaggggtgttctctggtgagacagtttgtgccgtggggtatggttcaacaacgatttctcgccggacatgggattctgccgcagaaccactccttaccgtggccggtgcgtctgggggcacggactgcgtcatgggtcccctggcctcgatcgccttgtc

SEQ ID NO: 143759 - DNA, 633 bp, Zea Mays
gttttccagccacaaacccatctgcacgtgtgcagtcctaacaaaactgctagcctgttttcaccggtgacgaacgcaaaacctagtctcacacttgcggatcttctctcctgtttcttggaggatggagggagtggagaacctgctgcaacacctgaagctgtcgaaggaggagatgacgcatattgatgtgggggagttgaggagatcggagacgtcaacatgccaggcgatcgggaagctgctgtctgagagaccggctcatccggatgctttggaacgggcgcttggaaggggtggtgtccgctcaatggtacggagtgtaaaagtctaggtgagaacaaattcctcttcacctttaggcaggcgtcggggaagaaaagagctcttgaggaacggccatggatgttctcaaacgagctcttgattatggcggatctggatgaatcgaaggcaatagaggagattgaatttttttatattccaatttggatccgggtgctgatgatcccgattggactgattaacaaggagaccggggaggctattggtaactcggtgggagagtttctggaggttgaagaagatgatggggtggttgctgtggggaagtatcttcgtgttaaaattatg

SEQ ID NO: 143760 - DNA, 360 bp, Zea Mays
tagtttgaggcattgttggagatgctcttaacacgttcttctcctcctgcagatagcaataataagtgtccggtaccgtgatgttagacacaagcccaccaccacgtcttgcaaataataactgctggtccatccatccatcgtccatgaaaccgcaacgacgacaccaccagcattgtagggtcggttccgtacatgccgtcgccatcgcggccgtgtcatcagggcctactatgttccttgcttgacccgtgccgtgcccgtgcccgtgctccagccgtgtcgcggtggactttgcatcgatcggctgacggggtgatgtcctccccgcaaccacctgcgtctatactctgcttctcc

SEQ ID NO: 143761 - DNA, 457 bp, Zea Mays
agcttgatggcgttctatgccgattagagccagacattggatgtaatgagtcatgtgatgttagtgatgatgaggaaaaccaggtaataaaattcaatttttttaatgacaaaatatttggaacatatgagtatgtatggtcacatattttttgtaacaggaaggagaaataaataataataatgctggcgatggaatggaagaagatgacaattcaattatatgccacaaaatagtatataaaagataaatatataatcttgcatgaagtattgtatgtaatgaatatataaaatcaatgtactaaaaaatattttattttgtaggatgatcataacactatgactggatgtggacatgtgttaaaattaataacagctggtaaccaagtacatattcaaaatttagtgttcatttgtatataatgcaatagatgtttatgctgcattgaaatgat

SEQ ID NO: 143762 - DNA, 653 bp, Zea Mays
gacgggtgcacgcttgtctcctctctctcccgcactcgactctctcctccctcactcacatgccttcttctcccactccgataccgcggcgccatggatgttggtggttagctctcgtggccatgcctccactttcctcctctgcccgagtcgagccccgaaaacgcttcatcgtcgtgtgtcaaagccccagcgcatccttcccaagcttgacagaccttggacaccaatcgtagacaccaccgcgcccggttcgtgccgccatgtgtgaaccgagtgccgtcgtccaccgttcgaggagtcgaagccaccatcaaactcgtcttcaactgtcgcttctccccgacccttgccctgctcgactcaccgctagtaagtcattggtcgagctcgctttcctctcactttctctctcggccgaaggaaggggaaaggtgaccgcgggtagaaatagggtaaagcgtgtggggggggttcgtattgtcatagacacaacacattagtgggataagggcatatctgtgagttttgatttgttttaagtctaggggcctacacagaagattgttttcctttacctttctgtttttccttgtgacgaagttgtagaaaatctttaaaaaccatgacttgagtttcagagcacaaaaatc

SEQ ID NO: 143763 - DNA, 897 bp, Zea Mays
ctcgaataaaattctcttcggaagaatatgcaccgaccttgacaaagctagttttcaatttccttacgcaatccaaggatttttcaaagcatctctccttggatttgcgaagctcctcaacatttttctctagcctagtgttcaaccattcacttatttcctgtttcgcttttgccagttcaaaattttcattagctttagcaagttttttccgaaggtcgtcaacttcggctttatgagcttcggattgagcgttaaattttgcttcgtcttgcttcactttgtccaccaatgaaagtaggattttatctttttccacggcttcatttctcagcttgataacttctgatcgaaggttgccaagggctatcttgcagctttcatcttcagcattcttctgcgcccttaaagagttgctaagaattaagccctacaaaaagatagaatcagcacgagaatacaagacaagataatctatttttaagttcatcacttctgtacctttagactgttgtacgcaaggctgtctgcgtgatcatcttttgacatggcggagaggccagtttctagcttcggaaatcccatatttttggccatctctcggcaaacggatatttccttgctgtctaggagacagtataggaaatcatcttcatccgtgccattgtacaccaaagcccccttcgggtatttcagttcccgggcgtagtgtttagcttccacgatttcttcttcagataacttttttcccgaagcatgtcgaatgataaaatcaagatcttcggacaatgcttcaggaataggagatctagctttttcaggggcatccttcttctccagagtcatgctagtatctggagattcttgctcagctctctgctcagttgcaccaggccc

SEQ ID NO: 143764 - DNA, 730 bp, Zea Mays
tggtgggataccttcaatgtcaccatcagagatgctacctgggcgaagtttgaaacagctttccgggagcaccatgtgccccaagggctcgttcagctcaaggaagacgaattccgggaactgactcaagacggaagatctgtcagcaaatatgtgcacaagttcacggaattagcccggtacgcaccagatgacgtcagtaccgaagtcaagaagatggcccgcttcctgaagggactcaggccagaactcaagaccatcctagccagccaagacttcctcagtttctctcacctctccaacaaagccatgcaagtggaaagggcaaaagaggaagaaaaaggccatctcaagaggaaattccaagtcctccaggctcagcagcaagatcggcaccagaaaactcgatcctttggatttccacccaagggaccaagcttcagtagaccagctggacccaccacgtcacgtttcagtcagcagagtcagagctcctttcatgccccctcagttgcaagcaaccaacccccggcgaatgagttttggcactgcggagatcctagtcactacaagaacaactgtccccagctgaagccatcaggacctgcttactccaactcggtgaatggccccaagaataccatcgcatccacccccaaggcaccctcctccatcagccagcagaacaagaccccgtatcaaggaagggctcgagtaaatcacatcgatg

SEQ ID NO: 143765 - DNA, 695 bp, Zea Mays
gttcaattgcgtgatcaattttggtggccaaagataccgatgacaacatgaaaaaggactcgggtggcaccacataatttctgtattggttgtatccaccaactccaaatcctatatcttccagagaaaagctatggcatgtattaagcgtcttgtaaagagcaatgccgatatgctagtatagttaactttggagagttgaatgttactggtaaccttcatggaaaactacttgttccactttcataactacaaagtaatcatgtttatgaggtaaatcagatgtttggtagtaagtgcaatatcatttaggtgttgtttgtttcagaaatgatttcaccaacgtaaatggtactagatccaaaggacaataactacaagataatcaattcctcatttgtttggttccacactatcgtaccagctaccaggtacacctaccgtccgccaagctgcggtaacaaatcacgccgaatttacactggcatcagacccgattacataggacctgaatacagccaagtgaactaataacttttttcagacttagattgtgttgtagataacgtctcaaaactaccgaaccaaagactaccttagttgttgacctgacccttcagctttaagtacaccatatatttcagcatcattgattccttgggctcatgtgattgattgtcaagcaaaattctgat

SEQ ID NO: 143766 - DNA, 432 bp, Zea Mays
ggacattaagactatgcatgtgcatgttttctatgttatgtcttatgcacttggttactatttgaactttatgtctcatgcaattggtgaactacgtcttatggttgtggacaaatatttgtaatattctgtgggttgaattatgtgtgttaaatcttatgtttaaattagtttgaattattctgtgaatggttgatcgatgagtgattaaatttgctgcgcttacttgacatattacttcttgtatgcctcgataaccatgactgtaggaagatctccatcaaaactccgatcgattatgtgtgttgtatcttcaactagaaatatcatgcacacacatagggggagctattcctacattctgagttttattgggatttatctatctctcggacggaacttcaaatcaagataagtcttatgaaactcatc

SEQ ID NO: 143767 - DNA, 518 bp, Zea Mays
aagcgtaccgggtcccttggatggggtccagatccctccgagtaaggtacgggccgcaacaaggtcctgggacaggggaaaccctggcatgagcaagggtccggtcctgacgcgtggccgagctttactctgcgcatttgctccccgctcaggcggagacccgatgcgcccacgtggctcattgcccgtgacataagccagcgggcggagcctgacgtaaggcccctagaccgcgcagaatctgcatttattacggaaaggacacgccgcctgtccaccctgctgacaggcgatgtgccccctcagcatttattgcgtcctgtccactccgctggtaggcggcgtcagggccaccttgcagacggcgcacctgtccaatccactatcaaacagtgcgcccgtgccgcatggcgcactgtgctcatcatcccttatacgagaagcttcccctgcacgccgatactacgcagatctcggatgtcagggcgcaagaagattgctccagcagcgaacatttg

SEQ ID NO: 143768 - DNA, 444 bp, Zea Mays
gtgattaaattgtatagtgggtactcggacacgctgatcagtttgcgttggtaatcggctgagttatggcattagctgaatattggctgcgccctggcaacacgacgcagtatttgtgccgttcgaacttggctgcgtcatgtgattgctatgtcgcgctctcgcttaatcggatcgctcccgttgagttggaccgccatcgctgagtcacacatttttcgagggccctgaaggcattgcatgtgtgtcgcaactattgagttacaattgcgcttgttgcgtctgttgtgtctgttgcgcgtacttatcgtgtacccctactaccaagccacagttgtgtctgttgcacttattacgaaggatggatgtgttgtcgtagccctgatggctgcacacgcgttgacaccagacgctagagcttgtactcgtgtggattgtggtggg

SEQ ID NO: 143769 - DNA, 335 bp, Zea Mays
gtgcaggacaaatatagcagcaaattttctaccggctgaccgggcgttgctcggcgtggttgcttgagtactggcggagtggtaaagaatttcttcagtgcctctagagcctcctgtgcttccgtggtccactgaaatttgtccaccttcttgagcaatttatagaatggcattcctttctcgcctagccttgatatgaatctgcttagcgctgccatgcatccagtgagcctttgaacctttttctgcgaccacggcggttccatcctcataatggcctcaatcttctctggatttgcttctattccccaatgactgacaataaacccaagtag

SEQ ID NO: 143770 - DNA, 346 bp, Zea Mays
ccgccatccatggcggcatttgcgggggcaggggcctgcggattgcagagatcgcgcccttccatcgacgatggaggctaccgggcggggtgtgagaacgcgcgtgggacggcgggggcgggggcacggtgatgctgtggacgccctcgttgtccccttaaggtataagtagagatatccgtcgttgtttgtatcgatggcatggtttgttcaggccagcaggtccatcaggagatccatgtgcagtttggatcgagctgatcaatgcaagggtgtgtacatttagcaggttctagagttttcaaattgctgccaaaatgctaaaagaacgagaaacgtacgtttc

SEQ ID NO: 143771 - DNA, 622 bp, Zea Mays
gggggtgcgactgatgggtgccaaccaagtgagaataaaccttctgagatgaaaacagattggaagaggcattgcagcgccaaatatcattgtgatcatgcaactgaagattagctagaatgtcctgaagtgaaagtagctgcccgaacgcttcagcagaaaggggagtgtggaacaattcattcggagaagccagccgagcttgattaatgttgatctctctgacagaggcaaaagaccaaagctccgagaatctttcagatgtgcgcagaccattccaacgatcatgccaaaggagagtagtttttccatttccaatctccactcgggctatttccttaaatacatcttggattttgagaatatctttcgaccagaacgaaccaactagtttaactgaaggcaaagaattgctataatgagtggcccagataatgttaacccacgggatgttgactctattaaagaatttatggaggcatttcataaggagcgctttattttgcaactcaagattgatgactccaagtcccccctgggtttttggtttgcagactgacttccaagcaacttgagaaggtttttttgcatttatgtttgtccctctccaaagacagtgccg

SEQ ID NO: 143772 - DNA, 582 bp, Zea Mays
ggccatgtgtgggcgatcagcttggtgagctgcgaagggttgcccgagcggggagaaaacttctggcaagcttcgcacgacctcgtgactcgattcgcggtgcatataatcacgggccaataaaatccttgacagatcaccttggcagcgagggccctgggccctgagtgggagccgcaagttccgctgtggacttcacgtaggatctgaatgccttcggtttcggtgacgcattttagcatgggttgactgatccccttcttgtatagctggtccccgactagtacgaagtcccggcttcggtgcttgaggcgcttggcctcattgacgtcactcgggtggtagtatccttgcagaaacagtgttattggggcccgctaatcttcagtcataatgaggttgacgatgtgatggccttctgcgttgttggttacttgtaatccctctgggttgcggacggctggtgtgccaatgacgtggtagaacacgtcggagggcaaggtctcgcctctggccgctgccttagccaacgcgtcggcctcttcgttcctggcacggtccacatgctgtaaggtgaagccc

SEQ ID NO: 143773 - DNA, 428 bp, Zea Mays
gaaaccactccgacaccggaaaatgatgaggtggtagttttcaagagttttttcagagcagtattgcggtttcccttgaacgagatgattggggaagctttgaataattacgaaatttatcttcatcagctgacccctaacgctatcgttaggctcagcgtgttcatctaggctctccgaagccaaggagtagacccgaatgtcgaagctttttgccaagtgcatgagcttcattatcagacaaaggccagagaagatgggctgcatgagaattttggctgttacaactttgcttaccgcaaagatatgaaggccatggtggttagctatcgcaccaagtggccaaccggttggaaaagtgagtggttctatgttaaggccaatgagaagaagagggagaagctcaagacgctagtactgagcccgct

SEQ ID NO: 143774 - DNA, 351 bp, Zea Mays
aggaccctcctcgtccctttagacaggataagggcaaagcagtttaccttaagaagcaagggggcaagaagaagagacggttggacagagccacccatgcaaaagttgtcgcagcagcagcagatcaggcagagcagggaggtcagctaagaatcgcctgtgaccagattgctttcagaatccgttgtctctcatctcgtgcttgctcctccactgctcagtccactcccttagaaccagtcaccactcgacctcccacttcgccagctcctgccgctcttgagccttccaccacacctgctgcgtctaccacctccaccacaccaatttccaccgctcccgctcctactc

SEQ ID NO: 143775 - DNA, 731 bp, Zea Mays
ctcataaaaggtctcaaattcaaatttgggattcaaaataaaaaggagacaaaaaaggagaaaggaaaatataaaaggaaaaagggaaaattattaactgggctcgctggtctcatttcggcccatttgccttcgcagccgcacggcccatcctcgcgccatcacgaccacgcttgcgccgacaggtggggccctcgcgacagactaaacctccgtgccgcgcatcctctatagccgctgatgggtaggacccgggaaccagactccaccacgcacgctagccaatgtgaggcgggacccacacataagaaatcaccctatagatcttctccattcgcccgcgcaacaaaccaaggccatcaccgtgaatccccttcgccagctagccccaaccacttcgcccacctcaccgggagataaatatcatgttgacccccactttctcctcgaccataaccctctgctcacagcggattggacgcctacccattcaagcgcgactcaccaccattggcgctcttacgacgtgtgccccggatcagtgccgcaccgtactccgacctgtgctctccctccgtcgattcatcgagtggtgtggtgcatggtgcgtgtgtgctgcaggcgaattactgccctggaacgggggaattcctcgtcggaatccatacctccgacgcggaaccacttgcgctgtggtctgccttgttcacctcacgatcgtcggtaagagc

SEQ ID NO: 143776 - DNA, 324 bp, Zea Mays
cgatcaccaaggaaaggcagtttcctgtcaagcccaaccgcccgcaaacgatccaatgatgtttagtctaacagcagagagcatgtctgtaatcaaggagtttgaggatgtatttccagaagagttgcccgggatgccaccagaaagaggagtagagttctatatagatctcattcccggcactgcgcccatcgcaaagagaccataccgcatggcccccaccgaattggcggaattaaaacttcaaatttcagaactacagcaaaaagggtacatccgtcccagttcgtctccctggggagcacccgttcttttcgttaccaa

SEQ ID NO: 143777 - DNA, 723 bp, Zea Mays
ctgttggagattcaatgtcctaaggctcactccgggaggcatgcaaatcgggtagcttagtttaactatccagtcatatactagatctttctaacagcacagctatccatacgttcagctagaatagagtagacattgaggcctagtggtcagtcaagaacgaagaatttagttgccggtcacagtaccaggtaatatggtttttctctctccttccttccattttggctggcctgtttagctgctctgtcggaagaagaattacactgctacagtgacttcagagcagctattttagctttatctggcgggatgactgctctgttggagtgagccacacatgaaaaatttcattttgacgggcacaatactacatacagtgtgaatgacctgatgtccccattcacacgtttgatgtcccccatttgatgtgacatatatgctgaaaaaacaaagaacaaagatttgcagagatgcatgtggaggaaagatgtgcagaggaatggccaacaatatatatatatacacaacaaggacatagtgcaaccattacaggaataaaataaaaatacgaaatgacagtgaaagccgttaatttttcaatgagaacgtgcgtccgcactaatcacgtctcattgtcatctttgacttcgtccacaaaaagaactccactggatgatgcccggtgttcagccagcagctgtgactcagcgtggctggaac

SEQ ID NO: 143778 - DNA, 793 bp, Zea Mays
ataggggcgcagattaggccaacaagcacagccaaaaattcgtaaggaagaataatatggcttttggtgaaaaagacgttctataggagtttgattattaataaccgggctaggtagtctattaataagatatgtggccgatagaaaagcttcatcccaaaattttagcggcatagaagcatgagatagtaaggagaggccaacttcgacaatgtgtcgatgctttcgttcagctgccccattttgctggtgcgtatgagggcaggagaccaaatgagatatgccaattttagtaaaaaatggatttaacttttgatattctcctccccagtctgtttgaatggtgtggatttttctatcaaactgcctttcaataagttgttgaaattcaataaatttttggaacacctcagatttcagtttgataaggtaaatccaggtaaatttgctgtaatcatcaatgaagctgacataatattgttttctgcctacagactcaattgcaggaccccagacatcagaaaatatgagctctaaaggagagctggacttactagatgaaacaggatatggcagctggtgtgcttttgcttgctgacaagcatcgcatacagactcattattagactcatctaaacaagggaatttattacttctaacaatacgttgaactgtagtggatgaaggatgttcaagacgatcatgccaccgagagatcgatggacgactgactccataggcatgacgctttattgatggtgatggaggaagagggtacagtccatggcgacat

SEQ ID NO: 143779 - DNA, 578 bp, Zea Mays
cacgaacgcgtttgtggatgcggggcgagcagtaaaaagcaaaggcaggtccatttcaggggaaaacacatttcagagaaaaacacatttagggtttctaatgtggcataataaaagagatcaaaaggcatctgtgccttatagtgtaggtagactaaaaaagggcagcaaaaagcatgcgtgctttcaagtgtacatggagaccccattgcaaagattcaaaaccaaacgcaatgtctccatactggaaagcaatcagagtttgggacccttctattgagcaacgaacagggtaaaggaaagtgaagcctgaaaaggatctatttacctccaagaaacgacggcggcgggggctttcaagtgtacatggagaccccattgcaaagattcaaaaccaaacgcaatgtctccatactggaaagcaatcagagtttgggacccttctactgagcaacaaacagggtaaaggaaagtgaagcctgaaaaggatctatttacctccaagaaacgacgacggcgggggctggacgcacgttgaggcagcggcggcgtcgctgtcggcgctagcagcgtggtcg

SEQ ID NO: 143780 - DNA, 560 bp, Zea Mays
catcgtccagccgagccgtatggtgatcgtcgggacctcttgccggagttcgtcgccaacccgttcctggccgtgtgcagacgacgtggttgggggcctgtttccataaaagctggtgagtatccactcacctagtccctcgcctccctcgcgttcttattcatttaacagtaattggggaggattgccgtagcgatttggggcctggcgagctcgtcggtgttcgcctgggcgcgggattagtttaccgccgtggggctcgcttgaccgcggcgtggtacgggaagaagaacggcgcggggctctgcggaactatctgggggatttcagggctcgggttagtcacgagcggggtcggcgtggtggcgttagcgccgaaccggagttagaagacgatgttgttgccgtcgatggtaaagtcaacggcccagatggttgcagcgtgataagcgtagccggatgggggcccggaaccgtagatcggctcacggacggtcttgatcagatttagtgcaccgtttcatgtgattttgcgcagaccgtagatccctggctatgcg

SEQ ID NO: 143781 - DNA, 360 bp, Zea Mays
tcgatttgggtcatggctcctagatgaggacatggccaaatttttagtttacacaaacataccaccaacattctaccggcacaaacacaccagaacaaacacaagttggactagtggtcaaactaagaagaaccataggccacataaatacatgtctaaaggacccaacaaataagactagaaatttgcttataggatagtaatgcttcacacattttccaattatttattatcggaataaagatgagggaagcacgttcgttcacaatcaccaattattagaataaaggtgagagaagcttatttgtgcacaaacgacaaacacaatgcaacaatcaggatgcatgctcgtcctattcg

SEQ ID NO: 143782 - DNA, 384 bp, Zea Mays
atctcccactgcgaaggatcaatgtcgtatggccttatcatgatagcgcctcagagtttgctgataccgggctgactgaatcaccgtattcaatcgttcttcttctagtatatcgacatcctccagtctagtagcctcagcttccgctatgttttcaaagattaatctcagtgccccaaacttgagatcagcgggtagcactgcctccgaaccatagaccataaagaaaggagtgtttccatgcagagctcggctaggttgagttctcaggctccagacaacatatggcaactctctgatccactttcctacgaacttttcattcttgtcgaagactttctttctgacacttccaatatcatcccgttggctctttctacttgc

SEQ ID NO: 143783 - DNA, 322 bp, Zea Mays
gttaaactttcgagatgcttacctgtaggtggttgaggaattggggtcgttcagcaactactgctggagctttgtgaaccacaggcccatcgcaaacggcttccgctatgctcgccaggtgcctacaaagacgccgaaagctgaagccataagcaaggacttgatgcgccgagggttccagtgcgttggccctacaacgatctactccttcatgcaggttgccgggatcgttaacgaccatctgtcatgttgcttcagatttcaggcttgcagccagcacaaggccagtgaaaagtgaaaacggtgcgagggcagagccagc

SEQ ID NO: 143784 - DNA, 503 bp, Zea Mays
cccagactaatataatgtcttatattctaattacatgactcaaaaatatatggaatcatgaacctttgcttatttaactgtgttcagtataaacatggggattgctctaacatcaataataagagtttctactattttacttatggtacaagaattctcatgtcacagattcgcactcatcaatcatcaagcagccaagaagcgcctttccagtagctcgctcgcttcctctccgatcgcttcgaagtcgtctttctgggcctctggtcaaccacctgcctgacgacattgttattgcgtcgccgcttctggtcgtcttcttctcggtagtagcctccagggaacttgcgctttgcatcccctgtctgctcgctgcggatgcgaccgacggcgacgccgacggcgacgggagacatcttcttcttggcacacaaccattgcttcttgtctcgttgaaccggaagatcagtgtcgaccggaacgcatactgcctcttgttcttg

SEQ ID NO: 143785 - DNA, 643 bp, Zea Mays
cgctttccgtaggtcaggtaggggacagtcctggacttctgattttgggtttgtttcggtgcaaatttcttcacttggatacgaattttcacactacttcgctgaattaaatcttcaggcttttctctcctatagcaaatcttcaggcttttcgattcgaaatttaaaaccccgtcagatccatgcttgcgctgctcgccataaactgaacctgacagtagcaaaaggaagtgttggatattgtgatagcacagacaaaattattccatccattagtcccccttgcagtgaagataaggatgtatcagttgccagacctcgaaatcacttaactaatgcacatcatatcacctccaaaaggtggactaaacttaatgcaacgcgtgaaactttaaaattctgttttttagaggtgtatctgtttgggaatagcctcaagagagattgatcatcatttcccttcaaacccagctatatttacaccaattcatgtgaacagagacaagcttcctgttgctccacctacctatacatcatgcatgctactccacccccacccatccccacgacagagttcaagttcacattcaaatagtaatgtactcaactaggtaatgttgtgattttatcatctgcatttaca

SEQ ID NO: 143786 - DNA, 693 bp, Zea Mays
cgctatggttggatggcgggttgattagtaaagttcccgaggactcttcagagaaaaggccacgaagaatgggtatgcaacaggaactattcgattctaaatcgagggctcagatcgcatcggtcggaggggtaagttacacctaatctagaccgctcatctatcaaacgatggttccgatttcataacaccaggatccaatctacgcccttcatcggctgattgacggcgcacgatcaatcttgaaggggtatgcctaggatccgatctcagtcgcacactccacatcctatggctcacacgtcctcacctgcgcaccgatgcaagcacggcggagcacgacctcctgcgatggagctcacgccgaagcactacatcccggtgatttaggacttctagcaccaaattagcaagcgctatatgaacagaaggacaaggcgaagtagactaacaattactcaccaatgatagagacaacggcgaagctgcccacgctgcgcagtggatccacgacggagagatggctccaacgagcaattctcgtgccccgacggctccacagtggtcaaaccagccacacactcacgcggtggagtgggccataattccttgaccaattcccaggcaccgaacgatgacgagagcgagagatgaccatggtggctcttccttggtccctggcgagcagtaccc

SEQ ID NO: 143787 - DNA, 618 bp, Zea Mays
gttttaatcgtgtttgtagctgtactccccttgaggttgtgctgtggggtgagcaggcaacctccttcccggctgatcagattagtattgccggccaggactcagtccagattattatctttgttggtactattgctagatcctatgctggtatgtttgtctaaccttgctatttacacttctattaagactctatgtttacccaaggttccaaacctttcaggtaccacttcgctgacaggtggatcgtcttgcaaatggtacgtgaatccgcaggttccagaggcaacaagccttgcagccaggtaccataaacacgtcacccgcttcccttgagcgccaaaaaatataagtctaccctttatatgtccagttcccttgtctcctttttagcttgcatcataaaaggagcccaattatgtctgctgctggttcgacgcagagtgtgccgaggatttctaccgctgagcataagaaagtatctgaaatcaaacacctgcattcattcaagcatgaggtggttcctttcatactaatcgactacatctttttatacactcttcttatgtgcctaagagaacaatgctaacccctgtactgcctcatttaactgttttt

SEQ ID NO: 143788 - DNA, 298 bp, Zea Mays
caacgttgagattgaagaatgtgtcaccatgatacaattcaatgagctcaaacaaagcatagaagccaagcaagatctgttggcacaagatcttcagacacttatggctgaaatcagaggtcgtcggcgactccctgatggtgcaagaaaccatgatgaagatggggaagaaggtgaaggaaattattctagaagggcaagtgaacatgggaggagaaatcaaggtgctgcacgtggtagaggaagaggtcggaatcgaagaaatgatgacaatgaggaatctgaatttgggaatgat

SEQ ID NO: 143789 - DNA, 736 bp, Zea Mays
cgagcttcgagccgacttgagtaacaaacgacttgaggtctcagaaaaactcacttcactggatcatcctgctatcttgacgcgtggttgtccggctaattgaaatctagtcgtcctatttatgcttgagggaggatcgaccgtttgagacccgaccgactgaagcttgattcactaaatgtgctcatcaaaagctgttgagtattgagtttgtcaactgaaattcaaccgatagaggtctggctaaaatttttcgaaaaatctgtcgtggcacccaatgggtgtgtccagtgtcaggttttgttgtctcttccataatacagtttcttgagtggacatagaataatgatgtgtgttcgccgcgttatgctagggatgtgctgcttcttgtaaatcggaacgacccttggttacttgcgactgcttattatatgggtgggaagcgaaagggcaccctctcgttttttaaatagtttgatcagctgttgtgtgcttcttcattaatcttcacctctatctccttgctcccttccaaaccagagaaaactccattcttctagcaccatggtcggcaacaggaaacgcaagagggcgcccacaccttcctctgagtcctttggtgacttggagtacttcgaggaggagtacttaggctccgatggtgggacctccttgacgcctccgcactcgccatcgagcccatcgtcgaagaatacgacaactcgatggacctcac

SEQ ID NO: 143790 - DNA, 493 bp, Zea Mays
ggaactttgactcggctggctgaaatttgacggagcggaccctactggcttgctgaagctcggtgctttgggaggaaacccaaaagatcgaactctctggtgcctgtcttgctgctgagctcggagaacttgaaacttcctcttaaggtgaccttttcttcttctcgagctctttccacctggatggccttgtttgagaggtgcgagaaactgaggaaatcttggctggcgaggatgtttttgagttctggtctcatccccttcaagaaacgggccatcttcttggcttccatgctgacatcattaggcgcatagcgagcagttctgtgaatttgtgaacatattcattgacagatctccctccttgagtcaactcccgaaattcttcttccttgagctggacgatccctaggggcacatgatgctctcggaaagcggcttcaaattctacccaggtagcatctctgacgatagcgctgaaggtatcccacca

SEQ ID NO: 143791 - DNA, 524 bp, Zea Mays
gtcggaagagtcttcggatgaaggcttagattattttgcggccttggatgtggctgaggcggaggcttctccgcgtgttacagatgctgagattttgcctggtccgagagttgggcgtaggcgacgaagggcggtggcgaagcgtagagtgggcgggtttgatggtggtcgtcttcgtgtgggcggggctggtaggcaggaattgttgtcctcgccagttggggcgagtatgggtgagggggagttgcggaggctttttgagggtgaggtgctgaggataatgctatttaactatagggagatggggatcattccgaaggttgagcctatgtaaggtgtgatgccctcgctgtacgcgtgtaactgtagtttgtatgataaggttgactaccttcgcgcatctgggtgtgttcgtaaggtgttgcgcacccggtctggtatattattgtgtcggtccagctacgcctgtagactttcggactcatgcaatgggccttcgacttttacactcgttatgctggccc

SEQ ID NO: 143792 - DNA, 500 bp, Zea Mays
ttcagctcaggaatttcctattttggcatatcaatagctcaaggaataataaagtgcaccgaatagtagttagtgtatggaacatttagttgctaccttactatggttgttcttcctaaagtcctttgacatataagtgtttgcttgttaatggtctctacaattgttccctctgattaatgcaacttatgcgattaagattgtttgcttcttgtgcatcaaattgaataatcctttggcttatattaactgctcctacaatttgggatatcatgagcatgagcgaaagtaattggttctatgtctattttataaatcatatcacacttcaatacaatcttactcaataatattactgtaaacacatgttattttttgtttgattgtgtttgatgcctaaataatcaagactacaagacacaacaatgtcacagactcacagtaaaacaagcatctataatgaagtgtatgctgggggcaatgaactacgacaatgctca

SEQ ID NO: 143793 - DNA, 450 bp, Zea Mays
ttttcaagctcatcactttcgtaccttcagactgttgtacgcaaggctgtctacgaggtcatcttttgacatggcggagtggccagcttcaagcttcggaaatcccatatttttggccatctcccggcagacagatatttccttgttgtctggaagacagtataggaaatcatcttcgtccgtgccattgtacaccaaggcccccttcgggtatttcagttcccgggcgtagtgtttgatttccatgatttcttcttcagatagcttttttcccaaagcatgtcgaataataaagtcagaatcttcggatagtgcttcgggagtaggagatctagcttttcagacgcatctttcttctctagagccatgccagtatctggagattcttgctcagctatctgctcggttacagcaggctctacccctgtgggcactgagggcccagcttcg

SEQ ID NO: 143794 - DNA, 650 bp, Zea Mays
cggacgggggaaatcagaccgataaggatgagaggtctgggccgtgcgatcaagatcggacaggggaaatcagatcgggaagcatgagcggtccgggccatgtgatcaagatcagacgggggaaatcagaccgggaaggatgagcggctgcgggcggcgctgttcgtctccgcagcggtgatgtcgccggagttgaggctggcgcgagctagggtggctccagggtcgctggagttaggcagagagggagagggcaccacggtgaactcaatggcggggaagaggccatgaatccatgggcagagaagggagaacggcggtgagaagttctcgggtgggccggagtaactccggtgagccattctggccacggggaggggacttaaggcgcgctaaggcctaggctagcttcagcagaggcaggggtgacacagggacctactccggggaactagaccgggctaaattggccggccaccgcgcgagcacggcggaccgccacgaccgagcaacggcgaaggcgaaattggccgagcatagggcgcaataagggaaattgggcacggggacgggtgtctcaccttggggcagagcttggggaggcttggcgcattctccggcgagctagatggtcgggaacgcaggcgcgg

SEQ ID NO: 143795 - DNA, 506 bp, Zea Mays
gaacggtttcattgcaaccgtttcggttggaatgataagtttatttgtactagtattgattagttggaataatttctgatcacactccgacctaaccgaacatagcctgaaactgatggcggacaggaccgaacatagccagcggcacccaagataaaagtcgtataatcgcagtcgcagataccaaagcatagctccgaacactgcctctgttcatctgcctggtagaggtagcacgccagatcaccagcgatccgcacgtcgcagcagagcaaagatatcgcggggagcaagagtagtcaacgcacgaatggtgggcacggtgtcgctagcggcgggctacggctccgatggcgtgtaccgctcgccgcgcctggtggctgccatcgcctccgacccgggcctctccgtcacggacctcgtccttcgccgcgccgcggcgtgcccctccgcacccgcgctcgtggacgccgcgacgggccgcgccctcaccttcggggccctcc

SEQ ID NO: 143796 - DNA, 832 bp, Zea Mays
aaaataagttatttaccatgtctcaggtggagatatatttggaaaaggtgaggttagtatttgatagagaatttctcatacttcctgtctgattttttttaaagtgcttctatggagaggatcaacttttatctgttcatatctcagggaccttcttgacttgtccaaagacaacctgcagatcaaggaaagtaaaacccaaggaatttacatttctggagcaacagaggtcagagtgaagaacatgtcaccttccttccattctaattttctgtgatattcagaaagaagtacttggcatcaggacctccatgctttcactttgatatctggtatctgttcaattacccctgcagatatctatcctcaacagttcagatgccttggagaacctttctgtaagtcttcttgagctttacttggagtgcctttctataagcagatactaatttagttttgttgtcttgtttaaattacagcaaggaattgccaacagagctgttggggaaacacgtatcctctgtttgtaaatctggagtcctgaatcagttattctaaatttgatatggtatgccatctttaatgtaaacagaaatgaacctggctagcagtagaagtcactgcttatacattttctcagtacaatatggatgcacttcagatgagaggtaggccaaacatcagagttacatgtttctatgtgcatttatcagagttacaagtcattgttgtattaagctagtctcgattcttgctaaatatgcaatggttctttcttgttggaggttgatatactgtccaaatgctagatttatcttttctcagatggttg

SEQ ID NO: 143797 - DNA, 869 bp, Zea Mays
ctattccgttctagagcttccagaatccaaggagatattgttttccctgcatccctgttttggactataagacgtactttgtggttgtcgtttagttaatcgcttttctattcggtattcatttcatcgcgttccagctgtaacgcttaactagattgcactaactgagaaactgatgtagttgtttgctgtttgttttcaaattattcagtttttgagtggtattctgatgtcaaacttccagaattcaaggatatattcttcgcattccttttgtcacattttttctgtttttatgacatgctttgcggttgttgtttagttcattctgtgtgtagcatttaacaccattcattccgttgtgcacagactgtaacacaaaagaaaaagattgtaactgagaaactgccatagcggtttctgctggcacattgacaactgtaaatgcaggatgtttctgttcaaatatctccttttggcaaatttatttccataaatccctacatgatccccatgcttcatgattttggttatgagaatttggtctatattagtatttgttgttatagaatctgttggagaggagagcttgattactcttccttgcctcggaagtcttaccggaacaatcggcatcagagtggcttttcacatttttataggccctagaactagaaattctgctcatgcttttatccttgttatagatgggcagccctagtcccaatgagtcactagtttggtgttcgaagcagcctctccgtatttgtgggggaagcgcttttctaggcctcactcatgtatagcaggagcttaaaactgaactgttggtagctctgttcttaaggcgtcgcctaggcgtccaggcg

SEQ ID NO: 143798 - DNA, 456 bp, Zea Mays
caaggtacagtggtcagagggggaggactggaggagccggagcaaggagcacaagcaccaagccacccgagcaccagcacatcggaggcacggtcagtcagtcgcacggaggcagggagcaccaaaatccaaagggtttgagagatgacgagaggcgacacaagagtgcaacggagagatcgagagcgagaggcaagccacgaccgaagagtgggaggagtggcgttagggttagcctgttagggttatacggtaggtgaggtgtccgtgtatctttgtgggatgggccatgacactgggggagtgggggtaaggggctgagccgtctctttgtgtagcaggttgataacaaggccttgccaatagcgagtcttgctcgggctggcccaacaggctcaaacagctatcgagcacgacacgattatcgggtcgagctggcacatgcccacgtatatc

SEQ ID NO: 143799 - DNA, 511 bp, Zea Mays
gaaccagatgacgactggctgaagtgtgttgaaaatactagtgatgaactacttggagcatactccaagtctgaagataatgctctatctgcggcctttgggagccaaaaaaagaaaaggttaaatagggtttttgatgctattgggtttgtgtaccctgactatcgctacccgccgcgggggcagaaaagaaagggtgcaacttctggaaaggctgctgcttcggctgcttcaagcgagcccgcaccgaagaggaaaaagttgaaggtccttactcatcgaccgcgctacattgaaccggccatagtgcctgaatttggcggtgagacttcttcagctattgaagccaaaggacctgctcctacgtagaggattgaagagccagttgcaatgccaaagactgacaaaattgaagaaccgagaattgaagggacgaaaacattagaagttctaagcccttcggcaggagtggaggtgccgaagacacaaaaaggtctagcagcgaccccaa

SEQ ID NO: 143800 - DNA, 387 bp, Zea Mays
caacatcgcagatgtggagaaattttacaaaggttatgcacatgatggtgggttctcagttcgtattggacaacataagaaggttaatgatgaaattaaaggcaaatatttttattgtgcaagagaagggtatagagtacagaagcgcaaaaaagatattgatcaatctggaaaaaagagaaagaagagacataacgtgatggaaacaaggtgtgggtgtgcggcacacatctatgtgaaccttggtaccgacaagaagtacacgatttcttcaatggttgagcagcataatcatggtcttgtatcgccgctccaccgacattttcttcgatccaaccgtcatgttacagagagggcgaagagtactttgtacaattgccataaagc

SEQ ID NO: 143801 - DNA, 661 bp, Zea Mays
ttagcacagcaccacttagagcattttttacactctgactggtatactcctgaagctcatgcattttctctatttcatactctgtgttgcatttcttttttttctcagaggaggttctcttgtcaaggggggttttttctttttacccctgtctatgcttgataagttcacttgtcaacaagggggagagattttgagatttcccgtttcctctatctagggggagaattttgtctttcgggcttcctctcattcaagagggcaagatgtgttatttggagctattgctagttgtgttgagccgtttgcctccttctggaggaactagctttgattttcgcttttgtgctgatcttatgctatgaattggtttttttatactctgataaagccttttgtgctccgttaagattttggcttctagctagtggtgttgaaccctgcttttgcctcttatagagggctagccttttcttgcttggtcgtgttgagttgttgcccatttctttggggaccaagttttgcttactctaaatgacttgtctggcttttatctggcttatggtcatttgagtgagtttctcttcttcctcctctttttatttacatatgctcaaatggtggtgttgacaatgtactcattaagggggagattgcgaac

SEQ ID NO: 143802 - DNA, 574 bp, Zea Mays
ctcccggtccggatggttttcccgctgagttttatcagcagttctgggagaccatcaagggggatctcgtgcaaatgtttcaggatttagacaagggcgaactccccttgttcagccttaattttggaatcattactctcatccctaaagtccttcatgcaaatgttatcctacaatacataccaatatgcctccttaacgtgagctacaagatttttaccaaggtagtcacgaacagactaagtgtggtagcagataaggtagttagcccatcacaaactgcctttattaaagatcgaaatatactcgaaggagtgatcattcttcatgaaacaattcacgaattacatcgaacaaaatagagcggagtaatcctaaaactagattttgagaaagcatacgacaaagtacggtggccattccttttacaaacactccggatgaaaggcttctcgtccaaatggatttcttggattgagactttcatttcgggcggcagtgtagctgtaaatgttaatgatgatgtcggacactactttcaaacaaaaaagggactccgtcaaggggatccttt

SEQ ID NO: 143803 - DNA, 346 bp, Zea Mays
agcatccgcaacgacgttcgtggcgcccgacctgtactccacagtgaaagtaaagcccaacaacttcccgacccaatggtgttgcgggatcgtggagaggcgctggtcgaggaggtatttgaggctatagtggtccgtcttgacgacaaagcacctcccccagaggtacggccgccagtgccggaccgcctggactaggccgataagctcgctctcgtaggctgccaacgcccggtgacgaggagcgatgggacggctgaagaatgccaccgggtgtccctcttgggtgagcacggcgtcaaacccgtgtgacgatgcgtcacactcaaccacaaaggtctttgtg

SEQ ID NO: 143804 - DNA, 386 bp, Zea Mays
ccgccgacatgggatcctccgctgccagctccgtcgccgccttcgggggatcctccgctgccagctccgtcgccgccttcgggggatcctccaccatcggcacagtggctggcgacgagcctccaccggacacaatagccgcaggggcagcgagggagccttcaccggtttccgggggcggtgccgggtcgacctcagcctcggccaccaccgagttggcctccgcttcgggctgcgcgctgttcaagggtccgaagtcctccacgtcctcggcacgcgccatctacaacatagcacaccaattcagcaagcccacgtatacccacattcaacgacactatacaaaagacaaactttacctgatcccttgcccggtcagaccgctc

SEQ ID NO: 143805 - DNA, 280 bp, Zea Mays
cgaggtcgaagggaggtcattcattcgcggacagatccacgctcagccgatctgcgtctttcgaggtacaaggtccaaggtacgcttcgtcgcatcgccttcgtctacacctcggcttgatccgggttccttcgaaaccgtacctagggttaccactagggtttacttgtactttaccttgattctgcgctacgatttatgtgttcatcgcctactttgactagttagggttgcggttatgtccgacatccgatgcgacgattgtttaagtacaagaacc

SEQ ID NO: 143806 - DNA, 686 bp, Zea Mays
ctccaacattgtccccagggatggtgcccgccgggccatcgccaaggaagaatgtggaagggccagcgtcttattacaggcatgataaccaccggagtcgccttttcttcttctcctcgataggtgtagctggatggttcactcagcgtgaacgcttccgacgagcaccttctggtttctgaatttcctcgtcttcgtgaaactcttgcccaatcgcagttaccatcggctcagtgcaggcatagtcagatgattctccggccagcaggctaagaacaacatccatcttagcatcatcggtgctagatagcatctcgaagtgagtttgcttcttagcctcgggaagattttggaggggagcaattaaggcctcaatgtcctctgaggaggatcgcattctatggcccgggctaccatctcgaacaggaggattggagacaaagtcagagaagggactatgcggaggcaggttccatgcagagtaagataagggggcaccaacattcgaaaccctgccccttaatatcatatcaagtcggcttagcaggtcctcattgggaatttgcctgttagtgactcgggtagaatcgttgacaccagtgtacaagtaagcaggttagactctgtccttcaaaggttgaatgttcttgaagacaaagttagcaactacggcttcggcagtcagg

SEQ ID NO: 143807 - DNA, 699 bp, Zea Mays
ctggagcgacttcagtcggcgcttcatcgccaactttcaatccctatccgataagccagcgcagccatgggacctcaagaccatcaagtgccgaggggatgagactcttcgatcgtacctcaaaagattttagaccatgaggaatcgaatccccgaggttgcggaagcagcggtgatcgaggacttctaccagggatctaatgactcggccttcgtccgagccatactgcagaaggcaccgaatacctctgagcagctgtttagggaggcagacatctacatcactgtcgacaaatgagctcaggacctcatcggaggagcaaagcctgcatcgccggcaccacgacgcgacgcgaaccagcaacccgacaagcgttgggagaagaggcctcgcgatgaggttcacgccaccggaccacccgtctcttgtgcccgaggggcaccccacggaggcgaacgaacgttagacgacatcctcgatgctcaatgtccgtaccataaagacatgcgccacacccttcggaactgcagagacttcaagcactccgtcgggaacgaccgacccttccaacctctaccacctcccccgccacgaggaggacccagagaacctcgacaacctcagcagcaggaagggggaggaggcggagcatttccccgtgtcgacggagaagtaaacgtcatcttcggtggacacgg

SEQ ID NO: 143808 - DNA, 443 bp, Zea Mays
ttgagcgagttggacacttggctacggctcacgagatctggtccaccctcgagaatttccatgagagcaatgatcatgtgaagaccaggctctttaagacgtaccagcaagagtacgagaaatttgttcagttggctggagagaccatagacaatatgttttctcggttccagtccatattgaacaagatatgtgccaacaaggcacaattaccctatgatgatcatgagaaagctctccagctactccatgctctagatcagagggtttgggaggtgaaggtctcggcgatcattgagtcgtccaactatggactctcatcgtggatgagctattcagcaagctcaagtccatagaagttgaccaccagaccccggccaagattgagaaccctggtgcacccaccatggccctggtctccagaggtggttgctcctctaacc

SEQ ID NO: 143809 - DNA, 437 bp, Zea Mays
aaatgaacatgggaaaagggggaagaggaggcaacatggggatgagccatgattgtagtattttgaaacctcctggaattgttccatgctcccaacttacatcttgtatagtagtagagcacacaacatctgtatgtaacgccgtttgataaatacaagattatcctggccttgcttgtgtaggaaaacatatgctgccaggaaacagggtgcctttttaggcaataagaggggtttcccttcactgattaatatataatacaagtgatcaagagacaaaaaaacaaaataaagaaaatcaaaagaattacactatgctctgtaactatacctctgtgggacgtagctctaccttgattgaagaatattttgttgtatttctggccaaatacaccagctgaccagcacataaaaattatgatttccataagcaggca

SEQ ID NO: 143810 - DNA, 1041 bp, Zea Mays
ttcaatagccacaaaggctatgcataatttttagttgttgcaggctagtcatgtggacgatattgacaatccgttttatatttttttttatttgccaacgttgtatggtagtttgatttttttatgatcagtttctctatgcatgcttgttgaatcattatttagaccgctttatcttaaacgaagtcaatgcttaactgggagttgcttatgtttgttagtcatctatctctttaatgatggggttgttgcatcggattgagattttttttatgaatgatggtttgatagatcaggtatgtctactacttcgaatgcatcctgtgatatcacgaggtacaaattgttcaagtgcagtaatagtaggttttgttgtatgtgaggttaatcaaggtagtttggttatgtggattgtcttattgaagtccaattactactgttgagcacagtatcgtgttattattttagtattgaaagtaatatttatgaagcttttgcatgagtctgtgtcaagaagtatattagttttcttgttgttatccctccattgctttatgagtattgtaaattttatctcttttgagaggagaaaaagacgttatatgatgtgagcaccatttgcttcacgtcaacagaatagttgtggagagctctagtagtgggattctagtgtaataacaaccatgttttatagtgctagagacgggtatgtcagttgtttcatacattgtcgatacatggatgtttgaccttagtggcattaacaaacgaggttgttgaatccgttgattgttgtgcttagtgttctaacctattaggtaaagtgttgtttaatggctttggggagttgcatccccatttggtagtggaaaatcctagtgttgattgcacctgccaatgccttgggttttattttatattgtttttttatgggtaaggtgttgtttggttttgggagtcatcttaacttagttggaggctgaatcaggcttcacttatctagaatgttttgtagtaggtttcttcatctttgcataggat

SEQ ID NO: 143811 - DNA, 529 bp, Zea Mays
gccagatatcctcgggttcactagaaggcaaaaactcctcttggggccacatgctagtctccctacaagaacgccacatcgtgggccaggcaaagataatggtggaaataggccgacccaggaaggcgatgggctcacgcccgaaaactcgtggcttgggtgtgatcccgttgaagctgttcgcttttcccgcgcccgacatcctcaaacgctggggatagctcagaacggaggtgtcgggttgtcttcgggataagcgaagtttgttcgctattagctaggagataagctagaagagtgtgatcatcatgtacgcgggaagcgccctacggtcgtgtatataaggcctaggggatccccatcactttcatctcattagcacctcaccattcggtagacaccacatgtaaacacctccctcatacaaagtcaccttaggaagtagggtattacgctcctcaagtggcccaaacctactgaaaatcgctcgactctctctgtctctctctcgcgtgcccccgacacggac

SEQ ID NO: 143812 - DNA, 364 bp, Zea Mays
tcaggctacgccgggcgcgtgtgcccgcaagacgcggggaaggcggaagggaacgccaggaggtttagggatccagcggaaggcgtgaggaaggcgacgggacacaaggaggttcacggatccggcggcatgatcaggctctatgctggagcaggagacttgaagtgggtgggtggaggatggacgcgatcgaagaagggaagggagggatgtgagatgaaccggacgacgagggagctcgagcggcgatgggcgcggcgtgtgtggctgcaagacgtggggaaggcggcgtggggaaggcgtgcgtggctgcaagacgtttagggatcggggtgcggttccttggagggatggaggagagtcg

SEQ ID NO: 143813 - DNA, 835 bp, Zea Mays
gttctagcatttattttttacactaaaaagcattttcctaatgaatctatttgattttctaattatctggaccgagcgcaccatttactagaaagtccaggggccttggtgcaataaatccccagactcagagccagtccttgtggacggagggtttattctatcaaaacagagggtcccatatgaaattatgcattcgcgaaaaggctatgaagcatcctagaccgtccgatctactccatgtggtccagattagactgccacttgtctgaaccagtatgcgatcttgcccctccgatcggaatctaatggtgcagatcttaaataccagagaataacgtggagaaggggacggcgaacatggtgggaactcaccttcagtcgaccgaggcacggtgacgcccgaccacgcagaggggcggaagcgaggacccggctgcgctccgaccaacaattccgggcgagtccagtcaaattccttcgcgagagaggtccgcccaggttcttggtgccctaaccatcatccccctcaaggcttcaaagtcggggcagcggcccaaagcgatggtcgatcacgacggattttggagcgcaacgatggcggcgccctgctcggtcttctacccgcggcgaggaagcccagccctcgcgttgacggacacgcgaggagaacctctcagacgcccaacgtgtaacactggccgagctccaccccactagaccggcgcaagccacacgacaatggcggactgcgaatttctctctctctatggcaaacgaaggtggcaaggaacaagcggtaggttgatgacgcaggggaacagacgcggcaacc

SEQ ID NO: 143814 - DNA, 387 bp, Zea Mays
tctttctggcggaacgagcaagatcgaaatctgagggaagcagaggagtggttcgaagggaaaaagttaagttagggctcaaaaatcaaaaaaatcacgtcggcgcgagtacaaatggggtttcctgggttgggcactatttctgaagtgccaagtcactactcgggaaagcaaagctttaggcatcactcggcggttacctctaaaacgccggcaatatcaggcatcactcgacgcttacctctaaaacaccggcagtatcaggcatcactcgacggttacctccaaagcagcagaagacatcaattacttggagcaactaaaagttattcattaatatcaaaaggggttacacaaactcaaaagttgactcattatgagtcggcc

SEQ ID NO: 143815 - DNA, 340 bp, Zea Mays
tgcagaccaagtaccccaccttgctagttgagcgcgatgagttgagatctaggtctagcctattgggtgcgtgtaccgtttgtcctggcttgcagactaagctagcagagagagatgttaggatagctttgcttgaaaacgctagctcagtgagtgccctacacctacgcagtgtgcactttgtgagggtttgcagtctgcccttgagtcctacagacacgacaagacaaggatcaaggaagaaaacacataccttcgatctatcttgggttgggtgtcgtgcagtgagccccagttgggcatgatggtcagtcagttcaagaggggaactggcggaccg

SEQ ID NO: 143816 - DNA, 432 bp, Zea Mays
cgatgatcgagatgaagtagcgtacgtggcgatatagtaggcaggaagccacaagactagatgtgatgactactactgtgtgatttgatgacaacactcgtaggtatttatcggaggaaaccacattcgatttcaaaaaaaatccgcaccaaataataaggattcacatcatataagataaggattcacaccagataaggcttcggcctgcccggtctagcgaggcgagcgaccttctacctctctcccaacatatacgagaccatgtaaaactctccacctcaattagaaatataagaatgtttccacactcctctaaatattgacatgcatctcttcatgaatggacatttgagatttttctagaaattattctaaaattaaaataattccaacaattatcacgcatgctatgcagcaagcgtgtttgca

SEQ ID NO: 143817 - DNA, 369 bp, Zea Mays
cttccttctgtctcaatacattcattgcgtatactgtatggatatgacttgttcagaaaatctattgaaaattcctggtcgtcccccccaatgggtgtgaccaagggacatcttggtacgcagagcgtttagcacactgtcctggagtagtaacttgatgtgaccgtggggtgtaatcatatcgcccgagtagttgaccttagtctaaatggtgtcgtgttacgagaagcggcgtctgttgcctaattcattttcatgcggcttgaattgcttattgaatacttgcgactgttcggcgagcatggtaggaagtggacggtcaccctcgccctctataaatagcatgcttgcaccgttgttctcttcgct

SEQ ID NO: 143818 - DNA, 333 bp, Zea Mays
aggttctctatgcttctggtcgtctgactggtcctgctgctgattggtgggattcttacactgctgcccacgatgctgctgatactatcacttgggcagagttcgctacgcagttcaggaactatcacatactagctggactgatgaagataaagaggaaagtgtttttgtcgctgaagcagggaagcatgtcagtcagcgagtaccgcgatagattcattcagccctcaagatattcaccagatgaagtgggtgaagatgagaggaagcaagatcatttcatcgaaggactcaatggacctttgcagtacgctttagtggctcatacatttc

SEQ ID NO: 143819 - DNA, 685 bp, Zea Mays
gaaaagagtaggatttaaagggtaggttcaaaataagcaccaaggtaaagatatagatattacaagggttaaaggcgataataggcaagggtgtaagagataagaggttaaggtgcacaagaacaaagggtatgagtacaataaagaatagagctaaggtaagactggcacgtgacaaaaatgaggttatgaccaagggtgggataagtagaaccgcactctcgaattgagaggggagaagggaggttttaagtggcagacatatgacaagcatcaaggtaggatcacaagggtaaaggcgatagcaaacaaaacacattaaacaatgaagttgaaagtttgcaagcaacaaagaataggatacatcgaagaaaaatgggtaagatacaactttcaaattgagacggacgagagaagattttagaggaggtataaaataagcgacagggtgagatgtagagatgacaaaggtaaagatgatatcaatgaaagcatgacaaaggatagaattagggtaagactcgcagaatggcgaattagaagaaacaatcaagggtaagataggtagggtttcaacagaagagttgaagtaaaaattcattattgaaggaaattacaaggaattaacgagatctccaaggatgtgcgaaataaaatgaatgctcatggatcatcgagaaacaag

SEQ ID NO: 143820 - DNA, 511 bp, Zea Mays
tagccattctcctcctctttggagttgctgcaagaatctttgacgccctcggcagctccgtctcttgcaatgaactcaaagccttcggttgctccgttgctttctttaattctgtctcctcggttgattccatcctagtttcagcaggagcagaatgacttggatcagatacatacgacccctcaataggcctcggctcttcggccgtttcaacgcgcttggggcggtgtgttaaaaccttaacttttttcggcttcggcgtgctggaaatcgccgaagcagcagtttttcttttctttccttgctttcgtgaaggataatagtaatccgggtatacaaacccaatgacatcaaaaactctattcagtctctttttgccttgacccccgaaggttgttgtcatagcatcatcctcagccctcgagtaagcaccaagcaattcatcactggttgctttgatggcatccagccagtcatcattcggctcatcgaattggctcttgtacttgaa

SEQ ID NO: 143821 - DNA, 448 bp, Zea Mays
aagaagcaagcgatggttgtgcacttgtgcttgcgattttgcctatatttgagtctcaactcagttggctctcacggtctcacctggacatctggacctgcatggctgtgtgatactgcgatgggccactggatgactggatgtgctagtctgctggacggacaggacagtgggcagtgggctggaggagggtggatgcatgtcgctagtattgctgctgaagtgctgatgcttgacattttcgggtaagaccgtaaaccgatagtgagttttgggtaaccgaaatttcggttttgaagtaaccgatgcctgtttcggttctcaatacctaaaacctgaactttttaaaaaccgaaccgaaatgtcgggtaaaaccgaatgcccaggcctaatggagagccatcggattcctgcagagggtcttcattgttgtcggcggcgccccctt

SEQ ID NO: 143822 - DNA, 588 bp, Zea Mays
ttgaaaataagctggcaccagtccatctggtggaaacgatccatctcctcagttaaaagaacctcatggttggttattccccagctggcagtagggaacaacaacttattgaacagtatcaggaagaaggatctgatgcttagatcatcgtcagaccctttcctcagacgatcttgaagagctacaaccccaaaatcttctttcgataaaccaagttcagcccttaaattgttggcagcaacagcttcatcaatgcccaatgtcgttcctccaccagcatttggtaaccccaaaataaggtgcaccgtatcctttgtaattttgagctccttccttgcgccggctcgaattgtcatgtcattatggtcaagcttttccatcagccaagctaaatgaaatctactaccgagtgcgtcaactctcatatcaagaatactggagaaccccctccgtgcaatagcttggcgctgtctgtcatttaatatctggatgcttactaatacgtcttggggattgcatctcacattaagcctctgctgaaaaaatgtatacaatgaatagcgtaaacatttacatctgcataatcgc

SEQ ID NO: 143823 - DNA, 300 bp, Zea Mays
gaggaataagaggaaagacatggacaacaacaatgcagcagaaggactgaaggagattgtgctgaagaatttggccttcctcggccgatgtgggtcagaaggcggctaaaaaactagcatacgatggcaaaggtaaatcaaaaggaagtgctacagacatagacgaatttaataagtttgaaaacgtttaggaaggtgtctatgctaaacgcttgaaaatatgctcgacacttactatactcgcctcctcacacaagagtacaagacgtctggaacgtctaagttaaatctgagcatgat

SEQ ID NO: 143824 - DNA, 394 bp, Zea Mays
cttgcctgctcgtgaggtcttgatggcgcccaggaagaagaaataggggatagttacgcccgccattcccccaatcaatcctaatagccaacttcaattatgcggtaactaagcttctgttgtctctgagtctgatcttcaccatcttatcgaagtcagtgttctcccgcccaaggaacagggctcctggcggatctggcaagggatcaccgtcccaacggaggatactcatgagttagttgtttttgttcccttcatgatccgaggattaggtatgtcggtttcccctttcctccacggttttctcgatttttattctctcaacctgactcatctgaatcccaactccgtgcttcaaatcgctatcttagtccatctctatgaagccttccta

SEQ ID NO: 143825 - DNA, 408 bp, Zea Mays
gtggatatgttgaagatatgcttggagacgatggtgtgcatccaattgatgatgtggatgtattgatcatctggccgatcgggtgtgttggcgataaggcagaggatcgatgacgtgaccctcgagcccaaacttgttgaagtgagtgcccatagtttggctcgtctagatttagcatcttaggcacatgatttcggatgttcaccatctgcacaatgttgtatagagtcagggcaacgagagttactagagaagctatgcactcggtagaggacaatgcaaaagaggcacgggtggagatgcatgctggtcctagggccgtctctgatttttggggccctggtgcaaaacacaaaaataggtcttgttatgtgtttcactagcctattcgtcggcatcccttcagtt

SEQ ID NO: 143826 - DNA, 1025 bp, Zea Mays
gacaataagatacttcatttccaacttcaaagttaacttctatacctttatactattgtacgcgaggctatcagcaagatcatccttcgacataaccgtaaggccttcctcaagcttcggaaatcccatacttttagctatcttccggcaaacggatatttctttgttgtctgggagacagtatcggaaatcatcttcgttagtgccattaaacactaaggcccctttcggatattttagtttttaggcatagtgtctggcttccaggatttcttcttcggataattttttccccgaagcatgtcgaaaaatgtaatcaacatcttcgactgaagcttcgagggcaggggattttgctttttctgccataccctgccctgctgccatgccggtatgtgtagtttgttgatcagctttgtctttaggcacgacagccttcgtctcaatgggcactacaggcctagcttcggctttggcttggaccttagaaacttctgcaactttcttaataggagcaggggtcaaggcctttgtggtctccataacagcgtctagcacgctggccatcctcctcctcttgggagttgaggcaggacatttttgcatctttggcaaatttgccactgccggtgggcttagaatttctggcatttttactgtttcttccacctttggctcttcgaccgtatcatccttagcttcggctggcccgactgtaggcaccttggcattacaatagactctttagcgctctgcacgatggaagctgcttgttttgcttcggcggttgaagaggccccttcgccaaattcaggtactacggccggttcaatatatcgtggccggtgggtaagaaccttcattttcttgcccttcggcacagcagtggtggccgaagcaacaatttttctcttcttccctttccttcgcagcgggtagtgataatcagggtaaacgaagccgattgcatcaaataccatgttcaatcttttcttccctgggcccccgaaggctacggacaaggc

SEQ ID NO: 143827 - DNA, 449 bp, Zea Mays
ggaagctcacaactcagcctactccatccacctagggactaccaagatgtacctagacctcaaaactagatactggtggagagggatgaagaaagagatagcacagtatgtggcctggtgtgacacttgccaatgaacgaaggccgagcaccaaaagcctgcgaactattgcaacccctcccactgcctgaatggaagtggaaagaaataggcatggatttcgtaaccggactaccccggacacaaaaagggaataactctatctgggtgataatagaccatcttaccaaggtggcccattttatcccagtaaaaactacctttggaggagccacccttgcccgaatttatttcaaagagatagtcagactccatggcattccaagaaagatagtgtcagacagaggaacccagttcacctccaaattctggacaagccttcagaaagc

SEQ ID NO: 143828 - DNA, 553 bp, Zea Mays
atcatattcagggaatatagtagttaatggggggcatggacgtacattaggctaccaaccccggttgtcttataaatacccccgtcctgtagctggaggaacacgcttgacaagacatttgtgctcctagccatatgttttgtcgtgctactcacttgccacctatcatgttcttgagtgcttgaggtccactatttctagccccaacatttggcgcccatcgtgctcccttcgaagaacatcccacgatggctcccaagaaagtaaacaccagggccaactccttcccagatgaggccgcgaaggcagccctcgacgccaagaaagggaaagtcaccttcgcggacaacatcccacccccacagtcgagaacaccaccaacgggtttgaggcaggaaacaacaagctacctcggaccaaagatccacctaccccaaaaggaagcattcacacttgcagctccgagagcacacccgaagacacccaaacccaaaaagtcacttctaccatgccaaaatgtggtctgatttgacaggaaacatgatacccccgc

SEQ ID NO: 143829 - DNA, 457 bp, Zea Mays
ggccggccgaggccaagaaatcggcgccggcgctgcggtcgcttgcgtcggtgttcatgcacgcggacgtcgcggacgtggtgctcatggtgctgggcctggtgggcgccatgggcgacggcatgtccacgcccgtgatgctctttatcaccagccgcatcttcaacgacctcggcagcggaccgggcctcctccaggagttcagctccaagatcaacgaggtagatagaatacattccgtctcgatctctcgcacctccgttcatccgtcctagccagtagccagtgtcaacgacgccatagctgacgtcgttacctacctctccttctcgactgtaccagaacgcgcggaacctcgtcttcttggcgctcggcaactggctcatggcgttcctaggtgagccggcgctgcacacgcacgcacccatgccaatgccgccggcggtggcgcgcggcg

SEQ ID NO: 143830 - DNA, 394 bp, Zea Mays
gaggtctccagccagtggctgcacgtcgccctcatcgctctctcgaaagcggggaggagaaatatgtgtagtgaccgagggagtggtggtaggagtggtggaggctacaggtggtatggtgtcaagtggaggtggagctaaaactggtggagcaggtggtgaggggtccaacatactgggggagtgcgcagacgagagaaccgagctgaatctgataggttatctagttgactccaatgtgaatctaacctccctactctgctcgctctactgctattgttatggctgctctggtgtatcaatccaaacgacacttccaacctctcttctacttgagaaccatagccttgcccatggcgagctgtggtgggggagtagggtcctgaccatcgcc

SEQ ID NO: 143831 - DNA, 501 bp, Zea Mays
cttgtaactcgagtcaatgtatccaaaatcttgatggggtactcagcataagtcagatcctcttgaacactaaggtcttccatttgtaactgttctttaggtaccctaagacatttcttcagctgagatacatgaaaaacatcatgaacatccgcaagatgatctggtaactccaattggtatgcaacctctcccactcgctttaagattaagaagggtccaataaagcgaggggacaattttcctttgaccttgaatcttctcataccccggagtggtgacaccttcaaatagacataatcaccctccttaaactcaagtagtcttctccgggtgtcagcataacttttctgccttgactgtgcagttctcaaattctctcttatttgctgaacttgttcctctgcttcctgtataatctcaggtccaaacaactgcctttcaccagtttgatcccaatacagtggagtcctgcactttctgccatacaaagcctcaaac

SEQ ID NO: 143832 - DNA, 1132 bp, Zea Mays
tggaaatttggacatgagctctatacaccaaagttgggtttgagcttaaggttaaccttgtttttagtaggatgcaataaattgatgaagctcttgaagcagatcaagtccaatttcaactctaaactagcccaaaagtggattttaagatttagctatgttttgctaaaagtccgtatataaaagtcgtggagcttggaaaagtgaatgattttcatatttggagctctccaagtgatgtgggagaatttgaagtaatttgcaaaaattcagatttgggtcagttggaatcagcccaaaacagttttgtttatctgtatttggatccctgtaacttttaatccatgagtattttggaaacagttgttataacaaacctgtagagtaactataggagaacaatgtttatgaaatgtagcagccctaaaaccatatgcaactaggagaaaaaggtgttcaaagtgggactgtcagacttatggattttcaggcttcgaatagttgccaaagtctgaaatcagtgtttttagtgccattttggggctgtgtgttgcctgttctaggaagttttggaccatggttgctatgggagagttgaagagcatatgtcagtgaacaaatttcgttgtgtgagttaggcttgatctgacccagaacatggagtacaagttacccaaagtggggctgatagtttttttcagttttcagaccaggaacagaaggttaagtctgaattgcagtgtttgtgctgtttttggagctcatttgtggaaaatctaaggagctttgggctgagacgtctatagaggagttaaagaccacaagttagtgtacaaattcatttaatgggaatgggtgtaatcctacgcaaaatgtggagaaaatgtggctcaaaattggactgtcagtttaattgggctgaattttgttctgtctctgaaatctgaatttcagtgtagaatgcctagtttggagctgttttgtgatcaatatgagtggttttagactgtagtttctatagaaaacttggagaccacagtatggcgaatacgtttcataaggtgagattgacatggtgctacataaaaagtagagtaatgtttgcctaaagatcagttgtcaggtgttgggg

SEQ ID NO: 143833 - DNA, 612 bp, Zea Mays
gcctccttcatttcgcgacgagctaaaattacatgtagaggaactgaggaaaggataaaatgctggcaaagtttagctcataacatattaggtcatccaaaaaaaattctcaagatcggaggagacatcatctgctttaattctctgcacagattgatgcaaagccacgctaaggaggagaaactgaaaggtagaagaccgattgcaaggggacgagtcatcgccgaattttagtttgattttacccccaaaaagttttttaaaaacagatagtgaggcaaccatgtaatttgtattggagagcaactggcaatatttagagaaataaatacataatatgttggatatagctagttaaatggttaggatgacatttcactattaaaaccaacaaccagtgccatcttttgcgtagatcaaacaaccacgtcaatttgtttaagcaaactattaactactatgaatctacctatgaggttcccaactatatagttttgtgaatcggggacatgctcggttggacgaaccatcgtgctaacgttgatgccggaggaattcaccagagcttagctgacagaagagataaagtacaatctcagtcaagcacgcgag

SEQ ID NO: 143834 - DNA, 296 bp, Zea Mays
attccgtcattggcttagcaatcctggagaaatctggaatgaatcaccgataataccctgccaatcccagaaagctttgaatctgtcgtacggtggtaggaggcttccaatccatcatctcttgcactttctcaggatcaactgatatcccctcctgagaaatggtgtgacccaaaaatttaatttccctcagccagaaatcacatttggagagtttggcatacaagtgatgatcgcatagtcgatgaagtactgtatgcaagtgctttgcatgttcatcttcattctttgagttg

SEQ ID NO: 143835 - DNA, 640 bp, Zea Mays
gaggatatgaaaatactatgggaaataggtgttcaaatgttggatgagtatcgtaaagattcgttcacactaagtgcaattatttttgttacgatcaacgatcaccctgctctcttcacattatcaggctagttcaagggaaaggttggttgcacaatatgtattgatgaaactgcttacgtgtcccttgttgcatctaagaagatagtatacatgaggcacaaatgctttttattggaaggacacaggtaccgcatgcgaaagatggataagtacttcgacaataatggtgaactgcattctactcctccatccggtaacaatagaggtcatagagtttttgaaatagtcaagaatatcaactttgttttcaggaagaagacaaaagatgggaaaacaaggaaggatgccaaaccagctttgggggctatattcaaaaagaagtttattttcttcgagtacttgccttactggaaagagtttgatgtgtgacatgcgatcgatggtatgcacgttcagaaaaacgtttttgaaagcataattggcaccttgctagacataaagggcaaaacaaaagaagggctcaattcacgcatggacatggtaaatttaggcataaaaaagaactacatcctgttct

SEQ ID NO: 143836 - DNA, 954 bp, Zea Mays
tcaaagatgggctgtcagactgccctaagtctaaattcaggcagacagtgagattggataaactttgggttcaattttaagtaggatgtagtgacattttgtgggtgcacaatgtagcaaagttagagctggtctattaggatataactttgttgcagagcattggtctagttgccatataaaattgagaggaaattcgccccaaagctggtctgtcagactgactgatgaagcgtctgatggtacattgatctgaacttgagctctggttcagcccccctcatcgccggcggcctttgcgcccggattcgcgccggccgtcgcgattcgtgccttgggcgagtggattttgctcaccgtgaaaagatctcgtcgcggatgggttcgagttattgtggcctcgctgtccccgaccccttgcaccgacgacgtggctttacggccgtcactagagttggcgtccttcaccacgatcgtgccacgccccaagcctttaaccatgtcgctactagccgcaccagctcaccgataaccgtcgtagctcctcaaccagtgagtgccacggtaaaacgcgctggtgactcaccccttctttccggccaccgcgtgtcttcaccaaattcactggccaccgcttagcgccactataaattgacggcacggtctgctgcgttgggtcatcaccaagcctgagcacccgctcctgccgccgattagtcaccacaactctccaatttcccgttcccccaattctgtttccactgtcgtggtagagccctcaccgtggtcaatgaatcccaggtctgttcatgcaccccgctgtcttgtttcaacatccttgggttctcctgatgcttcccgaccctgccaattggactaggaccccttagatcgtcaggaatgcgcttgattgcccgtagtgcccgctgtcaccgtggacaaagtgtgttagag

SEQ ID NO: 143837 - DNA, 746 bp, Zea Mays
ttgtagttgatatatagaacaacaactttgttacagaaggattatcaggttgtcacacaaaaattggagaaccaaggcctttaatctactctgtcaggcgatctgatgaacggttccaatggtacagtgactggataggatcagattcggtgaacttcgccgccggtgaccttcgtgcaaggattcgtgctgatcgcagtgattcatgtaggaacccgggcaggatagtaccgggaggatgaaaagatcataaagggagtggatttgatcgcggattgaagcttatcaaccgcacctatagccacgcaacgtggccggatcactggtatcgccgtggtacgccgaagaccccaaatatgccatgtcgtagtcctttaccatgctgtagtaatcatggcgcatctggatttaccacctcaagagctattgcaccggcaagcgccatgactgagcaaccagaaactcttccccctctccggccgccgcgcatcttcccaaattagccgccaccgctcatgaatcctataaattgagcgtgctctcagctccgctaggtatttaagcactcagcgcacctactcgtgtctcaaatcattcaccagagaactccaatttgggattttccccaaatcaatcaaaaacaccgtgcggtgtgagctcactatggctagcttgttataggtccgttcatggcttccttgctcttgtttcagcgtctctatgtgctgtagatggttagccacccg

SEQ ID NO: 143838 - DNA, 418 bp, Zea Mays
caggagaggtttcagtgcatgttgtgcctggttccgctttggttgcagggacaggtgccgcaatcccagcaggtgatcttgcctcggataattgggcaccggtggtccctcaggctgggccatctttaacctccatggtcaatgggactacgatgcctctgcagattggatctctgaacatggccaaccaaaccttggctgcttgttcacggactgctgtggagaggaacctggtggcgactcagcaaatgaagaccacccaaggtgttgtccaggatcagagcctgcgtggcgagtctgagcccgaaaatcatgcacctgctccggttatttcttatggtaatagtccatcccattttcattatattgatggtttacgccgtagcttacgatgtaatatgcaagctgctaatggctc

SEQ ID NO: 143839 - DNA, 450 bp, Zea Mays
tgcttcttccagtgctttgctttggttgcaacgctagctctctcatgcattttgtcctctcaggtctctcttcccctgctgcttggtgccacttgggagactcctgtgttgcaagcatatatatatacatcacaacagctgaactcgatctctctctctcatatacatacaagggttgatcatatccacatatatagctatagcttgccggaggatcaagggaccatatatatacatacatacagtcagtctactgatcgtcgacgacgatcgacaaagctcgccttctcttgcctttcctgctgcttgttgctgcacaagatcatcaggcgacaccgaggattttgttcatctcagctagctagctagctacacctcctcttggcgcatcaagatgaggggcttcgtcgcttgcgccgttgcagagaaacgccaccgcttggacaggac

SEQ ID NO: 143840 - DNA, 519 bp, Zea Mays
acttactcaggagcctagttagcagagttatacatgtcaagaattgtttgtctgcacggagtaccaaagaagatcgtatcggatcgaggaacccaatttacctcgcgcttttggaaaagactacatgagtccatggataccaagctaaactttagtttagcttatcatccacaaagggatgggcaaacataaagaacaaaccaagtgttggaagatatgctaagagcttgcgctctaaaggatggtagaagctgggataaaagtttgccttatacagaattctcatacaacaatacttaccaggcaagtctaaaatggcaccatttgaagcactttacggacgaaagtgtagaacaccactttattggaatcagactgaagaaagtcaagtatttggtccagaaattctccaagaagcagaaaagcaagtagagattattagatacaatttgaagacagcatagtcgagacaaaagctatgctgacgttgatattcgaagtaggagactttgtatacct

SEQ ID NO: 143841 - DNA, 326 bp, Zea Mays
attacgcaagcactcgtgtgtgtgatgaggtgaagaagcagcgctcgggctcaatttataggaagatggccgaaggtggatgagattcaaggatctgcaagtgcgctggcgagctcacccgcgcggcagagccacggcgagcgtccggtgatcgccgattaaccgggcagcgccaccttaggatttatgcgccacgtcgcggaagatttttaccacagtctgatccttagccgcggtggcgatcttatccccggcgagatttttctgaattccggtgaatagtacgcctgccaggccgaattcaaacgactattctccaaatttta

SEQ ID NO: 143842 - DNA, 770 bp, Zea Mays
tggtcttcatgagaacttcggttgctacaacattgtgtatccaaaggatacgaaggctccggttctcagctatcgtacaaaatggccgaccggttggaaaagcgaatggttttacataaaggcagacaagaaaagaagggagaagctaatgactatggtcttgagtccattgaaaatgagcttcgggatgacaaggcccttgtgccatatgcagcttggctccccatgccaggtagccaaagtagaattcagagtggtagcggcagaagtcagcactagggatctagtgcaagaatatttggcaaatagagtatttctgacctctagtggttgcggaatgcctaagaagaaggatgggggcaaaaagcatgaacttgttcggctcccctaccgatttaaatttgagaaacaattcaagaatccatgcaaagagtggttagaaatgattgaaacaatgtgcaatgacattcttggcaactacaccaagaaagaggaccagttaatgactgcttccttcggcactcgaccaaaacgaaggctgaatcgagtgatgaacgcgttaaatttcgaatacccagactatgaaaggcttgacaaagggggtgaaggggtgaaaaggaaaaggattgtgagcatcctaaatgggaaagctgccaggctagtaaaggaggatgagaatattttgaagaaggcaaaaatagcccctgagccgaaagcagcaatctctaaaaagcggaagcttgacatgactccctctgctgagccgaggg

SEQ ID NO: 143843 - DNA, 514 bp, Zea Mays
ccggcctgccgcgggtaccagagggagacgaatgatgggtccgtcctgatcaacacgacggcgccgccccggtggtggacctgcttgcgtgggggcaataatgtctcataactcataagtcatatggcacaaaatatatgagattatactaaaaaagaatattatacggtgaacggtagtataatcaactagaatttttggcatcttagagcaactccggtagttcttaaaaaatagtgttgggagttggtaactgaggtttgagcgtaaaaaattatgatctccaactgttccacatatatatagatagtaaatcaaatttgaaatcagttttgtgggccagatccttgtattccttttcgtttccttcctcgtcttctctggctattgcatggtgccccaccgccaggccaagtctatccaccagccatgcacacagcttgcagcaagtgcctagcaagaacgtgatctgctgaccgccactgccgagcaaggtccggctgcccagcgaccg

SEQ ID NO: 143844 - DNA, 1012 bp, Zea Mays
gaaagttgtgaggtcaccgtccacattggcgcaagtgacaagtacttggagatgcaaccctggaacgtcaccaccactggaagccatacgcaaggctccatccaacttgcagctcagaaagcattgaagcacttgtgccaaatgtttgaatgtcacttgggatccacccccgtgaagtacttccctccactagatcgtaaccgtcctatttgggcgacaaggatccataacttggggagtaccatgaccgagaaagaccccactattgtcgctatgtctagctatctgtttagcctcgacaatttgtgaaaccaactgcaccagcgtgtgaaggacctcatccaacatgctgagaaagcagagacccactggcataaggctaagcttgccttagctcaagtagaagcccgagcggtcgtggtagaaagtcaccttgctgtggccaaagaggaccttagggagcaggcggactgccatagtcaacttctcagaggtgtatacctagtggatcatgcctaatgcaaggagcaccagcccatgaccgctactgagtcaccacccatggagggaatccctttgtaccctttgtcccacccccacaagaggatttgtgaatcggtgccactcacaccacccgcatctcctcgtgaagccgaagtaagagaccccaaagaccgtgccatagggaccagtagccaagttatttcagccaacccttaaaaggtcgagacacgaaattgtaccctgttgtatcatgaatgtctgcatgtggaatgaatgcttgtgtggtgcttgaatgctttcacttatgtgcattgtgtaagatgatatatatacacataagtataccccaataatctactagtggaagtaacctaatcatccgtacccttgaccacagatgtctcgccgttcgagccaagttcatggactccatgctctggaaggtggagatgaggtcaacccaaggaatcaggctgcacgtaatgtgatcctagatatggtgcaaaat

SEQ ID NO: 143845 - DNA, 724 bp, Zea Mays
ctaaaaggtacttgattctgttatgtgttatctaatgccattgttttaagtaaaactaaactactctctattatcgtactgcggatgctgtcacaggtggtgaattgagctcacagcttcaccctggaacacaatcttttggcaatagttgattcctttctcaatatgaacctcaagaattgtcctctcctgaacaactttgctggaagatatacacaaatggaattcaagtagcatactgacccactacatttaaggcaaaaagtgttcatctgttgggtcatatctaatcttatctgccttggtatagtgtcatgataaaatctgtaagaggtcaaacaacacctccttcacacaccaagaatcgatcataaaggcattgttaaatttccacagttatatgtcaactctcacaccaataattaagactgcttccactattgtttagcatggactttgtagagctcagagggagcatttctatgcaatttagggttcacaagctgctcctccagcatcatcttaatgtccttcactgcctgcaccagtcttgctcctctgtaaactcctgccatgaagagagacaaaggcgagaccttggagggaggagcaggttgcgtacaagaaagatggtagatttttgaattcaaagatgctcggaaaataaaagaaagttataattgtcaaatttggtattctactttctactattttccctttcttg

SEQ ID NO: 143846 - DNA, 289 bp, Zea Mays
tgaaggcgggaaggatgatgaagttgatcttcccccggcccacgcccctgtgattcgtgggttagtcctccacagggcagaggcttggcgtgctggcaatgagccagtcactgatttcactgccagtggaggctctgctctacttcaggatcttcgtttccaaaatcctgcattgcgcattcgcgatgccaggattgatggaaaccgcttttggacgcttcatcatgtggacttttataattccgtcattctccccaagaagcatcaacctatcctgcatcaacgttat

SEQ ID NO: 143847 - DNA, 625 bp, Zea Mays
ggagaaccctggcacgacagcgtggtgccggtgatcgccggtggctaatcaacggagcagggagaacaagggagagagaaagggaactctggtggggaaattcacctcgggtgaagcgcggacggcggcgaagcttcgctcggcggtggcagaccatggtcagggacagtggggcggccttgccgtggttgatctgaggctcaaacgatgcggcagcgagagggcttcggcgagctcgggcacgggcgggtggagcttgggtgggcgtgctgaggtggaatgaatgaggcagggggtgggcgtgtgcaggtacttaaagggggttgtggtggcggtttcgcgtggagaggcgatgtgggcgtgaccgtcttggcgtgcgtgcgcgtggcccgctcgacggacggttggaagaatggggactgctaaatggggcctgcacggcgatggcacaggcgtgcaggcgcgcaacgggtagaggcgctgacgggtgggggtcgcggggcagagaacgtgtggacgtgcttccgagcgagggagagcaccgacaaggcgagccagccgggcagtggaagagggcgcgcgggcgcacgcgggtgaactaggcctggtgggctaaaaggccagg

SEQ ID NO: 143848 - DNA, 703 bp, Zea Mays
cttcgccttcagctattgaaaggctctcttgaagggacaccttttcccctgaaagttccctgactttttgctccaggctttccacccgggaggttagggaggtgcagtggagggtgaggtcatcatattggttatcaagggtgtgaaggtatccagccatgtagacgatggtgggatcatcctcaataggatctcctcctgacagggcctgaagtcttttcctccaggtgggggtattcttgttgctgggtggaaagtagcgaaggggggtttcaaagatcactttgttgtagttctggcatagttgtcggaggggtgttcgggcaacattctggcaagtatctgggaaacggtatccggtaaaggtgacttggaaggaaggatggttcggatagtttcggctttctcccaggtagactgccatagagcatttctccattccgccctcgatatactccgtccagacgtattccgacttcttgcgaattcccatgcgaagcgcatagcttcgcaacaggtgtgggaacccttccacctctgagcagtaggatgtcctaatggtcagagagtcttccatctggaataggaaaagaagggtctgttaaaatcggggaggaggagagaagacttttcttggggaaagaggtatttcctttttagggcaagttttagggtcagggctgcgacctacggccagtcctat

SEQ ID NO: 143849 - DNA, 486 bp, Zea Mays
gtttttacttgatcatatcttctcttgatatgtctattctaaatctgagctagagatttgatttctgctggtaggttgttaaggtttcaacctagagtagagaaaagaaaaacagaaatgaataccacatcactgaactagtgtgacccaacccaacaagtagctgaggcccatgcttaagagagtcgcccctccttttccactagaaaatcgaagggagtcatcagcaaagacaaggccccatcatagtttaatgctgcaagcggtacctgctgcatgagaatcaaactataaaattggggtggtccaaatctctccacctacactggggaatctgatctcatatataatcacgcagagttataaacaaatggttcagcaaaggacaaaaccacctatcatatgcggacaatcttttgtgtttgccattcttttagccaccacttgctgatttatctattccctcgagtaggttcttgctctttc

SEQ ID NO: 143850 - DNA, 3340 bp, Zea Mays
cggacatccgcgacgatgccgacgccgatgccggcgacccgtccctcggttccggcgctggcttcggcgcgcgctgcatggtcgacgtcttcaacttcctctgttccctgctggtgagcgccagcgacatggtaataaccccggatggccagggggccttcacctccgaggaggatgtgatgctattctctctcgtgctcgtcaacaccgccgtcgaacttggcggcgaggccatcggcaagcaccccaagctcctgcgcctcatccaggacgacctcttcttccacctgattcactacgccaccgaatacagccccctcgtcctctcgatgatctgcagtactgcactcaacctgtaccacttcttgcgccggtgagccagccagcaatataatgttagcatcagtggcaggttcttctaactcttggcaactgcattgctctgcttcaccaggttcctcaaattgcagctggaagccttcttcatgttcgtgctgctccgcgtgtgcggcggcggcaacgggccgcagctgcaggaggtggcgatcgagggcctcatcagcttctgccggcagccgacgttcgtgatcgagacgtacgtgaactacgactgcgacccgctgctgcacaacgtgtttgaggaggtgggcaagctgctgtgcaaggcggcgttcccggcgtcggccccgataacgacgatccagctgcaggcgttcgagggcctcgtcaacatgatcaccaccatcgccgacaacgtcgagatcgacaagacccccgaacacggcgcctacgccgtggacgtgtcggagttccgcctcttctggaccgagcgctgggactctgccgccgccgccggcggccagcgggagacgtgggtggacttcgtgcgcaagcgcaagctgcggaagaagaaggtggccgtcgcggcgaaccactacaaccgcgaccagaagaagggcgtggagttcctcaagctgtgccacctggtgccgacgccgccggatcccaggagcatggcttacttcctccgctactcgccggggctcgacaagaacaagatcggtgagttcctgggcgaccctgacgagttcagcctcaaggtgctcaaggagttcacggagacgttcgatttcacgggcgccatcctggacacggcgctgcgcacgtacctggagacgttccggctccccggcgagtcgcagaagatccagcgcattctggaggccttctccgagcggttcttcgagcagcagacgacgggggtgttcgccaccaaggacgccgcgttcatcctctgctactcgctcatcatgctcaacaccgacctgcacaacccgcaggtgaagaagaagatgtcggaggaggacttcatccggaacaaccgcgccattaacgacaagaaggacctgccgcgggagtacctgtcggagctcttccactccatctccaccaacgccataaccgtcttcagcacgtcggcgacggcggtggagatgacgcagagccggtgggtcgacctggtgaagcggtcgcgcgccctggagcccttcacgccgtgcgacttcaagcacaagctgagccgggaggtgttcatcgcggtgtcgggccccaccgtcgcgacgctggccgccatcttcgacagcgccgacgacgaggagacgctgaaccagtgcgtggaggggctggtatccgtggcgcgcatcgcgcggtacgggctggaggacgtgctggacgagctgctttgctgcctctgcaagttcaccacgttgctcaacccctacgccaccacggaggagacactcttcaccttcagcaatgagctcaagccacggatggccacgctcgcgctcttcaccatcgccaaccgcttcggcgagtcggtgcgcggcgcgtggaagaacgtcgtcgattgcctactcaagctcaagcggctcaagatgctaccgccgtcactgatcgacccggacggcagtggcgcccacggcggctcggatcagcggtcgggacatcggcacaggccgtccgcctccgacgctggcgtcatcttccccccgacgcaccgcggcgcggggacgagccggcacgtgtccggcatgatcggccggttctcacagttcctgtcgctggacagcggcggcgagtcgctgctctccgtcggtagcgagttcgagaacaacctcaaggtcatcaagcagtgccaggccgggagcatcttcacggagagcgccaagctgccggacgaggcgctgcagaacctcgggcgggcgctcatcttcgctgcggggggaaagggccagaagttcagcacgcccatcgaggaggaggacacagtcggtttctgctgggacctcctggcgctccttgcgacggccaacctccagcgcttcgcgaccttctggccgccgctgctcgagtgcttcagcgccgtgtcacagctgccgctcttctcgccgtccccgttcgccgagaaggcgatcgtggcgctcttcagggtcgccgtgcggctgctgtcgacgccgccgccgctgcgcccctccgacagccgcgtctccgaggagctagtgttcaagtcgatcaacatgatgtggaagctggacaaggagatccttgacacgtgctgcgaaggcatctcggagaacatcgtgaagttgctgacggagcacaccgacggagtgcagacgccactcgggtggaagacgttgctccaccttctcaccgtcacaggccggcacccagagacgttcgaccagtccgtggcggcgatgatcaagctgatgaccgacggcagtgccagcatcacacggttcaactacgccgccgtcatagaggccgccttcgggttcgcggcgctcaagatcagcccgctggacgtcagcacaaagatcctggagctcatggccgagtccgtgaactggctgatccagtggcacaagtccggctactccgaccctggaaacagcggcggcttcagcggcagctcttcgtcccagacgtcggtggaagatgcgtcgcggatgggcaacctggcagtcaacatgttcatcaagctcgcggaggcgctgcgcaagacgagcctagtccggcgcgaggagatccgcagccaggccgttttcgagctcggccgcgccttcaacctggccgcgacgggcgacctcgacttcgggccggccggctgcctcgcctgcttcaacctcgtcatcttcgccatggtggacgacctgcacgagaagacgctcgagtactcgcgtcgcgagggcgcggagcgggagacgcggagcatggagggcacgctggccgctgcggctgagcttctggcggacgtgtttgtgctgctcctgcc

SEQ ID NO: 143851 - DNA, 377 bp, Zea Mays
cgttgtgcagatactgtatccctgcaagttgtggaggaactgtggcaactcatcaatccaccagcgtcagacattgaatgtcagtcggagaatgagggcgaacttcagtccatgctgctctcccaagctgctcttcagggcacagtggctcctcggacgatgaaatttcatggcactatccaaggcattgatttattggtgttactcgattctggtagttcacactcatttattagctcccaggtggctgaacatattcaaggggtgtgtccattgccaaaccaactgtctgtacaagtagccaacggtgagagactacactgtatgcagcatgtgccacaggccgtgtggacattgggaggttgcgaatttcagtc

SEQ ID NO: 143852 - DNA, 1238 bp, Zea Mays
gtttcttggctaaccataactgggttctatcactatttcactgagtctctgacatactacagaaaacccctccaagttctaatccttcactgtgctgagtccacgacggcgtcgagcgcggccgaagtccggcgagctcctagaccggcgggatagggcaacgactagggttcccgagcgatggacacggaattggactcatcccaaacctttcccccaacttaatttcactaatgatcaacagggttgtgctggccacggtgaccgtgaaggttgcggatggatgaggatgttcctggcgatgggtggtggtccagttgcatcgaatgggtcgaggggttcgcggggtgcttatggatgctagaacaagaaacagagggacgcgagctaaccggaatcgagctggccgcagcgagctgttcttcacggcgacggagactgatttggggcgaattcaaaattcgtggattctagcgaagggttgcggctgatccggggtggctggttagcttattaccctacggagttgatggcgcatgcaatttataggcgcatcgagcgctggggacgaatttggtcaaggggtgctggcggtcggagagggaacatggacactggagcaagggatgggtggcttccaccgtggcgcttcctcctgtgatcaccggttgaggagctacggcggccatcggtgagctggtgcggctagtgacgacgtggtgagaagcttggggcgtggcacaaccgcggtgaggcacggcaactccgatgacggccatacggccacgtcgccggtgcgaagggcagggaacagcgaggccacaatagttcatacacatccgtaactagatcttttcatggtgagcgaactccccacgcccgcggcacgaaaaccggcgaaggggtcgtcggcggtgagatttttgacgcggcgatctgatccccaattgagttactgtaccatggctagtgttcgtcaggcagcctgacagagccttttggagcatgattttctcttgattttatatatcaacatggtcgacactctttagcaaagttgtagccctaggatccagctataatcttgatatagcaatcctaggcaaatacttgctcgatcatgtattaattcatgcccaaagtgcctgtagttgcactgcttgtctgagattcagaacttaaacagcctgacagtccaactttaattgggtttttctcccaatttcttataagatcat

SEQ ID NO: 143853 - DNA, 513 bp, Zea Mays
aagatggaaaaagtattcccacctggattttttaattgtatgcaacatttgcttgtgcatctaccttgggaagcgttagtaggaggacctgcacagttcaggtggatgtataatcaagaaagataattgaaaaaactcagaggaatggtgcggaataaggcaagggttgatgggtgtattgtagaggcgttcgtagccagagagatcacattattctcaagcaagtatttttcagacacaaacaacgtgaatgcgcaaatgagacggtaccatgttgtcgagcaagctctaatcactgatctaagtgcttttaagtgggaaggtaaaggtgtcggagcttacacatcacatcttgtggcaacgatagagcataacaagaccttgcttttcttgtatgttaatatgctagaacttcatccttatttccaaatctttgatagcatatataaacccaacaaacaacttactcaaaagcagttggatgacctacgcttgaaagggttacacggtggc

SEQ ID NO: 143854 - DNA, 1188 bp, Zea Mays
tgagggggagggaccttctaggccctcttagtcccctaagagagggaggcaaaaggtggcctcctctcgttctttctggggagattcttctagagggagttttccctgttaggaggaagacggtgctcaggatgtagacattgatcctcctcattctaatgctccatttgttgggggtctcagcatgcaccaagccactgtgacttagggccctcatgatgcccagcctgacttcaccgtgaagggagtggatgctcttcaggagatcagattcaccaatcctactgtcctcccagacatcctggggttcctgatccaagatcctagaacttatttcaggcagatttctataacattgtcatccttaccaagaagcacccagctattcgtcacagggtgattgactaggcaagatgtgagaggatgaatgatgaagacatatctcgggctctgaggatgtatgaatagaaaggagtgaagaacatgatgaccatgcaatatccctggagtcattgcccaattctatgccactctctggattaaaaaggttgatgaggaagttgatgtgtatgattacctagttatgtacttctttctccaggggatttggcacaaggtcagctaccaccgctttgctcatattttgggtttctcagatgaagatatcaaggacagcaacctcagagttcatgacattcgtctgcctcggagggaagagcagaaaattgtgcatatttcaaatgaaagggagttatagatcacttccaacatgcacaggtagtatcggtacctaaattctatttctgggatgaccattcttcctaagggcgggaaccaaatgaacgtccttgggcagagtcatgttctccttttacttctgactcccaacaacactgctcgtgtcaatgtgtttgatatgatctgggaggatatacttcgagcatcttggtctccattgaaggggtgtctccatgtgccctttatcatgaagatgatcaaagttgtcactcagataaaattttagaagcctgtgaaacattctcactacgtgctatactaggtttattccagtaacccagaagcacggtccaagcgggctctagctgggtcaggaggccttgcatcttcagatgagccgccacctcagccttcactcgacgagacctcctctcatgttgctgctgcctc

SEQ ID NO: 143855 - DNA, 491 bp, Zea Mays
ggaacactgcaccgcaggtcctgcacccgtgctccttgaccggcttggcgtcgcggaggcatggaacggcggcgagctccctagtcttgtgggcggccatgtggccaccgaggccctggtgcgtcgggaaactcgcaccgcacagtttgcatgtgtacccgttcggattttggggacctggaagcggcggcggtgggacggatgacgtagcatgcacctctgctggaggcggcgatggcagcgcaggcgcaacatctaggtgggtgacggcttcggtgggtgggctgggcttggcaaagctgctgctgctctcgttggaaacattggtcatcgtggaggcaatcggcacggacgagggactgggcgttgcgggctccatgtgcaccggcgaggagggattgggtgtcacgatcgtcggcaagggcgttggctgcaagacaatttctgggtttgcaacgacaacggccatggattggaccgattgggcactg

SEQ ID NO: 143856 - DNA, 946 bp, Zea Mays
gcttccaccagaagttttgcttcaagtctcggtacattttggtttcaccagggtgaacaatgtaaggcgttttatgagcttctctcaagacatccatcttcatctctgatttctgaggcacacaaagacgacccctaaaacgaaccaaatcattttcatcaatggtgaactcctagggtttaccatcaccaaccctctttcgagcttcctgcaatagacgatcttgctgctgagccgcacacactctctccatgagggaggattgaataagcatccgagtctcctcactagcggtgccgacataccacaaagcgatccccaaacggtccagatcagcgatcaaaggcaaggccacttttggaaccccggacctgctaagggcaacaaccaccacatttgtcttcccagggtgataatgaatggacaaatcataatctttaatcaattcaagccatcgacgctgcctcaaattcagctccttttgagtgaaaatgtacttgagacttttatgatcggtgtaaatgtcacaagactcgccatagagataatgcctccacgattttagagcaaagaccaccgcgccaattcaagatcatgagttggataattccgttcatgcttcctcaactaccttgagccataagcgatcactctgccttcctgcatcaacacacaaccaaggccaattcgagaagcatccgtatatactgtgaaacgcttaccactctcaggcaaagctaggataggggcgctcaccaacttgttcttcaatgtctgatagctgacctcgcaatcgctggaccagacgaacagaacacccttctccaaaagtctagtcaaaaggcttagaaatgatggaaaaatttggtacgaagcgtcgataatatccggcgagccccaagaaacttcggattttagagacactagagggtctcttccactccac

SEQ ID NO: 143857 - DNA, 398 bp, Zea Mays
cttgtctctaggcactggtggcatctgaacttgcactggaggttgaggtggggggtgggtgctgctgcacctgctgcatcgctgctaaggtctgaccaattgcctgaactgcctgagtttgcatcatgaacatctgctcaactgtcatcgagggtgggcggtggcaactgggctgcatcctcctggggtgcttgttgtttcggctgagcacgcctcgcaactctgcgcctgttctcagacatctgtagaaatcacacacatatcacatctaaatctacagtctttcagcataagaaaagatatacggaaatcttcatagcactgaacaaatgatcatcttcactgacaacttctcagataaagaggaaagtggaaataaatggattacccaactaaat

SEQ ID NO: 143858 - DNA, 799 bp, Zea Mays
ccgcgcgcgagccgacacgaaggcccactagccagtcaccactcgcgctcgcttctccttccgttcgctggctcgtggacctgagaccatatctccttctctccgccactgacgtatgggccctgggcatcagctccaccctcaacgaacccgccgactatggcagcatgcgctgacttcgcgcaattcattgatgcgcctggccacatccgcgtccatatagggagcacgaccgggttcgcctctctctcctctttatcctgtccttgtgaccaccaccgtagcagagagagatttgggagcgaaggtgagacgaagagaggaagtgctccgccacggttggattccacgctgttcattgcgcttggcgccaaattggagcacggcgtgcgaccagggggtttcgcccaagtccctggatcggtttggtggcgatagtgggcttggtgcgtgtccagggcgcgctcaattcgctgccgccgtcgcaaatccgtgggtcattgtgggcggaccaggagacgaccggaatcactgtgagaactcactccccaagttcgctaccttctcaatttcattttgcacctgaggtacgtagggatcgtgtaccgttgagcactgtgggcgttccgtccatggcgggtcgccgtggaactcggcggggtcgccgaggtttagtcggaggacgaagacgaatcgtggtgcgtcgatctgttgatgagcggcgtagattaaaagttgggtaccgattcgggttgtggagatgagaaccgtccaatttagatttgacagatgaaaaatt

SEQ ID NO: 143859 - DNA, 493 bp, Zea Mays
cttaaggctcgatttcatattctcacaaccttaggtcgttctttctttcagtaggtactcggtgtgatcatgtgtgcatatatcattatgcatactaatgatcattgaggatgagcgtggaggaccatacgaagtggacgagtacaagatactcgagttcttggttgcagcaccaatacaatcatcacccctattaggacctgacaagcgggcccaaacacttgggagttgctgggataagcaacacacaacaaaacggttagcctggaagctgaaatgtcttgtcaagtgtatccgtgtcgggatccggacgggagtatttatagggtaatcagggggacacaagcctaaatatgatcgtatcactagttacctactatattcttagaatatgtcgtgcaatagggtaattacagtacaatattggctcgtgcctaattacaccaaatcgtttacccgctaggggatctggacaaagggccttggggtctag

SEQ ID NO: 143860 - DNA, 1011 bp, Zea Mays
caagtggtagatttttgctgatatattatacttgtctcttggtgttatatatataggtactttattgtcattgatgacatatggaatacttctgtgtgggaaacaatccaatgttctttgatgcacaatgaatgtggaagtataataatcatcacaactcgtaatattgatgttgcaaaacaagctggaagtgtttatcaaatggaacctctttctctcagcgactcaacaaagttattctgccaaataatttttggcagtgaagacaaatgtcctccagctaatttagctgaagtggctggtaaaatcttacagaaatgtggtggtgtaccattagctatcattaccatggcaagtatgctagccaataaaactggaaaggaaataaacacacatagctattggtcacatgtgtaccaatccatgggttatggtctagatggcagtactaatgtgaagaatatgagaaggatactatcagttagttactatgacctaccttcacatctaaagacttgcttgttatacctaagtttgtatccagaggactacaggattagaacaagaggtctgatatggaaatggattggtgaaggttttgtccatgaagaacaagggaagagcctatatgaagtaggtaaggattatattgaagagttagttaacacaagtatgttagaacctgtcgggattggccatgatggtaagaccgtatcttgtcggatacatgatatggtccttgatcttatcagtttcttgtcaaatgaggagcattttctaacaaaagtaggtgggcaacaacccgtatctcttgatctgcctaaaaaggtccgccggttatccctccaaattagccaggaagaggaagccaagcagctagctacaatgagcttctcccacgtaaggtcacttactgtgtccactgaagttttccagttgacgccaaaactttcggcctttctggtcttacgtgtattgaatttaaagaaatgtaatggagtgaacaatcac

SEQ ID NO: 143861 - DNA, 1156 bp, Zea Mays
tggttctcagcctttaaaatagaaaggtgaccaaaaggaacttgttgatttacaaagttaggcatttagccgcagacaggattacgccatagatagtattagcaatttcttaattaccccttctctactttgtgaactgcatgttgctattttaggcagtgcattaataacaaagcactctttcctttctgaagattgcagtgtgctcctaaaaatattgtcttgtctgtcctaaagcaattataataagtcactagagagcgtatttgtgttttttttctgttggccaaaaagcacaggaataaatcctctgtactgctactgctctacccctatgttttcctatttctctgctcatggccataaatacaacatccaatgtcttcatggtttgttagaatctgcctactcagatatgtatgttttcttgtaagttccatcactcgctgcttgactgacttctatgttctattactcgctgcttaactggcttctttgttccagcatttcttttttaccttttgtagtgggaaacaccatcattagtactttatggttgtagaacacaggttgaactacaatagaagccattcgtgcacaattgagtttaggcaaagttcattcaggggttgtcttagggtgattagactatgggtatgatgactagggcagggcacttgtttcatgtcacctaactatctcttaaaaacaacaacaaagccttttaggcttttaatcccaagcaagttggggtaggctaactatctccctaaaggcagttattaacacaattaaaaatgtgtgattctaacctgttaatagccttgaaagacttctagtttgtcttgtttctttctccttttctatcttgttactgttaattctatcttgcgccatttttcagttctgacagtattattattttcgtgcaggctaaagatatggtggaatttctcgtattggtaaaccaaataatctgcaaatttaaatcgtcagctagcgccatattggaggaaatatttcctactattgcaagtcgtttgtctgcgatattatcacaagatgcattttcagctggtcctgcaagcaatactgaggtaatgttgattgcctctgtaaacaagccactgtgtatattactttattttctagctgc

SEQ ID NO: 143862 - DNA, 1109 bp, Zea Mays
ccccgagagactcccacctcaggcagaactccgccttgcccgaattcaccatcgctctgtctgtctcgcccgagctgatcctaggcagataagacaaaaggcgaacgaaaacaggtggggaatactcgcatttaatgtgcatattagaagatattagatattgtgcttatcggataagctaggattgttatcctcttggagctgcgtctccatctctatatctccccctgattttctccaaccgtgtaacagccatgcatggctcatctatataaagaatacatcggcaccatgttcaggtgtcgagtcttgagccatattaacatggtaccggagccaatggttcaatagatgtccatcatctcaactttttcttccgcctccacccctgccaccatgtctcactcgaccaacaacatgccttcccctcctaccatactgctgcatcatgcgatcaccatctgtctcaccaaatccaattatctactctggcgagcccaactcctttcatatctccgcagcataaagttgatggggtttcttgatggcaccctgccagcaccaccgacggttgttgcgtcgtcttctacagccggtgccgagatggtccagaatccggccttcatcaagtggtatgatgccgaccagcagctcctcagtgggcttctatcttccatgacggaagacattctccgtgatgtgatcacgaccacctcatctagggaagtttgggaatctctgcagcgccagttctcctcctccacgaaggcccgaacactacaactttgggttcagctcgccactgcgaagaagcatgatctttcggcagctgactattttcggaagataaaaggcatcgccactgaacttgctgttgccaatgaaatcctgtgtgatgatgaggtgattgcatatttactcgccggtcttcccgctgaatatgatccatttgttacgtcgctaaccaccagaaccgagcctgcttcccttgatgatgtcttcgcacacctcctagcgttcgaagctcgacaactgcagcatatcaccgacatgcagctgaacattggttcgtctgcaaattacgctaggcgtggcggacatggtaatca

SEQ ID NO: 143863 - DNA, 575 bp, Zea Mays
ggcaagtgtcacaccgggccacatactgtgctatttctttcttcatccctctccaccagtatctggttttgacgtctaggtacatcttggtggttcctgggtggatggagtaggctgagttgtgagcttcatcgagtgggacttcctgtgcctctccttttggtacacacagacgattcttgaaccaaaggactccttgttcatctatcctgaggtccggaagttgttctttacgagattttgccataagtcttgttgtttctgcgtccaggcattgagctttgcatatgaggtcttctaacattggtttgacttctaggctgccgttgtttcctagacatgcattcagctgagctgattccttcttccagccctctaaaaagttgatccccttcatcccgaaaggttttcggctaagggcgtctgctaccacgttggcctttccggggtgataatggatctcaaggtcataatctttgatcagttccagccatcttctctaacggaggttgagatctggctgagtgaagatatacttcagactcttgtgatcggtgaagatgtggcatttgttc

SEQ ID NO: 143864 - DNA, 453 bp, Zea Mays
cgaagataatgttattggagatgttctgacgcaagagaccggaggaaaggagcatgtagtgacctacctaagtcggaggttggtggatgctgaaacaaggtacacttttatcgagaagttatgcttatgcctattttatgcatgcaccaagtgtagatgttatttactgtctagtcattgcaccgttgccagtcaaaccgatgtgattagatacatgttgcaaaacctgattatgagtggtagaattggtaaatgggcttatgcacttatagagtatgacttggcctatgaaccattaaaatctatgaaaggtcaggtcatagcggattttattgtagaacgtcggagagatgatactcataaactgacatatcatacctcactgttactccctggactttatattttgatggatcggtttgcaatgaaggataaggaattggcatcgttctt

SEQ ID NO: 143865 - DNA, 580 bp, Zea Mays
ggcaggcgtccatttacacatgaggtcggcataccatcgctagtccgatggtcagacggaacaatgaaccaatgcttagaaacgtacctcagatgttttgtccacatgtgtccctcccaaatggatcaaatggctctcactagccgagtattggtacaacaccagtttccattcatctctttgctattcaccttttgaggtcctctacagtcactagcccaaccatttcaatctgtcatcagctgacgtctcagttccagccgatgtgtcatcctggctctaggagcgttccctcatgcaggctgttgctcgacaacatttgctccgtgcccaacattgcatgaagaagcaagctgaataatcacactctgagcgccaatttgctgtgggtgacctagtatatctcaagctcaaaccatatatttagtcctcactcttccaaccgttcctgtcagaagttgtcattcaagttcttcggaccgtttaccatcatagaccgcattcacgctttcgtttacaaactggcgttgccgtcgtcttccactgtacacctagtttttcacgtttcgcaactcaaggc

SEQ ID NO: 143866 - DNA, 458 bp, Zea Mays
gaggttttagggcacctggagtcattggcagatctggaggtggctttggtttcggcaatcgcgtggaggggttcacctcgggaggctttgggcaggcgtacggtccaaatggtgcggggcgaatttctggccaacacctaggtcctcagttcggatttggtgtcgttggacacaacaacagggtgccgcaaaactccaagcaaacaatagtttttggacatggacagcagcaacctgcctcgttctcagttggaggagctcaacatggtacacaacaggttggtgttgggggacagaaacatgattctcataatcagcgctacaaggataattctgggtctggtcgacaggtagaaagaggtttttggccaaagcagcatgctaacaggggccggcccccattctccaaaggtccaagtttcaaccatattgcagctagtggttctgaaggtcttcaa

SEQ ID NO: 143867 - DNA, 811 bp, Zea Mays
gccgcacgtttttgttagattcacttgtaggaggaacttcatgctatatatgaactatagttgactgcactatggatgattattattcatcatttgatgaaggatgatggggaacttcatgcaataatatacaatgatcgatgcaaaaggtaacgttggggagacgaacgaccgaaggcaaaccttgatcatactccacgttaacaataactggcccatgcatggttgtgagattggattccacaccgtttattagctagggcgcgagattggatttgtaatatcgtaccctatccggcaatccaatcgaaaggggttataataatgaagccatactatacgatatcccgacagggactaccaaaatctcctgccagtggagaacgacgacgatcaaaatcgtgtgtatgatttcaggtaaaccagttgtttttatttcgggatccgtttacaagtccggcgtgcttttcaaataaaacaccatgcaatctcgcgcaaaaaggacacctgcaaagtaaatatgtctctttccgttctctaacatacttgcatgcaggccttctcaaagtagtactgtaggtaactgtgtcttagatgcacggcacagtacatcgcgcgcgttaggctggatgccggaagggagctctcctctttaatcatatggagaaaaggtggtaaaggaacaaaagagacgagtacttaagcttgttggcgccgcgtgttcttctctttttgcgtaggcggggcgggggaagtacttggctggacgcagacgcagtctgactcgctgttgcatcacaggacccccgtc

SEQ ID NO: 143868 - DNA, 732 bp, Zea Mays
gggacatttcctcggtgtcggacgagtttcttatcctggtaggaggtagggcctgaggggctttttccttctgctcagtctgacatccttgacttttggtcttcttgcggatttttcttacaggggcaagcttcttcaacttcttgtcgtaatccattttcagtgtgcggtaggcctcacgggtgttggtttcctcgccttctgctatctcaaggttctcttgaagggacgccttttcctttgtaagttccttgactttttgctccaggctttccacccaggagtttaggtgagtgcagtgggaggcaaggtcatcatattggttatcgagggtgtgaaggtatccagccatgtagacgatggtggggtcatcctcaatagggtctcctcctgacagggcctgaagtcttttcctccaggcaggtgtatttttgttgctgggtgggaagtagcgaaggggggtttcaaagatcaccttgttgtagctctggcatagttgtcggagggctttctgggcaacattttggcaagtatctgggaagcagtatccggtgaaagtgacttggaaagaaggatggttcggatagtttcagctttctcccaggtagactgccatagagcacttttccatcccattctagagatactccttccaaacatattctggctttttgcggattcccatgcgaagcgcacaacttcgcaacagatgtgggaacccctccacctctg

SEQ ID NO: 143869 - DNA, 313 bp, Zea Mays
tttggggcgttagcttgctgttgatggtaagtgctatctaaacctgatagacacaaataccccgggttaattcaaccccttcccataccagaggctgcttggcaaatcataagcctggatttcattgaggggcttcccaggtctgctcatgctgacactatcttggtggttgtggacctattttctaaatatgcacacttcttgccattgctgcatccctacacagccttgaaagtggctcaactccttatggattcggtatacaagttgcatgggttgcctcagtcgatagtatcagatcgagataaagtct

SEQ ID NO: 143870 - DNA, 785 bp, Zea Mays
gtgccaaacccttgccgtcgcgtgtagagcttagggaaagataaagctagggtggcggaagcggggagacacggaattcacgttgccgtcgacgtcgggtgccggtgttcggatcagaagcctgcgccgggttgctgcgaaggtggtcgtggcactggtcggccggattgacaagctgagcgaccttaattgctcgtcggagtttggcttgggtgccgcgccgccctgcaccgtgaacggaaaccttgccgccgtgaaacaaggtaaatcaaccccctagtgcgttcgccatgttcttctttaggtgtatgcgttgtttaatttcaatttcgtggcgtgggtgcgcttgtggatgatcgccggggtgctccgtcacggggaaacttgccaccgcacggtagatcggctctgaggttgacgatggagtgtgaaccgttagattctaggcgtacgatccagattaggagagaggtaccgattcgggtggacggatcgtgcgtcgtctgattccgatcggtcggcggtgaatcaatgtaggttatttaaatctgagacgttgaagttctatcgtgcggctcggattgggtaccgtttcgatcgggattgatttaatctgcgccgcccattcaagatcgggcggtcaggattgcttcataccctttcggcttggcgattttgcaaaagagaccccctactatactagtatcaacccgcagtccacctggtgggtcgtctgagtcttaggattagttacacctaggcccctgacctttctggaaatcgag

SEQ ID NO: 143871 - DNA, 499 bp, Zea Mays
tgaagaggcaagcagataaacatcgttcagagaggacatttgctgttggggattgggtttatcttaaacttcaaccttacattcagtcattcgttgcaactcgatccaacaacaaattgtatttcaagttttttgggccctatcagattgtggagcgtattggtgcagtggcttatcgtcttcagcttcctccagccagtgtcattcatcctgtaattcatgttttcgcagctgaagcgttctgttggccgtaatgtgtctctttcttcacatttgcctcaggaggaggtgcctgtgcagattccattacatatttttgtagcggtgtatgattgagcgaggaggagatttcatcgcccaagttcaagtgctatggtcaggcatgtccaaggagctagcgacatgggaggacgaagcagccttgaaggtgcgttttccagatgcaccagcctagggacatgctggttctcaagcccaggggaatgttggtgacaaggag

SEQ ID NO: 143872 - DNA, 622 bp, Zea Mays
ttttgtcagcttcggtaactttctttgtggaagagtggcgtttggaatccagtgtttccaaaatatctaatacatttaccatcctttttcttctaggggtcatggcagaacttttttctgccttcagcactgtcacttctgttgaaggacttagaatcccgggcatttttgctgcttcttcagtttttgacctttcggccttatcctcgtcaaccttcatttcaaccagctcagtcgaaggtatcttcagcattgcagccggcttttcaatcttctgcgtgggacgcacaggttccttcggttcagtagctgaagatgtttccctaccaaattcaggtaccacggccagttcaatatagcgtggtcggtgggttaggaccttcagctttttacccttcggagcaggctcgtctggtttggccgaagcggcagcctttgcagaagttgcaccctttcttttctaccctcgtggcgggtagcgatagtcagggtatacaaatccaatagcatcaaaaaccccatttaatcttttcttttttcgactcccgaaggctgtggatagtgcattgtcttcaatcttggaatatgctccaagtaattcatcgctggtattttcaataca

SEQ ID NO: 143873 - DNA, 486 bp, Zea Mays
cggccacagtgcctgaatttggcggtgagacttcttcagctattgaagccaaaggacctgctcttatgcagaggattgaagagccggctgcaatgccgaagactgacaaaattgaagaaccgagaaccgaagggacgaaaacattagaagttctaagccttcggcaggagtggaggtgccgaagacacaaaaaggtctagcagcaacccccaagagaaaaaggatggctagtgtattagatgtgctggagacgataaaagcttcaagctctactccaggaaaaattgccaaggcttcgaaaacacagattgaaaccgagacaaagctgaccgaagccaaagctatactgagccaggctgacgccgaagctgggccttcagtgcccgccaattagaaatcctcagaaactggagaaaagacagcggaagaagaaggtatagaacaaattgtgcctgaaaaacctgccgctcctgctcctgaagcgtc

SEQ ID NO: 143874 - DNA, 439 bp, Zea Mays
attttccgtatatatagaaaaggagagattgaatattgcggtaaggagccatgcgaatgcgtaaggttctcccctgtctctcaactcctaaaggcttcgtttgggaacaccaaaactagccggtttccgccggacaggcaccccacgggcacaaaatacacgggattttcgttcgagcgtttgggaggcttgtgtacgggtttgctagccccgtgtaacactgtttttgacgggtgtagagtttcactcattcgatggtcggttttgtgtgcctggtgattctctccctcgtcctcggctcggctcctcgcctctacgctgcacctgtcctgtcgctgccctcacccgacgctgccaggttgcatctctgtcgtcctcacctcttcgacgtcactcgccaccctcacccaccaccaccaccatcagatctggatcgacc

SEQ ID NO: 143875 - DNA, 590 bp, Zea Mays
cataagtgtactaaaacaagagagcagagggcatgaacggacatgcagcacgctggtcacggcgagctcactcaatacggcgctctggaccgatttgggggaaatcctaaattgggactctctggtggctaatcggaggcacgggtgggtgcgttgagtgcttgactacatggcggagctgatggtgcactcaatttataggattcggaggcggtggctcgtgaattggagttggcgcggtggcggccggagagaagggagagcactgttgcaagaaattggtggctttcaccgtggcgagctcaccggcgatcaacggacatgcgtaatacaagttactgcgacgtggtaagacacctaggcacgtggcgtgtggtcgatcgatggccaactccggcgatcttatctgaatcgcccgtgaatcaggcggacacggtggccagggttgaacagtggtctaagttcatccttaatgcgatatttctcatccccagcaactatctatacttcactgagcatgaatcgcagcgacatcgccaatcacgatgcgggatcaccggcggcgagatgaactgaacctgagatatttt

SEQ ID NO: 143876 - DNA, 301 bp, Zea Mays
cataaagagcttcaaaaggtgccatttggatactctcttggtaactattgttgtaggagaattcagctaacggcaaacactcatcccatttttctgaataaactaatacacatgctcgcaacatatcttccaagatctgatttacccttttggtctgtccactagtttggggatgataagccgaactatgaattagcttagtaccaagagacttgtggaattcctcccaaaatcttgaaacgaactgaggtcctcgatcagacactatggtcttaggcacaccgtgcaaactcataatccg

SEQ ID NO: 143877 - DNA, 277 bp, Zea Mays
tcccaactgaagaaatatgttcgattgccgactgagatcatagcagaaccagaattggagatagagccagatctatcgtaccaagagtacccttccaaggttctggattgtaaagaaagatcaactcgggctaaatcgattaagatataagatccaatggagtaacacttagaggaagaggctacttgggagactgaggaatttctacgttccaacttccccgattgtctacctaagggaattggtacgtaaccatgcccaacccctccccctgccc

SEQ ID NO: 143878 - DNA, 1871 bp, Zea Mays
gctgcgcaaagaaattaaattgccaagcaaggcatacctggagcagaagaataattataagatacctcctgctcataggtggacgaaaatgaaccaaaattctttgctggagacaccattggacctctatctgcaatataatcttcagctccattctgaaacttacacatccataagtaaaatatatagatcaagggcaataagatactttacctaataaatggtttgtttctctctgttgacctgtcattggaaatggcacatgatcaatacttgattgaggtactggtgggtgcaaagcttctgtaacttctgttggcagaccagctggttgctgatactgatcatggtaaccattatgatgaccttcagttctacttgtggatatggcatgctgttgaatctggtggtttcccataacagatttagcagcaacccatgccttagcctttgtagcccaatcttcctcattgtcatgaccttccattatttaatttttaaggaaatagagaaactatcgtcatactaacaattgatttatcggcgcaagaaatttattctgcttcagaagtctctctaaagttgattgactatagtaaatcttacgctatgtttaaagtttatttcattgagagtagcctaaatagatttaatgacaaggccccccaaatgaacaactggtccatcgacaaacaagaaaacgttttagtccagtataaaaacaaagtatcgcaccaaaaactaccaagaacttattatgtaagaaagcactcataataagataagaaaataacagtcacgtcaagagtatgcaaaaccaatcacttaatagtgatttatcaacaaatagttctcaagagatttgtatacagaaagcgaattacacgacagtaaatctgttaggctaaatattttaaagtaaacatctcctgtgtagtcactaatacatgacagatagcagtagcaccacaatcaagtggtgcaaagaaatttccaactaagattaaacttgaataacaacaccagtattaacatggccacgatggatatatatttgcagtttcagaaatgtgttatacaccagtattgagatattgtgttttcacaaacaaggttgaaatgtgtgtataatagaatctttagcaaaaaaaaactcccacgtcaataagcattaggatagaatgtttagtagaaattccacaacatagcatatcaaactaaactcgtcgtgatttgcaaaattatatatgaaagaaacagaggtacatataagagtaaaccttgatatccatgattctgagcccatgagtgattggtccaagcctgcaaaataagcaacacccagcaatgaacttcatgttccgtgaaagtttagagcaatgaaacaaatgaaggtcacctcaatcaaagatgaaaagttgagatccagatcaatagtaccagtgaaaccatgaaaaaggtgaaaaactgatagcattatagcaaaatcatcccatctaccgttgtgtacaatcatatcaatgtcaaactgtgcccagccattaaggcatacaacaattgagtagaatggaagcataagcttacacccgaacaaccacatgcccattgtgctgggcactaggagtggaatccccttacaactaacctaacactcaaagccacacctactcacaatccctagtacaaaaccagctacatattgccccccaacaagaacgtcaatgcatcggcggaaattcgaaacccatacagggtaaacccaacgtacctgccccggcggaggaggagggtaggtaggcggcgggtgctgcccggcgccgtggtgagggggccaggggttcccaggaggcgggggcggctgttgctgcatc

SEQ ID NO: 143879 - DNA, 727 bp, Zea Mays
caagatatctcttttcagaccaaagagagtaaatcaaacaacttagcaattacctaatgagagcaaaaaattgcatccactcacaacaatgttccggcgtgccgaaccccctgcctcgcccccacctgtttgatagctaggatctcgcctgagtctaggttcatcctgcggtagacctgcccaaactcaccggcctcgatgagctaacacttacgccaccaaatcgatgggtctcctctccgcctccgtcaatggccccaccccctctgctgccgctgcccgactgaacaagccatgtttgctttcattatctgtgtcataataatacttaaataaatgacatggtttttggtgcatcaacatgtaaagcatggggtatttaagctgttgaccttttacaagggacttcaagttcttgcatttggataaagaagcatgtctcacaagaaatctcttaaaacaagcaataactaataaaaactatatttcaaattaattattaaacacatcaacagacttgatcgctatacatcacaatgtctctagctgtctggtgtgtaacttggctgactactcaaattcaaagagtacatatttggtgtctgatagtgtaatgcatgtggtatacattggctacatttcctttgttgatttacatcgttgacagtgctatggtaggtacatgcaaaagaatgaatgcacattatttgactcatttccacatggt

SEQ ID NO: 143880 - DNA, 442 bp, Zea Mays
tctatgcctacaaaagacaagaagaaggctaaagggaaggcaaaggcacaagggaagacaaggaagaacaaagtttcagtggcacctgatagtccagcaatgtctacaagaagcagaactcctcaaaggcaaagccatgctgcccacacaaggagcaagagaaagcttccagacttgaatctgtagttggtccatatcactttgagatccctatcacttttgtatggcgtgcattgtgcatgtgttattttgcttgataatgtatctagtatgttctggagatctctaggttctgtgagggcacttgtagcttgggtccaccagtatgacctatatggtctgtgaacaaatgagatctatattctgtatggtgtgtggtctgtgaacaaaggggtattttggtctgtgaacaaatgtttacctgttgtttaactgcttatgg

SEQ ID NO: 143881 - DNA, 427 bp, Zea Mays
cacgagttcatcgtcgtaccattccacatttgaataggacaatgtatcgatgatgagtaggcgggtggaaaatatcatggtatcactggatgaataggcaatgcttgttgtgtcacctttcgggtcgttttattcggcagttttgttttagcgggtggtcgaggtttctttgttggtcgatcgcgtagaacgaccttcttgctagcgtatttggagagcaattaatcaaaagtaggactgactttgaccaaccgaccatgtgtgttacaagtgcttttctcctgcgtcttctttcttgctttgtgtggaggccgatgcctctagccatgggcggactgtctagctgagtcatacggactgactacttgagcaccggaccatccgaggtgctcgagtcaggaagctttgctcgactgctcgattgagc

SEQ ID NO: 143882 - DNA, 642 bp, Zea Mays
ccatcagccacagagaagacaatgaactgtggtacttcttgcagagaagtcaccctagctcggaccaacagcctagtagtattgttaggatcagggtcccacatgagcacccttccaaaagcacccaccgcattctgaatgagttcatgagtccagaaatccatagggaaaccaagcagaatcagccaacattcatgattaaaggttagggcacgctgattccagccttcattgtggcgaataacagtaaaggaaaatcccagtgcttgctgggggcccaaagccaccaagttatctctgtcgaacgtgaacctgaatcgcaccaaagcctgccccagatgagagcgttggatgctccgaacttggacccgccggacttccaccaaatactcacggataatatcatcgaagatatggaagttgacctcatgctccggcaaggggtgaacaagcacaatgccccaatcttcatgcgccgaaggttgaggacgagtaacagtatgtaccattatctcacgatgatcgacttgctgcgccacaaagccatgggggaggaacggtgtaggatcaaatctgcgaaaagccatttctttagcagcaccaagaatgctggaggacgaaggtggcggaggtcccacactc

SEQ ID NO: 143883 - DNA, 340 bp, Zea Mays
gaggattcggtgggtgtggtcaccactgccagtgcctactcggtgttctggccttcttagtgaaatagaggggtggataaggtttgagggcttaccctagatgtatgtgaatggtgtggcacggtggagaaactatggaatcagctagggcatagtggatttcagtttgtgctttcatatgccataacaaggcatagctgctgcagcctggctgtagcttctttgggaccatatgcagaggataaaagagggccaacatgttccacttatctcctgcatggtcaccacgtagaggtgaaacacagtaaacccatgaacacatattcactgcatgttggac

SEQ ID NO: 143884 - DNA, 483 bp, Zea Mays
atcatcgcattctccatccttccctcttcgcgtagtacctatcgggatagccaatgcggtcctagatcaccagggcgcggtgcaccggtgaagttccgccgcaagcacgagagcggcgccgccgtgcgcgggggttggcaggagaagtgtcacgtgcagcgtgggatgggggatcgacggccgagatatgatctccactctcccctttgcgctagcttgatctggtccgttgaatagcaatcggatggctcggtgtgttgtgaggatacttcattaaacccctaccgtagatatgaaatcggatggttacctgtggcgctctgattttgcccgcacagatctaatctgggccgtagaattagatctaggcggccaggattgctgcgtaccccttcggccctggaaccttgcataagagcccctgcgtttagtcgaattagaaccctccgcccagtgaggagttttctgagtctagagttttct

SEQ ID NO: 143885 - DNA, 323 bp, Zea Mays
gccgaaactcaatgtcgtgagctcccaactcgcaggcccacttggctattcttccaatggcttctttgttgtggagaatatcccctattggaaatccggtgactactatgactttgtggtcatcaaagtagtgacggagcttgcgagcagttagaagtactgcatacaatagtttttgaacttgaggatacttctttttagagggtcccagaacttcactgatgaaatagacgggatgttgtactggatatgcgtgtccttcctctgcctgttcgactattaatgcggtgctcaccacgtgagttgtgcaggagatgtacaac

SEQ ID NO: 143886 - DNA, 810 bp, Zea Mays
aagaaatttaagatagaaaacagaaaaagtaaaacgtaaaaaggcagatctacgtttgggccaaaatcgcagctgacccagacaccccactttccataccgcagcccagactcataagagcaacgacatgtaggccaccagcgtcagcctcgcctgtcgcgcttaggcttctgcctcgcaccgcccagaagctcacctcacagccctgaatcctgctctcgcccgtggcccactaaccaccactgcgtaggtgaccgcctaagtatggggcccgatgcccagcgaatcaccacgtgcgtttgcttatgcctgaatcgctgaaacatgtggtcccctcgccagaggacaacaccatctcctaaagtccatcttccactgttcgtgtgcgagtaggatgccggttgttgcgattcggtctctatggttgggatttgttgggaacctgatcctcctctcggtgcctaaaaatgttggccgctaccctcctctcctcatccatcggtgctagctccgaagatcctcgcaccaccgttcgtcaacaagtgaaactgagagcgaggagcgccgtcgcattacaaattgatagtgtcgatgaagaggttgcgggataggacatggagcatctataggggccgtgcatcatgcgtagggtggctacctagcgcggggagccatcagttggcagcaatttcttgttgttgacccggcgctggcatgaagccacgctacgccacaggcacactgcaattccgccttcgtcgccggtgagttagccccatcatgttatccgcgccctcagctttgtttttc

SEQ ID NO: 143887 - DNA, 275 bp, Zea Mays
ctcagtccgtatctcgagacaaggcatctgaagcaggagaaactactgacgccagggcgctccacgaacgccgaaactctcgacatcgtgatcgtcgtcacacccaggatcacgagtggagcatgatgccaggcaccaacatgaccatccattccttcctcaaaacctgctacccgacttcgctcgagccatacacatgccagtgaagtcggcggagttctggcccaaatcaccaacggtttgccccgcactccggacgcggagggatatcgaca

SEQ ID NO: 143888 - DNA, 639 bp, Zea Mays
tagacgcacacatcgaccacgcgagcgtactcttgtcgtcgctaaatggggccagggcgccagcaccttcttcgggtggttgagatcgcgaatccgcaccataaccgccccacgaatcctggggattctgtttcaaccgcctagggccgacctgcaagggggctacatagccacacgtcgggtctccgccccctttatgccacaaagacctagtcaccatcgccatcggagagggagtgagagagagagagggagaagtgtcgtcgcgccaggaattcgtcctcgccattccgttgttcttgatgggggcagggtgattcatcgaggggcaaggaaggttgttgtggcatcggtgcaagggaaacgccatcggtgccgctggaattgatcgacggagatcgccgctgtcgtggattccatgctccgccgtagacaaagcgcccgcgcacaccaaatcaaggtgaggaaccctgccatgtctcctttgtccttgatgctttgtatgacacatagaatcgtagtgaattgtgcacttgtgggtcggtaatcgctcatcagagttcgggttccaccgtggggccgcagaggaccatggacaagaggattagagcgacaaccgacgttatgctggtgggcaat

SEQ ID NO: 143889 - DNA, 610 bp, Zea Mays
agcctgcaaggcggcaacaaccgtatatatatacgcggcggttggcggggacgcagccatcgtttatcccgccaccgtggaggaggacgggggacagggcgcaggcgcgcagcaacggcaacggcaccgacaccggagccaatgagcgcggcggagggaaagctggcgatggcgctggtccccatgaatgcggcgaggcagagagaggttaggaggagagaagtaataacaatatcccggtaggcgagcaggtgactgcgattaggtcggattagagtcaggattaaaaaaggaggagctccgtaatccaaaccgagccccagccccagccccaaccggaagcgcggctgaaaaggcacttttgggaggagcgacagcggcaccaccaccagtccaccaccacggcaggcagcacccggatgaacagccaacccaaaaatggcaaaacccaccaccgtctaccaagcagagacagggaggagcgtaggagggtgggcgacggacctgcactgccgcgggcaccgcaggcggggccggacgcgtggatctagcgcctaacccgtgtctccccgcgaggacgggggcgagcagaggtccccctgccggtggc

SEQ ID NO: 143890 - DNA, 541 bp, Zea Mays
ctcctgttgctgaaaaagtaccggcagaggtctttactggagttgatcccactggtggtgtgcctgttcaggttgaccccaatgggtgtgaccgtgcgccggttgaccccaatgggtgtgttcctgttgaagctgaccccaatgggtgtgatcctgttgaaactgaccccaatgggtgtgatcctgcaacatcttttgtccacatttttgatgaggacgaagaagaggaagaagaaattccgctaattcgcaagaatagctggcgttatagaggtaatagaggggatagtgatattacttctccagctctgtctgctcttgttagccttcaggatttatctataacagattttgatcagacccttgaggatgtcattcctgaggatatgctgtcagagccgactgatggtgatatgatggatgtttgctctgacattccagatgtgggattagaggtatcccgggcagcatctcgcgcatcgtcgaccttggaaggcggtcttcggtgtcaagaggttggtcaagattgctcgactcccat

SEQ ID NO: 143891 - DNA, 561 bp, Zea Mays
cttctataaacaacaacttcatctttttctggcgcaggggcgacattgtctcccccaactcttacaatatacatgtcacgaaaatatctccccttcatgtcatcaatatggctctgtttgatagacgactttccgaagatggtatggcttggctgctagggccgatcttcggaatcttcatccccacattccacatcatattcatcactatcgtcagaattttcagacaaatctaccattatttcgtttgtgatcgtctctgtgtttgttttttccatagcttcgtaaaacccagcaagagcagggtccgcaaccttcttcttctcagacatcttcttctcttcagacattcaacaagcacttgtgtatatcacgaagctcgcaaatcaagcgagagctgatagcaagagaattaaaatttgagaaaatagtacaagcaactgaaatggtgcgacaaatgctaccgttgtgggtttctatttatatgcctagtgcattgcaacttggtcggacccatttttcattgactttcgctattctagcgaagggaaggtgtttttc

SEQ ID NO: 143892 - DNA, 716 bp, Zea Mays
atgactcgaaatgaattagtgatctactaggactatggtgcttgcgcaaatttggacagaggcaacccgaaacgaccggtcgacatgagcaatgtccacgacggcgttcccgagcgacgacatggcgttccttaaactacgacgcggtaacattcagtcaaccaagaccgagagctctactagcaataaggaatgctaaaacaaggaccagggggacatgaactaatctgagaatggctggccacgacgagatgtcttatggcgatggtgaccgatttcaaggaaacccgaaattctcgagctacgatggacgaacgaaggtgaggagtggtgcgctagattcgtgataagaaggtggagcaaggggaatgctcaatttatagtgatcaaccgcgtgcttcacgaattcgggacggaagtgcacacggtggtgaatagatgtgtcacaggagctcatctaccgtggtgctaaacggagtaaggtcttggggtggtaattggctgtctctcacgacctactgcaacgtggtaacatggtctatggtgtggcacaatcgagatcactggtggccacgacggtgtcgaccgctcggccatgtcgtagagccagtgaatctcgactgatgaaccagtgctagagaccactttcacggcccttccccgatcttttcacccaatgtttatccacgccgagctcaccgtgatatttttcggcg

SEQ ID NO: 143893 - DNA, 363 bp, Zea Mays
tagcccttgaggtcgaatggtccaacgtacaccagagagcgccacagatcgaaagccctgtcatggacagtctgtccctttagttcggacagtacgatggccccacggacaatccgacccccaaggccggacagtccgatggctaccagagaaggtcgtagagagagtccactatcgcgaacggtacggcccctgaggctggacagtccgaaattgcgtagagaacctcaaactcttttgaggtaagcacaatagaggaatttagagatctcaacaatttggacaggggtttatatcgtccgatcctttggaggagattgacataggggatgataaaactccaaggctgacttttatgaacaa

SEQ ID NO: 143894 - DNA, 333 bp, Zea Mays
caaccggattcacacctttcatctattatatggatcggaggccatgacgccgtaggagataaagcatgggtcgccccgaacaagcacatcagcggtccccgacgtcgacgaaccaacgtctaaagacctcatcgacggagaccgcatcctcgccctacaggccctcaacaaataccaggcccaaaccaaggcctggcgcgataacgcggtcgtcccaagagagttcaacaaaggagacctcgtactcatccgaaccacccagacagaatcatggggcaagctggagccgaaatgggagggtccattcatcgtcaagacaaaggcatcccccag

SEQ ID NO: 143895 - DNA, 1257 bp, Zea Mays
ctcctacactgcaatataacaggagagaagcaacaacgtcgtcagccgccccgcgccccactagccacaccgtcggccctagctcacggccacgggagaagaggatgccggtaaagttttgccaaaaagttcatcaaaacattttctactctactgccggtagaatgctcatagaaatgaagggaataaaactatttttttgttacgtggagagaatcccacatgaattcattgattcaatgacctcgatttacataattttgtgatagacaatagattacaaacagctaacaagtacttcaacgacaaagagggaaagaaagcaaacacaacatgaacagacttgacgcgagcagaacaacaacaaccgaattcttgaggacctgaccatcaaacagcgtacttgtcggctagctcgtaccaatgtaaaccacactacctatcgcacaaacgctgcatagttgtctccctccattgcgcacatcaagggcagaaatccttgaagggatgagggaccagccaactaaggggggttaagagtgaagaagcacatcaattgaaacttgccaaagaacaaccatctcccttgaaattgacgacgagcaccccataaacatcacatccaagcatcataaatcgtcatccaactcccttaaagggaggacacctctaagtagagagggcaagatcataggtccacctggcataagaatgatgtcatcaccaataggagacgtatgacgaagcaaaggtgtgacgaagcaaaggtttgaatggccacgcaacagccacatctaatatcgtctgcaaggccaaggccaacaaagaagacaacaaataggcaaccataaggcgagcagggacgatatagggcacctcccgacgcatcgggcgtgacgttttcactgcacaaatatcacatttgcacatattccagatgacctcgagaaccgccacccggcgcatcgggcgtgacgttttcactgcacaaatatcacatttgcacatattccagatgacctcgagaaccgccactaagatcggctagacagaggagacacaggcatcccgactttgcctgcaataaggactagaagtgccatcaagttgatgcttgtagaaagccaagcaaggctttcgcccaaaccaacatggttgttgctacatgaccacccgaacctaaggacacaagggtcgacgcagcggtctgggtggtcggagggcaaggattcggcgaaacaatcatagagatcttac

SEQ ID NO: 143896 - DNA, 567 bp, Zea Mays
gggggctacacccaacggagtcataaaattttggagacaaatgctaaactctaaatcatacaatgaagacctttgagttaattatttgaaaatcaaatcaaagctcgggggttacacccaatggctgcaccttcggtgcacccaacggagtcatgaaatctcaagaaaaaacgatgaactcaaaagcgagtggtgaagacctttgaattgattatttcaaaatcaatttaaagatcgcgggcttgtgggggatggatatccttcgggtccacacaagtgcgaaaatacgctcagggccacacaacagtcgccctctagaggcgtcctgctatggaccggataaaaggaatcagcagaaacgagccggtctagatgcgaaagaggcccacgttcgagttagccgcagcgtaagcgcgaatatgtcgggttgggtttgttccccacacttgaaatcctgaaccaccggcgataacttgggcgcgggagcactggatttccccaggataatggaagattattcgctactaattaggggataagcaaggaggttgtaatcaacacttggga

SEQ ID NO: 143897 - DNA, 487 bp, Zea Mays
agtccacccgtgttaaaattttgtggtcagtgctcgactgctcgggtactgaatgttgccaggtcatggaccattcggctagggtcaacgggtcgtctgaacatgccttttctaacatctctaacaggattcaaacgagaaatctaatagttacttgtacgacagaccatccggttagagggcgtagatcgtccgcgtgtgcgcggaaagaaagcatcttgcccataattgctagtattggttgaaggggtataaatagaagtgttgctcgtgtattgtagctctcttgaccatttctagcatacattgaacacattggtgatcctccagcactcccactcacacattgctagatattacattctagtgagtgattctagtgcattgcatcctttgagtgatcttgaggcactaggtggcacaccgagcaaacattaacgacttgttactcttggaggttgccacctcctagatgtcttggtggccc

SEQ ID NO: 143898 - DNA, 421 bp, Zea Mays
gttcaaatgcaccacatgagacgatttcatggttcaaatacattaaaatgtctcacttttatagttcacaaataatattgaagatacaatacaccctcggtcgttaacataagcatagtcgatacttgatagacctatacatatcgtgtcatgtacacatgtaaatttattttagtgttaaatctattatcgtatcaaactctcataccaacaatctattaggttcatgacaatggctttaagaaccaacatttttttgttagatcttcctattactatttaatatttttatatctaactatctagcgaggacaaaaaaattgccttcaaatcattatagggtgcccgaaatacacctaatattctaatgacctattattataaatattgttagccaatattatatgtagcagtgataatt

SEQ ID NO: 143899 - DNA, 1184 bp, Zea Mays
tatgttttgacatataaagtcatttggttcacaaatatgtgaatttacaagccaaaccctgagatttggacttaagtgcaaaatggacctcatttgagttctacactaagtctgaaaatcagtgttaaaggctccactttagggctttgtaacttgcaaagcatagggtttttgccctagatcaccacaccaaagttgtagagcattcaaaggagaataaatttgctcaagagtacaagccttgttcttgtgagaaattgggagataatcttgcctgaagttggactgtcaggccaagatagactgaattcctgttggacagtgactttgatccaagattaagagtcatttagcctaagatccagtgggaatctacctaggattgctataacaaagttgtagagcttttatacaggaacaactttgttacagaaacttaggtgtgttgccattgaaatttaggagcaatttggccctaaatcctggctgtcaggtgctctgaataaggcttgccatggtacagtagttccaagctgaagaagatcgcaggttcacccccctgctcgccaccggtgtccatcaccgttgatccctgctcgtcgtgattcgtgcgtcgtggtcatcggttatgcacagctcggtaaaaatccttaccgccggtgagctggccaccactccgacgaccccctctcctgtcttcctttctgctttgcggcgggcacgataagttcgccgtcgaccgccgcttcccgaccgtgcgccgcgtggcctagccattttacagcgccgccatgactccctctacccgtcccatcgtcgccggggaacttgccacggcaatagccacgtattcaccgcgccaggcttcttcctcccctccggccgccgcgttgctcgtccaaaatttgcggccaccgatcactccgcctataaattgaagcccccactagcttcgcaacatcatcacccacctagccaccgtgaatcgctagcaatcgtgcaccagtgcgcttgaatttcggttttcccccaaatcaagtttccgccacccgaaatcaacctcaccgtcgccagcccaattccggtcagctcccgttccctgcttcctcgtttaagctttctcacatgccttggatgcttgccaagccattgaattgaacttcgggctctctggtcaccaggaa

SEQ ID NO: 143900 - DNA, 302 bp, Zea Mays
tttggttgtcatctaatttatatggtttcttcttctgtgaataggaggtaaaaactggtcctggattggagtctacttggatgcatgcaatatggtatctccttatacaattactgctacaagttcttctccatccatatgagtattgggaggctacattttatgtggccatatgttgcaagaaatcctttcctgtcattgctcaaggcgataactccagtgcacaagaattcgttgaacacagtatacatgcttgcatcaaggacattcaaaacactaaaagacatatatggcttgcatca

SEQ ID NO: 143901 - DNA, 473 bp, Zea Mays
atgtcacgaagtgggaggcatcgccggatgggtatggagcaatcccgtctttgattagattgggggtagccaacgcgatctactgtcctcgacggctgagacgtgtattggtgagggggacttgcagaatctatttgagggcgaagagttgaagatgatattgtttaatttccaggaggcgagtcttattctgaaggtggagccgatgtagcttttttgctgacctcgctctcgtgttgtgatagtgagtgaaaacgatgccctcccccgcttcgcaatagagagggagggcgacaatgtgatttgtattacttgtgcgatgtggccgatgggcccttcgttttatgtatgtaaactatgatggcatatcacgtgatgcgtttattgtaagattgtctcgatttgtaattgtgtctcgatttgtaatctcgcggacgatgtcgtgcgcttctggcgcgtgcccggctgcaccc

SEQ ID NO: 143902 - DNA, 881 bp, Zea Mays
ggacagttatgctcctaggcaacccagttacaaattgagcatcctttgcccactctaaaaatactcaggcctaaattctctaaagttataacagcataatattcctttctaatcagagctagctaaccagttccagccttagtattatatattgtgtttagcgagaatgggtcaatagtgtcagttaacattatcaagaggacaagtggacaaccaaggatacactacacaaatctgacagggaccaagaacaaagtcagaatactgacacccaagacccaacgatggcttcttatactgaaactcatcccagttgcatacaagctacaaccacatctgtgtctagaggttgatgcagcagtagcacagcactttttttttctaatttccacatgacactgtaaggtaaatttaattgcttatctcacaacaactgtctaaactccaatgtttagtaaaaacctgcagcgcgaaatccgcaagctaaaacaaaaaaaatgttgagtaatggcagcaagtgatcgagaagggttgtcaaaactaatctaatagtgcttacaagcaatcagctgttctttgagtgttgatagaaaccaacatacattatatgttacaaccaataaaccaaaatcttgtcacaaattgtggagcaatatttaaattttgaccataacgttgatctgaattagaaaatggtgtagcaaagcaatagtcaccaataaaaagctcatagcatgaagtggaaaaggatatcacaactgaaagagaaaacggtccgcaggacactagttaaatgtgactggtatgcagaacgctgttaaaagactttgttgacagggactaactagtttcctacattgaaaaatccaaagccaaaataa

SEQ ID NO: 143903 - DNA, 292 bp, Zea Mays
ttggggaccaactcagcatcaccagcagaaatcaaaactctagcatcaggtgcgccggactctaaggcgacttcctgacccaaagcacgtgctgctgccatgcaatttgaatgtggaggagaagacccgacatggacatccatggaagtatgagaaggggaacccgctcggacaccctcgggggctgggtcatagctcgcgctgcccacccgagccggatcatcaccggcaacaccctcgggggctgggtaaacgctagcgccatccttgagtaccgggttctctgtagcag

SEQ ID NO: 143904 - DNA, 326 bp, Zea Mays
tctcaaacttctttaaaacctcacctatcatctcataaagagggaaccgaagtcctgccctgaagaagctcttgaataccacaacttcatcttccttcggctctggaattgtttcctgtccagcaaagcgaaccagttcatcatcattttcttcaaaatatcctagtttcttcattagaaatagatcttcaaccttaattgtggacctcccaaattcaacatggctaggcttagttggacatagaatgttatcgtcatcttcactttcattgtcactctcaacttcagtcatgaccagttcagcttcggcattagaggtaccttca

SEQ ID NO: 143905 - DNA, 398 bp, Zea Mays
agggaaattgccaagtacatatccgagtgtgacacttgccagagaataaaagctagtcacttgaaggcagcaggccctttgcaaccccttcccataccatcttggaaatgggaggacatttgcatggactttatagtgggattgcccaatacatccagacaccatgattctatttgggttattgtggacagattgactaagactgctcatttcttaccagtgcacaccacccacaggacagagaagtatgcagagatctacattgatcagataattcgtctgcatgggataccaaggactatagtctcggacagaggagcaccatttgtggcacaattttgggaacaattgcaagaatcacttggggcccatgtcatccgaagctcaacataccaccc

SEQ ID NO: 143906 - DNA, 313 bp, Zea Mays
gggagggcgactgtggacgttgaggaggtgagggagaggggtccagaggaagcacgactgcgacgttacagcggaaatgagggagaaaatggaggagtatggagttcactcaccagagaaggagatctcgccagagtcgaggagaaaccgttgattaacaatgaatcagaggtctgatcgatgaaccgaaaacaaaacgacgaaggtctagatgagacgaacgcaacgataccctcgaattccacctatgacacacggattgaaagaaatttctcgtcggagttggaactgccccaaactttggtgagcaaat

SEQ ID NO: 143907 - DNA, 595 bp, Zea Mays
ggcttcacgagtgttggcctctttgccttatgctatttcgagactctcttggagggatgccttctcctttttaagttccttgacctgttgctctatgctttccacccgggagtttaggtgggtgcagtgggaggaaaggcatcatagtggttatcgagagtgtggagatatccggccatgtagacgatggtggggtcatcctcagtaggatctcttcctgacagggcctgaagtcttttcctccaggtaggggtatttttgttgctaggtgggaagtaacgaagggggtttcaaagacctctctgctgtagttttggcatagctgttggagggcttgtcgggcaacattttggcaagtgtctgggaagtggtgtccggtgaaggtgacttggaaaggagggtggtttgggtaactttagctttctcccaggtagactgccatagagcacttctcagttccgttctcgcggtactctttccatacgtattccggcttcttgcggatccccatacgaagcgcgcaactccgcaagagatgagggaatccttccacctctaagcagtaggatgtcctaatgaccaaagagccttccat

SEQ ID NO: 143908 - DNA, 475 bp, Zea Mays
ggcggttctccaccggggtcccggttctgtgacggtggagtggtggcaaggcacgggcggtggtaggggatcacggtggtagggtcaatttggccggagggcacttgggatggctggtccatggtgaggtggcgggcgcccgcggtggggggatcgctggtgaggctgccgggtgtaatagggaaagggggtgggtgcgttgtgctcgcgaggacatggtgaagctcaagagctacaacaattggactagaattcaacggagaggggagtgcgggactcaccagagcggaggaagggcgcggcaacgctggctcaattgagctcggggaagggaagaggcagtggtcgaggccggtgtggagaaagagggagctcaggcggtccttttataggcgcccggggcagggaaaggggcgagaggtggcgagcaccggcgagcttgccacggcggggatggtggcgcacagtggcgacg

SEQ ID NO: 143909 - DNA, 296 bp, Zea Mays
tcaacactgggggctggatattgtcgggccactacctacggctcaagggaacctcaagttcaccttcgtcgccgtcgaatacttcaccaagtggatcgaggccagggcagtatccacaataatgtcgaagactgcccagaagttcttctggcaaaacattgtttgccgattcggagtcccgtccgagctcacagttgacaacggcaaacagttagacagccaggacttcagggacttctgcttctccatcggcaccaagcttgccttcgcctcggtataccacccgcaatccaacg

SEQ ID NO: 143910 - DNA, 448 bp, Zea Mays
aagaggccggccggggctagtagcaacgacgactaaagcacgtactgttcattcctggctcataggaaggaaaggaacagacaataattcagagtgccgacctagctagctaggcgtaacgtacccgcagtcgaacggccgcaacagcgaacaggatgggtcgaagacgaggtcgttgagatgatgtggattagtcatacattcatggtacattatatgcttgcttctgctgatacatcgcctacacgtgagaatgttgtaagagaagatgtgtgttttaacgagttcggacgggccaacatatacgtacgaacgcagttattagatagataggtttcctctatattgttgttcatcgtatatctaccgaccagatttaggggtgttctaggagcccataacgatgaggccgtatagtattcatgagtctaccggtgaaaaatagaat

SEQ ID NO: 143911 - DNA, 704 bp, Zea Mays
cttggcagccaagtaagcctgcaactgtgtcaaatgatgaagtatggctgccagggctagatcaattgatggaggagcagcggagggagcaacactggaaccacctacctcatgatcatatgagcgaggtggcacaagaggtggtggtggtggaatcccgaggtcatcatcattagagtcagaagaagtatcagcactaaggggatccataccctgatcctcaatctgtcaaattgcctcgtcctcaaattgactctaggaggacaaaggatcctagggtcatgtatccgaggcacgagcactggtgtgagccttatcctcaggtgtcgggcgatagaaaccaaacataagtcgggtagagtcaagagcggccaggaaccgaggaggtcagctcagttgcgccaagatgtgacagaggtagtgagcatatgacagctgatgacgagcacgaagttcatccaacacagtgtcctctatctcatagataaggaagtcgacaatgtcaaatagtgagtgagagacgagggcacctaggagctagagctggatatgagtggtggcctctcggtatcccatccgtggtaacaaggtttgtctcattagctcatataggaacttggcagctgaggtgaagtttgcaagagagcaccacaagttgtctgtgaatggtggcctgaagagagcgaagatgtgatctatgcctg

SEQ ID NO: 143912 - DNA, 412 bp, Zea Mays
caggggtcctccaacttctgtttcttcgcactgggaggtccccgacggtgttcaagtgcgactgagctccggcgagctagcaggccggtcgaatggagaaaggactgacgcccttcatcggtcgaaaccaaattcacaccccaaccatcgattcccctaagttaattgcacatttggtgaactaatatggtctggccacggtgagcgcgcggataaactaaagattcatgcgttcccaatggtcagtggacctctagtctaattggacgggtcagcaagcattgtaggtatgtgggaaagcttaaacgagggagagggagggctggactgaccggagtacggctggccgtagtgagcagttccttgcggtggcggaaagtgaatttggggcgaacgtgaaattggagagctg

SEQ ID NO: 143913 - DNA, 505 bp, Zea Mays
gccggatcgtctgtatgacatctccaccaaatcgatagttaccttcacctgacggaagatcgggcacccccgttcctatcaagtggtattcaaagactcaggtattaccgtcaggcttaccctagtttagtttctgtttttcatcctataactccagaaaattgccatacaaaaaaatccgcagtccaagaaccctttgtttggcctttgcaatttcgttttccgtttggctttgttcagttcgtgtctgtggtcgagtcgtgttgctggtttagggtgtatcttcgtcgtagttcaactgcaccttcgccgttatcccatccaccattacccagatcacaagtcgacccaccccattaatcgacttgccctcgctagccgccttgtgtgacttcttgtcgtgccaaccctagataggttgcgagccgccttgagtcttctgcctgcaccgcagcccatccttattcatctggcacaacctattttttttccacgaaagtttgtg

SEQ ID NO: 143914 - DNA, 512 bp, Zea Mays
gtcgtgatgggatcacctgctccctccattcctcgcaggactgctctaggatccatcagagttgtcatctaaaggaaactgaaatgttaccctgtcatcagcatttgtagcctttagatagagacctgcaaaattggatgggatcgactccaatcagctccttgggattggctcgctctttatggcaggagggttcggctctagtcagctccgccaaaacggctggctctgtatggcgagagggatttattgcaagaaaatagagagatgcgggagggaggtgggaggggacaagtgaaaaatatcagttgatggttggatggggattgaaggcaccagatttaatgttctcatgtgagcacgggagttgtgtgagtacgtgatacattcccaaataattgtgccccctaatataacatgagatacatgcatgagatgaatccaactttttttcatggacttgggtctaggacacatctattagtttaggccaagtctcgtttcgatccttg

SEQ ID NO: 143915 - DNA, 410 bp, Zea Mays
catgcctcagccataggttcataccttgtgctcatctacctttcatatttcctgttccaactcaaaacaagtccaaaaggcactttttgctagaaactaggttagagagcaaaccaaagtgctaaaagcattctaataagtgaatgcaacatattcaaaggttcaaaccttgatgttttacccttttaataatgttgcactttctggcctcgctttagctcatttggacctggaatcttcaaattgcacttgagtgaacatatgctcatacacttagcaaaccagttagtcaaaaatgtgttggacattcaatcaccaaaacttatagaaatggcctaatttccccttccttttcaaaagtcaagtgaattataaattggaacggaaggagtatacacttgtcttatttt

SEQ ID NO: 143916 - DNA, 527 bp, Zea Mays
gcgggttctaggcgctgaggagatccctgagcctgagggcgaattggttgtgtttgaggcgtttttcattgctggccttcggctcccagcgcatcatttcgtgacagaggttttgcggaggttcgacgtgtaggtccaccaattgacgcctaacgccgtggttgcgctggcaaagtatgtttgggcggttgcttcttacggcgggcagctgtctgtggaggtcttcgccaagaactattgtctgcactggcaaaagaggaaaataggagataagattgcactatttggatcgtgcacctttacgccgaggactggaaagacttcggcggacgtcgtggaaatagtcccttgtgcccggaacaagtggggcaactgatgggacttttggttttatgtttcttgtggggaagtcgaagatctgcctgagctccctgcggccattatgtgctctcatagctatgtggcgttcccacgattcgaggtggcagaggatgatgaggacgaagaggcccttcggtacgctgccc

SEQ ID NO: 143917 - DNA, 430 bp, Zea Mays
ggcaattacaacagcaattggcaacggtagcgctgccaggcctgtcccagataacaccgtggaacagattgtttccttgctgcaacagtctgtggggaagagccaccccattctgaattcgatggggaattcagcgggtccgaatcttgggtctcaacacagttcaaagttggagaccatcaaagaattgtctaatccgacccacttggatgacaaggtgggttcttctgtgatttcaatttcaaaagagaaagtgtcgttttgtttcaggtgcaaaactaaaggacatcagttgagtgactgtaatattgagctattttgtgaaatttatgatgtcaaaactcacttaacttcgaaatgtccggtggtttgtgcctgcaaaacttttgcaataccttgtggggtatgcggtggagggattggggtttta

SEQ ID NO: 143918 - DNA, 923 bp, Zea Mays
cttaagtcgttgtcgacttaagccgattgctccgtttgcacggtatagtggtcaccctgggttaagtaagcgcgggcatgttacatcgtcttaagtcgttgtcgacttaagccaattgctccgtttgcagggtatagtggtcaccctgagtcaagtaagcatgcaaattggcaataaacaattcgagtgcctttgagaatgaagtcattttattgatggtgtatctcccaattacagaatacaatgccgtcccaatagcttttcaaatctagctaggggtaaaacttcctgagatgctctatattccatgagttccctatttccgtgccatccatttgagtaagacgatatgatccaggccgggtgacttccgctactatgaatggtccttcccatagtgacgacaatttgtgtcgtccctcccccgctagaattcggcggaggacaagatctcccactgcaaaggatcgatgccgtgtggacttatcatggtagcgccttagagtctgttggtatctggctgactgaatcactatattcaaccgttcttcttctagtatatcaacatcctccagcctagtagctttagcttcagatatgttttcgaagatcaatcttggtgccccaaacttgagatcagcaggtagcactgcctccgaaccataaaccatgaagaagggagtgtttccatgcaaagctcggctgggttgagttcttaggctccagaccacatatggaaactctctgatccactttcctgcgaacttttcattcttgtcgaagactttctttctgagtgcttccagtatcattctgttggctctttctacctgcccgctggctcttgggtgtgccactgatgcatatttgatctagatgcatttttgttcacagaaatcaaagaactccgagctagtaaaatt

SEQ ID NO: 143919 - DNA, 317 bp, Zea Mays
gaaggctacgatccgtccttagaatgcttccacatcgactctgagatccccgaggaaggagatcacctcagcatgccgcgggaaggtgaccagcctccaccacataacccagacggggcccagactcctccagggagccaagtagctcacctcgagcaaatccgagagcaacataaaaagctcggggagaagcagcaacgacagtagcaactacgacaagctctggagagggaggccgcttgcaaagccctcgacggaggcgcgcgagcgaaggcacgtgacgtctggcgtcgcatcgaggaagacgctgacgccgc

SEQ ID NO: 143920 - DNA, 447 bp, Zea Mays
ccatcaacctcttaatgcccagtgatatggcaatgttcaatccatggatcagagcttcatattctgctgcattattggatgctgaaaataacaactgaagagcatatttgagttgttcacctccaggggcaatgaagaggattcccgcgcctactcccagcagtttcagcgagccatcgaaatacatccgccatacttctgtagcctccgagctatctagtacttgttgttcggtccactctgatacgaaatcgactaccgcttgagtctttattgcagtgcgaggccgaaactcaatgtcgtgagctcccagctcgcatgcccacttggctattcttccaatggcttctttgtcgtggagaatatcccctattggaaacccagtgactactatgactttgtggtcatcaaagtagtgacggagcttgcgagcagttagaagtactg

SEQ ID NO: 143921 - DNA, 632 bp, Zea Mays
ctaagtaggtgtaacccatcttagaagtcatgccttggccttatcatgcactaaagagaagagaatgactcaaaccctaattcaaatcccttataggcaaatggagccctagaggggattatggcaaaaagtctatgtaaatcacattgtcttgacttggactaattataaaagttgtagtacacttaataccctacaaaaaaatagaaagagagtgaccccaaaaagatttcagaaaaaacccaaaaaggtcaccaaagagaagaacataaaagaaaaatcaggtttttctcaagttcaaaatcgaccctctttcaaagatcaaacatgttcaccttgttcccaacctcaaaaccttatggcccaattgacaaaatggtgcccaaagacccctagaacaccctggaaaagtttgaatccaaccctaagccatttgacacgacttggcatggcttttgtcttggtgtggacagctcggacagagccaacttctcacccccatatctctctaccccgaccatatcttttcttggaactcacatcgaaaaggtaggatttggtgcagagaagagaccgtatatgggggttatgctaagatctgcaccctaagtcgaccaaatcggccgttgaac

SEQ ID NO: 143922 - DNA, 385 bp, Zea Mays
tagatgcgacctctgctactgcaacatgattcggcgcttcaggaagtcgttgagcacatacatcaacatcaggccactcgaagccatgatttttattccgtccagattggggtggaactccagcgaaagggatgtcctggccctccactgcttgcggttgagggaaggctctaataccggcaggctgaggtggtcattggcctcagtgctggcaatcacccagtcacattgctagtcttcccgcttctcggtggcaagggtcgggatgtagattgtcaacggttctgacctcatttggaaatagaaggtgctgatgtcatccttgctcttctcagacttgaccaacacaaagaagtgtcgaaaaagggagggggtaggggcgcac

SEQ ID NO: 143923 - DNA, 496 bp, Zea Mays
ccgccgagcaagtcaacataagcatacatagcaaggcacgtcgccaggggccacacctacacaccccatccttacaataatcataccgcactatctgatgggacggagcagccctgatcataggcaacctcggcaccggggcctccacagtagctggtatatcagaagctacgagacgaggcgccataccaattgggcgaattcacgcgctgataggtgacgaagggctcatgacgactgaagaagccacgccacgtacgaccgcatcgtgagactgatccgtgggatccaccgcgcaccactacaaagacgtcagtaaaggacttgctacaagagccagagtaggagacgatgccataccaggagtacgaccacgcacgaccttatggaggatcggccacgacaacatggggaaccaatctctctctctccgtagaaaataggtcttctctgtaaggttctacccttaagatgtaaaaggacatgttcccctcct

SEQ ID NO: 143924 - DNA, 358 bp, Zea Mays
gcatgaccccaacaggtgcacaccgccactcggccagagatttcctctccgacatttggcgcgcctggtagggggctaggctttaggtttttgcctatgttcttatttggcatgatggtgtgaatcatcgagcaccgcaccgaaacttcggaggatttcgcgatggagcaagaagttgcatcctctgcgccgcgagtacccgaccgccctaagtctgggactgctgctgtacacgccatgcagcagcacacgcctgcacaagcgtcccggactctgtcaagggcagcgcttacggtgttgtctgcagccagggagttgctacgccacctcctagctccacggcctcaccggggccatg

SEQ ID NO: 143925 - DNA, 354 bp, Zea Mays
cggggaggagagtccggagctgagacggcgagctgcctagctccgttcctgctctatatctcagctcctccgttctgtcctgtggccccgagctgagctgccaaggatacgtacgtacgtacgtcttgagggaggctgccggtcgccctcttctctcgtcgacctcgtcggggttatgcggaggagcaggtcgtgcttgtcctgcgtgcccatggggacggcggcgctgcccattgagaaccacttcgtcgctccggctgcgctaccgtcggtgcccgcctcaggtacatgtatcatgctgataaagctcattgcttattgaatacctgctgcattcatagctactagtactcc

SEQ ID NO: 143926 - DNA, 281 bp, Zea Mays
gcagactatccgggacatgtataactcagctaatgttgctccggtgtatgttgtcttcacaggtatgaaatgggccacctttgttaagcggtccacaaccacccagatggaatcatagccagccggggtatgaggcaggccaactataaaatccatcctgatctcatcccacttccactgaggaatttgcaatggctgcaacagtccggcgggtctctgatgctctgctttggttctttgacagctatcacagatggcgacatattctgcaatttctcttt

SEQ ID NO: 143927 - DNA, 581 bp, Zea Mays
aaaaaatattaaactaatagcaactcatacattgagcaagtagtccattacatactgcaaacaggaaccaaaattgcctctctcttttttacggtactagcctatatagataccgacgcagttaagggcaaagcagtaagtacatttttgttattagtctgcaccctatatttgatcagtaaaattattgtagtctgatacttgggatttatgtagcaattatggcttacatgtgaatgctcgagatcccaaagaggttgagaccttggttatggtcgggcccccttgagagtacctgagctctagatgctttgtttaacccccaacaaatgccaggggcctggtccttacacaacccctagcaaatgtctaaggctctagacaggttcatgcttttgatgtgagataataccttatgttctgtatatgctagtttggttgttgtatctttcgatgacgttgtgatgccctcaggattttttcaccccctccccccttttatattctaaggagaacgaatgttacatggtgggcactaagttggctagtacgagtcgtatgagttgtaccctatgtatttg

SEQ ID NO: 143928 - DNA, 272 bp, Zea Mays
gacctgagaatagattaggcttcagtagcacatgcttgttactaaaaccggcattcttgcgtcatgcttgttactgaagatgacatgttcatgttcaacagataaatattgcgaaaatatgtatgcgacattggatttgtggccatacaagagatcgggtccggtacgtgatacgctaggataaactaattgaaaagattgtccaacggagaggtacccgtgcatcgtggaatcctaaggcacgacagcaataggaagagagacagggaccg

SEQ ID NO: 143929 - DNA, 620 bp, Zea Mays
tggcgacggatttcggtcgacggtgagcaattcaggtggtgctggcggtgaatcccaagcggcccggcttcttcaaccttccttaaggccagatgaagcccagggacaccagaccgaggactgggtcgacggcaagtagaagatctctcgtggcggcatacgacgcttggcttctctcggtctctccatgcggcacaactggtgagacgaggggaagaggagagtagggggggtctgcccacttatcccgcgacgtcgcgaagatcttgcccgcaagctacgccagcacgagctgcggggtggtcgttatggcgcccaccacgccggaattgcaggcacgaggaccaggtcacgggagtatgacgtgcgggacccggtggacagagggcgtgggcgagagaggacatacgtgctgacgaccctggcccacccgtcagtgtgtggttgatcatggcaagcaacacccactagtcagcgcctggtgttggggacgcgcggtactggcgacaaaccggaccgtgcggaaagggaatgtgtgtgtctggcgcgtgggcccgtggtttcggcactgattcccagaactgggctgcgcgaatggtaagggcaacgtgggccaaatt

SEQ ID NO: 143930 - DNA, 840 bp, Zea Mays
ctccagaacaagagaggtaagaagtggttggaatttctgtcattctttcttttcgtcccgcacacggttacgggttgtcccttttatgtttaccggccatcagtcgaattactactatctactagacataagccctatattccaactggattacaaccagaaaacagctggcaagccaacactacggacttaccgactcagttatcatcaggggttgccacaccttccccctcttcagattgtgcatgtccccatgcattaagctcaggaaacattttggccaccacattccagtcctcccaggaagtagcttcatctttcttggtagtccactgaatcataacctgaacaatggcctgattccctttcttcacaagacgtctgtctagaatcttaacgggcttcaactctccttgctccaaattcaatgtagtaggcaattcagagaagactggttggtaattaggcgtaaacagttttaactgtgatacatgaaaaactggatgaatcgcaaccccttcaggcaattccaattcataagccacggacccaataaccttcacgatcttgaagggaccaaaatacagaaaatacaatttaggacatgatcgaaacacaactgaatgctgcacatatggttgtaacttgagcaacaccaactctcccacttgaaactttcgatcagtcctcaatttatcagcttgttgtttcatcctgttctgggctttagccagttgtactttcagcatctccatatgacgtagtcgagtctccagaaattcagacacctgagtcccactggaagtgtctaaagctggggcagcatccactagaggctca

SEQ ID NO: 143931 - DNA, 939 bp, Zea Mays
tcttatgtgcaaatttgacccacgaaggggtatcgttgcttcacagccatcagatcttaacttgacggcacagattaaaagggatgaagggttactctaagttctaatccgcaccgcacataagcgatctaacggtcacgataaacatttccccacccccaatcttagccgcacaaacgatatcctacggttcggcaacacaccagaaacagctgaccactgaccattagattatcctgcaacggcccaaatccgaacacccgaaagggtattcactgctctaatcctcgccgttggcaacctgatccacggataccgcatctccctcctatctgagcgcgccgccaaggaaccatacccaatctaagccgtaggtcaacccgccaacggtccagaccccttcttcctcagctctcccccgccgatctcccaggttgcccagcctagctccggcgcgacgacattcctcaacccaaaccccgatctctcaccacgcaacccgaccatcgagtggccaatacggtagcctcccagacacagatcgctccaccactacagcggtgcgcccaaccccggaagcatccacaagcaatgaagagggtacacagaggaagcgatggctcaccgacggtgatggcggggcaaagcgctgtgcgatccgaggtcgtatccaatcgccacacgaacacaccggcttgctaacggcgtgaacctgggaataaccgcaagcggcccgccgcatttccccgtcagcaatggcgattccaaggagccaagggcaaatgggatgggggaaggtcgccgtccatacatatataggcatccatgcggtacccaaaccctaaggagtccttctgttaggattcggcgccagggaaatctaccagtcccgcgaaggttgcggcaatggcgcagggaacgcggcctgaccctgtgggt

SEQ ID NO: 143932 - DNA, 397 bp, Zea Mays
cgttggggctcggtctgttgtttcctgcttgagaacgtgctgaagctgttgtagccataccttgttcttcttggagcttggcatgtagctcgcggagctattcaaggtgcgcgatctgactcctcatgggggtatgatccgcaccttgttcccttggttcttcggcgtgtggtgctggcgtcagggcgttggcctcccaaggcatgccaagctgctttccctctctgtgctcctcgtgctcaatatggaagcactcccgaatcaggtcgtaaccctcatcagtggatctgtagtcgttggaaccatcagagaggtagtagtcacatgcgaacaataaatgccgcatggccctgggatcatggagcccggagaattctaggccaggactcaaatcatc

SEQ ID NO: 143933 - DNA, 320 bp, Zea Mays
ctgagacacttcttcaattgtgatacatggaagacgtcatgtacatccgcaagatccactcgctttaggattaagaagggtccaatgaagcaaggagacaacttccctttgactttgaatcttctcataccccggattggtgacaccttcaaatagacatgatcaccctccttaaactctagcagtcttttccgggtatcagcatagcttttctgcctataccgcacagttctcaaattctccctaatttggtggacttgttcttctgcctcttgtataatctcaggtccaaagaactgtctttcaccagtttgatccca

SEQ ID NO: 143934 - DNA, 1338 bp, Zea Mays
cggcttatataaatggaccggccagcccgagcgcatcctagcgtagggttcctctcatcgcctgttccgccgcgccgccttctccacccttcgcgcaccgtgttcttgtcacttgtcggcacacatcttgctacggtgttctacgcgggatttgctgtctgtgtttctctttcattgtcttccatgtaggtttgatctacgcgccgccctttcattttggttcctgatgctttcttccatgattccgcttgcggttcgcctgatcggtattgacgaggaggtagtatgatggcgatgacgaaaaactatggttcgctcgtctgatcggcggcggggtttaatccccactgccttgctgagcttaaaagtagtccgagccactcgtttccttcctctgaacccagatctggtccgcttttttccgatatgtggctttctgtgcggttctgccgtgatccgcggtctccaatctgtggttttctgagttgttctgcggcgttcgggttcttaattttttttggtattggtgttgcgatgatgatttctcatcagcttagagatctgctcgatgagcttgggaaatgatcttgcattgtttcctcctgagcggttacctgagcaacccaacaatccttatccttgatttgtgattttgcatcgatgtagatgacattgttttggcaatgaaaaagccccataaatagggatccagacgattcgttttccaagtactatcatgcttgacagagttcactgaatttcaatatacaagtacacagacgcgggcaacgcatctgcgacatgaatattttttgttgcgatgatgagttctcatcagctgagagctctgctcgatgggcttgggaaatgatcctgcattgtttcctcctgagcggttacctgagcaacccaacaatccccatctttgattcctgattttccatcgatgcatatgacaatttttttgtcaaaaaaagattgcagatgattcattttccaagtaatatcatgtaaagccgagtcaactgaattctaagatacactaacgccaacaatgcaccttacacgtccaagtatgtaacttgagaaaatgagaaatatctttacaagtgcatgacaaacaaatttaaaaggcttgtgataattctgcaacttggagcaaacaaactgtaacacaggcacacgacaacggtcccaattggtagagctggttgactaggcaccttaccaccttgtccttgccgaccaggctctttactagagatggcagcggctaaaaaccgctggtattatttgtccaaactcacttatccaaatacatacccgcaaagaaaaaat

SEQ ID NO: 143935 - DNA, 462 bp, Zea Mays
gctgaataacgaaatggccagagtgagatccactgcaagggtgtcccgcgagtgagatgaaactgaagtaactaagacatcacccatcttagaaatgatgaggtggtcaaggctggttgccctcgcccgcgcgctcctctccctctctgcctcgcgggcctgcctcgtcagtttgctgaaccgtttcccccgcatgcccgtttcctcttgctgcgttgtgggacccccctgtcagctacgccttccccgcgccccgccatggaccagcatgcgcgcactcgcgcatgcacgctgagatccctggccacgtcgccgacccacgcaccccagttcctttttgagaaacctcgtcccatttcgcacagtctcgctctctctcgcgctctgccctcgctgctcgacctcgccggaaacccacgcctgccgtgccagccacaaagctcgccaaaagcaatgccaagc

SEQ ID NO: 143936 - DNA, 657 bp, Zea Mays
attaagttttggtgtttgatgatcaccatagccatttgggctaaaattatttgctagtgtttttgttacagtttaaaggatgcaatgtagacatggacgaaggcaaagtaatgatcgagatgatcaacacatcagacaagacatttgtagactcattgaagacctataatatcattcaagtgttcaagacacgagatgaaagaaacccagacgaagagatgcaaagaaacagagaaaaatagactacttggtagcactatacgtgttcgatgaggcaccagataagataccagagagttgcattgtagtgaagaaatgacaacagaaatagagttcatcggacatattggtgtgcactagatggggctacacattataaggctatctctagcagtctccctatcacactccctatttcaaacctcactctgtaaacagtgcggtctacagtgcaaaatagtgttttgcacgcccatatacatgttccactagagatagcctaaggaaagcattgggctattggttgtcactatggtttgaccctccagcttcatcgttgatgttgaagatccactacttctaagatctaatgactcgctgctacctttgttgtggtacttacctcctctttagcttagcgagggagcttctctttgg

SEQ ID NO: 143937 - DNA, 627 bp, Zea Mays
gggcgtggaaaggagtggcagtgaaggaaagctactggggcggatccggaggagtagatgcttagcaagtgcgcaactaactccctcgggatcaatttactagaggattaaaccaagggatcaaccgaaattccatggcacatattatactcttacggcgtccgtgcagtgcacagcgtgtattatataatccgcatgctcctcggatcccgcacattccttgttcctcgccgacccaggagcaaactggaggctaatggtatgatttggcttgggattaagcgaggagtactgcgtctgcgtgaggcggccggaattagctagctagctagggatcggacgacgacgatcgatcgcgcccgtctatcgtctgcagattaattagcagaaatggagagagaggacggggatggacgtgcatgccatatgggggcagcagtttgttgcttgacgctattgccgcgcgctgtccccccctcgcccgcacatgtgcatcgtcatcccgatccgctgatcgatcaatcatctatccccggcaacggccggccgttccctgtcgtagcctgtaggtgtacgtatacgtacgtgctctgtctggcagccgcccgcccggctggccatgtcgtg

SEQ ID NO: 143938 - DNA, 803 bp, Zea Mays
gctctcttgagttacctaagagtagtttttcatacgtctacaccaccacacctaactggactcaaccaagtcaagttagcaatctcatgcctccctttatagtacaattaaaaaataaaggtcctatcactactaagtgtccaacatctcctttgacacttagactgtcttcagtggatcgtgtaaaataggggacacgacactgtaaatggcactgtctgacactatttgcagagtgaagtttgaaatagaggataagataggggagttgctggagacatccttagaataagttgatccttgaccttcttagatattccttttaaaccgtctattgatctttgttgggacttgggacggaggccgaaccagacctcgatcgacccttcattgatcacgcctctagacaaactaaccacgtcttagcacaagagcaagcgtgaccgaagacctcggcgagtgcacgctaccggtgaagccttcaatccccatggccgacgacaaccgcacgaggacatctacaagggaccaggtgatctcatttgtgctttaacaagagatgcaaaaaatcagatttaccccatagtttgggttgtttagaaataaactaaaggttcttggacttggttcttgggattactacagaaggatctgcaaattcctatatggcaagggatgggttatcataccacaccagcaaaaggtatcaaaatttgcttgatgtatgcttgtccttcattaacatgtccatagctatatgtgtgctttgatgtttactgcaggatcttgtcaatgcagttgta

SEQ ID NO: 143939 - DNA, 352 bp, Zea Mays
cgcacttcgccctggatccgtattctgctttgggaccatctcgtctgtagcagatgagaaaggaattctgcaccgcatagcacatccgccggagaagaagctttcctcgaaaatccccaagaaaaccgcaacaagacaacggacaacacaacctcctgcgcctcaggcaaagactacttcttgcaagccgaaaattgggaatttacctgcccgaagaacccctctgcccaattcgcccacaaaggagtggacacggattacaagaaagaaagaagcaagcgttactagaaaggggacggagctccgccgaattatctttccaacaccttcgccctcaaaggaggatggaaag

SEQ ID NO: 143940 - DNA, 473 bp, Zea Mays
tacttattcttgattgtgacttcatttagagctcgataattgatgcaaatccttctggtgccatccttcttctctacgaataggacaggggcagcccaaggcgaggtgcttggtcggatgtaacctttctctgacagctcatcgatctgcttcttaagttcaactaactctggtccggatactctgtaaactctcttaaagatggggcggttccaggaagaagctctatggcaaactaaccttttcgcttcagtggcatacctgataggtccttcgggaacacatctgggaattcggacacaactttgataatctcgagtggatctgcttcactgctatcaacagccatctgataacaaccccctttccttggctcgggcgggactaactcggtcaccacttcctctcctagtggggacatcaacttaatggtcctcttatcacaactgataactgcctggttcttatctagc

SEQ ID NO: 143941 - DNA, 1075 bp, Zea Mays
aatccttcgtccccgagccggaacgaggacccctccgcggcagtcagtgccgcggattggctttgataccaatttgtcacaaccggaggtaggaagtccggcggtcaccggagttgagcgcgaagaactgggagcgaagaacatgacagaaattcagaagagaagaaaggtacgagcagtattgttttttctttgttgtcctccagaactattacaagcctagcttatatatcagccggccaccacaatcacaatacggcccaatacagcccaccagctacatttcaaaattgtgattccagaattaactcccgtgctcagtcgccaccgtctccattcgtgacacccaagcccaaaattaaccagcgctaacattgagaagggcatggcgaggaggatgaagggtggtattaccgtggttgagtgctggaaaggtgttggccacggcgcaaagcaggctgacggcggtgatgtcgcaccggcaagcaatcccgacggggctcgtggcaatcctcgagtggcttggacacgactactttcctccggtccttaaggagctaccgagaacaattccgaggcgcggttgacggttaggtcggagttccctgacggcagcaccctctttcccctcctggcgccgcaatttgtggtacggtggtggtcgcaagaacggggaaagaggaggaagagacggacccgaggacgtggcttcccttataagcgcgaatttgaccaggacgcttcaacggactgcgcgacgacggcgcgccccgccatgcgccgaggttcagttgagggacggagctgaccactagggcccacaaagcagcaacggagaacagcgagcacacgtatggaggctggcacgcgggcccgcatgtcggcagtagagcgttggtcgcatgggagtgctggcgtgcggtcgtgtggctgcccgatgggttccacatgtcgacggtacacgagacgagcgcgagtgtgtgagaatgacgagtggggacggtgtcggcgccgcacccgtgagttgggccgagcgcatggggcaacggttccgtgggccaaaagcgaggttagc

SEQ ID NO: 143942 - DNA, 355 bp, Zea Mays
cgggtccagctgcatgcgcggagaagtgaaccaaacaaccaaaataggaaccgaggtggttcccgtcgtccaaattaatctcatcgtcttttccaaaagctggcggcgttatgttaattgttgtcgacctttacctctagccaacaagaattcgactaacaggctggccgaccgaaattaatgatttatgaggacccgcgtcctttatttctcccacacatgctccactcatattgtcttctccgctctgccgcctccacttgtcgtcatgatgtcgcgtcgtcatccaccccaaggagcagttgctaccacgttgccatccccttcatttccttgtagctgctgccgcgcagcc

SEQ ID NO: 143943 - DNA, 416 bp, Zea Mays
gataaagatagcaggcctcgttggggtgaagcccaacccaagaatgagtgggccagaatggacccactagaagtctccagcagtgtggttttattttcgctgaactcgtgagaggagggttaagaagggatagagaggaacctcggaggtgtggagaatagaaccctattggccggttgtgtctgatctcctggcggctctgccgttgtaagttccaaacaattactcatattcaagtgcttcgtagaggaaatattatgctgggagcggcatacccccctcctaaatctgtgttcttacaagtggtatccagagtccatttctaatcctggcggacccttcgggatatttgtggcgtccgcaaatcaagacgcgttcgcaaacttagtcggaagccatggagcagagcatcgtcg

SEQ ID NO: 143944 - DNA, 553 bp, Zea Mays
tgcgtgattccgaacgtttggggcaacaatggtggcggcggcacaatcaccacattcgcacacagcaaggcccgatggcgcctacggcttcaccgatgatggacatagcaggataacgatgggccatatatatacccagggaagatggttaattaagattattacggatcctatccacccagaatcgactcgccctaggctcccatggcatgcgcaacaaccccaatctgtttcgtcggtatggagatgatgcagctgacaaacatggcccattggtcagccaacgagagagggagcgagacaggcacgtgggccagcgatgggatgatgcggacgccaagggaaaaagggtgggacgaccagcatggacccagacgtcggtcacaacatcaggggcatgcgtgcggcgtggctagtttgggccggcagcagagaaattcagcccatgcaccgcagagggggagaaggatgagtgggccaagggcttggaattcggcccatgcgagcaccagtgggtcttttcccttttttaactcagattcaaattccaaaa

SEQ ID NO: 143945 - DNA, 395 bp, Zea Mays
gttagagatccgatctccgcggccgagcttgaaggcgttgttgatcagcggaagtgggctggcgcgtgcgcagttgttgtcgatcccgcttatggcggcgatgaactagggacggccacacaagacccggcatggttgcggcaacagggaaggtcgacgcgggttcacaggccggtggaggcacgcgcggataccagtcgaggggactagctgactaggtcgtgcgatggttgcgggggaatctccaccgaacaaacccgataacggcggccgcgaacggaggcaaaaagaggaagaagataccgacacgagggtcccacctgtcatccactgttcggaagcaaacgtgtgcacaggcaaggattggagcgcaggcccgcatggcagcaccgggc

SEQ ID NO: 143946 - DNA, 302 bp, Zea Mays
ggaattccccatcggacaagcatttgcatagtgcccaacctgactacacttgaagcatgtaggacctgtcctctgtcctataggcctcgccgaggtgccagtgggggcagcctgacgagtgtggggtgtctgtggagtcccctgtggagcgtactgagctggacgcggtcctcctccaggacgagctgctgtaccctggggtggagcatagcgtgggtgaatactactgctaccctgcccctgggtaatggccttccgcttcatctcccccagttgaacacgcttgtgttcaatagctagag

SEQ ID NO: 143947 - DNA, 542 bp, Zea Mays
ggtgatgggtttcgccatggtcccgctgtgctacgtgggcagggccactgccgccccaatccgtggtatggaatctacccttgtattcgctagatctcgtacaacgttttgcacttttcgcttgtgtattcgggcgcctggtggtagggattgaccggtgccggccatggtgctgccatgcccttgccctgcgccgccgcatcctggtagcgtggggagaagacgcactgatcaccgttggatcttacaccaatggcgtaggttagactgggtctaccacttcagagtatcgcgcctggggcgttagatcgagatatgagggccacggctgggtctcgccttaattaaatttgggcggctgatctcgtatcggatggatgagatcgcataccggttcgatgcgtagcttgatgtaacatgggccttagatccgtgatcggatggcctagaacttgcgtgcgttgccagccgtggcgcttttcccaaaaaggccctagagaagtactaaactaacccgccatccccgtatgcataaaattcac

SEQ ID NO: 143948 - DNA, 620 bp, Zea Mays
gatttttttccattttttcaggtgattagggaagcatgggtatcttctatacctagccacatattatgtaggataaaagatgggtaggttagggcaagaatagcttgggataagagagtttatggtgagaaagaactctgtgttgggtggtaatgcatctgaagattgagtttgacctctctctttccttgacgaggttgatcttttacttttctggtcttggtctcattgagtcggggtcggtgcatatcatcggacttgggaatatggttaagatagatatgggtgagatagactacaagatgtaggtcaaaagttggtttgacgttaggtggggatagacagattatgcaatccatcatgactctatggttgggttagatcttctattcatggttgagttggtctagtgcagtagtttaggtttaagtgcatgaggggagaatgaggtttataggagtaggatctagtttatttcattagtgttaacttgttaagtgactcacattagattgaataagctctagattagtataagttaagtgtgttacgtcaaattttagttgggtgacttgttttaagtcggtcctggaaaaacaatgatatatatcattgggaat

SEQ ID NO: 143949 - DNA, 1053 bp, Zea Mays
attttatatacttaattttctatttttattggtctctggactgggcctcaattttcagagaatgcagggggctcgggacaagaaacccgagacacagcgcatagttactatggacggcggatttattttaatgaaaccgaggggctattttgcagttttggctcggcgaaggggtaagctcaattctgggccgttcagatctgatccgagggccacaaatagatcccgcacatcgctcaaccacccactcccgtgaccgcccgattaaagtttaacggtcacgatataaaagaacccggatctaatctgatgcgcacaatacgggatcaacggctcggatcaacgcagcgaaggggtaagatgtgatctaatctcagccgcacggaaccaatccaacggacatggcggcacgcgcgcactccttctcaaacaccgtacagcgacggcggcgccgcccaccaggctgcggcggagcatcgccggagtcgggctatcctacgatttagtgcatgaaacagaagactaacccgcacagcatggactagacggctaggcgcatgacggcagagcaacttaccaagtgttcaggcggccacgaggtcgatccacggtgaaccacgggtctgcgacagaggcgcgaatccggcgacgagtaccgtacacctcagtcgagctccgttcgcagcgctccaacagaactctcccgagacccacaccgcgcacacaaggtggttctaagggcggtatcaacggcggacagttggatttggcaattggtagcctcacgagtcgcggcggcgcgttgccgtgcgtgatgggagaagatgatggctcgactaggggacccgagaggcgaggcaagaggtcgcggcgggtttttatgcccccccccccccccgcatggggaatccaccttcccccaagcacacggcgaaaggatgaggatccgggcgagattctcgccatttctgttgaagtcaaccccggagaagacggcgcgcatgtcgcaacagacggggtcgaagaccaccctgaccgtgggccccgcacggc

SEQ ID NO: 143950 - DNA, 810 bp, Zea Mays
ggcgccaccgctggggaaatcccatcagtgccatcgccgacctcgaagtacagaagtaggctcctccctaagcagcggagaaggtgcccttgactctccctcagtttaatttggccctgcgcggcgcaaatcgctcgccggagtgggcagaactctgcggcgccgcacctcgtcgtggaccggcgactgcgcaactcaaaattccggtacgaagccgcctcgatttccgcccacttctcattgacgtgtagtacctaacgtgtggggtagacgatcggtctaatcgtgtgaattgctcgacggaattgggcatcgtcgttgtgccgcagattgcatgggtagggcaatggggcattcctgcttcaggtgggactataacgtgtggactcagttgtgtctcgatggcataaaaaaacattagtatgacttgggttagggcgcgagcaccccaagttcctttctccgtcggagttcgccgccgcggaggcaagtccgccgccgcccgatgccggggcgtgtggaagacgagcatcaaccgtagcgtcgatgatggacggctcagatcagaccacgcataccgattcagcgagttacacgatgaccgtccgatcgggatcggatggtgagtactcgcgctaggactcatgaaatcagggccgtcggattgaaatctgagggttcacgctgtgtaccgcttcacgagcggcaggatctaatctcgtgcgcccatctcagatcgtgcggctaggatagatccataccccttcgcgggtctaaattgcacttgagctcctcggttaatgtcaaaat

SEQ ID NO: 143951 - DNA, 488 bp, Zea Mays
taaataacccgctcggcgtgttcatccgcgacggacaccgtcgagacagcaagctacctcatcctcgctaaaggcacacccagctgcagcactcgccgactcagtgcgggcagattcgaatgacttgccagccagcatactaagaacaacatttacttcagcctcattagaaatctcttgcatccggagatgagtctgtttttcctctttagggagaccccggtacgcagcaatgagggcttcaatatcttctaaagaaggtcatgctctatggcctggactgccgtcttggataggcgggttggatacgaactctgaaaaagacctctgcagcgacaaaacgacacagtaaggacactacacatgacaaatacatgaactcatatgcaaccgcgcttaccacgggcagaaggttccaaacagaatacgaagggggagcaccaacgttcgaagctttgcccctcagcatcgagtcaacccgactctca

SEQ ID NO: 143952 - DNA, 453 bp, Zea Mays
ctcaaaagttgatgcacttcgcagtacattatagagatcaaaagcttggggaagaggactggaccatatatcacacgatagtcctttacaataagcaactcaaggaatttaaaatgcagatcaagtgacttaggtagcttgaagattgcatccctttcaggatacttacccacaagagccttgaagagcttcacgaattgcttgtagcaattatatatttcagactcagagcgactaatgttcagtgatatgaataccagtaaatccaactcaggcagcacaccaaggttttattcaatgaaatcggtgtcaggaatcgataagccacaggtcttgctgaaatacaaaggaagtaatctagatctcagtagcttgcgaaccctatcatggattaaaaacgggaggttatcgtcaatatcttcaacgagacggttcctaggtgccctgtccagt

SEQ ID NO: 143953 - DNA, 634 bp, Zea Mays
actctgaaattcaggtgttcagtgtaacagagtcagctttgggtgtgaattcaagcttgatttattaagaattgaaccatggttgctatgacaaacttgtagctagtttatagctctacaatattgctgcagaaagttaattgagttgccatttgaaattgggagtaaatcagcgctaaacctgctctgtcaggcgctctgatgaagcagtgccatggtacagtgtccgatatggatcagactgccagcgttggatcctcatcgccggtgacctccctgcgcaaggattcgtgctgccaccgcccggattcgcgctagagactaacggataacatcgcggggagagggaatcttcgccaccggtgagctggactccactccggtgaccccccgcacttcccctctaccctgcggcttgagctgatatgctcgccagtgaaccgccgttctccggccttgcgtcgcgtgtcccaacctcgccaccgcatcgtcgtgactccctctagcttcccgtcgaccaccggaattactgccacgacattgaacacgtattcaccgcgccagggttctttcttatctccggccgcccgcgatgttcgatcaaattaagcgccaccgtcgaaacctcctataa

SEQ ID NO: 143954 - DNA, 603 bp, Zea Mays
aaggacactggggtgcccagcagtcacaccacagtttcctaccatcagccactttaactggtaaaggtttaggcaattgctgtacattcttgacatctcccatcaaatgcagactcataaaactagctgaacttccagaatccaccagcaccaacatctgtttgtggtgtattgaagcccacaacctgatagttttgttggtttcactgccactcgcagcagctattgatacagctaacaccacctcctcatcctctggtgccacctgactctcacttccatcgacttcaatttctcctaccgcctgagaggtaatcgcccacatttcttccacaacatgtaatggcacactactggaacatgtatgatttggattccatctttctccgcacttgaaacacaacccctttgctcttcgataagccttgagagcagcaagtttactatcctcagctctgtaactactatttgctcttcgcctctcatcactttggggtaatcctctatggctcaccactggaactgaactaccagccactacggaattcttttggtaacctttggacattccctggttctcaattctcctaccctctcttctac

SEQ ID NO: 143955 - DNA, 390 bp, Zea Mays
attttaacaagttggattgatatgtagtagcatacatcatgagaaacttattctcatgcaagagactatatgagattactaggataaagcgatagtctcgatatgatcaagatatagaaataggcaccccctagagatatgcatcaaagaattggaatgaaaagaatagatgcattcaactttagagacaaatagggagaaccattattcatcttgatcaaggcttataaaatttgcaataaacaatttatgcctagtattctcaatgaaaaagatttagagtgcttacaactacaccattgattgttttgaagatctcattatccaagtaggtgttgttgctcttgatgtctttctctttcatgtgagtgtcctccctttgtagttgtt

SEQ ID NO: 143956 - DNA, 443 bp, Zea Mays
tgttcttggcagaattagtccgtcttggtagtcaagaaagcttgccgctggtcataggtggagattttaatattctaaggtgtccaagtgaaaaaataaagataattttgatcaacggtggccttttcttttcaatgcggttatagatggtcttagtttaaaagagctggagatgtttggccgacgattcacctaggcaaacaatttggccaatccgacttatgagaaactcgatagagtgctggttaccacagattgggataaaaatacccattatctatggtcctatcattaaatcaagatatctcggatcatacacctttattactaaatacgggagagtcctgctcgagcaattcccaacatgcttttaagtttgaactaggctggttgcttcgggatgggttctacgatttagtacaggaggtatggtcgaatgagtc

SEQ ID NO: 143957 - DNA, 296 bp, Zea Mays
gtgaaatttaaaattcttcatcgtgggaaaaatacaatttccttgataatggaacatacgacttagaaccattgatgcttgtatttagtacaactcagtgccatgtcacacaacagctagaaagttattgtgcttttaacttgttcacaacaaggaacaagtataataagtgaagaaaaaaagcgtgtgatccctgtaagctgctacagctacccccttctgcatttttcacatcaccgttattcgtagagctttccagtttgctaagcattgtcattatcaaaggaaaagtcaat

SEQ ID NO: 143958 - DNA, 392 bp, Zea Mays
tgagcaccctattttggtatgctatagtgcttacagtgcagtaccactaactgagattgcaggcggttgggagtgacacatgttttagtaatgtttccggtgctcgcatgctccacttgaaattgtatcttctgtacaggagtgccccgcatgcaaattcccaaagagggtttatatccacgttcaggaaaatctgcacgtgtttctacctgatttctctttctcgaacattacccactacttgagaaggtctagtccataccactgaactaaattatcggtgcatcatatatggccacatggccacatttttaatgtcatggttcatacgattagataccggttcgatttgaatggcataccggtcatcatggatacagtgtgtttgggga

SEQ ID NO: 143959 - DNA, 685 bp, Zea Mays
cattctcccttcacacaaccgtttacttttaacacgttatcagcacatagactcagacactgagttttggacagaggaaacatcgtggaatacaagaacagaagaacagaagaacgcgaagaaaggaaaaacatcgcagaatacaagaacagaagaacgcgaagaaaactgtaagtacaatgccactgattactcttcgtcgcgtcgttcaggcgatccgccgtgccgtcatcagggagttcctccgcgcataccgtgaaggaatcctcgacgacaatcggattggctttgccattcacagggtaatggtgaatctggttaacaccggtgccaccggtgtctggattccaaatcgccgcagtcataatcgcagttcatctcgtcgtcgtcgagcaccaccagtggtggttccccctccaccgccggcgacagcaacgtccacacaagtacctgcatcagtgtttcaaatgggagagacttacccgcacggttactgtccattccacggattcggaccatgtgctctgcgcgacgccggcgtgctggaggctactctcaccgctgcccgccagtactacaactctcaagcgcaacctgatgcagttcccatggaggagatgctcgccacggtcgcggctccaaacctttactcaccgacaccggaggtggaacctactgcaccgcg

SEQ ID NO: 143960 - DNA, 461 bp, Zea Mays
tgttatacttcctgttgctagactgaacatcattgggtcattggcgggtgactgggcctgacaagagactgactttcccttatggtcggtgaggtggactgtcttgtctgcgcaactgatgatgcctttgtgtttagttagccaatccatccctaagatcacatcaattcctttggatggcaagacggttaagtctgccaagaatactaccccatttaaaaggattctgacttgggagcatttgagctggcatagaaggtctgaccctggggttcgggtgaccaagggaatctctaggggagtagagggaatgccatgcttttccacaaaactagtggctatgaatgagtaggatgctccagaatcgaaaagtacgatagcggagtaaattcaacaaggaactcaccgagcactactcccggagcatgctaagcctcctgggcatcgacgtgattcactca

SEQ ID NO: 143961 - DNA, 504 bp, Zea Mays
cttcgatggagtcgtagaattctatgaaatcctaattgtcgaattgttttctgttgtctactgtcaactcggaggggactctgaagcgacagacgatgttctgctagaagaacttgtgttgtcttcgctgttattgttgaaacagctctggcttcgatgtacttagtgaagtattcgactacgacaaaagcaaatttgaggttgacttgcgtggtgggcaatggtccgacgatatcgaggccccatcgctgcagtggccaagtgtgggcggtgagctttgtgaattgtgaggggggcaaccgttctaggtgagaatttttggcacgcttcgcacaagaggaccactctgttagctgcgcacacaatagctaaccagttgaaaccttagcacatgactttggtagcgagggccctaggtcccaaatgtgaaccgcatgttcctctatggaccttgcgaaggagttctatgccttcgattattgtgatacatttgagcattggttg

SEQ ID NO: 143962 - DNA, 618 bp, Zea Mays
cttggatcaattgcaacacagaaaaaacagccaagttgagtttctctccgtacttctccccccaatatttataatattttgcaatcattctcttgcccatttcagcacataagttgtcttcgctacgacaccactctcgcaataaaaccaaaacatcagcaatctcatggaagtaagaatgtgaggttggtttacttgtgactgaaacacgaagggtaagttcatagaagtgctctaggaattcagccatttttcttgccttttcccaatatgatttctcaggaacaccgaggccattttcaccttctaaatctagcctgtagtatggatcttcatcactatacctttcaaatgccttttcatattgttgtgcaatatttagcataaggtatgttgaattccacctagtgcaaacatcaagggttaaaaatgatttagtctgtacttttgctaattcaacacatttcttaaatttgactagcctagatggtccagccttgacaaacttaatagctgcccggacacgactaattgatttgtctatttcctttagtccatcggtgactatcaaattaataatatgggcaacacatctcatgtgcaggtattctcctccag

SEQ ID NO: 143963 - DNA, 589 bp, Zea Mays
taaccttcttcctcttcggccaccagcgcatcttcacgaaattggacgccaccgctgtgggagcctataaattgccgaccctgcctgctccgctaagtaattgtgcaaccagtagagcaactcgtgcctcgaatcatccactagagctccccaattagggattccccccaaatcacccaagaacaccgagcggtgtgacctcgccgtggccagctcgtctcaggttcgttcatgcccactgtcctcttctttcagcacccttacttgctcctgatactcgctgacccattaaatttagctaggcggtgctagatcaccgggaacgcgtttgaatgtccgtcgtgcccgctgtcaccatggacagagcgttgtcgagcctcattggtgaaattgagtgaggagaaatgattaagagatgtccgatttggtgtctgccacacgggagcaccggtcattgcgagatccggccggtacaagctcgccggagcttggttccccgccgctcctcgtcgtggacttcgggctgtgaaggattagaaacacgggggtgttcttgcaaatgtcagtgagacatgagaatagtgccatg

SEQ ID NO: 143964 - DNA, 720 bp, Zea Mays
gacaaaagcatcccccagcgcctacaggctcacaacgccaaacggcgaggacctagagcactcctggaacatcgacaacctccgcaaattttttgtctgactaatcggggctgatttcgcccttgtaattcgccaaaaaacaatcttgtaccggcccgcactcttttcctcccgggggtgaggtttttaacgaggcggagccatgtaatatatgtgcgaaaaatcccccgcaaaaacatgcgtcgaaaacagaccgcgacgacggccttcattattcgaccaatccgaggtcaccgcgaggctaagcgctagccaccctcgcgtgcgacaaatccgcgcagaagtcgcctaagggtgcagccggactaagcacaacaagtgcgcaaaaaatctgatgtctatcgcgaagactatccgcgcagaagtcgcctaagggtgcagccggactaagcacaacaagtgcgcaaaaaaatctgatgtctatcgcgaagactatccgcgcagaagtcgcctaagggtgcagccggactaagcacaacaagtgcgcaaaaaattctgatgtctatcgcaaagactatccgcgcagaagtcgcctaagggtgcagccggactagcacaacaagtgcgaaaaatcgaagtctaccgcgaagactatccgcgcagaagtcgcctaagggtgcagccggactagcacaacaagtgcgaaaaatcgaagtcctc

SEQ ID NO: 143965 - DNA, 906 bp, Zea Mays
tggcctcgtcgcggtccagcgacacgaagattatctccacatcccaaaatatgaaacaagagatccaacatgagtagcagacatacacaagcagtagacagacagacacaccattattaacatttaggtcttcaaacaagagctgcaacatgattataatgtcccagagaaagttacggcttattacattcaacaatcaacgaggtaagttacctgagcgactgagcctaaggccttggtgggctggtggccaatctccaagcacaaatcctataatcctcatgacagtaacaaagtaagaacatgctggtagttgaaaacaaactatgacgtacgacacactctgcataatcaaaagtgatatgcacaagaaataggatcgtatctcgcacaataggcttgaaacaattttgagacaatcaacgagggctcagatctctcaccggtcgaccgcttcctcgaacggtagcgctacagatgacccccatggtccccaaccctagccctcgccgatgcagcactgtaaccggcgcaagtgtacttgctccaatgcggtggggtggcgagggttagggtggcaccatcgaggtgcggatccgagaatggccaccgctcgggaggcggcccgacgcgaaccacagtggtgttcctcattgctgttgtttctcgagggccgtggattcaagtggggtcgagaggggtggggaggagccctgcagccacacgcgaggtgaggatgatcccagcggcggtgccactggctctctagcaaccggagcgcggtggcattcccactggttgtgtactgaccagaggggtgagtcacttgccggagtcagatttgaagtcctcatcgtcttacgcagcgaatgagcgtctaccgccgcggcctctcttgaacttctt

SEQ ID NO: 143966 - DNA, 504 bp, Zea Mays
tatgagtgaagtgtgtgtttggtttgatttgaggcgaagaaaatggaatttgggcactcggctcggaattgatcgctcgaaacggagaattgtgtgaaaatgaagcctgagatatcggattggcatgaaatttggcgaatatgttacgagaggtgttgtgaaggtgcctgaaaaaattgggtttaatcggagcatttttggctggtttggacatttcaccgagcacgtggcatgcggtgaattagggtttcggggaaatggtcaattcaggctgtgaaaccctccctaaggagctaggaacctgtaggggtattcaagagacacaaaggaacacctccaaccacatggattcacaggatttgataagaatttgagattgagcacaaagggtggaggtgatctatactgcagctaaccagagagagagggaattggagatggtgctcactagagaggaaaggaggagagcacaagcccgagcacttgatcatcggaggatcgccg

SEQ ID NO: 143967 - DNA, 476 bp, Zea Mays
cagcttgctcacctgggacaaggtgtcccctggctgccacacgtaggtgatgaagctctgcacagcgcgagccggcgggcaccggcagaggagcggcaccgtgacctcctgcccgatctgtaggctggtgggctccgacctcgggttgaggtcgtggatgaggtggtactcggtgaggttctcgtaggagagcctggcgaggttgtagaaggtgtcgccctgccggatggggtacgtggcgttggcgaaggaccaggcgcccgtgcagccgcacctgacgggcacgagcagcggctggcctggctgcagcacaccgtcctcggagctgagaccgttggcgctggcgatccgggcctggctcgtgccgaagaggtccgagatgctgccgaggtccaggtagccgggggactgcgtccggtacacgacgtacgtgtcgcacggcgacgacacgttacaggcgaatcgcgcggggacgg

SEQ ID NO: 143968 - DNA, 700 bp, Zea Mays
acttgatccaataagacaaagactgggcatccgagttatgcgtcgaccgaagcgctgatatctcgggtgatgaagttgcacacactcgaagagctatacattcggcgctaactcgactaaggaagtgattgaactctagataagcaggactacatggcacgataaaggaggagataagtagaatagatagtgatcacaacttgtaaagggataattctctggtcgtgtatataaggtcaagggagactcctacaaaatcatatcatctcatgccatcacacaccagccctcatcaacaaccctgagcgccatcacagctcacttgtaatcctcatactccagagaaatttcagtacacggcctcaacatgaagtagggtgttatgcattctagcagtccgaacctttataaatccttgtacaagtatgacgtgctcctgcacgtaccatcgagtcacagtcaacgacacctccctacccaaaagcatcacgtgggtaaccttgtggtgcgcggtcggttacaaacaccaacacatatgatcctgtaagggtactatcgtcttttcctttgtagacgtgctgataaggtctttaggctttctctctcgtttacttgctcttgcacgctcagatcattgggccgaagcttcctagcttcggctttacgtgtacaccactcaaacgaaggctctaaacaaagc

SEQ ID NO: 143969 - DNA, 527 bp, Zea Mays
cacagacggagggagggacgaggacggagcaccagagccggtagcgacgaccgacggtccgacgttgaggagtcgtggactcgcggtccgacgtcgaggagcgtcgccgtcgaatcgcctaggagtcgcggttagggttgtgtggccgacgggtgacgggtctgggggagtggccgagtgggctgggctagagagaggccaggaggggtatatcgttagtctgtgggttgtggctggcttacgggtcgccaccgcgtgctggcctgtagcttgtgccgggccggaccatagcacgcgggcctacatagccgctgaaacctggcccgcttaacgggccgtgccgacccgaacccgttactaaccgtgtcagatcgtgcttggaccagactagaatcgtgtcgggtcacgggtcaaacgggcggcccgcactgtttggacatatataggcagaaagccgtccaggtgtcgcgtacattgctccgtgtctgtcgctcgtggctaccgcggtcctccaatagtcctgtcga

SEQ ID NO: 143970 - DNA, 357 bp, Zea Mays
gactactctcccatatccaaaaagaccaaaatgtggaaaatcctgttatgaaacaaacaagaaaactgaaacgggcggtgatttcagcgttgatctcttctcgaggacagccgtcggggtcagctatccagcataccgtgactagtcaaaaaggacaaggaaacacgagcagctgcaggaggggccgggaggaagaagggcgaaggcgacgtgcaagtaatctattgagcatgcaggtgggcgtggctcagacggggatgaggcgccgacgacatggacctggactggacggctgcggcgcggatgcaatgcacgaaaccagggacgtcgacgccatcgcgtcgttttctaatcgcc

SEQ ID NO: 143971 - DNA, 582 bp, Zea Mays
ccgaatctccatttcccggcccaactagtgcacctgtaccacactcccgcgcagcccattttttcccctccctgcgccgtcagtcaaggtctggtgggccccgtctgtaagtccctcaccccactgacgcgtccgccgctcgggttcgctaacagctgggcccagaaagccagggtcttcttctccctcccgtattctgctatggttccgcgggcgccaacaaatcgcgagattctcgccgctgccttcgccgacccgattttccccacgcggattccgccgagtctgttttgcttgcccctataaaattggacgccgcatcaccgagcacctgcgcatccatcggcgcctgccacacccttgccaccgtagttttcactcaccttcatggccattgggatcggagagcgatgcaagcttgggagttcaccggttcgcacaggatcttagcaagtcttgccggtactcagaatggtacatcggtgctcgttgaagcgtatcgatgtcatggcgagcggggtcccttcggagtccagagtttacggcgaaatcgctataggctggggtatgggtcgccgcccc

SEQ ID NO: 143972 - DNA, 402 bp, Zea Mays
tcaacatcccagtgacaatcctacgccatcttccgtttataccgaggatctagcgtttatacatgaccgagaatccgcaaaatagatgccatggcacaaaaatggcaaacgatacaatcctgacaagatggtgcacgcatccaatggtgaagcatggactcactttgatgccattcaccatgggaaagttgaagaggctcgtaatgtatgtgttgcgctggccacagatgggttcaatccctatggaatgaccgctaccccatacacatgttagcatgtgttatatatccccatcaatctccctctggtgtatgctttcaaagacaaaacatatttgtgaccttgataattcctggacacctggagaatagaatgggcatgtacatggagcctttgattgct

SEQ ID NO: 143973 - DNA, 452 bp, Zea Mays
gttttcattgatgatattatggtctattccaagagtgaagacgagcatactgagcatctgcacatcgtgcttcagcgactgcgggatcatcgtctatatgctaagttgtctaaatgtgatttctggctaagagaaattaaatttttgggtcacaccatttctcaggatgggatatcagttgatcttgagaaggtacaagaagtgatggattggaaacctcctaccacagtgagacagattcggagttttctgggattggcagggtattatcgacgattcattccggatttctccagaattgccaagccaatgactgaattgttgaagaaaggagtcaagtatgattggagccagaagtgtgaggatgcctttcatacactaaggcagcatttgacaacagcgccagtgctagctcaatcggacaacaccaagccctttgaagtttattgcga

SEQ ID NO: 143974 - DNA, 408 bp, Zea Mays
ctgggattttacagtaggtcctaaaagttgattatgtccttttagtcgcttgtgatccactatgttgcaggcagcttgaagccttagctacctacctttttttgctgttagttcttactttgcatcctgagtgtttgccattcctaggcttcttgctgctgctttttttggatattatttatgtgagaattgaagccatttgttttacaatttggtttcatgtaggatgatctgttgattggtttggatacagctgctaaaagaaagttatgttctatctgaatcagtgcgtttgaccaccttgcatagttcagtttctttgttttggctgccgtgttatgacttatggggttggaatcagggagcattactgcatctttgcactgcaccaagctccaataaggggat

SEQ ID NO: 143975 - DNA, 503 bp, Zea Mays
gatccgcgctcgcagatccggtcgcttttggcaacttgcagtcaaggaacgagggagggaatggcgtgcctcctggggctagagagcagcgccgagaggcgtaggaccgtgtgaggtggaggtgagggtcgtggagccaccgcaccaaatcgccgagcaatggcgagcaggagtgggatctgacgacactgttgatgtggagcgacgacagaagagtgcacgaagatgagaaatggcagatggatgaggcaataccgtgcgacgatgttgggggaccgagacgccacgcatggagacggcggtgtggcaggggcggcggcgcttggagatggcgattgtgggagcacacgacggcgagagcgacgaggaaatcaattagggttgctagatgttcgggcgagtggttaagtttggggcatgcggtggggccaggagcgtggagccgtggaccataagtcgcgctgagttgtgttagtttgcgtaaaacgggaatgtaaccatta

SEQ ID NO: 143976 - DNA, 524 bp, Zea Mays
gtgcgagtgttggcgtagtgggctagtgtgtagtggttgtaggcttagcgcttaagcatttggttatctctttatttaaagggtccagtagtaacgcaagtgtcgtgggggtgctggctaagcatgagatgctgctaggtgtttgtgtgtattgattaattagtgaaatgcaagtgctaagtgcaccggtgtgtggtgccaaaaattccttagtatcttctgtgcctgagcatttatatgagtaatacaacatttcatatattttataagaatttgtctttgataatagatcattttaagcttgcacaacagtaaacaaagagtgtaaaataattttggaagtcagattatattcatattagccttgttgactacctttccttttgcttcctattttagcactctgatggactgtgcttcaatgatgaaagaagtctagactccacatttccatacattatttcacaatgcctctataagtgtattgaaactgtaatttttctcagttaaacttgggaattacc

SEQ ID NO: 143977 - DNA, 305 bp, Zea Mays
ttttgaggttcaacattcagactatttctttagaacatgaaaatagttttacacagtttaggaccatgttctcaacacactacaaaggtgtttctccacaatcacagcttgtgataatcaatggggttagcagtttgtgtgtgcacgcattcagaaaaatgtaaagccgggaaatagcattgctcgattacctgaatagctctcacattgaagagaccaaggtcggcaaacattgcctcagttcctgttttacaaaaaatgcaatgcacattacatcacttgtggttaaaattagcgatgcttta

SEQ ID NO: 143978 - DNA, 305 bp, Zea Mays
tccaagtctaataaagtcgaagtcgattgataaccaatagtttgaatgcctttgagaatgaaatcttttattgatgacgtattttccaattacagagtacaacgttgctcttatagctcttgctaagggtaaaacttcctgagatgctctatattccatgaattccccacttttgtgccatccatttgagtaagccgatatgatcctggccgagtgacctccgataccatgaatggcccttcccatagcggtgacaatttgtgccgtccttctcccgctagaattcgacgaaggaccaagtctcc

SEQ ID NO: 143979 - DNA, 283 bp, Zea Mays
ggcgcgcgggggtgcgcgtgcgggcgtgctctggcgcgttcccgagtgtctgcccacgtcgaacacgtggtggtttacttctgccagtgttcaacggcctgtttggtcgccttagcgtgcagatctcagcaaaaacccatgtacggtctcttctctgcaccaaatcctatcttttccatgtgagtttcaagcaaagatatggtcggggtagagagatatgggggtgggaagttggctttgtccgaggtgtccacaccaagacaaaaaccgtgtcaagtcatgt

SEQ ID NO: 143980 - DNA, 519 bp, Zea Mays
ggccatggaagcttaatggccagacatgattggtcggtggctggctagggggccagcatggctaaggatggtagggcatcggggagggcgggcgtggcgatctacaggctagacagggggacatgcacgactaggtcaagaagggtggcaacaacgacatggtggctaacaggggccctagctagtagccaaacgtaatggcctagaggccgattagcgtgggggatgacacgtagggtctaaagtccagtatcggtcacctgctcgccagccagggaaggaaagagagaagagtggtcatggttagttgcatgctggccggagggtgcgagagggttgccacggtgtcctgagcaccaaccatagtgggggaaggggtagtccagccctaggacgtgatagaggatggtatcagagagggccaacaatgagggcattcaaagggagtggaagagatgtggaagaaaaaaatagaacaatgataatcggtggtggtggtgaatatttccacccaagttc

SEQ ID NO: 143981 - DNA, 917 bp, Zea Mays
cggctgcctctatataggaggaggaagactggaagaggacaggcagtaggtcccacgacccttccagggaagagagtgttcgtgacgcgggcggcccccaaatccgcataacaatctctgttgcccccccgccaaaatcctcagatccccttgctgcagtgcagatctctctataatccgcgctcgtggcgacctctcctccagcttccgttcctgaaatccatctctagtttcgccatttgggttttttctcgagggtttcgctcctcactcatctgatttaacgaagggagctgggtcacacccacaggccgcggcttctgaaattcgatggccgtggctgcagcgcgcctgacgctcccagatcgattcgacgaggtttacatagcctctgcccggtgaaaagatgggctcgtgggttatacgcgcctcgcacatgcacgagctgaatttcttctcgccttttcgatcatgacgtctttcgtttttttgacgtatatgattttccctggtgctagcgccgagcgcaactgtggttgagatccaatgctcctcgttactccgtccacctttacctatggaccagtttgcatgtagttgcagtctttttctaatgtcgataatctgatgttgtggctagttctcctcgagtggcaatataatattctccggatgcacatgatttggatcatccgctgtggagtttagggttttgttcaggttttacaggctctgctttctggtatctagcagtgtttgtttctttcgttctgaatctcgcttttcgttctgaatcatctctcgtttcgggacatcctgagtcatctaattttttccttttgaataacgtctcctactaagacgggtatacccttttcaagcattggatttatcagttattattacccatgtctctc

SEQ ID NO: 143982 - DNA, 602 bp, Zea Mays
tgaggaaacagaaacgagaagactgtttccgtacatttttatcactgggttcgtaagctacgaactatgatattgtgtctccgtatctaccttttttaagctggattttttttgtgtggtgataggcattataccctatgttataaatatttttattgtttcttttgatgactaatttaatgcacgcatttctcgtcaggacatgtacaactcaattaaataaagtgtctctggaggggtctttaaaggctaattaaaaaaaccaagaggcgcacgactctacacggctattcatacatattatgccttactgtttttattatctagagacttatggctgtattatacagtcttttatctgtctcttatatttagaaaaccgttccaaaggctcagagttatatatgtactttagtactttgttaggatactatcaagttgctaccctgttgtccaccactagtccctaaaaattaattaattcactgatcacgagctgcgattcgtttgggagcttgctcagaaacaagcgaggtgccctgatcaagtggctgtgatatcaccctgtactgtagagcaccgcaaatttataaagatacggc

SEQ ID NO: 143983 - DNA, 570 bp, Zea Mays
caaatatatctgttgtgaaattaggagaaggagattggcgtgccacatgtgtgcacgctcactcgccttgaggccagacatggcgtcagccgtaatgatgattggtgcagcccaacaacgccacacgcgtgactctggaccctagccacacgtcgccctagagcaacccacaccatagccaccgccaaaggccaccacactcgatcgtccaaatccacacttgatctagctctcaccaacacccccatcccacctgttggctttggccctaacctccaaacgtcgttcatgcatgtacgggagcacgacaccacgacgctcccccacgttcatgagtggttcggccacccgacgcccatgccctcttctttataaataccaccgccactgcactatgctcgaggtcctaccctcgaccgctaggctgcctctctgccctctgctcgtgccaccaccaatgtcgtagcagttgtcgacaggtttctcgtgtttgtagcccgtcgccattatcgagttttgtcgggtaagtgtcgacttcaaaacctgcacccaaagcacatcatagttcgc

SEQ ID NO: 143984 - DNA, 900 bp, Zea Mays
tagaattcaagcctctcacattccagcaaacaatttttgaaggattcataataaaaaccccagacaataacgaccaaacatataacagatcagcactctcccacctcaggggcagaccagccaaaaagggctgcaagcgcctgaatatgggaaggggagagaggcttgtcaaacaatttgctgtaacgatccagagcctctggattgatgccttcgttctcgtcaatcacgtgaaggaccctcatcaccttcttcctgaatcttgtctgaccatcgctggaagtggcaaggttctcgacaccaattccggcaatacgccggctgcgacgaggaggaacaacagtggagttcgcagccccaggtctaccagtctgaggagcaggcaagatatgcactgtagacttggtaaccctgcatctgaaggaagatctgagctgatctgatatgggcgaatccgaaggcgaaatggagacatccaccgaaacgttttcagagctctgaactaactgagagtcgaccaacgaaacttggggatgctgctgtaaaacccggcatcttctggaataaaccttcgggggcatacaccacagggttctggaaggaaccaaccccaggttacttgaatggagatccgagggtgtcgcgttctggagatcctcctggtccaagtgcgtcgtaatctggttgaccacaggaggggatgctgtttccgacagaagatctccggggatatgggtggaggcagagccgcccagacaccgatcaccaggcaccacagcaagttggagagaataattatccccagcggatggaaggacaggacccgaggaggcgggagaggaagcgtccagagcaattaaggccttggaagacacaggcgctgccaactcagagaccgaa

SEQ ID NO: 143985 - DNA, 426 bp, Zea Mays
atcaatggttgtatcgcattccgaaagtttgtactgcagacgactcactttggctgacagctccgcaatacggtggctatcccactcacgtgccctattcctgtggcgtagttctgaccggagttgctccaccctggcttccaggtctccaattgggtcattactgccactactacttccttcatgcctggaggctagctgatgtcgtggcacaccatgaggtccagtcgatttgcggtgggtagtcttagtgcgcgccatatctccataagaggggaagatttattagtatagttttaaacatgatgcatgcataatctaataattatgaaatcaaccttcgttgatcccccacttcctacatatattgcactctgttacccgactttacaagataagggactaccagaaagtgataaggtaaga

SEQ ID NO: 143986 - DNA, 408 bp, Zea Mays
agcttagtgcgtacctcgaaagcctgcgagtgtactgtaatactttacatgaagaagtgcatgtactgtatgctcgactgcacccggacgtgccttctaacattgctgcaatgggagccagaccctcgggtatagcaaatgaaggacctgatggggagctggacctttttaggccccctccttccatgaaccttgctgacgaacggtctcctgccgcaggaaatggagcaatgaaggatgaagaagactagaatagtatagtttagatattatacttatgtaaaataagtaatgaagtcaagttgtacactggagtctgtataattattacattttggtaatgtaaaatgatggtgtatggtagcatgttatatttttttccaaatgtttctttgcctcagatgccat

SEQ ID NO: 143987 - DNA, 589 bp, Zea Mays
cacgaacagaaaaaccataatccagatcagacgagtcccacctccataatccaaatgtccggccggccgcccgcctgtccccatacgtagtagatgtcattgtttcagacatcatgatggttgagctggatttttctccggtagcggtcacgtcgtctgatggtctgagagagacgagacgagacgagactcgcagcgatatccaaaattcagcaaccatccatctggattctggaatggaaacctcagtcaagcagtccatctatcccatcgactggaagggaacagcacggacatcgtcgtcgggacatggctgccgatataaaaaaaaacggtgtgggtacgtaggagcagagcttccttcctgctagcttgtgttgctcccagccagccagcttcactgttgcgtcttttcaaccgggcgcagttgcctgacgtccatccgtccctcgcgtgctcctccgggctcccacctctcgatctcgaatcaccttgaagcaaagcttgaattcctcggcaaaaatccgaccgccacaaaagcgggttcagtttcagtgattgctgcatgccctccctctcccgatcgttc

SEQ ID NO: 143988 - DNA, 481 bp, Zea Mays
acttactggagctgtgaacaaattggctgaagctgtccaagcacctattgtagtccagaccacagatgtccaccctgatctgtatcaaatttgcatgagtattccaggtttcactgatgaggacttgatgacttgctttacctacctattggacaacaaaaggcaaggtaatggctttgtgaagatggagcctaaacatcgtgtgctttggctaaggcaacaccttgcaaagatttgagcagaccagtcttatgcctatgatgcctaataccatgctctatgcataatactttgatctatgcctaatactttgctctatgcctatgacactgaatctagaactgtggatgataattaataattctgagacttttctaccggtctgtgatgattttatatttaactgttgcctttacttgcctatgatgatatgttttataatgatgatcaatcaagggagtatgacttgttgctttgtttt

SEQ ID NO: 143989 - DNA, 400 bp, Zea Mays
gttcaagaagtaaataaaaatcagaattttctattttctaaaaatcagcccctctaactaaacctccaatgttcattagcttataagccttaaaaccgtggacttcaaatgttgtgctaaactatcccacttgttggacgccagtgagcgtcctcaaaaccgcctggttatgcttgtgcctataagaccaccccaccctcgcccgttctacccttgagcctctgaccagttggcaagtgcaccctcgtaggaattttgcctgaaccaagcacagcactggctgccattgtcacccgagccccggccaccgtggcccgaccatcacagccaccccttcgcccgatcgagctccatcgttcgcttccctgagatacggtgaagctccaacccctcactctcg

SEQ ID NO: 143990 - DNA, 633 bp, Zea Mays
ccggcgaggaatccgtgccgctacgtcgttcgatccgtcccgaattcaaggtgaagctcccgagccggtcttggagccctcactgttagcgtccgcgcgtgtcaacacggtcgcccagggaacttcgcacgaacagataagggaaggggacgatgttctaccggcgggtggactcccagatcgcctcgcggccaaggggtctgacaaccgagggaccgggagatgggattaccaaggggaaggcgagaagaactcaagggctccagcttttaaccacaagcgcggaggaggtcaacccgattcccccggaagcacatcgcgaggtcgttgagctcgcgcccacggagtccgcgggcgcttccgccatggacgggcaaggtggttggattcgcggctgacaactcgggtccacgcgccagcgggtcatccacagcggcagtacacgcgactggataatggtgggtgacagagcgggcccgcctgtaagccgaaatgggaagagcgagcgcaccaccgtgattccctgagaagtggggccgccccgtcattgaaaggagggctgggccgtgcgggtaagctttttctggtgggctgaaatgaacgtctgcggcccatgtaaggttttatcctttt

SEQ ID NO: 143991 - DNA, 355 bp, Zea Mays
cgatcaccggcgtcaagtcgccgacaagggtgtgagacgtgcggaagggctagaccgaaagggtgggcttctaataggcaagggcgtgggcacgggcgcagggctagtggtgcggtcaagccaaccagagctcgtggcatgcgcgggcgcggtcagagcacattcccgagtgctagccgaggtcgaacacgtggaggtttgcttctgtccctgtccaagcgcttgtttagcttccctaacatgtatatcttggcaaggatccatgtagggtctcttccctgctcgaaatcatttcttttccatgtgagtcccgagcttagatatgcttagggtgaggagaaaagcttatgtcaag

SEQ ID NO: 143992 - DNA, 576 bp, Zea Mays
cgagttgatttgatgctgagaggcaaggtttcgaatgccggtgctcccttttcgtattctgcctggaatcttcccccatagagcccttttccaagtttgtatccaaccctcctattcaagacggaaattccgagccatagaatgcgaccctctctagaagatattgaggccttcattgctccataccgaaatctccctgaagaagaaagacagatccatctctagatgtagacgattgctgatgaggctgagttgaatgatgttcccagtatgctggcgggtgagtcgtctgactctgtccatactgagtcggcgagtgttgcagctgggcatgcccttggcgaggatgaaggagttcacagtcctggaagtgtccgtcgcaaacgattgcgttgaacgagccatccagccgctcctgccgaggggaagaaaagaaagaaaagacttcaacggtcatctggcttggaactaggtgctgactttactatctcagtcctcggcggtggatcggcgagtgccaaccttgaggatgatattgagaactgtggtggtgccagagtcggtggacgtgtgttt

SEQ ID NO: 143993 - DNA, 333 bp, Zea Mays
tcactgttagggtatccatcggacatcagcttcatcattgctgaaaatgttgtattgctgattcgataacgagacttcatatacaacatcctcaccataaaaagaaaattttgaatggctagaacccagactaagcaccttctttgaatctccaagaactcctgcaaatcttggctcttctccatcagcctctgccgctgcaaacagttcaccgatcatctcaggtactccatgatcatcatcgtaaacatcatcgtccacatccatatgtatcccaaagtcatgatcatatccttcgacctcctcctctataccctcaacttttgtatctgc

SEQ ID NO: 143994 - DNA, 522 bp, Zea Mays
caaagcgaaactgagtcaccacttcaatcatcttcatgatgaagggggcgtgaagacatcccttgagagggaagcagacaacatgaataatttcttgccaaatcatatcaaaaacattgattctttcagagctatttggcttcataaatgtgaacaagaccttgctctctcctaggatattcatttggttaccactttttggaatgagagtcattctacagagagagttaatgtatatgtagaacttatgcagattggttgactcccaatatttatcagtctcagagatatgaagatcactggcttcatccttggtgggaggacaaaagtcatgaatcttaatcttgtccccagaaatatcgccatcagaaaaaccaaggatgtgagcaaacctccggtagctcaccttataccagctgccttcgatatagaaattgagataaggaaagttataaggactttcctcatcagccagcttgatccaaagggtagaatagaactgagcaataacttcatcattcc

SEQ ID NO: 143995 - DNA, 535 bp, Zea Mays
atcagcgaaggagtggtcgggattaggttatcaggggcgatgcgtcaggatgcatcacaaccgtagatcagtggaggaacggatgagactggactatgggtattcatcgtctggaccgttggatggggatctaacgtaccacagcgcgtaccggctcgggtcgtggataatttaatcttagccctccatctgtgatcgcacggctcagaatagacgatacctcttcggccgatctttatgcagaaaagcccctcagttttcagtgaaccaacccgcagtccatgcgccagtagtctgagtctcgggtaactttgtagtttagcccctgtggtatctggtatttagtgcgccgtccagaggacagttaaattagatgaataattatgggaaaggatttttagtgtaagaataatcacaaaaacttgtttaatcaatagaaaagtcatatgaagtccaaatttattcattccagttcctataatttggtaataatattgtttatcacttagtgccactgttttagcatgaaaactat

SEQ ID NO: 143996 - DNA, 718 bp, Zea Mays
gggaggaggggggaggactcaccggagagggggaagacggcggcgcttcgcgaattgcgctcgggcaaggggaggaaggtagtggctgaggccggtgcggggaaggaggtgcccgaggtgacctttttataggcgcccgagggaaggggagcggcggagctcggcgggcgccggtgaggtgcacagcgccggcattaatgccgcacagcgccgccgatgagactccacggtggggcggtaccgggcaaggacgttggtcaaggggggggaggacgaggcggtgccgaactcttcctgtgcggcgaggggacgatgatggaggggacggcggtgaagggacggtggagcgtcgtacgcggggaagacgacgcggctgaccggtggggctggtctgccagagagggaaaacgcgcgagcgagaggggctggcgggtggggctggcgtgtcagcgagagcgggtgaggggagcgtgcgggcggcttcgcgcgtgagcaggccgactaatggaccgagggagaggaatgcgcgggcgcgcgggaggggaggcggtcgcgccatgggccggaattggcccagcagaggggggattcttttcctttttctttttaccttctcaactcatttcttatttgtttctttttctttttgcacaaaattatttggtggatattctaggtgttggaaaataaaatctaagtgaggtgcttgtgatcaaac

SEQ ID NO: 143997 - DNA, 557 bp, Zea Mays
catttgcgtgctggggattggacatgattggacccttcaagaaagctcagggaggctatactcacgtgctggtcgccatcgataaattcaccaaatggatagaatacaaacccattgcttctctaaccttagctaaggcagtggagttcatacaagacataatattcaggtttgggataccgaatagcattataattgacctgggatccaatttcactagttctgaattcttcgatttctgcgaacaacgaagtatccagatcaagtatgcattagtagcacacccaagagctaatggtcaggtggaaagagctaatggaatgatactggaagcactcaggaagaaagtcttcgacaagaatgaaaagttcgcaggaaagtggatcagagagttaccttatgtggtttggagcctaagaactcaacccagccgagctctgcatggaaacacccccttcttcatggtctatggatcggaggcagtgctacctattgatctcaggtttggggcaccaaggctggtcttcgaaagcatagcagaagcagaagcaaccagg

SEQ ID NO: 143998 - DNA, 576 bp, Zea Mays
gtcttggagggagattgactctgattaatagcagcttgtctaacattcccctttacatgctctcattgtatttggccccatcttctgttttaaaaaagatggatatctttagaagaagactattgtggtatggtggaaacaataaaaaaaatatcatctggcgaattgggattttgtttgcatggataaagataaaggggggcttggcatcttaaatctaagatgtatgaacataagtcttcttaccaagtggttatggaaacttgaaaaggaagagggtctgtggcaaacaattgttaataaaaaatacatgaaaggcaagcccttatgtattttaaggaaaaagcaaggggactctcaattctggcgaggtcttctttactgcaaggataagtattgtgataatagaaaaatggaaattggtaatggtctctctaccagtttctggagtgatatttggtgtggtgatgtcccgttgtcaataaagtataagagattgtttgagttatctcttaataaagagataaatgtgaattgggctttgagtggtaactggaattccttaacttttagaag

SEQ ID NO: 143999 - DNA, 646 bp, Zea Mays
cagcattcaggtggcaacaaagcatcaacagcaacagagaactcagctatgctctccaccaagctttgttattagaattcagcatcaagatcgttactgactccactctgcaaaattaaaaaaacaagtgaacctgcagactagccaatccatgtgcagctttaggcataattcctgcatcatcagctgtctcaatttcaaaaccttgtagctctgaaattttcctttgagacaccatcaagtgtgaggtttgtggcaagtgaagaatatgattgtgctctaaaatcagatctaacactttataatttcccttctctcggtccattacaacacccatccgaacttgacaatcagttcttgtttcagctcttggacactttgttagatgatcccttttatctttcaatctatgaccctcatttgcacaaacatatctgcaggacctaaccttcccatctgactttcttttgtttgtgtacattttcctaacctcaaagccctttagacctccataaccaacccaaaacatccaagcctcttctattgtaccgaactccattccaactcgaggtactagaacaggcaataaaccttccctgcaaggattttgtatttgggggtaagctaaacaacacaagtttaaaat

SEQ ID NO: 144000 - DNA, 505 bp, Zea Mays
atttttttgtcgtgggtatgagtatggggtagtaaaatccggtgggtatttacccattgccatctctagtgtcaggtgggtaacacagcgtctgtagcaaccgccatggacttttatgcgaggaagaagcgtctaggtgctgggtccaaccggtcagcggctgtgaacgacgaaggcaacatcgagtcggtggagtgcgtgcggtgttgggcctagtctggccactcgaccaatgcggcgataaaagaaaagaaaaaggagaagtgaagtaatcgggccgcacgggaaagggtattgggtcgaggaaggttgggcccgcgagttgtggagatgagccgctagaaggggaactcgacccacggggtcggttttgcctttttcttttcctttttcttttctgttttcactttcctaacttcaaatcaagtttgaattaaaatttttgaattacatttaaatggtgttcaaatttcaagcctatttaaatgcacaaaccaaaatctcg

SEQ ID NO: 144001 - DNA, 479 bp, Zea Mays
ggtatttcaaacctgaacagtatgtcctgaatgaacttcactgcctttgcagaggtcatggaagcgattagcttgtattctatccacttcgtaaatttgtcgatggtaaccagtatgtgggtataacctccttgacctttcttaaaggacccgatcatgtctagcccccaacatgcaaatgactaggtcacaggaataatctgcagctgctgcacgggtaagtgatgttgttttgacaggaattggcacgcctcgcacctctggactaactctgcagcatcattcttcacagtcggttagtaaaacctggatctaaaagcttttcccactagaattcttgatgcagcatgcacaccacactgcccagcatgaatctcatctaatagctgtctctcggtagccgagtggatgcacttcatgaggacccctcctgcacctcttctgtacagcaagccccctatgatggtatagtgggccga

SEQ ID NO: 144002 - DNA, 1169 bp, Zea Mays
cttttagacaaacccaaacactgtgcaagcatgtagaaggtgtagaacgggatagtaagaagacaaagaaataagtcaaaagtaaaagaggatatcgaggcacttttttttgaacgaagatatcgaggcacgaggcacttaaatccatccttgacgccttcagcaaagtgtcagacccatgtaaactttgctaaaagctccatccacccaattcgttgtgaggacatagaccttgatcaagtgatctcacctttcttgggagccagaggcacttttccctgccgctaccttgggctacaatacataccaggcctctccaaaaagtgcatgtgcaacctctcatggaatgtggcagagacttccaggttggaaagtgttagtcagttttggtaagctaaaatcagggctagacatatgattaccttcccaatgtattctaaccagaataggtagggtatatgagctgattaggcaaggatcaatctgtgattgggtatttctataaaccctgtgatccttgcctatatatgtgtaacctctctaccctgttatgcaatgaatcaatgcagttctagcctcctcatatgttcctacagaaaggaaagctattaaacaaagtcaggtgtttgacattagtcacctcggttctgttgtccatgtctatatatcacctcaccatcttcccctcaaaatctgaagatcctttggaagggggaagagaacgccaacgaaggatactgcttagtaaagtggccaatagtgtccaagccaaaggagcttggaggacttggggtgtctgacctggacaaattccgaagagcatatgcctactttgatgccgatatagttagaccataggcccaaccaagagaaatcgctgcttggtgtgaagaggcagccaccaatataccaaggcaacggcggcgacatttcaacggggtggtgatatacacagtttgcaacatttagaaagcaagaaataggaggatctttgaaagcagcttgctagatgcacggcaggtggcctgtagagccaaggaggacattgacctacacacgagggtgttgagtaatttgccttagttgggtgtgtgcttaatgctcgtgcgcctatgggagcctgtagccttcggaattttctgtacataaactcttcaatcttaattgag

SEQ ID NO: 144003 - DNA, 463 bp, Zea Mays
gcaacagctacttaagggcgtagccggaataacgttaagcgaagtctatcattacaaaaatacttcgcacaaagtcgccacatcaccatacaaattacaattgcacacacggcgaaggcattgcccattacatacacatgacgagggcaccgcctatcacatcggctcaaccttcggaataatacccatcttcctataattaaacaacattatcctcaattcctcaccctcaaaaagctcccaaagatccccctcgcctatgcccgccccaatcggtgaggacaacaattctcgcttaccaatcccgcctactcgaagtcggccacgctccatccccatgcgacggcgcctgccgctccgcgaaaattcacccacacactgttttcccaacacccttcgccgcctacacccagtactcataccaggaagatcctcagcaccctcaacacgcggcgaaatctcc

SEQ ID NO: 144004 - DNA, 297 bp, Zea Mays
catacttcccctctgtgctgccttttggaaagactgatgttaagctttctcaaagcactgtttgacttgccctagtgaactgttgaggtgcaattgtgcaagttagcatcagtagatatgtgtgagtgtgacctagtatagattagcttgcacgttagcacctatcctgctttctgcattattatgtcttgcacttgccctgatgaatccttaaggaaaagttagaaagtaatgcatactcatataagtcttagatccatagtaagttaatcacttgggatgataacctatgggctt

SEQ ID NO: 144005 - DNA, 536 bp, Zea Mays
caaggaacgtgtgcgatcgaggtgctacgcggacggagctccggcggcgtggtcgacggcgagcaagagagtgaggagcacgtgagagagagagtgagctcggggaggaagagaggaagggagtggttgtccaatatatagagaatgggagggaaggggagagggcgccggagaagggagagaggagaaacggcggccatcattacagccatcaatggagcgttaccatcattaacggcgaggaggaaatggagaatcggaagagggagaaacggccagcgtgaaactccttaacgcaagaagaagaacggtcgcgggcttcggttggcgcgggtgcggggtcctcggccgatcggttgcctaggcgaggggttgctcctggcgcggcgcgggcgtcgcggttgagccggagtcagggcttgggcgcgttggctgcatggcctgggcgcgcgggtggggcatcggggtcgcggggcttgagcgcggggtggccgagcggcctggaacttcctgggctcggcgtggtcggcaggcgc

SEQ ID NO: 144006 - DNA, 358 bp, Zea Mays
cgaggatagtagcgtgggcagccctggccgcggggacttgcggtccgcatcaagctatcgtcgacggtgagcaattcttaaggtgctggtgatgaatcccgagcggtgcagcttcgaccatgctccttctagcctggagaagccccaaggaataaccccgagggctcggtcgatggcgaaacgaggctttcacgcgacggatctctgtgctcggtgctctctctctcccttgatttcgcttgcaactcccggcgctacagcttgattccgatgcacggaagggcgaggcgatcttcgcggccacagttttatggacggacacggccttaacagcctccagctgagaattcggggtggc

SEQ ID NO: 144007 - DNA, 545 bp, Zea Mays
accgcgacttggccttttgacacgttgtgcatctagcaacaaagcgctcaacatcacgtctcaaatggggccaaaagaagtgtgtggacagcatagcctccttcttcttagcaccaaagtgacccatcaaaccaccaccatgcgcttcctgcaacaacaagagacgaacggaaccaactggaatgcataggcggttagctctaaataagtatccatcattaagcacatatttattccatgtacgtccctctttgcaatttaataacacatctttaaaatcatcatctaatgcatattgtcccttaatcgattcaagtccaaaaatatgataatcaagttgagacaacaaggcataacatctagataaagcatcagcaatcacattatcactcccctttttgtgtttaatgatgtagggaaatgtctcaagaaactccacccacgtagcatgtctacgattcagatttgtttggctacgaagatgcttaattgattcatgatccgaatgaataacaaattccttagaccataaataatgtttccac

SEQ ID NO: 144008 - DNA, 449 bp, Zea Mays
cttcgtgcggcaaatttaaataaagcctaaagcatgctcggtgatttccgtagtcggctaatgagttagtctaagataattatatcttatgtattcatcgttggtgtaggttagagtagattgaaaatataagttatgcgacatgttattgttgaagataagatgtacaaataatcagtttggtgttccactcgtctagtcgatagttgttataaatatttgcgccaaaacttggtcataagagtgtagtgggcatgtggtgttggttggatgtgataagtagattagaagtgtgggtctgtcgaagcactgtgatgtcgatcgtgtatatcgaagtacattgtagtggtaattgcgttaagttaatcagtagtgtctcgagtgcacgccacaacatggttgtatgcgagataagataatataaggtgcgctcgacatgaatgttcgat

SEQ ID NO: 144009 - DNA, 536 bp, Zea Mays
acaacaggagcctgaagcggaggaggtggagcagactgaaccggaggaactgagacaccagaatgctgtagcataagagccatgaatgccctgctcttagcccgatcctggagtagctgctgctgaagtgaatcctgcatgtcctatatggtctgaaacatcgagagcatcctcttggataaccgggtctgctcggctgccaggtgagcctgctgttgagtgagagactggagaatcgaagcaatagcagggtcaatagccggaggggcagcaagggtagcactagaactcccagcctcatgatcatgtgagcgtggaggcataggaggcggaggcggaggaggaaccccaaaatcatcatcatcatcatcatcatcatcaactgctgcatcctgagcttcaaactgacgaagaacagcatcctcggcctgagagtcaaaaactggagcagaagctggcacaggagcctcaggcgcaggacggtaggatccaaaaacaaggcgtgaggcctcaagtgtgccctgaaactgtggagg

SEQ ID NO: 144010 - DNA, 762 bp, Zea Mays
ttggcttcgattcctcgatggctgatgatgaacccgagtagctttctagcgggtaccccaaacacacacttctttggatttagcttccagcgctagcacctcaagctgttgaagacttgttgtaaatcttcgatgaagttttcttggttttctgttttgatcaccacatcatcgacgtaagattccacacgcttgcctagtgatcggctaagcatgtctgaatagcactctgataagtcgctctaatgtttttgaggccaaacgacatggaggtattgcaaaaggctccaaagggcatgatgaatgccatcttttcttcatcttcctttgccaaactaatttggtgatatccggagtaatagtcaaggaaggagagcatagagtatcctacggttgaatcgactacctgatctattctagggagtccaaagggatccttcaggtagtgcttgttgagatcgatataatcgacgcacatgtgccaatcaactttattcttttttagtataagaacagggtttgctagccacccaggatgcagtacttctctaataaagcctgcgaataccaagcgagctaactcggctcgtatagcttctcttttgtcgagggtaaaacgacgcaacttttgccagattggcctcgcttaaggatacacgttgagttggtgctcgaccagttctctcgagactccccgcatgttcgcaggttgccatgcgaatatgtcccagttgtcttacagaaactagacaagcacgtttt

SEQ ID NO: 144011 - DNA, 680 bp, Zea Mays
gccatggctagtgacttgctctcgtgtgctctggactctggagtctggtttggtgtgctagcgatgagtggagcttaaagtcgaacgcgcgcgactgaggaggcggtaaaagggaaagcaagctagcaaaagccaagaaaagggaaacaaggcggcgcccactcggtaaagccacttgcttagccatgttgtgtttgcacttgcgcatgtgatcgcagttctgtaggaaaaacctgctacctgctttcgccggacgctttctgtaggaaaaacgtcaagcacaacgctagctgatctatcaacagcattctactggtagccgagcctgggcgaaatccaagattggccaacaatccaacatgatccatcggacaaacacaatcgaacgacgacgtagtatactatctaccactaggtggggagcagaatcctggcgttcagtctatcgtaatgtgctttcgcagtgggtgattcagtctaatattgtggcaccccgagcaagcattatgcccacgcgctgacgctgatgaggatgcgaaacccgaacgccgacgatcgccgtgatcctgtcggccagcaaggcgagagctcagagtgagggcgcaaacgccgccgcatatgaaggcaactgcgaggagtgcgagggctagcagcacacacaccgcgacgccgcggtcatg

SEQ ID NO: 144012 - DNA, 448 bp, Zea Mays
gccaccccgtaaatcatttagagatttgtagtactctgaagaggagttctctgactctgatggcaggagctctccgactcccccttcgcggtcgccgtcaatcaactccgacgactccatggggctctccctgggcgagcaggcctttatgagggtcttggaacgctctggccttgccaactcggatgagttggacgagagcgaggaggaggacttagagtaaggggaggatcagagagaggaaaacaacgacgacggaggcgatagaagcgacaacgacaaagacgatggcagcaggaagggtgacaatagcggaggcgggcaagggcggcagcggtggccgcaacaccggtgataaggcgccaccctcccaaaatagtatagtgtagtagtaataaatagtagtagtaggtgtagaagtagtatcatagtagtagtaagtgtagaa

SEQ ID NO: 144013 - DNA, 383 bp, Zea Mays
gtttagatgacctcaaatgaatttgtacgttaggatagaattagaaatcacgtgcatctagtatggtgtcgatatctttattactgtctttcgtgtgttaggagacggagctcttgactctcgtgcttgtgtgagaagcctacaaacttactccttcgtctgcctacaagattgttttgatggggtgccattcttgtttttggacgtgatgtcctttccatatgtctttgcgtgtatgtttgctccgtcaacattgagcacactcggtcatgaggtgattcagtcttgaatataaataattatccgtttacagcctatattcataatagttcttagcttcgcaggagctgcagggttttgtcattaatagagcgaacagtatc

SEQ ID NO: 144014 - DNA, 360 bp, Zea Mays
gtagcctacactagagccttcgcccacacgctaaagagacagggcgaaggtgaacctggtcagagaattcgcacggtgaccaagagaagatatctggccgccgcaggagaagtccttgatccactagctctattcgctgctccacgctccatattattgtattcctgggcccacttgtcagggtccatcttccttgtatgtgttccccttaggctataaaaggggagggcacatgtgttgcatggggacacgctcgcttgaacccaaaggatggacaagctctcccgagcacgggaacatcctcactcgaactcctttggagacatctccatccaaacccaagctttctcaagctctaag

SEQ ID NO: 144015 - DNA, 548 bp, Zea Mays
ttgtaagtgattttgaaaagagattactttgaaaactttaaacctcatttccgttatctgattttgaaaagagattattatgaaaactttaaatatgcctttgctatctgtaacagagtaatggaaagtcaaccatcaaactaaattgttttttccatcatcaaagcaatttgcaatatccgtaacctgtttgaccaatactggcagggactgactggttgtgcaaatacctacttttaaattattgaaagtgggagcatgaaaggtaattttgcggtcctgtcatgcattatagggaactagggacaacgttaatagatgttgtgatttttttaagaaaagtaaatcttgtctaccttgctgtttaccagttgctgtttattctttgaggatacgctcccttttgatttcacttgttcaatgtaaccatatgtttgttccatgtttaatggaagtttctgtgtttgtgatacccaaatcaaccaccaggataaaatgttataccaatgcgctattgcaccactgcagttgctttaagatggattttt

SEQ ID NO: 144016 - DNA, 284 bp, Zea Mays
gggagagagagaatgagagggctcacctagaaccgccatgtgcagggacatcagcttctgcgcgatttggatctaaagagggagacgagaggctatgtgacgtcacgttggttatataaaagagaacgcgggaggaggttgccaaattcatcctcaattgtgtcgcgaccgagagagaggcggttgcgagcatgacaaattgcgcgagacagtgtaagatggagactgagtcaaacgagtggtagatagggttggataaaattagaggaagacggtcagagctg

SEQ ID NO: 144017 - DNA, 455 bp, Zea Mays
gcttgatcaaattgtatccatagcaagctaacgatatgcttggtgtttttgttgtgattgcatgcagaaaggggagtgcaaagtaagcttcatatattttccatggcaaagtaagcttcatatctacctatatgcatgcatgcattttggacaactgaatattatttcaagtcttctccatgcatatgggatgttttgatgcaatgcaggctcttcggaaaggtggcgatcgtcacgggcgccgccagcaaactgggcgaggccatcgccaggaagttcgtcgacaacggcgccaaggtcatcctcgccgacatcaaccgccactcctgcgagaacatagtagcggctctcaacaagaccaaccacggccccgcggtggctcacgcgatgcgcatcgacgtcagcgaacccgacagtatcctcgccaccgtcgaggaggcaaagaaggtctacaa

SEQ ID NO: 144018 - DNA, 801 bp, Zea Mays
ctgaggacgaaaagtgacactaagagaaagcttggtgcccaatgcactgtgaagactctcccagaatttggatacaaatttggagtctcaatcagaaacaatggacttaggtacctcgtgaagcctgattacttccttcatatacaaggggaccaaatctgaagctgaatttgtggtcttcatgggaataaaatgcgcagacttagtcatgcgatccactaccacccatatagcatctctgccccgaggagaacgaggtaaacccaccacaaaatccatggtgatatgctcccatttccactccggaatttccaatagctccagtaaacctgcaggccgcttatgctcggccttcacgcgctgacatacttcacaagcggccacatacttagaaacatcaaccttcgtccgcttccaccagaagttttgcttcagatctcggtacatcttggtttcgccagggtgaacggtgtaaggcgttttatgagcttctctcaatatatccgtcttcacctctgatttctaaggcacacaaaggcgacccctgaaacaaaccaaattattctcatcgatggagaactcccggggtttaccatcgccaaccctctttcgagcttcctgcaataaacgatcatgctgctgagccgcacgcactctctccatgagggaagattgaataagcatacgagtctcctcactagcggtgccgacatagcacaaggagatccccaaacggtctagatcagcaatcaactgctaggccacttttggaaccccggacctgctaagggcatcagccac

SEQ ID NO: 144019 - DNA, 752 bp, Zea Mays
ctcaagttgcagagccaactctatgcaaatacatcttgaggccagtttagggaacgctcgttttaatctcaatttataatgaattggatgggattgagcgcgtttaaatctttaacaagtcaaaaaaattatatcccaaccttatccaatccatatctaatgacaataacggaataaggcctcagtgcttgaaaaaaaaggtaaatcttagccaatttcccatgcatccaagcaggccctgtgatgcctaggtggctagtttgcatactgaaaccttactttgagtcgcgaatatgtgataacggaagtgatattaaccctaatctttagtgcatggtacatctgtacctgagtcatctaactggggtttgtattcttggccaagaacacgctatacatgcataagaacttgtcaaaattgctacttgatagttatacgctgcccacctgtatctgtatatatgttgcacatactatgtctcttgctgattaagcatactagttcagtcaatgcactgcaatgtgcgatcattcgttaccctggtcaaattggacaaatatccaattttttggcattatttaattcgtttacttccgattctgaaacaggtctttagtcgagtgaattgcacaaaacaggtattggaagttggaatcatctctccacgtggcactagtttaaacattctttcacgtaccggggttcaaatcagtttacaccatcttcgatctcccatctagcaagaatgatc

SEQ ID NO: 144020 - DNA, 346 bp, Zea Mays
cggacgcttctgccatggatgagttacagggaggctgccactcatattcaactttggctccttggtgccctagtttctcactcagagtttgatgtcggattttctcatttgtgagatcgaggacaccgtactggatggtctccgtgctcgtcgacagctgccttatgctcactatctgtgtcacatctttgctcagctgattcggccccctcagttccagggtactcttgaggactctcgcctcatctttgggtcgtaccgtctagctccagaggatcctgtgccggcacctgctccagtgattgatactcaggccgaggataccacttttcaccagtttgagact

SEQ ID NO: 144021 - DNA, 296 bp, Zea Mays
agatcaagtatgcatcagtagcacaaccaagagccaatggtcaggtggaaagggccaatggaatgatactgtaagccctcaggaagaaagtgtttgacaaaaatgaaaagtttgcaggaaagtggatcagagagctgccatatgtggtttggagcttgagaactcaacccagtcgagctctacatggaaataccccgttcttcatggtctatggttcggaggcagtgctacccaccgacctcaggttcggggcaccgaggctggtcttcgaaagcatagctgaagcagaagctacc

SEQ ID NO: 144022 - DNA, 295 bp, Zea Mays
tggtattaaagctgaacgagctgaaggtctcacatcaactcggaatctctatctgatacctacggaaaagtagtccgcaacaatctttccagctgaagcaacgaccgcgcagctgcgagacggtaaccggcttagggtcctcgctgcaaaaatgttttctaaatcactggggcctcatctgcacgcttagcatccaactttcagtttccaactcccactagcaaagcaaaacaaaacaaagcagatcaaaaggacttccggcggagcagaggtattgttagtactcagttatttg

SEQ ID NO: 144023 - DNA, 358 bp, Zea Mays
gacagaggaagggcgccatatgatctatatagaagagcaccatataaatatccatataggtataaaggaggaccattggtggtaggagcttaagaggtaggagaaggagcttcagtggtaggattttcattgggaggaggacaagcatctatgggaggttggtagggatacaaaggaggagaatatgtgtatagaaatagaggttatggacatagggaacacggatggtcagaaacatcctcatggtgacaatgcatgagagaaaggccatcgaagaaggtctgtcccacacaagtacgggtgccagaatgttgtgacgattgatcgttggccaagtcagtaaatgttccaaactttg

SEQ ID NO: 144024 - DNA, 705 bp, Zea Mays
cagggtacaaatacctggcgcgctcgtctctgccgcaaaccaggggaggccagccgctggaattgccgccgccatgggtacaagctcatgcggtcggtcggggcgcgcagacggatctgtgggcttcatcgggtccccgggaatgtactcatggcttcgggaggaaggattggacctgggtgtgccctgaaatgctcatcgtcgtgagactgtcgccgccggtagctccacgccgtgggcagctccactgccccgccatgtacggtaagaccagtgatctcaagttcaccatagcctctttttcgggtagagacttctgggataaagtatcgcgctctaggaggctggtctggtggggctcatcggtcgccgccgtgggggtttggtgccgccgcctgtgctgactcggggaggaagaaggtcttgtgaccgttgatctgctaatcagataggccaccaacggtgtagatttaatcaggtgtatgctagttgtcgtgtgatccgggccgttgaatccctggcgagcagttcggattagaccaaggcgtgataaagcttgggccatttgatctttatccaacggtagagatcgcgtaccggttcgcttctgtggtattctaatcgtggccatagaattctaatccgacgtctgccagcgctcgatacccgttcgttctgggtaattgcaaatgagtccctcgggaa

SEQ ID NO: 144025 - DNA, 471 bp, Zea Mays
attgatatcctgcgactgtttcctcgataacgcgcgagtcatgatgagcacagtgtacgcggcagcatgggcgtactgcctgccactggaatggacaagcacgccgcctgcgggatggtctggtcgccgtccgccagaggaatggacagggctcattaaatgccgaggcggcacatcgcctgccagtggaatggatagggcacattaaatgtcgaggcagcacatcacctgccagtggaatagacaggcgacacactttatccgcaataaatgcagcaatcgcgcggcccagaggccttatgtcaggctccgctcgctggcttacgtcatgggcagtaggccacgtggcagcatcgggtctccgcctgagcggggagcagaagcgtacacggtatggtccggacacctgtcgactccagacccccgcatggtcttgattaaggcctaggtattctttgtcccagaatcccg

SEQ ID NO: 144026 - DNA, 762 bp, Zea Mays
gttgaacgtcttgagaagaagaaacggttgactaggcatgtgaggacgaaggttgagaccgaagatcaagcaccagaagaaaaggagggtctttctagcaacgggagcagcgagaacttgactactcaagagaaggatgaggaaataagttctggtagggttatagagagagaaagtgaaaaaaacatagacttgttccaaaggattttcccgagcaggcaaggcaccagatacaaagaacagtggccaagttagcattccaacctcttcatcaagcctatatcaaattatggaggtaatgacaaagcaaacccccatgatgcttttgagtcctttggtgttgatttagtaaattttgctcctccactgaagcaggccggtacgatgatcttgtctgacgacacatgcgatggcaacctggggaagtgccgaaggggtttactcgcatagtgaagcctattgatgacattttcaacaatatattcaaggaggcgagtactaaagctactgggaatttgtcaaaggacgacaaagaggtaagcatagaagaaactagaatagcagccgactggtagcccgctaaattatcgatagaaatcgtttttggggatggtgaagaggagagggacaaagataaagaagaggagttgatggacaaagatgaaaaataaaaagaaagagagaaaagaaaaaagatgctacagtactctaaattgccctatcgttcgaaagagataagaggccagagaaagctatgtttac

SEQ ID NO: 144027 - DNA, 913 bp, Zea Mays
gtggcggtccttggcgctattcacatgtctcactgacatctacaagatggcgaaccgcgtagggacgaactccggcgagcatgtatcagatgattcacgtgatgactagcgttctactttggcagagatcaaatctaagacctaacgagggtttcccctcaaacaatttcatcaatgggacattgaatcgatcggtccatggaaacagcgcggacactcgaatgggtatcgcgttcccggtaattaagggggactcagtgtaattgggttggttgaggagcatcagggaagcacactaattctgaaacaaggcagcagagagcatgaacaaacctggaagtggctggccacggcgaggtgcgttttacggtggcggaaaccgtgattgggggaagtgagcaattctcggtccctggtggataatccggggcaaggattggtgcaatagatgcgtgattaccctatggagccgcgggtgcactcaatttatagtgatcgtgagcggcggccagggaatttgggttggagatcagctcacggcgacttggatatttcaccgtgctctgcgtatcgtggcgagcgaggagaaaacggtgcaggaggtgtaactgactatcctccacgatccctacgacgtggagaatgctttgcggcgtggcacggttgagtgaaacggcgagctcaggtgaggataaactcggacggccgcgcggcaagtgtacaggatggccggaccagctagcaatcgcaatccatcccgcccagatctttttacccatccccggtgttatccattcctccccgatcacgaatcgagacagcggtggcacgaatcgcggcggagaggtcatcgacgatgaacggctggcagtcgatcttcttcagtattgtaccatggccattcctcatttag

SEQ ID NO: 144028 - DNA, 434 bp, Zea Mays
ccattcatttatagccactagttttgtggaaaaacatggcattccctctacacccctagaaatccctttggtcacccgaaccccggggtcagaccttctatgccagctcaaatgctcctaggtcataattcttttaagtggggtagtgttcttagcagacttaaccgtcttgccatcccaagggattgatgtgatcctaggaatggattggctaactaagcacaagggtatcataagttgcgcaagtaagaccgtccttctcaccaaccgccaaggaaaagcagtatcctgtcaggcccaaccgcccgccaacgatccaatgatgtttaatctcgcagcagaaagcatatccataatagaagaattcatggatgtatttccggaagagttgcctagaatgccaccggaaagacgagtggaattctatataaatc

SEQ ID NO: 144029 - DNA, 316 bp, Zea Mays
tcttcgtcgacgccgccgaagagcatggatctaggctaatagccgcaagatatagcaaattcttttagttctgatatatccaagtatcaaagatcaaagcttctatcttctgaagaggcttcttcagttccctttccctttgacgttgaagtctctacagcaactgccccctcagtgttcttcccaggcgcaacgtttacaataagtatattgatttctgacatagctgtaccaaggggaccgccattattcttagcttgttgagcaccttcgtcagctatagcaggagtgatttccttttgaaccactggtggag

SEQ ID NO: 144030 - DNA, 308 bp, Zea Mays
acgatagcgaaacgagactgaagaaccccaaaagctctttccacgtctttcctacaagcttcttgtgcagtggcaaaatatttcttcttgttaccttgtggttcaggtatggtcttcacaaatgtagcccacgagggatatatgccatctgctagataataacccattgtataatcgttgttattaatggtataattgaccagtggagcttgaccttcagctagccgtgcgaacaaagacgacctgtgcaaaacgttgatgtcgttgtgcgaaccaggcatcccaaaaaatgcatgccaaatccaaag

SEQ ID NO: 144031 - DNA, 550 bp, Zea Mays
cccccccccgtcggatgccaaccctgggcggccagccggtgcgaagtcatgcctttgtggtggatttacgcagtcgcaacccaaccgcatttatgcgtgaagtggaggccgaggccgcaaaggttgtatgaaagtatgtgccgaagacggagactctgaggagttgggatatccatggttcaaatgttaggttgaaccacggttttgagttgaaccgtctgacgtatgccggctacccgagggatgacgatgccgatgctattgtccgttaggggaaaaggcgatgacaatggctgataagggctcttcgcggggaacagcgccaagcgcggccaccaagaagaagaaattaggtaagcagctgaggggtcgagggcttccgatcgttttgttgcgaatttactagagacctgcgcagttcccggggagacgatgtctttgctcgagcttcggaaatcttttgcgtgaatgctgaaggttaccgggggtcgctggcctaggaatgttccgattccccgggcgggcggcaaggacatgtttacatctcgat

SEQ ID NO: 144032 - DNA, 418 bp, Zea Mays
gcgatttccaactcttgcgaaacaagtttcttcgaggcgcgtaactccttgatgatagaaccttttgaagacagtaacttactaagccgtgacactttagtctaggaggcccttaactcatccctatgatggtcaagctctaacatggtgaagcgatgactcctctccaaaatagtaagggaattgctggctggtacagtctatctagactgtcacaggaatcaagaagtgctcccctctcctcctacaggcaagaagagcattgaacattgaagtgaaggcacgaaacagaatcatctggaacagttaagaaaatctacctcatgggccctcttctctgaatcaagttgagcgttcaaggaagagttcagggtctgagtgccatccaagaatgcagaaacctggttcagatcggctt

SEQ ID NO: 144033 - DNA, 412 bp, Zea Mays
gcgttaaaattggcctgtgctcatgtaagtgagaggtctcgatctctcatagacaataatattggcctatgctcgcctaatgaatcaggtgatgaacgtacgcacgcagcaaactaccaccaaaagatatagtcctatgatcaaatcggcaacccaagaacttgtgagcaatccgcatcgacccaagaaccctagcaccaagatttctagatcatggccagtagatgtaaaggagttagaggaggagtggaggacaacataagtaccagcaagaagcatccaccgaagggatagcatcgatcccgtcgttcccctcgtggacgtaggctagtcggtgtcgatgccaccgctgaatctcctgctgcacctgccaatcagcttcgtggatctcatgcagctggtcaaacaattg

SEQ ID NO: 144034 - DNA, 545 bp, Zea Mays
caagaaagtgatggttaagcgaatacaagaccagagtaccgattacgatggcttatatgtggagcttggtgggggaatagtaaacaaggaatgcaatctgaatccaagttgttgtaaagttaaataaccatccaattagaagttccctgcctagtgctgaccacaagatacgacggatgcaaatagatcaatcacacgcgcaagaaatttcagatttgatgcagacaaggagtatgattggaatgcaagtgttgcaatcagatccaaccaaaattttgcaccaaatgataacagcaagctggttgaacaacttgataaaaattttcagcacttgtgcacataaacaaaatgattgttctatgtttctttcacaatcttgttcaacactttttttggtacttttctttcttctcttttttttcgatactcttttttttatcgaactaaacacagagatctgatatgatattgcacactttataatactttaacaaagaactcaaccagcagctataacttaaataggatcaaagttaacgcgaagg

SEQ ID NO: 144035 - DNA, 398 bp, Zea Mays
catgaattcttctactacagatatgctttctgctgctagattaaacaccattggatcttgggtgggtggctgagcctgacatgaaactgactttccttggtggtcagtgagaaggatggtcttatctgcgcagcttatgacaacattatgcttggttaagcagtccatccctaagatcacatcaattctgtgggatggcaatacggctaagtctgccaagaacactaccccacttaaaagaattctgattttggagcatttgaggtggcatagaaggtctgaccctggggttcgggtgactaagggaatttctagatatgcagtgggaatgccatgcttttccataaaaccagtggctatgaatgaatgggatgctcctgaatcaaaaagtacagcag

SEQ ID NO: 144036 - DNA, 1330 bp, Zea Mays
cacctctggactgggcctcatttttcagaaaagtcaggggcttctacgcaaaagtactcagactcagaacactccccactggacggcgggttgatatcctgaaagcagaggggctctttagcaatgttgacccgcgaaggggtatgggcaaaaactgatcgtccgatctaaaatatgcggtcccgattagatcagctcaaccatatagggttacttctctcaactaccattgatcaccgaatcaacggacagggttctaaacgatctaagccacacgatcctaaaccgagggctcagattttataacgcgaagaggtattcttggttttaatctcggccgtccatcctatgatcaacggcataagtgatttcttccacccagtcattgccagcggcgatgtccagggggcgccgcggcggagcttggccggagctggcccaaccacgtcctggcgtgctaatcctaaatttaactggcgcatcatgtaacctagagggtagccaatgctgtgggagagtcattaccagagctagaagaaatggcgaagctgcccacgcgcacacccagatccgcgggggggagaatcagttccggcgagcaattcgcgcgccacgacgacaatgtagtgctccgattcgccaggtacgcatacgatgacgtagtccgaagcttttgaaccaagccctgggccccaatgacgacgacggcgcgagatggttgtggcggcggcgtgatgcgatagcagagaggatgcgagcacgggaggaaaacgcgagcgcagggaagaagaaaaagcggggcggagtagctgtgagggaggtttaaatggtcggataggtgcggtcatggtaggatatgcgcggtcgccatgccgaagttaccggcggactttgagccgagcgcgccgtggaagtagtcgaggggaggaaaggttagagctgacggcgtccggatccggagttgcaggggcgaccggcgaataaccacagcggaaaccgcgtacggcgcgggagttggctagcagcagcgaacggatctccaaccaatacgcccgagctccacggatccctcttccttcgcatacggcggcgttggcgatgaaccaaccggctgacacggaggtcccacacgtcagccgaccctgcgcacggtgagaaggggatgggccgcgcgggagctactggccagatgggccgagatcccagcagccggcccacacgcaaccccttcacttttccttttctttttcctgattttctttctctctcttctatttccaagtttaaattttgaactcaaacttaaattcaagcttgtgctacattaatc

SEQ ID NO: 144037 - DNA, 484 bp, Zea Mays
ccagctgcctccggacactcagtcgtcgtcgccgcctccgagcgccagcccaggccatcacgagccaccacccctgtgcacagaccataaccagcagccaaacactgcatcgacagcacgcgcgcagccactgccaagcgcaatcgtctctactcacgcctgacgccgccgctatcacgtgccaccctcctgccgacaaatgcggcctcctcattgccaagcgcaacccctcacttctctcttggctgcgccaccatgatgtcgccacggaatgcgcagagccgccgaggagagcaaagtcccagcgagaaacacaggagctcttccttccacctctggcgaacctccaaggaaactcggcgcccagacctgctcgcgcacagggagcatctctgctccggcggctgctcaccggcctccctggttcttcctctcacaatcgtgcagcgccctcttctctacggtggttgctactcctctctga

SEQ ID NO: 144038 - DNA, 293 bp, Zea Mays
ggggatcgagttcaataaacacgttgattctcttctacatgaatcttaagcacacggaagcatcgcgatcagcggcacacacacatcactgggtgggtggtcgaaggtagatccagccatgttgcaaacgttcggcatcgccatcgaccatgccatcaccaaattaaacgcgacctgggctctgtccgatccacaagaaccaacggtaggctgacacaccgtcatggtggctctgcaatcctgtggcatactgtcctgtgttgatgtgccattgtgcatagcggcagacgagc

SEQ ID NO: 144039 - DNA, 711 bp, Zea Mays
aaaggatatgcttcttaccagcttcccgagtttctagtcgaagcctgtcactacataagccttgttctagtgcacacaagactcggacgaatacctacagtcatttgttcgaaggtttctctgccttcgggctcaagcacctgcaacctaggatgacgtcgttattgaagctatggtcaaggggctcaggccagatccagtagctcagtactttgccaagaagcctccccactccctagagaagttgttgcagagatggatgaatatataagagctgacaatgatttctgccagagaaaggaggagatctacagataaatcaaagccgccaggggcttcggaggaaggttccacccaagacatgtttgaagtatccataacccaacacaatgtgaagagaagacaatccaatctcaggggcactcaggccaacaacaatagggaaacaatcagtagcattcctcttagggtattgcccaccagcttcgagaggatgaagaggaaaccgaaacttcggtggtagattcaatgcacccctaagaaaaccattctacctattttatggtgaggacaaggaccacacatttaggacttgccaccacactatccacaagcaaaaggagatcgcttcggcaactacttagtcctctcagccgaaggaggtgttcagtatatcttctactgttcaccttatgttccacaatatgtcca

SEQ ID NO: 144040 - DNA, 782 bp, Zea Mays
caaagttgtagctggtttatagcactacaatattgctgcagagatttggacctgttgccatgaagatttgagagaaaagttgctttgaaaatgctttgtcagacacactgaataagcctccgatggtacagtgatctgttatagatcagatcgctagcgcgacgacctcaccgccggtgacctccctgcgcaaagattcgcgccgccgccgttaggattcacgctcgctggtaaccggataatgcttcggggtagaaagatcttcgtcgccgtcgagctggaacccacctcggtcagccgcggtactcctccccttgctcaccgcccggggataaggttttcaccgccgtcgtgccgtcgccgttgtccgccacgtggctctcactttccaccgcatcgccgtgactccctctaacttcccgtcgaccaccggagttactgccacgccactggacacgtattcaccgcgccaaggttcttcctcatctccggccgcccacactgtccgctcaaattaagcgccaccgccccagggatctataaattgaccccgcagagagcttcacaacatcatcacccacccagccaccacgtattgctagcaattgttcgcccgagctcgcgaattttgaattcgccccaaatccattctccgccacccgaaacccaacctcaccgcggccagccttattccggtcagttcatctccttctctccctcgttcaagatttcccttaagtctacgatgcttgccgagccactgaattgaactaggagcccgc

SEQ ID NO: 144041 - DNA, 784 bp, Zea Mays
cctccaaacagctttggcatataactctaaatataaagcaagttggagaactgcagaaatttaaataagatttcaacgataccttgagaccggttgagcttatcttctctgccagctgatcaacagcaacattacttggggcacatacaagaacctacaaatttgacaaaattagaggtcagacaattctccctaaaccatgtcaaacaagtgaacaacatacttctaataatcccatacctgtccttgaccttgtttggccatgtgatacacaattgcaccagatgtgacagtttttccagtgccaggtggaccttgaatcaaactaactggcttctgcaggacacttttaactgctaaaacctgaatacacaataaataatacagaagacaacatcagatcaaacaatcaataacaacatacacaggccataacagcagcaaatttgcaaagctgcacccaaaatttaaaatatataatatacacagattgtcccagaacagaagacaaccatgttaatcaaaggcatgaatgcaccatgttagaagacatgaaaagcaaaaaaaagaggaaatatagaacaaagaatacacacacatgtgtgagtgtagagagagacagagagagagagagagataatgtacctgggaagcatttagttctggaagtccaggtgcaccaaagcgtcttggtagggtgttacgtattatttgatgctcaacttcatgtcccaaaaggtggtggtatatgtatctgtgtgaaagaacagacagtaaaactttg

SEQ ID NO: 144042 - DNA, 336 bp, Zea Mays
aaacgccaaggcgaagaggtatcggggacccagagccatccgatcaggaatctagggcacatattaaatctgccccccctgaaccggtagcaatacgagccctcggatccaatgtctacgcctatgatttaatgtgaccgcgatctaatccggtccgttcattacgatcacgcggtccagattcagtgaagacacgatttgatcgtagccgttcacagacaatcccacggccacctctaatcttcaagcttctgacgccgagtcctgctaaccaaacagagctccgcggcggcgccagggaccagccaacccccaccatgccaccccaatgtccca

SEQ ID NO: 144043 - DNA, 736 bp, Zea Mays
ctaagcttcatctgcagattgaggagctgccaccttcgccaaggtcgagaagcaacagtcgtggcgacacaccatgattgaggagatagactccatcgagagcaaccaaacatggagtctggtgcccttttcacccgtccaacatttgattggattgaagtgggtgtataagatgaagaacaacaccgacgatgaggtgatcaagcacaaggtgtggctcgtcgcaaagggctttgttcaacagccagtcgtggacttcgataaggtcttcgcgcttgttgcctgcattgagtcggtgcggggaggtgtggctggtgcaccacatggacatcaagttcgcattcctcggtgaggaacttgttgaggaggtctatgccaggcagcctctcgtctttcgtcattagcaacgaggacaagataatgcgcctagataaggcactttacggacttcgtcaggcatcacacacgtggaatgccaagcttgacgaaacgctgatggcgctcggcttcagccacaacatgttggagcatgttgcctatgctcatggcaagagtgcttctcgaccactggtgggattctacgtcgacgacctcatcatcatcaggaatgaaaccaactagatcacaaagttcaagcgaaagatgagtgccaggttcaagatggattatttgggctttactctgtttctatcttggtgcgtcagggggacgacgacatcaaattttcctaggcggc

SEQ ID NO: 144044 - DNA, 2301 bp, Zea Mays
ttctttcccaatgtcctccaatctcctgcaaccatctgggtgcacaaaaccttgtgctaaccacagcagaatcagctgctcagcttcaaattcccagtttctgggggaagatgctgcaatatgcaaagcattgtttcagctgtggtggtagattgtcatagctcgttcgtagaattggcatgatttcctcccatactgcatttctctgcaagacttgtttccactcatctacactgttgttacgtttcaggtgtccagctaccacctttgcggcaagaggaaggccactgagtgtctcagcaattttccttccaatgttctccagttttgagtcgatggtatgttttgtctcatcaaacacataagtctttatcagggaccaacaatcattaacttgcaaggtctccagattaattatagaggatgattgtagcatctctgctactatacttgaccgagttgtcaaaagtatcttgctcccctttgctccgtccttcagaggggctagcagcttctgccagttctcttgttctattgctattgttttgttgtcactgttccaaacgtcatctaaggcaaggaggaaacgttttgaagcaagccttgccttcaaggcgacttgaagtctattgaaatttgctatgccaccatgcctaaaccgactgctggaagctgactccagcatttcttttgtgattctcaactcgtccaagagagaagtaacacaaatccacatcctcacatcaaagctctctgttattctagcgttgctgtacacatgctgtgctagagcagtcttacctatgccacctacaccaacaaacaatagagacaacagaaactgggttctcgacctgagaacttatcagagcagttaccagctgttgggcttcgaagtcccgcccggtgattctcccgtagggtattgagcttgtcatggcgttgcgattgctgcttccgatgttcctgggtagactgagtacttcacttactccacttgtaacctgctcaatacgctccaacagatttaccatcttattctttacccttgctgatctatcccaacatggttcaaggctagaagcagcgacaccttggctgtgaaaccgggagagcatgaaggcactgattgggctactgctctcgtttgcacttgattcttctacctcatggtggagacggttgtactcaagcttgtctaggaggtcctctgcatcatacataacatctcggagctctcgcatccatggaagggagctgtaggagagtgcgggtaccagctcggcaccatggagaactgactgcgtgcgaagcaaagcaacacgaagcctgtccagctcatgctcgatgccacagtcggccgcccattgccggagctggtaggacaagtatttgtcgaagataacctggatgaaccagccacctatagccaagtaactggagatatccatattgccaattactgagattgatatcctttcttaagacctatagtctctcatatactggtggacaccaggtcaaagtcttccaagtctttgaaggatcttctgcaccatatgttaatggggctacctttagttttgaaagggacacatttgtcagctttattcatatgctggttcctttatgaaccttaatgcacccttttcaactgacccacattacctgtggttagagacttaaatttctaatcctagactttgtttggatctcaggtaaggagcctctgatacacagaaagcatggagcatctgacatcctttggctggattcgtggagtacagtttgtaggagttttggtatgaagaataagtctagatgttttgggtcgagtttcttcgcatcagtttacaggagattccaatcctctctgggttagctaggcccatttggggccactcgtcattttgttgtcagagatcctgctgcctttgttttatccaaatacacatgcagggctggtttagatattggagagcgcgcagtattggttgtcttcagttttgaaactttgatcgctaaaaatggtagaggggtgattgggtgaaaacgagctgatgcgaacggacaacctatatcctatccttgtgtatttcaattggatttgagttaggatacggatagttagaaacctgacaaatatgaatacaaggatcagatatatacaaatattatttggccggacatatgcagatattagatacttgtataataatgtatgaattgctcatcatttaatataatccggttcgagtataaaatagttacacgagcattgcataatgcatagatcaacag

SEQ ID NO: 144045 - DNA, 481 bp, Zea Mays
cggtttcacagttgaatcggccagagttttcttccaaaagtgtttgagtatctgtcagctccttgctcaatttcttattttgagcttgcacttcggcaagcgatccttcagctgaatgcagcaaatcatccttttcctttagagaatcttcaagttttttattttatcttccaaacccttgacaataactttgttctttctttcttcatcatcttgttgcatttttaaagctttacttagtaacaaactctataaaaatgaattaaaaattagaatacctaagtcaacacaaagatatcggtggtaacttgcaaaaaggatcttactttgaagttcgagtaaaataagcttcctatgatgtgttggcgtctgtaaaacggatgtctttctcaagcttcggaaaaccaatactcttggatagggtgcttataatttcagcactgacgctgtcgtggatgcatcccacaacttcttcatcgaa

SEQ ID NO: 144046 - DNA, 320 bp, Zea Mays
atttgttgtgttggtctggtgcgcatgtagtcggtctttgtgcggacagtttggtgtagtcgttttcgcacttgttaagcttcgttcggctgtacccttaagcaattgttgcacggatagtctttgcggaagacttcgattcgtcgtacttgttgcgctatccctgctgcacccttaggcgacttctgcacggatagtcttcgcggaaggctacgatttttcgcacttattgtgctagtccggctgcacccctaggcgactttttgcacggatagtcgcacgcgagggtggctagcgctgagcctcgcggtgactttgtt

SEQ ID NO: 144047 - DNA, 1132 bp, Zea Mays
tggcaggcggtccctgctctgaaccttttataccccgtctctctttttcgtcaaaacatttgaaattttaactgcgaacaaaggacagaatgagtctttgatgaatgtgtgcaaggatactgggcacagcaaaagtgaatcgaaggaaagagagaggggagagatgcactcagcccaattattatagacatacaagatattctatactaaattcccggtaggcgcggtagccaatgtttggccagttttgtgcttgtccatttcgtctaattctgggcaagcctgccggcctgaatcccggaataattgggcatagcaattcccatccacgggcaggcaaaaacacaacacccctcgatcgctgaaggcaaccttgtactactactacccccccacagcaaccgtgtctcgtatggctcttccgttccgggccaatcaatcgacgcacacaggctcgccaataaaatatctccaactcttcgctccaccggatcatgtgagcacacaccaccacccaccatgcacggtccggtccctttcttgaatccctgcttgtcttgatgagcagagcagggcggggccggctcagctgcgcctgaagctgaagaggattcgaggtgcggtggctggctggctggtggctggcgagctcgaccaggacagagcgaggcgctagcgccagtggcccagcgctgaggtggtcctaggtttagatagcagcagggttggagtggagatctcccgcccgacaacaagatcagacccgtatttatgctttgagaggaacaccaccgaaaagcctaccccctccatccctatctgcattaacatcttcacaccggccgcccctcccttcgttcagttgtcagcatgcaaacctcagctcctcctcctccgcccggacccctctctcagtctcagcaagtgcagtggccggtgttgtgtgttttccagcagacgatggaataatccctcgctcggcagcacctgtcgtctgtcagtcgcgatggtgtgtgtttatcatctgaggaaactagtttgtattattgagagagggtgttctgagcgatagtgtcgtacatcccacgacacgtctctctcatggttttctactacgacagtctcttttctc

SEQ ID NO: 144048 - DNA, 603 bp, Zea Mays
agtggggaaggtgaccttaggcctctgggtgttgtcagtgaagactatctctatcaactccattgaggtggagttggatcgggtgttcttttcgaaagccatcgtgggattggtctttgtaatgaatacagtgggcgctaaatgttgggttctgacacgtggacccaaacactcgggagcaggtgagacaacggtgctcaacaaaataggaagctagggtgctcaatgtcttgtcaatcgtgtctcatctaggagttggatgtagttatttatagtgcaaccaatgggctagcctaaagtacgttcgtgcccttggatacctgctacatcctcagaatataatgtacaacagagtaaatacgaaacaatgctgacctagatctaattacaccaagagttgtacccgcaggagaggctgacagatgggccaactttacatgtagagggcccacagggtccccactgtctatacgtagtcttctagtgtcaagtcatgaaggcctttgcctcatggtcttcgatgtcgcctcattgactcgtcttctgatatggcgccgaggtggaacaattgccctttgcttcgcttgggctctcgctctggcc

SEQ ID NO: 144049 - DNA, 413 bp, Zea Mays
tctaagtaacacatggcaagtataggaacaaggagatattattcatgacacgcttgcacagttatgttccatatccagctacgcaacaaatttcttgatgttaatgttatcaaagtagaattagacggaaacaacaaagatggtacaatagtctctggacacaaggtacttctgaaacctaaaaagtgaaaaatcataacgtttcctcccatataaatatgtaagtttctgttttcagtatcctatagtcctgataggatctggtactactgcagacaacaatcaagcagttaccggctgaatgctagcatatgaacaaaactaaatattcgctttcaatgtaagcacatcttgaaatgatggatatgggaccagaagactggatcacgctattcagtgcccatagagatgca

SEQ ID NO: 144050 - DNA, 335 bp, Zea Mays
cttgaactgaatgttctcgaattcttgcagcagcttctgtgcatgtgattctttgatgcgatctgcaccctgccgcatactcttgactgcatcccaggcctccttcactgtcttctttgcccccagcgtcgtccacatctccttcggcactgaacgcagaagtgcgctcattgccagacgatcctaggtgcgcttcactcctacgccgccctgctcgatgatgtcccagacgtccattgcctccagattgcactgcatcaacatagcccactcgaaataattagaccgatcgagcatcggccacattaatgacccaaccggtacgacggtcttca

SEQ ID NO: 144051 - DNA, 529 bp, Zea Mays
ccctgccacatctgaggatcccacatgggtggggggaaagactggttacctgaattggggctggcaccagtaggtcgaaaaggtgtgtttgagttgttgtcagccattctggaatgaaatacaggaatacattaatttggacaacacagaacagacttgaactgtaaagtatgaactgtaatgcattgcacataaaggttaatagcaaaggaacacaatgacgacgcattggacaaaaaggttcatacgaaaccaacgtaatgattaagcattgcacataagactcatagacaaggaacacataaggatgaaccattgcacataaggttcatacaaagtaaacataaggtaggagcattcgtacatcggtcacccatgcatcacatacataagacacaagtccttatttcatttcgatgccttactaccagtaacaccgtagtctacgtaccacaattacaggttccaaatgctatacctagtggacctgtcggagtcgtaggagtcattgtcactggcctcatacagt

SEQ ID NO: 144052 - DNA, 827 bp, Zea Mays
catgttcgattcctttataaaatgctacctgaaataaagtgcagaaggcatagtatggagactatttgaaaagcacagtagccaaatatggtaatatctatagcaaagcttcaatatatgttgagatgaattgtgcatgaaacttatttggtgcattttatcttcttgggctactaccgccataacaaaaacaactgaaggaatatgaattccttattgcacattcttaatgtatatgtggaggccacccacctagtcttgaacctgggcagttcatgtgagtatgtggctaaagggttcatgactcccctctcttaagataaaactatgagatgtctattgtcttctccctgtggtcattttttggtgtaggtgtatcaactgtaatgataacttttcagtactagtttatgtgtattttgtttgcctctatcaatctaattctgcatcttttcaactaaagtcaattttatttgtgctccttaattcatcactttttggtatttgcttcgttgaaatgaatataagtgagcaatatcactggatgcagtcgcatcattgatactccagtatacctatatttcatcaaatattcaaatgctcttgcagatcctgaacctagcatcgaacaagtctgagattgaaaggaaggtccatcattctattggcaattatgcagagagagggctacgatcgcttgctgttgcctatcaggtggtaaccaactagtatactatggcatgcttgtctatatacaagcaaaaccttactaaatttattcatcgtaaaggaagtacctgaagggactaaggaaagttctggtgggc

SEQ ID NO: 144053 - DNA, 341 bp, Zea Mays
ggcggagggaattggcaagagccagatctgaagccaatatatagaagatttgtcattaatccttagcctaatccttatcatatttcgcttatatttaactgcttgtatatattgtaggctaaagcagctgccaagaaagccaaagctatgaagaaatcttaaaggctaccaggaagcgaagcaccttcagctccgtgaacaaaaacttctgctaatattgtaacagaaccttttaattgcagttctaacatgagtctgtaattaaacatttgatgaaacaatgaccaaatgttgttgaatgtgtaaatattaatatgacttgtgtgagcaatacttttgcc

SEQ ID NO: 144054 - DNA, 535 bp, Zea Mays
aaaatagctttgcttccttgtatcattagccatttggccaataaactacaactacgctcatgaccatgttgttaactaacatgtacgcctacacaggcatgatcaccggacattaactcaagtgatggaggtgttctagctgctgtgcatggcagacctaggcctgcattcatgctcttcatggcgcgcgccccatcttctgcatgccctgggtcaacatcatggccaccagtaccatcatcctgggcataaatggttcagagaactggtaaaaccaaaacacttaaatgccaaaccagtaaaaccagcgaattagctgagcaaaagtattataatgcaacgtgggttctcaggctggcagcagtctcatttcctgaacgagcactgcttcaaatgctaaaggccagctcaggatcatgccacaattatcttctgagctactgcacagatagactagatgtcatcttcaagggttgctttcttcttgagattgtacttatttgattctcttttgtagctttgtaccatcagccac

SEQ ID NO: 144055 - DNA, 315 bp, Zea Mays
atgttggttcagcactctatcaaggcccttcacaggaagaagatcgctagcctgtttctaaagctagatattacaaaagcttttgactcagtgtcctgggcctttctcttagaagtgttatctcatcttggcttcgggcccaggtggtgcggccttgtgtccaatatgttatccacttcttccacacaagtgttattgaacggaactccgggcgattatattcgacaccggagggggctgcgccaaggcgaccccttatctcctatgcttttcataatcgtgatggatgtgcttagtagcttattcaagcatgct

SEQ ID NO: 144056 - DNA, 495 bp, Zea Mays
gggccagggagggagcccgaggaggaagaagaagacccggagtcacctttcttgtacaagtattttccaggtccacccaccctgtcctccatgggaacaaaagaaaaagaaaaaaaaaagagagaggggaatacagcacacgggaactccttggccgtctatatatactccaactctccaggcaaggttagcaagcagctcatattcctactagctagcttccttccaagttccatccatatccacatcgcaagctgaggttttgcctggtagcttccctgccaagtgcaagaccgccaaccacgtccggctgcttgaaacccacggacgatcgaggctacaaccgtgcgtgtggagcgcgacgtacgctgctcagctggtgagtctgaaatccaaggtatagcagtgggtaggaggagcatgcagacaaggccgtttctgttttcgcgggtctggttctagttctagttctacagggaatccgcacggcgaccc

SEQ ID NO: 144057 - DNA, 354 bp, Zea Mays
gaggaatctgagttgactaaggatggtggtaggaaggaaatagcaccgaggtcagatgtatggcaacatttcgttaagataaaagatgataaagacattgttaggcatgctaagtgcaaatattgccatagaaacatgaaggcagaggctggacgccatggcacatcttcattgaagaggcatttggttgcttgcaaacgcaatccaaataaatttaacaaagatccatctcaaggtactctacaagcaactcaacatgaaggtgttagcacgtggaggtttgatcaagacacactaagggttgcttttgccgagatggtaatagaggatgagttgccattttgctttggtgag

SEQ ID NO: 144058 - DNA, 412 bp, Zea Mays
cacaaatcaaacaaccctagttcctggcgtcgaggatgcaaattcatcatctgatgatcatgtcgaagccactttaggtgggcgtgaaaatagcacacctgacccatgctcaaatgcgactgggaaacgtaaggtgcgtcatgattctccaaaaccaaagaagaaaaaagatacgagggaagagtacatgaaacgcctagtcgaggcttttgagtcgcgttcaatgaccactaacaagtccatcacctctgctgagaccgaccctgtccgtgttgaggttaatgcgcagttgcaacaagtgatcgatgatggtgcagctgaaggcagcaacctacatttgtttgccactcatctgttgattgagaaaaagtttagagatgtatttgcaacattgaagaccaaagaaggaagg

SEQ ID NO: 144059 - DNA, 505 bp, Zea Mays
caagccttcaatagcgatctcatttttctgtcttcgtcatcctgctgcattttcatggccttgctcagcaacagactctgaaagaaaaattaaagttagaatctcattattgaaatacttaaatcggcatgatgaaataaaagatagcaaaggaactttactttaaagtttgagcaaaataagctgccaataatgtttcgtcttctatagcaactgatgtccttctccaatttcaggaatctgatgctcttcgataaagtggttatgattttagctccggtgtagtcgtgaatacatcctaaaatctcttcgtcgatgctgccaaaaagcatggatccgagctgataaccgcaagatatggcaaattccttcagctccgatatatcctcttcgtaaagttgttggccacccaggtgccaaaggtcgaaatttgtatcttctgaagaggtctcttcaattccttttcccttatcaatagccgcttcggctgcgtctttctcacgag

SEQ ID NO: 144060 - DNA, 891 bp, Zea Mays
ggcctactatctcttttgatccgcacaacccaaactgcacaacggcgccgaccggtgggtccctttcgtcagtcacgcccgcttgttctcgcgctccaccgctcctgagcgacttacacctgggacccgcggccagtgttaccccgcgtgcaaactggtgtcacggacgggtcagcttccatctgcgtggccaacttacaggcggggcccgctgtcaggttcatcctcaacaccggaagcttcggaacaaactcgcgcgcggaaatcctggtgtcgaccgagtctaccgcgtcggggtgataaaaccttcccctgggttctccacggtccctcatgcgcggaatcgtgaaccttgtgaccctccctgctaccttctcgcgtgattatcgcccccagaacccctgtcgtcttcgtgttcctcgccgccgccgcgggcatcggctgaccgctcgaattggaccctaatcggggcaccgagagatcgtgcgggtctcggtgaagccgttcgtaggcgcaatcggccggtggtgaccggagaccgtgtgaatccctcgccggagttggcaatgcgccgtgcgccgcgggcaacttcattgtgctcccctcttcggtgagtaaaccctacatcatgttcacttgtgtccccggatcatgtagcacccttcgaattagaacttggcgcgttgttcacagagtttgcggtcgccggcaatggcgtcgcgggggtccgactgccgctgccggtacggctccaagcgccgccgtgctccgcgttagagaattggggagaagcgccctgaccgtcgatcagggaacacacggctaggattagttttgggcgtaccgattcgctaggatggatcggggtcgtcaatctgtcaatctatggct

SEQ ID NO: 144061 - DNA, 356 bp, Zea Mays
ctcatcatcggtctgcacaaggattgaggaaagactaagagccagtacatcaaagacacatcgatttcgatgattctagatcatcaaggcccccaagatgataagggagttcagacctttcttaacgatcccatgaactttatcataagacccctctcaccagtctaggaaggatgtatgtcctggctcataggtcaaactatgtaacccaaactttctcatcaactaattctagtaaatccttgtaaatacacatgaaaccagcagttggttacgagtttcaggctcctggtcgcacaatggacatctgttaagatgactcagccccctcttggtcagtctaccatcagtccagc

SEQ ID NO: 144062 - DNA, 358 bp, Zea Mays
tgagagtatggtgtacccattcacattttttgcttttctttatatttttctagcttcaacagggtccgtgtgaaaccaacccactatcaattgttgttgtctgctactacttaagttgtctccctaaaatgaaagaagtatcgactttgacttagaatgcatgaaggcgtaaaaagaaaattcaacaaatcctgactgtagcacacattcacgccaaaggccttaaactgctttaggttttagcccatttccaagtgtacgaatggtgttgttgatcctgaagtaaaattgatggtcttttcgtgttgttttttcacaaattctggacagtaggtatgattcatttttatcactgtaa

SEQ ID NO: 144063 - DNA, 429 bp, Zea Mays
gatgatgttgctaaagctacaaaagctaaaactgagaacaacaagaatattaaagttgttggtaataacaaagatgggataaaattgaaaggacattgcttgcttgcaacaaaatttgatgctaatgaattatttgcttccacttctgttgcctacgctttggtatgcaaggatgctttgatttcaattcaagatatgcagcattctttgcctcctgttgttgctaacattttgcaggagtattctgatgtatttccaagtgagataccagaggggctgccacctatatgagggattgagcaccaaattgatcttattcctggtgcatctttgccaaaccgtgcgccatataggacaaatccggaggaaacaaaagaaattcagcgacaagtgcaagaactactcgacaaagttacgtgcgtgagtctc

SEQ ID NO: 144064 - DNA, 332 bp, Zea Mays
ctttagtcctcaacaagctaggacttttgttttagaacgtcgcagaagatctgtgagtcaattcattaagaaatgagacaaacagaaatggagcgactgaagagttagcaccgggtacaaagaaggccagaaatgtgcatgcccatcaacagcccccaaaacagccactttacagaaacacacacctacacaggccacacagctatcagcgacccaaattataccctaagagcgggttggagagtgaggagctcctgaagagcagaggcacccgcagcacaccaaagggtacattcattggccacaacctgcaaaacagtatgaacaccagg

SEQ ID NO: 144065 - DNA, 403 bp, Zea Mays
ctgttgtctgcataacttttctagcgactctgagcttcaagtaacctcttgcggatcagggcaaccttctcttcggcctctttaataaagtcgggtccttccagtgtcctttcccctacattggaccacattaggggggtctggcactttcgtccatacaatgcttcgaacggtgacatcttgatactggcctgatggctgttgttatatgagaattcggcatacggcaaactggactcccaatttctatcgaacgtcaacacacaggctcttagtaaatcttcgaggaccttgttgaccctctccgtttgaccatctgactgagggtgataggcggtgctgaaatctaacttggtgcccatagcttgctgaaggctcttccaaaattttgaggtgaactgcg

SEQ ID NO: 144066 - DNA, 362 bp, Zea Mays
gcggaacagagccgcgacgtgagctgtacccagagccacaccgccgtgagggcaacacggagggtcagaggtgtcgtagcataagctgtgaagtcgagtcgacgactcgtgaaaaccaaagagctggcgaatctggctggcagtaatagtgacatcctctcgctcaaaacgaaacctcatccagtgatgatctgggtctatccatacagatgcgtagaaaactcggacccactcctcaacatacctgccgctggtagtcaaaagagtcagaaggccagacagatatgtgaggtgcaccttagagtcagcaccggcggctagcagaaaagctggaaggtccaaaagccggtgcactcgcagag

SEQ ID NO: 144067 - DNA, 386 bp, Zea Mays
gcagggacaacttgccgcgtgaacgaagcatgagaccgtagcgaaatggggagaagtatgccgccgccgacccgcgcctacaccgatgaaccttttcccccttgtggtggccgtgtggattcacaggtgctcactagatgcgtccatgaccgactcgggcggggaaatccaccggggtcaacagaatttcgcaccggagatccagcgctgccgcgtatcctcatctcatcgtggacaaagctcacccctgctcagatatcggtaataaccgtctcaacttgctcacttccgatttggatttgagaatcgggcgtctgggggcgggatggcgtgtcgccggtgatggcgccactgcggcctggccttgggccgccgtccctgttatg

SEQ ID NO: 144068 - DNA, 652 bp, Zea Mays
gcatatgccatcatttttttcaaacatgttattttattcagcactccagttcattacaagcataacaaccattacagattacactacgcatgagatcatcaaggctagccagggacacttcctcaacgtcgaaaaagctctctattcctagggagggtagtgttggtggggcttcttacttcggatcagtctagcatccttggctcttgaaacgctttcagatcttctggacgggggcgagcttcttcagcctcctagcatagtccatcttcagggtccggtatgcctcacgagtgttggcttcttcgccttctgccatctcgagactgtcctgaaaagccgccttttcctccttcaattccttgatttgctgctctaggatttccacccgggagtttaggtgggtgcagtgggagaaaaggtcgtcaaagtggttgtcaagggtgtggagatatccggccatgtagattatggtagggtcatctttattaggatctctccctgacaaggcctagagtcttttcctccaagtaggggtatttttgtggctaggtggaaagtagcggaggggtgtttcagagacttccctgctgtagttttggcatagctggcggagggctttttgggcagcattctggtaggtatctaggaa

SEQ ID NO: 144069 - DNA, 753 bp, Zea Mays
cgccgacgagcttctttgtgtggctctccgtcgttggtcgcaaccctcgccactgccctcactcgtcgcacatcgcgctgtggtcacggtcggggctgcccttccgtccggtcgaccggtcgagcatggggcgatcaagcaggactcgaggaggaggtagcggatttatggcgacggatcggggtagcagggccgagtgtgggttgttggcttgttgcgcccgtgggcgtggcaggcggggggtgggggcgggcggagggatcatgagctagagggggagatcgtggagggagtgggcagtttggagggagatcgtgggggattcctttgtgcgggcgtctgggagtgagcgggtgctcctgagatggctgagatcgacgatgaacaggagagcacgggacagagacggtgctagcaggaagagctagagggcgagggctcgctgggtagagaaagcaagggagattgaccctaaagccaagctgggtcagggtaagaagcgtgcggcctcttggtagctacttgtgccgcaccaaagaaacacagcccacgcgacctatgtcatcatcatggcttgcacatttttatgaccataccggccagccaacatagcttctaccggcttataagccttccttctttagagaaagcaatcatggtcaaatgctcctgctagtgtcaaattgaggcaactttttgcgcgagcagacgtgggtccagtgtgtgcaaaactaatggtggctgtcacgtggg

SEQ ID NO: 144070 - DNA, 430 bp, Zea Mays
gcttcttcaaagttgggcttcaactaccaatgtatcaattgattgcaaagattctatagaagtacaggtatatctgcatcagttgatgtcgaatgctatagttcggcttggtgtttttatttgggtcatgcgaagctagggaggtcacatcgaagctgatgcgttctatagggttcacgacttacattatcaaacaaaggccagatccttggataaccttcacaacaacttcagattctacaacttcgcataccacaaagatacaattgctctagttcttgcataccggacgaagtgccatggggattggacacaggaatggttctacactaaagtagactctgagcatcatgagaatttcaagagcatgctgatgaggcatgagtcctattagcttcggtctggagaccgaagtgcgacattaacgaag

SEQ ID NO: 144071 - DNA, 389 bp, Zea Mays
cttcctattttggtgcttggggtgatttgggtggtggatgtttggctgatgcgggtgcggaggcgggagtggggtggtacgacttgcacctcctggtggtgttggtatgcgtggttaggtggatgttgagcggggccatggttgtatggttgtgggaggtgatgttgatatgtgtgcgcgataactcttgggttgtcggctggttgagcccgagacattctgtccctggtgtccttcatttccgggcagtccctcgttgggtgcgtgcagtcttcaccgtgaaacaggcagtaaaatctgcgcggctgatgcgcccgtcctcagccccgatcgcgagtgccattgccgcggccctagggggataatcttgacggcgaggggtctcgccg

SEQ ID NO: 144072 - DNA, 482 bp, Zea Mays
tgcagcaggcctccctgcctgccgcttttggagcgggcgtgagcttgcctgaaagcgcctgatgagctctgacgcgagcgtgcgcgcttatcttgcacgagctaggcgctcgatctccccgcaggagcgcagcgcagcaggggaagcacggtcaagcagacagcctgcctgccatgtcagctactgctacctatgaccattttttcacttggtctaacatatgagtgtatcatattgtccttgtttgttgatgggtttgtgattcaaattctaaaaaaggtgggctatgttggtaggcttgggccggagcgtagcgacatcaactgttcttcggcccatagctcagggtgtgtgtcaggaggatgaagcctccatggtacggatcgttccacatctatatatacttgtaagccgcagcaggctgctacctatgaccattttttcacttggtctaatttaacctatgaccatctcatcttgtc

SEQ ID NO: 144073 - DNA, 573 bp, Zea Mays
ccatattgtgccatgtctcgccgtgctagtgctagtgccatgctatatggtcgggttggctatctatgacgcggagtggcttcctgttctgtgccatctctatcgcgcccgagtcctctagtccacgcctgtgttgaagccgtcttcaccatgccatctccgttgtgtcctctgcgccacaggccacaccatcctgccgcctttatcgcgcgctctcttgccgcctacgtcgtgccacagcaactagcgaggaagacgtcagtgggtagggcaacggggacaaccacattcaccagcgcgtgtctaggcgtctagcaagataggagggaaatgatttgtagcttcggttgtgccctatacctcgagtcaatgagatttcaaggggcttctcgcgtggttcgaggacattttgttggtggagcggtaaaacaaattcagaagtgatccaaacaacggtactcaagagggacaaacttacaccttttttattctgcttaaggcatatacaatcctagatccttaatgggttttccaagtgcaaaacacagctaaaaatcatatattacaaccctg

SEQ ID NO: 144074 - DNA, 358 bp, Zea Mays
agtctctccccaacttaacaaaattgattgataaggtcaagttggtggtgcagctgttagacttcattgaggagagcagagacttaaccattctagaatggaacttcaaagaaatccttcttcttcatttacaagatcttttagctaagcaacaaatttattggaaacaaagatgtcaaatcaaatgggccacccttggtgatgccggcactaaattctttcacgccaatgccactgtcaagcacagacatagccttatttcttctcttaaagatgataatggaaatatggctctctctcataatgaaaaagaagttgtgctttttaatgccttcaagaaccgtttggggacttctca

SEQ ID NO: 144075 - DNA, 827 bp, Zea Mays
ataaacatgaccgtctttttatggagtttgtagcaactagagagtttgctcatgcttgcacttgtaaagaactaggcaaatgtggatagacgtgtgaatttgaaactgacagagtgcataatttctggtgaccatacagatgatggtggaggcatggatcctgattctttgaggcggtgcatgagctttggattttcagagaaacaatcagggtcttcgattggacaatgtattgccaacttttgttttataatctgcaagccatttattctcgcctgagacccatcgtctaacagtttggtatttatcactttggatagacggaaatggattcaagactagcacaatgcggctcggggcagatgctattgttttcagtcgctgctgcaccaggagcaggtaccagtaccatatacctcacttaaatttctttccatttgtgaaccacccttcttttttatcaactgaaataatgccaagttattacttgttttcagtgggcctacacaatccattggtctcctctcttacactttcttggtggaaacaggacatacaaatgttgtagttccaatggtacgccttgtgatttttattttatttatttgtttggcataaggcacagcataagcaccacctcctttatttctggcgataatatattttctcttcttaggttgattataaatgcaatctaatgaatggccaaactcagcggttggagcgtcatggttcgaaacagttcttctcaaatttgtcggcgttgttgaaatggtccccttttgcaacagaagaagagctgatgcagaatgtatgctaaacctgcc

SEQ ID NO: 144076 - DNA, 311 bp, Zea Mays
ggcgaggtgcttggccggatgtaacctttctctgacagcttgtcgatctgcttctcaagctcaaccaactctggtccagatattctgtaagctctcttaaagatggggtcagtgccaggaataagctctatagcaaactcaacttttcgctctggtggcatacctggtaagtcctttaggaacacatctgagaactcagacacaaccttgataatctcaagtggatctgcttcactgctattaacagccatctgataacaacttcctttctttggctcaggcgagactaactcggtcaccacttcctttcc

SEQ ID NO: 144077 - DNA, 2041 bp, Zea Mays
tcgcaggttctgcgtgctccattttatttcctatactttggttaattgttatggtttacttgttacatttgcacttgcttcatacatccatactctgtggtgggatcatggtatactgttggcaggttttccctcttgctactgtgctcgctctctgatcatgtgcttctgttgtgtcggtgccatggtgttgtgtttcttttgtatttgtgtagtcttagctccgaggcagagttacctcagttcccacgtgtggctttttgggagtcagttttcgtgtgttgttgacccctgcaggttactctattcaaagttctgaaagtttagcttattaggatatgcatctacatgtgcgttgaccgcaaacatctagctattgcgtgtaaggggtttctgcaaagagtaaaagggttcgcatataaatttggtggccaatttattatttcttaggctacaaacagcattggcttcggatggtgggtcttctcgaaggtcaaaccaaaacagtttgaatcaatggtttgaattatggttacacagtaagcattagcacaaaacatattcagagattccctgcagtctggtcctcgcatacagtttagttgggtgagaaaaataaatttcatgcttaattgtggttgggacttcttagctccctagagctctttatttatgcttacagacgttcgagttgtgtgctcggaacttagttatctctcttatttatagttgtggttctttgtgctatggaacacctgccttgctacagccccgatgatgttggtgggacccttttgtcaaaatgcgttcctgcatatgcccttcacctctttactgctcttcttttcctagttgtgtctatgtttggttcttcttcgtttatatattctgagattgattttgtgtcctttgcttcctctcatagacccttaccacatactggtgctgccttagtttaacttcctttgcttacctacactttgggaatctttgcttttgatgttggcataagctgaatgtaggcttttgctgttgtataattgtgctttgtctcttttttgccctccttttgttggttctatctgtgttttcttttttacatgtatgtgttcttattgtttatgtatttacttgttcttattatttacaattgttgcttcaggaatttgcaacgtgcttccccttctgcccacgtgctcgctccactgaatacgctgcgtatcaggtatgtcgcaggttctgtgtgctccattttatttcatgtactttggttaattgttatggtttacttgttacgtttgcacttgcttcatacatccatactctgatttatcatgtatgcttctcctttttggccatcttggctttacctccctacttgctgttacctctggtggtattcagaactgattccaatgtgatacctgtgctcttgtcccatacctagacactccatttgcgattctataaactgctgaccaatggaccatgggccatgtcagagtactggtcgctcctctggaaatgagaggaagaggagacctaccacctctggtttgttcctttggccacgtttttgtttctatttactgacttgcgctgtttctgggtcccctgctcgttgctcaatctgtttgcaagatgatgaccttgtttcttaaccaatggttgccacagacatacttgtattatctccatcgaacatgaccactcagacatccttgcttaaccaacaatgcatccctatttggccgacgtttccactaagacctcgtacgtatcatgtacatctattgggattatgatgcatcacacgctcattcttatgttctcctcttcgttgtgacctggtaaaacatagatgctagatcgttgttgcatttccctagagaggcttccacctccaatagacaccgtcgaattgaagtgagaaggcggacacgagcttgtacaacacaggctccatgctcgactctacccgctcctgctgttcctctaaaggactcctacattgctcgcttgaaaggtcccctgctaggcg

SEQ ID NO: 144078 - DNA, 308 bp, Zea Mays
tatcagctctgggttgcgttgtgtcagcttcggcaaccttccctttgggagtgagacttatggagtcggttgtttccagtacatctaatacatttaccatcctccttctcctaggagttatggcagaacttttttgtgccctcaacgttgttgcttctgttgaaggacttaaagtccctggtatctttgttacctcttcagttgttgacctttcagccttatctttgtcaaccttcgtttcaactagctcaaccgaaggtgccttcgacattttagccggttcttcagccctctgcatcggaagagca

SEQ ID NO: 144079 - DNA, 312 bp, Zea Mays
cagtgcctcatcctcgggttcaccataccatccaaagagatcatccagtggacaacattcttggtagcatcaaaagaggggtaacaactagatcccgtttagcaaatttttgtgaattttactcgtttatttcctctcttcagccacttaaggttgaagaagcgctgggtgatccggattggataattgcaatgcaagaggagttaaataacttcacccaaaatgaagtccggtctttagttgaaagacctaagcaaaatgtgattggaaccaaatgggtctttagaaataaaaaagatgagcatggtgttg

SEQ ID NO: 144080 - DNA, 419 bp, Zea Mays
ataaccgactaaagataacctcggaacacacatcaatttgacacgaacgcactgagaacggcctgtccatgtgcacggcggaaaccgtgaccacgggcacgcgttcccgcttaatcagggctagattgagcaatcggtcgccaccgtgagcttcgcaagcatgcagaggcatgaaaacaacgcatggattggccagtgacttaccagagcaagccggccacggagcgcagagctttgggttcgccggagacagagaaaggggaaaacggtgtcgcggcagctctgggcaaaattgggagatgggatcggggctatagggccataagaggctatgctttcaccgtgcgcaatcgatttgggagaaggtggagagggcagtgcgaattcgacttcgaattagtcactgtgttcgcgatgat

SEQ ID NO: 144081 - DNA, 489 bp, Zea Mays
gacgtgttgggcactggttccacgtctgacttgaaattgcttgtttgccgaggagggggtggaggtagtggcaaagctgtgcgcgagaaggacctcaaattgactgatgcatcgaacttccgagtatctctgcgcgtggcgcccacctcttcctgcaattgggccaaaacaaaggcagaatccaatgtgcgaggacgttgaactaatacaacacttttaatgtcatcacggagaccatcgataaatctcattgtatagtatagtgggtcggaaatggtgctgtaagctttgagttggtcaactaattgggaaaactgctcgacataaacagcgacagtggttgtttgtttgatatgaaagagttggcgaatgaggatttcatgctgatcgcgaccgaaacgctccctaatcagacccccaaaatcaacccaggaaatatgtggcaattgtggttctacagattgaagccaacgggctgcaggtcctgag

SEQ ID NO: 144082 - DNA, 456 bp, Zea Mays
ggcctttggcatgaatgtgtgctacactcaggatttgttcaattttctttttaccccttcatgcattctaagtcaatgtcgatacttctttcattttagggagacaacttaagcagtagcagacaacaaaaattgatagtgggttggtttcacacggaccctgttgaaagctagaaaaatgtaagggaaagcaaaaaatgtgaatgggtacatcatattctcagtgaataggatcaaacagaaagaccttgatatcaatttttagttgctggagtcaggggtgctttcattttttggtgctcagacaccatctcttaatcagaacataatcaccaaatggatacacaaaagattttgagaagttcgagcacaaaaaattagttccaacaagcagcccaatatataaatatgctcaaatagcaaagttaggagcatacatacttcttccaattggtc

SEQ ID NO: 144083 - DNA, 457 bp, Zea Mays
aaaacataaaaacccaggggtctcggtgcaattctgtctaagactcagagttatccgcgctggaccgcgggttcatttctaaaaatagtagggtctctttagtaagaataccaggccgaaaaggtatggtgccattctggccgtcagatctaaatccagaggccaggattagaacctgccgcggatgaaccggtacgaacccgtggccatcggatccaaatccaacggtggcggcctttaaagaggtgggacggttctggtccgcccgatcccaaatcaacgctccagatcactatcccccgaaccggtacgcgaagtctcatcagagccgtcgctgatcggatcgacggtcgaggaccaatacataccagatctaatcttaggcgaccctttcccatccaacggctatcggctcttcttccttaactgagctgaccacggcgcgccgtaccccgga

SEQ ID NO: 144084 - DNA, 481 bp, Zea Mays
tagcgcgcggcggcatcggcgccggggcgatcggacatcggagctagctcgcatgctttgggaatacacaaagagagctatagctggtcgaacaagtggacgggataggagatgctggtgcctttttatcggccggccccgatagcgacgcattctaggatgtttatttgggtggacagcagttgtgtgcttaattgcgctaggggtggtgcggtgcatcttcttgggggagaagtgaagcaaaaggactgtgcgacacgccgcatcatcttggccgtctgccgacgtcattctctgggcccacattttctctcgacgataatggggtctcttgatcagtcaggtgaatatatgtagtagcttctgattaactatagacatttgctgttaaacaaaaggtgcaacgacggctgtgagcaggcatatatatacagtgagccagtgtgtcagtctctgtaaattaacaaaaggcggcggcgaa

SEQ ID NO: 144085 - DNA, 878 bp, Zea Mays
gaaccgagatggggtgggtctagctggtctactgaagctgggtcccttgggtggaaatccaaaggatcgagttttctggtgccgatcttgctgctgagcccggaggacttgaaattttctcttgagatggcctttttttcctcctttgccctttccacttgcatggccttgttggagaggtgagagaaactgaggaagtcttggctagccaggatggttttgagttctggactgagtcccttcaggaagcgggccatcttcttgacttcggtattgacgtcatctggcgcgtagcgggctaactccgtgaacttgtgcacatattcactgacagatcttctgtcttgagtcagttcccggaactcgtcttccttgagctgaatgagcccttggggcacatggtgctcccggaaagccgtttcaaattccgcccaggtagcatctctgatggtgacgttgaaggtatcccaccaggctaaggccatcccggaaagttgatgggcagctagttgaacacgctgattttctggacatccgatggcttccagctttcttttaatcgtgcgcatccaatcgtctgcatcgagggggttgctagatccgacaaacgtgggaggcttgagcctcaggaaatcccccattctgtcttgcggtcttccaccattcggacgctgattttccagacttcgagtgaggacctcgatgagtcgggtttgattggctagaatttgggctagatctaagggtagttctggaggtgcggggaggtgggtttcactttcctctctatcggcttccctttcagctctcaggggaacactgctccaatcccggaggcggtaggcgtggttttatccaaagccatctgccaggggaat

SEQ ID NO: 144086 - DNA, 567 bp, Zea Mays
atttttatatggtttcttaaattgtattaccttgtttttgatataccgaagctatcaataacaagatcctaacttatacatccttacttagtttatgcccttcactattccttctacgttatactatcctttcgaagaaaggatggcttaaggaagaaggtttcaatattgtaacttgtgttgccttgtttttgatgtcacaaaacaataaaaaacaagtgagcaacattggcacccacctctggtgaactcacttccatgaccacaacaagcttcgtcatggcaccaaagaagtcagcggcgactagctccatcctcgcatccttggaaatgaactagggagaagaagtgttgcagtaggcatgcaaccaaaagaggaaggcatttagtctgactcagcaagatgaagcgcttgatcaagagatacaaaacctagaggacatccatcaacaagtgaaaaacgcaaaaaagatgttttgcctctcagagttacagaagaagattgatgacacaaccaaagaaatgtgcaacattgtgcaaaccacagagcagccagaacaccagtac

SEQ ID NO: 144087 - DNA, 359 bp, Zea Mays
ctcatatagaaaatcaactacatggtcgtcaacaatttgttgcgcttgtgtccctttctttgcgcagtgcttaagggtggcctgagaagttttgtttttatgcctctctgcaactacttctggagtcttgcaaagcatggcactcattgatttgcttgccttctgggtacttagttttggaggaacggatacaagaaatgaggacatggcagtttgggcaattttcttctttgcttgcttgttttttgtcccagaacttggttcaggaccttcatcattccgctcttctccctcttcaccttcaatattatcagtaatcacaagtctcatgttccttttcagatacatgtgcatttcct

SEQ ID NO: 144088 - DNA, 375 bp, Zea Mays
gtcattgtattgctattttgcaggccatcgactagaacaaagatctttctagagaatcatattgttgattcagaaatttctcttacagccactgttaatttggtgtgtgtttcgtctttatatatgtgcttttggagaaagctgataggctaaattgtttgggttctaggcagtagctagaaagaaacttggaagctgagaaaagctgctgcaatatattgcaagaacttatctcacggcatttcaaactcgctcgcttctttcttttctacatacattcatagtacattgatatgtgatccaatttataaaattttaagcgaaatttcttgtggatggtgaccactaccaagtctggatcgtgagtagtacttg

SEQ ID NO: 144089 - DNA, 394 bp, Zea Mays
agctttaaaatatgtcttaactaatagcaatgaagttttttgtcacgaagcaaaaggaggtcatatatgttttgaagtatgctagtatgatgttgatacatattggggggaatgtatctgccgaaggtcctcaaaattaattaatactgatagtttttcataatttgtctcacgagtaattaacatatgtttgtccaaaaaatgaagaccaacatgtttgccgctgcttcagaagaaatgacaattatgtccccaacaattcttatagatgtatgtataggttttgagactatgatagtaattttacattgagttgtatattgagttgtccatataaataggtgaacagtgctcatgcacagaccgaacatgatttcacggcatgccgcctagc

SEQ ID NO: 144090 - DNA, 316 bp, Zea Mays
tagaggagaatttaatgaggaatttggacaaggtttccaaaaaagaatgtgaggctacacatggtttgcgtgaactgacaaaaaactttttttgacataaacaagtgcacaaggaagctttagttgtcaacccagaccggccgaaaacccactgcacacagaccactaatcgaaagaaaaacgcgaattgaaaaccaaaatgagacggacgcgtgattaaacacaacatcagacaaaatagatgtgcttcggcacgatgcaacacccatgtcaacttaggtttttgtttacacgcgatacggagacaggtcactat

SEQ ID NO: 144091 - DNA, 320 bp, Zea Mays
tcgagccatcaactaacttcccacgacttaggagttccttcgttcttttccaacctccaggtaacttggtttttactgatctggctgtaccccaggcgtgatattgttctgatattcatttgtttttaatgtcaggcgttggttgatgaaatggttggtcagctgaggtcatagggtgcttctgtcccggaaagggctctatctctggcacattggaatctagtgctgcttcagcggcgggtgtctgatttggagatggcaaatgctggttagtgccctttgtttttttctttgattacttgattaattctgttttttaa

SEQ ID NO: 144092 - DNA, 693 bp, Zea Mays
atgcggcttcctgatgatggccctcgtcaacgtggtgcaggtgaagctcgggcgactcgggtgcggcgccggcggggccgccgcctgggccgccgtcgtgccgctcgtcaccctcgtcccttccgccatgctcatctacatcggcaccgtcttctacgccttcacacgctagtcggtggcggatcaaggaacactctgaccaaagcacccgtttttcgatcagatctttatctgtgtgatccctcctcagtctttcttgtgtgtgattggtggtgatggcgtgagagaacttccaggggggaacaatgcagctgacttttgtagatttaagatatgtaaaatccatgcgatattatgattgtgttttggagttttggagcaaagtgaatctgctgtggttttatctgcaattggcctttgtatttgcacttgagaagttggtcagatgtgcctagaatctttaggtccgaagcaatggtgagatggagctcagctgctggttggtctctcaacttgatatgaaacaattgtcccagatctcaactactgactctgtagcaccctcaggtaggtttttcaggtctgagtttgtcatgtactatctgtattgtgagcgtggaaggtcgcagcatccgcatttgtcaagcgaaacttcgtcatttttttttcggtttctccaaatgcacttccccc

SEQ ID NO: 144093 - DNA, 515 bp, Zea Mays
cagacttcaggaggtaattagataaaggaagcttagtcggcattgctggaatatattcaaagcatacaatacagcaaaatgtagtgttcgttctctgagccaatatatcctcttctggcgaagttcaaagtttggcttgaagcaatttatgtccacaagatgcatagcctttcagagagatttcaatgtaaagtttatacacctgcaaggaaaaaagcaaatatttcttcacaggtagattgttcaagcctggtgtttgtggtacctgttttctatcattgctactgcagaatctatttttttcctcggacacacagatgagctacatatctctactactccttaagacgttagtgtagacgtccacaggttaggttggtgcacagttctgccatgccccctcctccgcgattcgcgtctctgccgccatcctcgccctcgccccgctctccatcgaaggaagggtgccattccagggattacaccaccattcttgccctcgcccgctctccggc

SEQ ID NO: 144094 - DNA, 662 bp, Zea Mays
cttctcgtgtccgtcgatgggaggtctggccttatttgccgggcgctgaagattgcgcaggcgccgtcgtccggctttgtcgtggatcagtgcgagctcggaggtggcgaacgcttggacctgtgccacgctgcggatccgcgcaagccatcgtaagtaacttcttaaagcttttcagtattgtgtaggcgtcgtatagctagatgcggctgaggtgttggggcgccaaatccctggttagtcatgggcgttcctggccaccgtgagtacggccttaggaggaagaaacataggggccgttcaatccacatctagcggctacggattgatcagaggacaactcttcacatggctattccggtccatgggatctggatcgggtggctaggagtgagcgtaggtattctagcaaatcaccgtcgtagattgaaaatcgaacgggtcaggtttaacgcaggtgtgtaatggatagtttttattccacgccgtagatcaaggatcctgcggccagcatcactggataccctttcggctctgggatcttactaaagagtccctggacaatttaataataaacccgctgtccattgtcactatgcactgtgtctctggatttttaccccgagccccctgctgttctcagattttgaggaccagtccag

SEQ ID NO: 144095 - DNA, 479 bp, Zea Mays
agcccatgtcgagctttacgcatcgagagagcaccaccatcgcagggaaggagagatagtaccgcaacacgaattttgggatcccatcatcggtctagctttgaccaggatcctcgaagagctgttaaaatggcactgtggcactggcagatgtgggggtcgactaaagcaacgtctatggttcgccagagatggtagtccgccgccaagccgctgatctccgtagacggtcaaccccgacatgctaatccccggtaatattactctaatttgattcaccactctcggggcatcgagtcgtagctttggattaaatgaacatgccttggggcactgaatcggtcatctccagtgatgatgccgccgagggaacttaacatcgtcacgcgtatcatggggaggatgaagatgagatgtgtgccattgatcgcttgttggacggtggagattagatctccagttatcgcattgaagctggg

SEQ ID NO: 144096 - DNA, 419 bp, Zea Mays
tcccacacgtcaggtagggagcgtcttcaacatcgtattcctctgctacggctgatgttccatcgtagcgttcgcctgcatcatccgttcgtggccgccccgccgcccgctcaacttccacttggtggagcagccgccgtgctggctgtccgtctcccgcgttgcatttactgcttcgtgcgtaattaatggtggttggcgcaaccgttctttctcccgacgtcctctcctcttcttgccctcccctcccaggcatttctctctatttcctcgatgccactaatgtttgtctcgtccgttctctacacaataaagcaagggttcaatttgcaatttaatttgtgattaatttgatcctaatccacctcatctcctcttcaatataagacgcagtacccctcccatttcctcctgctgca

SEQ ID NO: 144097 - DNA, 422 bp, Zea Mays
tgacctatccttcccatgtagcataacactattactgaattgacctcgacgttcactcccctcaatccaaattgcagctacctccgaagtaatgggtgaattatataacttctggttcagcgtttgatcaaggttcaaggcgatgtggtagtcttcaatgttatcaacgtgccccatactcctaaggtgctcagagtatggatttcccttaagtatttcaaccaattgtttaataactaccttgtctttctcaaattgttgttgacgacatttacgatatctatgctcgaggctgggatcatcatcgtagaagtagagttcaaggtgtttatgttccgccccaacttccctaccgaacgaccttacgttgtggtacatcatgccatgtgcacgaaacgtatagataccacaatccatgtttg

SEQ ID NO: 144098 - DNA, 753 bp, Zea Mays
gtgcggatcgcacatcaccgtcagggcccttcggcgattgtcctctctgttgtggggtgggtcgtcggtgacgggtgctcgcgctcccagtgtttgaagccgtgcgtggtgaagcgggttttgcaacgtgggccttagcgataccttgccgatgtcgagttccgccgtggatcggcctccacagcggtcaggttagagcgccgccggactcactgtatgggctactccctgtagatccaccttcgtcaagcatcgcgttgcatcatagtgcactgggtgggttgcgtcagggccggcgaagcttctcaccagtcgccaatggggtcgtcgtagtccgtccgttgggaggtagatgataaggttcgcgaacctcagattttgaggcaacggtggagattaggtctggggaacgctcggccagggagtgttgttggccgttggatctcgatctaatggctaacacggagtaccagttggctttggttctcagtcgtcggatacgaaatgtgcgggtgagattagatcttgtgttttaaaatcacggccgtcgatcaccgatcggagggcccgtagcgcgtaccggttcgataaagtgaggattttatctgggcccttggtttctaatgcaacggctcagagagaaacataccccttcgtggctacaaatttccatataaaccccatgggaattataataccaacccgccgtcctcgcagaatacctctgagtcttagaaaacttgcgcagagacc

SEQ ID NO: 144099 - DNA, 966 bp, Zea Mays
tgctcttcatggactaccaaggttgcacattattcttaaaaaaaatgacacgtgaaccaaatatgctagtctttccttaattctataaccagacggtgatagatcaaactgaaataggccatacttacaccagcagtttggtactatttactacaagaaataagaaaattatatagattctgctttcaggttgcatgaaccaatagaagcacgttcaataaggtgacgatccatttaatcaatactaacaaacaagtgaatcctcaagtccagaactgttatgcgtcctcttgctcacactattgatgtaactaagctaggaaggaatgctcattgtgctacatgagactatggaaaaagagtttgatcaagttctatacattttttgacctgacggtatcctacaagtgataaatcacgcattgctgaagttcggtttgagtttaccatgaactacaaccccaaacctcagtgacgaagagcagaggaaaaggtcaagaatcgtatgaaattcccaacgagtacaaatccaaacaaaaatgatcgagctaaccccacgaagccacacagaaaaacgaagaaacttagcctcaaactaggaaagaccgaataaatagtcctaaatctacatgtccagcgatccattccaggtcaaaagattcaaaaaccagaaggcgcccccagcaaaaccgaaagatggcgagtcaatgatctccaacaacccacaaatatcagctcgatcaaaccatccaacactccatccgaagcctaaaccgcgatcagaaagtgaaatcgcaaagatgcagtagcgtaactcatcccgattcgcgcgtcgaccccggctaaagcagtgcccccagccgccgcaagaaagcaaaacccaccgaatctcaatagctagcacaaaccctaacccaaccaactcaagctaacccccgatccgtgtcccgccgccaaagcccccgc

SEQ ID NO: 144100 - DNA, 460 bp, Zea Mays
agacaataacaatatcatatactctgcctttttcctgtggcgcatcgcatcacagacatcatacacttttatttgccaccacatatctcagcgaatgtctggacgaaaatatggtcttctttagcataacatactttgggttttcatgggcacatcaaaaagctcttgccatttcctataatgttgcagaagttgcaagttgcaacaaaaacaatagacaaagccttttagtgccattgtgaaaagctacagttgaaacccaaaagaagccttaaggttttgttttacattcgctcatattcaaggcaggctaaatctttggctgcctcctcccatgtcaacttcagccttccactgcctctctttccattactacccggtcttacttctcaggataccaaatacccgacaaaccaactggcaattacattattatgaatgggattacatgccataggca

SEQ ID NO: 144101 - DNA, 512 bp, Zea Mays
gtgcgaccccgtccatgccggcggcgacagcggcgggaggtccggctgctctgctgcgtggatcgtacgttggagccttggagggctggtggagctcgggggcgaagccggcggcccgaggaacctcgggtgcttcggacgggcgcggaggaaccgggaacgggctgggtggagtggataaaaccggaagcaccggcggtgggaccgtgggaggaagaggaggttggggcttgggggtcggtgagggcttcctagatatcgcgcaaaaaatccgataagcatcgaagcaaacaaatattccgataaaacgccaggtgtttactccagccttgtacatacaacgagatctaacgtccttgtgaatttcaaaatgaaaatgaaaatgctgtgaatttcatcgacaactccaagagcgaggattcgctgcctccatcgtcaattcatacagagcaatagcaccaccattgtggcagccaggcattcgctgcctcgttccttgcagcggctcttcc

SEQ ID NO: 144102 - DNA, 624 bp, Zea Mays
ggccaccatctccggccaccatctccggcgacctcgtctctctccttccctctctcggtgagcaggtcttccccctgtctcctgttcttctccctctcagttccctgtgttgagtttgcctcttctccaccccttctcacacctcttccaaatctgtgaattcctgtgaaatctggagatttcttgttgtggaatgtgttcctttgtatgccttaaactccattgcaggtttctagctccttcgggagggcattcccacctcaaataagcttttcaccgaaaccctaaatccccgcccttcacgtgttcggtgaaatgcctaaaccacccaaacttgctccaattgaacccaaatttttcaggcaccttcaccacactcccagtaacctacttgccaaatttcacaccaatccgaggtcccaagcttaaatttcaccaaaattcccgttttgcgcgatcgtttccgagccgtgtgccccaaaccctatttcttcgcctaaattcaaaccaagcacacacttcactcatattgacctatataaacctattcgtgaagtatcggctcaatcccatatcgtttcgtgcctcaattcgaattccaatcatcctatgtcactatttgac

SEQ ID NO: 144103 - DNA, 448 bp, Zea Mays
tatatacactactctatatgatggtagactaggcatccacagcatttttttggtgaagcacgtcttcccccgcccggcatcagtgttcgcgtcctctctcccgcaatctccgctctctcctacaatccccgtcctctctccccggatcgccgcttgaccatcccagaccatcagtcacgtttatggcacaccagcatccgcatctatggcacaccagcatccgccaccaggaaatctcgcgtctatggcacaccagcatccgccaccacgcgtcgcgtttcctatcccacaccagcatcccccaccacctcctcctcctcctcgccccacatgccccgagatctcgcatccactccgtctatggaaggccctcacaccatcagcggaaagggcgcacctcggcgcgcccagccatcctcggattccgcgccccatcctcggattcgat

SEQ ID NO: 144104 - DNA, 436 bp, Zea Mays
ggagttacgcctttctcggtgtactcgttcgtcgggagtttcccccacttccgaggcttcgtctcgggacacgggctgcaccggatcccgttccctggcttcatgatgtcgccgcatgttccggcgtctgtttcttcgtcaccgggcatcacgctagggaggttcctccccttgcatggtgggctcatcgtcaaagatgggtgcggactccaatctcccctggatgaagaagatgtaagggtagaaaggaaccgacatgatggtgttcttcttcctgtcctcctttgagggtggaggcatcggggcttgacgtattctccttccccgactcaggatgtctatttccttcttccgagtgatccatgtccactccttagtgggcgaggtagacaatggagttttttggataagcgaaaccccgatcgactgatctttc

SEQ ID NO: 144105 - DNA, 637 bp, Zea Mays
ctttagacccaattcctctacgtcggcccacaattggaaacctgaattttaatttatttattcatgacgttgtctagcttctcaatgatgtgtgggccaccaactgccagctgcttcttctcgaattgaaatgaatcccaaaacagaacgcgatgttggcgggatgaaatcctttgattaccgatcaagctaacctctggtctctggcagattcgcggcagtcagtcactgacaggtgaaccccaaccacaagcgtcttcctccccgagatctcagacaatggttccccgctcgcatggcacaaatccgagctccacggctcaaccacccgtgcggagtcgccgggttctgttacagccaccgcgatccaacctccgctggagccccatataaacaactgaggcctcgctcgcccatcaaccatcgaactccgtgaagccctcaccattgtagcacccgagagagagagagaacgtgagatgtgagccgcggtatgggtcccattgcctcgggtgagtcgtgtgggattccctgggaagctctgcgcgtgcttggggtctcaccaggggagaatggcgaccggaatccttcaacaacgtcgagctgcgagtttaacagagactcatacgacggcggg

SEQ ID NO: 144106 - DNA, 318 bp, Zea Mays
catcggctacgaacacggctccaaggcgtacagggcatacgaccccgtcacgaagcgtgtccatgtgacgcgcgacgtggtattcgacgagcgcgcccagtgggactggggagctgttgaagaggccggggaacccagtgggggcagcgatgtattcaccatcgagtacactgtcacaagtccggcggccccggctgttgaagcaagggcagaacaagttccgggtgaaatcgaagacatggtggagacagaggccagggcagatgatgatgacatggatgcagaccacgacgatggtgtgcctctccgattccgcag

SEQ ID NO: 144107 - DNA, 405 bp, Zea Mays
caggtgggtgcggtagctgctgggatacatggcgaagccgaagggaggctcaatttatagatcaattgagcagtggccgggaatttggggttgaatgcggtggcggtcagagaagaagcgagtcaccggcggggtgattcgtggcagttcacgggatgagaagccacgacagtcactgggtaatgatcatagttcacggtgatgtggtcactgatcggaagcatggcacaatcgcggcggaggacgcaaactccggcgacggccgcacagccatgttgccgatgcacgtggtcgggataccgcgaggccacggcagcccgaacatatccacgacgcgatctttccatggctgggcgtaatccactcacccgcagcacgaatcacggcgatcggcgcgaacccgag

SEQ ID NO: 144108 - DNA, 462 bp, Zea Mays
ccttatatgggctcataggttgtgcggtctcggaccatgaatcttgacccttatttggtgacccgctcacagattggttgtcgaatgtgcctttggaggcgagcaggcttgatagagctcaagagacagtggtggtggtgagctacatgcagccatcatttgtgtcaacgaagtccaatgtactaaaggtgaccttggtcctaaggagtaaggggctataagaagtaactagaggcataaaaaacaaaatctttatgcttggaggggtcatggaagtgctgattggcgacgtgctcaatccactgatagtgcttctttttgtgcgacttgatggagccgaaggattgtttcttgtcctccttgtgcttgtcgccgagaatattgacttccttcgatgaagtcttggcttcatgtttctttcccgaagacacagacttttccccagtggctaccaccttttgg

SEQ ID NO: 144109 - DNA, 283 bp, Zea Mays
tttctttttctgctcatcagcaggagaatcaagttgattggctcggcaagggcgcttcgggcgaacactgacaggcctctgaatatccaaggctttaccagcttccgggagagacgccaccaccaatgtcccagcaggagcggcatcagaagaatcctcggctaacatatcaagcatggcacatatatctgcatcactgggatccaaaggcacctcaaaatgaacctgccgttcatcatcaggaatttcttcaagcgaagcaaccaaagcactaacttcttcg

SEQ ID NO: 144110 - DNA, 587 bp, Zea Mays
tacaaattgaaaccttgtgacgagtgattgtaactcaatcgacaattgtgcaaatactgactgatccttgtcaggcagatccaccatttgacacaactcaatcacagaacaatgtgctgtctataacccacatagcttcacctgggatccattgtagggaatgattaaccaattttctatccatgaaccatcatatgactaaacatttgtaaccaatccatgccaactatcatgtcgtaggtacgaagagacagaatctataagttggactaaaattcatgacctgcgatagaccaagtacctttaccaattgctgagtacagtcaatacgatatccatcagccacttgcacagacaacttctttggcaatgtggagagaccttgcacatgagctgccacctgagtcctcaaaaaagagtgagaacttcctgaatccaacaacaccaaaagatacatgccttgaatatgtcctaggaattgtatagttttgggagcaggagctcccccactgcagcttgagacagacacaaggaatgcagctcttcggtagattcaggctcatgttctccttcaggtatttgcaacg

SEQ ID NO: 144111 - DNA, 566 bp, Zea Mays
ggcgcgccgaccagatctccaaggtcctcgacatcctcggcacacgccatctgcagcaacagcacactcattcagcaaaaccacacgtacccacacaaccacacaaaacaaaagataacctttacctgctctatcgctcggtcagatcgctccttaaccgcctcctgaccgtgcggaccccacatcctatcgaagagtgcccccgctgactgcttcgccacagggtatttggccttgaaaatttcacgttcaaagttctcgtctgattggtcgaagaccccgtagtgtcggcacccctcgcgggacaacgcattcagggtcccctcgcaggtgacgagggaggcgaaggacatgaaaccctgcacaatggtcgggagcaccagcagctcctcctgcaaccattcgaggaagcgaaggcctgcctcttggtcgggtacttcgaagtctgtagtccaggcacccagatcgcggtacgcatccacgaactgcgcgtgcgtccgctcgacttccgagcacgccgaggcctcggccttgtccacgcggccgcgtagggcgttgaaccttgc

SEQ ID NO: 144112 - DNA, 2278 bp, Zea Mays
ccgagaagacggtccaggcacggttcttgggccagacactattaaatcactgcctctcttctaggcacatcgccctctggtgtctatagggcaaagccctaggtgcaccgtaaggcatagctggatccacgtgatccgacccaaggagcgcgtcgccatgcattcagatccgcttgaggcacacaaccacagccaccgtgtcgagagggatgacactgtcgcatgccttacctcaatattggtttggctcgatctagagacgcgtcgactaccggtgcttatgctgaccctgtcctgccatcctggtcctttgttatcccactttggcgcgatctaagaatctatgagcttggatcgtgtttgaataactacccgttgaagcaagatctacctatatgacatatagaaactgtagcaatgcatgaacaatcaactagtaaaagtaaaatgtgacatgagtccctaacctttttatgaattctaatatgtggttatgccaatgtggatggggctaggtgaaacttgtgaaaaaaaactccctcccctatatgttctccacatccagtccttcctctgtctcacatagattatttgtcttcctcgcgtctgagtctgctagccatagttatgcctatgcttttgaggcacatgcttagtggccatggaacatatgaagtgatgtgtgaaaggcctatgctttttagtttgaggacccaactaagaactcataaaagtttaaggacgcatgatgcattttactctaaaatacgtttaacccgttttcctaacatttatcaaatagatagatctaacatttataacattttcatgtgaaataaggatttaaacaacttttttaggtcaaggacaacccaagagacatgcaaaactctcgagtagcccaagaactgactaggcaatccctgcaataatgaaggtaccacgacattgatcacgttacacctagggttcagcttggtcttatcttcaagggcattcttcaagtgccttcaatgtggaagtctcctgttgcataacagcattatgtaatcatgtcagtcctatatccagcatatagatgcattagccaagttgtatttaagcacatttagtatccatacgcatagaattacaggtggctagcgaatgcacctagctgcgttgtgaccgcgtcaagcgctattctcgccatgtcgttgcatgccgtgcatgtcgcatggtctgccgaattgttaggcacgccgtgcagctgcgcagtgtggcggggaaagtggatcccagttgataaaacgttgagtaatgcatcagtgtggttgcgcgttgcagccagacagaaaaaactgcagacttgctctctgtgtttagcgcgtcgctctgagatcgcacaccggcgactccgcgccaccattgcagtttgtcgcgaggtcgggccaacaatctggtaccagagtcgtggtgtatgcaatacaacggatcggtgagccctcctcgagaactggcgaagaagaagcgtgttctccctcgacgacaaccgctgaacaccatgaatcaagcatcaggttccggcggcggcgtgaaggagagttcactgatgtggccactcctcactcgtgataattactccgagtgggcgatgttaatgcagtgtaactttgaggcgctggagatctgggatgtgattagtcctgggatcaaccccaagagggcgcatgaccgtcaagccatgagtgcgctcctgcgctcggtgctgaaagagatgtggcagtctcttggcgcgcgcagcacggtgaaggaggcgtgggaggcagtgaagttgatgcggctcggtgcagatcgagtgaaggaggtgaacgctcagaagatgctccaagagttcgagaacatcaagttcaaggacggagaaattgttgaagacttcggaatgcgaatcacaaacctcgtcggcaaccttcgagcacttggcgaaatcgtggaggatgtccgcgtcgtcaagaagttcctgcgggtggtttcggctcgcttcacccagatagtggtaacaattgagatgttttgtgatctgaagcagctttcggtggatgaattggtggggcgtctgcgagtggctgaggaaaggttcgatgataaagtcgaacacctggtcgacaagatgggacgactcctcgccgaagatgactggcttgaaaagaacaaacatcgtctgcgttcaagctacaaagacaatggtggcgacacgagcactggttcgtcgaaagggaaatcatcggcacatcgcgac

SEQ ID NO: 144113 - DNA, 382 bp, Zea Mays
tttggaaaaggtggccaggctcttagatgcaagaatggttttacgtgaagaatgatctaagtcagagggaggatgtgaaagagattattcagcgtcctatatggtctcgcttcagcattaggaggccacacactgcacttgggaatgatgtgcaagcgtgccaagcggctttcaacatagtgtgcacctatattggcataagagacttggttcaagagcacattgtttacagagtatggcctcttgcaagtggatgggaaatgccaaagaaggttgctactggctctagtcaaggtggcttggtctatctcaagtatacctttcgatacagaagccaatttgatgaaccaaacgatggctggctagatgctatagaggcaac

SEQ ID NO: 144114 - DNA, 864 bp, Zea Mays
atctagtttgtggccaatgtatgctattgtggtgatttatttgggaaatcttacgcacattacagataggggttttatgcagtgagctttggacttagattaatgtagtggcatgaatactacatatttgtgcttcaacatgaagggttactatcaacatcccacgagacacgcaacaacaagttgcttcgtggttacaattccgcaaacttattgttaatattaccaagtgcatagtcaatcattaagatttagactaatatgcgcaacactattttatccatatgggtccttcaggggctcatgcataccattcgtcgtttggagccagtagttgacttcagatcaacaactaaaatgaccatcagggtctagcgctcacaaggacattcactggttgcattgtgctttcaagcacataggagaattgtgcgtatataatgttggtaaagtgcacgacatcaggccaatgctgccaagcagagatttttatatgcagagatgtatagtccagctcgttttattattgcccatggtttacccaattactcataccgttctgaaattgggtatcgatttatgcaacatttttaggtatattaattttgagagagaacttataacaatagttaattctttgtggtgttgccagcagggcaaacacttctcctcatattatataccaaattgttctatatagcattatttcgatctcttcgttgttcggcaaaaagagaagctttggaatagaacatacatggccaagaattcattttatctgggaaaaatcaccatataactagcttttgatgaagcaaatgatgataactgcttggcaagaacgaaacaagactagtatccgcc

SEQ ID NO: 144115 - DNA, 453 bp, Zea Mays
gggggatagagttccctgctaacctaatagtgatgggtactctggaatagatgttatcctagggataaattggctagagaagtactaagcggttattagctataataagaggacggtgaagttggtgcctccaccaggagaagaagtggtgactgagctaatcctgcccgagtcaagaaaaggaggttgccactacatgactattgatagcaatgagaccaatccactcgagactatcaaggttgtgtcggaatttctggatgtattccctaaagatttatcaagtatgcctcctgagcggaaaactgagtttgccatagagcttatccatggcactgcccctatttccaaaagatactacagggtatctggaccagagttggtggagctcaagaagcagatagatgaggtgttagagaagggttacatcagaccaagcacctgaccttgggc

SEQ ID NO: 144116 - DNA, 423 bp, Zea Mays
attgtacaaatatacctgaaagactgtaatgcagaactccattcaaaccgcatcaccatctgatcttgccacatgatagaatgcagttcacaacaaagaccaatgctcaaacctttgggcgccaatgtttatgtctgaattcttataaaaatcaccagcatgctttagacatgtgattggacattaaaccgataatgttgccatagtccagcacatccacatgatggttcctcaaaatcttcattatgcatactcaatcccatgagcaccatcacatgttcgtcaccgggaacgtcgttcccgttccaggaacaatatcatccccgaagtgaaaaaccttttttaaggagcatatcatgttcctcaatcccctgttccatgacctaatcatcctaggaactttgtgactacgtccgcccatga

SEQ ID NO: 144117 - DNA, 525 bp, Zea Mays
gtgaaattttacatatcaggtacacatgccttcctttttttggtgtgagcttctttttaagcaatttaggaccagtgtcatgacatgatggagtagatggaagacttagcgctacactggatggtcctagtaataaaagaggtcttccatcttttcctggtccaccttctccacttggcgttgcaccttgtgtttctaaaacagtgaccctccaccttctccacttggcgctgcaccttgtgtttctaaaacagtggatggtccaccttctccacttggcgcacttgaagattggatgccactaacagacacaagtacaaggctagtacaaaatataattttaattagtcattatatgacgacatttgaagcaagagagttataagtgaaatgtagctatcatatgtagacttcggagactgaatgtcggtctgtgaaggttcatttgcaccagcatatttgcgactcctctgtttcctatttctttttttggtaccgtttagtgggcacttataacttatttgt

SEQ ID NO: 144118 - DNA, 347 bp, Zea Mays
ggccaccaggcatgcttgagccttttcactattcacgatcgaaggccttctaatgccaaagcgtgaatgtatgggtcgctgaattacgtccttcacatcctccctcttaaccaagtcattcttaacataaaaccactgcttcatccaggatcctagccattttttctagaatgttggaatagggtgtctcgcatcagagcgttatacgaaaggagtaacagccaaagttgttatgatattgtttctttcccaaccaccttcatccggtaggataattggtgtatattgcagaagcagacggcgtctggttccagccctcagctcctcatcgcctaaatggaaactcc

SEQ ID NO: 144119 - DNA, 559 bp, Zea Mays
gagctgtgtagtgcgggttgccaagggcttctctaagaccacgttgtatgtcatcggtaaagtagatccaatatttgtcaaacaaagcacgaacattgcaaacaggacaatgaacgacaatggtaacgaacatttgtcgaagttgaaacgccgaggcagagactattgcctcatcaaatagtaggttccactcattgtcaccttcgagcaaaccacgggcttcgcacgcctctctgaatgtttcgtacacagtattttggaaggtccttatatcaacgaagctcgtggcacctgaaacaaacatcaagagcatgcgtagatagtatagctccccagctgttgggtgcacgtagtacatgcgaccaatcttggcagatgacaacctccttctacgccaacacctaatagaaacgtcccacgaccactctttggggaaatcacaataagtcagccgacgtgcatcactatgtttcatgtttgtttcaaaccattcagttaacattgtcttcttcgctgcacggctcaaaagcaatgcttgtaggtctgtcccaggctcgta

SEQ ID NO: 144120 - DNA, 676 bp, Zea Mays
gcccgctactcatgcgggcagcgcaacgaagggccccttcatcactatcatcctccgccacctcaaacggcaggaacgccacatagcagtgcaagcacatcacggacgctgggagtcctaggaggtcttcgacttcgtgccccaccacataaaaccaataatcataccagttgccccacttgttgcgggcgcaaggaactagctccacaacctccgccaaagtcttgccagtcctcgacgtaaaagtgcatgacccaaactgtgcaatcttgtttccaactttcctcttctgccagtgcaaacaaaaaaatttggcgaagacctctacggagggctgattgccataagaagtcactgccgagacatacttcgccagggccaccacgacattaggtgtcaattgatgaatctgcacgtcaaacctctgcaacacctccgccacaaaacaatgtgcaggtaaccgaaggccggtagtaaaaaatgccttgaacacaacaatctcaccctccggctccgaaatctcctccgccccgaaactcgtccaacttcgttcccaaaataccccaactgttgcatgtcttgcacgcgaaccgaggagatcctcgagacgccaaactccaccgtgtggcccgggtgcagctccgccgccgccagatcgctcatggtttcctcagac

SEQ ID NO: 144121 - DNA, 455 bp, Zea Mays
cagaccggagcggtcgcccaagaataacatccagatcctccggagttggcagcgggatagagctggacacgccccccacgcctaccgctgacggtgtatccgacggtatcgccgctgttggatttgtgatagctgttggcgacattgccacctctggacccccagctggaacttgggagcccgaaggcgttgcctcgacggtgacaggcggatcctgggggcccgacggtgccacctcagcaccagtgtcaccccgcatggtggaggcaaacgcaataggaacctctttggtcgctgccgatggtgggcttggcgccgacgctgatgaggctgcagtagccgctgacggatcgccggcgacattcctagcagatgtatgctgctgggaaccagacccaccggcgggcatagcggccggcgggggaggagcgtccacgagagccgaagaaggggag

SEQ ID NO: 144122 - DNA, 1020 bp, Zea Mays
gcgtagaggtagactatggctgggtgttgagggcactggagccgagtgctgttgctgctttggcgtgagggaggtcagggagggactgtgaatgggaggatagggtgctgagggaccaatcacaggggtcatctcgacaaccggcaagctccaagcgctgtgacggatggagtcttggaagccgcatggtgcgtggaagagcaaggtggcgtgaaggagcttgcagcctgatggcatgggataaggatcaggtagcttgaattaggagaagaagcgtacgtgattttttttaggaagtcgatgcgtgctggaacctggaagaatggagagagctgggacgtagcataatcacagggagatgagcgttcccagtgcttgtgattaggataaggatgagtgctggcaaaatttctaagaggctagtgtcggttgaacctaggagaagcatcaatacgaggagaggaatacactaagaaaataataaggagtcggaatggatattggataagaaagagcgtgagatatttagaagaggagaggcagtggagataagtgaggaaatttccctttttaattactatgtaatcgtctacatgaatcctatttttaacacaataataaacattccaagtttcagctaactgaataaatgttcagtgcacaacatgactaacagctctacttggaacgaagctttctgccaattcttagtgataacaagctgaccttacttaacaaaatttgttcagaaaagatagctctataaacttgttgtagcaaccctaggtcaaataattatggatcaagcgttatagaggttcaaagtggggtaaaaatactaaaattcagatttagctaactgaaccaaaagctgaattcacatatgacagagagaatttgagcacagtttactccaaagttggtacagcaccaagtcacacttatttaagaaaacttgttcactattgtatggtcttccattttactatagaaaccatagtccataactccatagattag

SEQ ID NO: 144123 - DNA, 319 bp, Zea Mays
ccgggtaatgctttctagctctcggttcttcagagatttggatcctcggtccaccaagcctcctcctcttcgtcgttgggctctttccttctgatagtggtatttcgtcgctacacttttcgtctttcagttgaattagtcagcttggctttgcattcggttcttggtggctccccgacgggtttccatgttgttgaagaatcaaaccgacattttcgtttttccgtggccactaagaaagttggcttcatggtccttgctcttaaacgcatcatctctgcaaactttgacgtctattttgatctttggggaaatggaa

SEQ ID NO: 144124 - DNA, 324 bp, Zea Mays
gccaagaacactaccccacttaaaagaattctgacttgggagcatttgagctggcatagaaggtctgaccctggggttcgggtgaccaagggaatttctaggtgggtagaggggatgccatgcttttccacaaaactagtggctataaaagaatgggatgctcctgaatcaaaaagtacagtagcgggagtaaattcaacaaggaactcaccgagcactacttccggagcttgctgagcctcctgagcatcgatgtggtttactcgtgcccttccttgatactgggtcttgttctgctggctaatggaggagggtgccttgggg

SEQ ID NO: 144125 - DNA, 668 bp, Zea Mays
gagtcatccaaatcatgattgtggacagaagtggcatatcgcgcctcatcaaacgccttcttgtactcctccatggatcccaactgcctaatctctagtaaagactacatagcctgcgaatactcctctgatccaaacttcaacaacaccgcgtcacaaaactcatcccacgaacacggaccatactgaatcttaaaaatctgaaaccaacttttggcattccccttcatgttcaacgatgctgacactacccaaactgactcagggacccgatacaaggtgaaataatcaacacattgatcaatccaaatttgaggttcctccccttcgaatattggaaaaggcatgcgtggtatgggtagatgccctccttcaaaatcctcaaccctacgccctgtaatctctctctgacgactcaatggcacactcgcatacctgcgatttggacctggtggtgcaaccagtggagatggtggagcctcgccacgataacgtccattgtgcatggactccaccgactccatgtcccgcaccatctgttcaagacagagttccgtgagcgccttcttagtttggtccaactgctgcacgaagcgaacccgttcttccatcgcctatcgagccacatcggccgccagccccacttccgccagcaactgttgttgaac

SEQ ID NO: 144126 - DNA, 388 bp, Zea Mays
ggactcatgaagtcttttccaaaagcgcgaggtaaactgggttcctcaatttgatacaatcttcttcggtactccatgcagacaaacaatcctcgacatgtataactctgctaactgggctcccgagtaagttgtcttcgcaggtataaagtgtgccactttatcctgtctactatgactcatattgaatcatagccatcccaagtatggggtagtccaactatgaaatccataccgatttcttcccatttccattccggtaccttgagaggttgtagtaatcctgctggtctttggtgttcggctttaacccgctgacacacatcacacaatgcaacatgagtagcaacatctcttttcaaaccgtaccaccaatacttttccttta

SEQ ID NO: 144127 - DNA, 282 bp, Zea Mays
tcagtctatgtaaataaggctgatgctgatgtgcttttatgtctagggttttgaggtctgtagccttagtatgttccctggatgtaatcgccaagactttgttctgttttcgtatttcataatgaaataggggtatcctctctcgtcaaaaaaggtgtagcgtgcacaggcatggtttcaccttcgttgccactccgagccatttatcgatgtcatgtgactaaggtttgaggctgatggtagtataaacaccactaccaggtgaagctcattccacacacc

SEQ ID NO: 144128 - DNA, 651 bp, Zea Mays
gccaaagtcggatgcctcggtgagagtgacccaaatcgggtgcctggccatccatttgtgaggggtgtgatccaaggggtacatcccattatgactatgttcgtccaacaagggctgtcatggatagtggttctatttgtgcaaccactgggatccgttcgtcgtcggtcatggcctccttgcctaccttcctcgggttcccctggaggcccctgaaagctaggtttggggcatttcgaaggaaggggaagaaaggacggtcgaggccattgtagcggtgtttattcttcatgatcgtggggtcacgctagctggtgtgatcgggaattacctccactggcggttgactcctctcatggccaggcggctgtcactattcaagatgaccgtcgaggcttcatcagagggcactcggttaagcgccccgccgccaacgacatggagattgcttgctagctcatggaggccttggaaattcgcaaaggtgtggatggggtcgtcatcccatatgtcttcccaagtctgggtcgccctttgatgtgtcctaagctgggcttcatggagtttatgagtctgcctggttccactcctttttttcttttttgagttcactgtcagttgcacaccctacgacccactcctttcttcttc

SEQ ID NO: 144129 - DNA, 385 bp, Zea Mays
atcaatcccttgactagccacaaggattactgaatccttctgccaaaatgttgccagttcaggtgatcaacaaggcactaatgctctacgtgcaatcaatgtaacaacagtttgaggtaagtagcatagttcgtttgaagctaatgatgtgccgtgggattcatccacctaccgaaagtcctacgaatttcactcttttttggccttaggtcctctttattaagcctgcaaccatgagctcactcgacttagcaacctacctaccctcgtgcaaaaagttgtaagtctaaactttccctttctgagcatgtcctataatggatcagttcagttcaccagattagtagctgcttacacatacacacggtgccccgcaaaaattcac

SEQ ID NO: 144130 - DNA, 687 bp, Zea Mays
catccctccctgcctgagtgagagaaacttcttcttcttgatcttcattaaaccagcaggaatatggtagtttctgaaattggttgagaattctgcctaagtgatggtgtcaatggcagcatatgctgcgcagtaagcatcccaccaatccacagcgaggccagtgaggcgacccaatgcgtatagtaccttctccctatcagtgtattgggcaatgttaagcaccttctccacgaacttcagctagtcatcatcttgcagcggatctagggagctagaaaaggtgggtggtctatggctcatgaactcgcgatgtttgtctctaggtggtggttggtgtgggtgttgcaggttattgttgagctgggcttgcatgttggccatggtattggacatctattgcagtagctggatttgggcagcaaaaaattcttccaacccagcaggcggagggttttgggggattcatcttcagttctaaattaactactgcccttcttcgcagaatgtgtgtaggttgatcgacacctcctcctgtcctggtattgaccatctgagttagatacataaggtaagatatatttgcagataagacagatgattaagtataggacacctgacttttaggatgagatcttttgggtcacaatagctcagtagatgagagtgacacctacctatcattac

SEQ ID NO: 144131 - DNA, 548 bp, Zea Mays
gccaaatgccctgcccgttatttgcgcacattttgtggcgcgtcccctcggcgctctaccccaggcggtgggattttgtggcacattttggaagactggtgctgtggttccggaaatcaggggcatcaagatttgtgttcggtgggtgaggctagcgcggactcacttcgaatggtgaatcgcggggacttaaacggtaaactagagaaacgatgtttgtactagttctggccagagccctagtccagtgtagtgctgatcatagtattgtgatgagaagtgttacaactggtgtgcttgtgtgttgagaagaaagagggcatgcccttttatagttcaagggctaaaccttacagtggtgattggtttcctaccaaagagagagatcaactacacacgatcgtcgtgtagtcccccataggatcgtgcgtagctgtaaccttggtatggcgtaccgtcttacccgcttggcccacggtctcatgtagctagtccattcctgatgtctctgtaacagtgcatggtgggtcctgtgggtcagacccacg

SEQ ID NO: 144132 - DNA, 371 bp, Zea Mays
tatgaacttggcttatggtggggcccacctccaatagtgattgtggtggatgtctgatgtgtgctcaggtgagtgcacatggttttgctagagcaactcttcacactgagatgttattttaaagtctgcaacatgacacttcatttcaacagcttgacttgtatgacaatgttgctttatgacaatggatgtaagtgggggcttactagagcgtacaatcatcaagaaggctagatgcgagcttgtggtttcttcacgcaagtttctcactatggatggtgtcggttccttccgtctggacatgaattgttgtggttaggcatcatcaacttgtttgggatgaaatttactgtggtgtacaatgagctcag

SEQ ID NO: 144133 - DNA, 273 bp, Zea Mays
ccgagacaacagacatgtggttacctgcgaaaggcaactagctgttggggtcgatgggaggaatgaccactgcagtagaattttggttcttctgcttgggcgccatcacaatctcattaatggattgaagggaaacaaaatcagagggaagcggagtaatgtttggaggcagaaaggtgaagttagggctcagaacgcagaggcgttcgacaatgtgatataaatgggtcaggcaccgtttctaaaaggcgctaagtcatcactcgaaaaagc

SEQ ID NO: 144134 - DNA, 321 bp, Zea Mays
ggttgagtcaataccttgagagttcggctgtagcctagggatgaagtggaagtactcccttgtaattgtgcagttgttttcttggctttcttcttgaaagtggtggccttatccgaaggtggctcttcgtcgctgttagtctcaacatccttcatgttttcatcgctaggcttactttgttttcctttcttactagccttcttgctagatgaatttacactcgtctttcttttttctctagcttcagtgcttgggatcgatttggagtaatctaggtagtcaaattcaataggattcataactttgtttagccttttttcc

SEQ ID NO: 144135 - DNA, 421 bp, Zea Mays
cgcctcagatctgtcatcctccgtgggcgtggtgaaccgctacattaaccacgatacgaagctcactatattctacctcatggcctccgcatcgtgtattccccttcgtagcagaaaaccgggcgcttgggcattgggtcaatgctcgtcggtggtgtggggtcaaccctgatgcatgccgccgtgcccaggcatgcagaggaaggagacgacgttgggaaccgctaatctaaccaccaacgatcacgattggagcacgtaccggttcggccggaattgatctgggccgttgaatccctgacatgcggttaggattagatctgcggcagggatgctctcggccgtcggatttagatcgcgcggctctgaatcaacgataccccttcgtcgtcccaacttacaaaagagtccctaggtttta

SEQ ID NO: 144136 - DNA, 1477 bp, Zea Mays
ggagccgacgtcggcggctgaactcagcaaattcaccggcggcgacggaaggagagggggggcgttgtatttccgtttggcatcttaaaaaattcgatctcccaccgtccaattttttttttttttttgagagagaggagtccaccgtccaatctgaccgtgcgattggattttcttgcggttgcgagttgtgactcagctcgagaaaggcaaagcagttttggggttttggtattgggtcttccccggtaggacccacgtaccagtctgtgggtcacccgtcactgccggcggcggcgccgtggaagcccggcgagcgccgctgagtccgccgtgtcccgctcgtagcttcccggtgactgtggcgtctgttgattgtgatggcagcgtgacggcccctcggcaggcagcttgtcgcctcgcctccaacgaataggtacgcccaatctctattggaggcagaaaatcagccaaattcgcctagattaattcatatctgtgcaaaaagtagcagaagggaaggcgtctattccgttccattggattttcccgtgcacacagtttgtacctcaagattaatgcattagtattgtgctcctcgtcaatgaattggtggggagctctccccccatccgttaacctaaacagaagattaatgtatgtcttctgtcttttgtttcatagcagctggccggatggtgtcatatccttttttattggttgatggtcttcttgtttgtagacatcagatgtgatatttcgtccagctgtgatgtgaaccatgattgtttcatttgctgtggctttcagtacttgagtactagtttgtagtttgagtccaaagcttttgttgcgtgaagctcttactccaagcctgcgttcgtatacattttaaatgatttaaacgagatttaggcgagtttcattttcatcgtgttcaatccacgaaagaacgagaataatagctctaattaacatgctagtttgcattttccttgattgcttgaagcatcaaaaggctccatggagaattttcttttcctacaaactatatactaaactactttacagtcagccaggagctgcaaataacagcttgatggctaactccaacaaatggtgcaatagcaatacagcttgcatagtggcatgagactgccatggtgctcaggaatgccttctctacatctgccgaggagcctttcctgaggagacacatggcatactctacggctgcagcatcacaagggagcgtgatccgcccatggctcacgaagccaaactcctcgtaggacatccacaggagttccgcaaacaccagcgtgccaaggtacgccagcggcacctcgaacctcctcccgtctaaactgtacatcatgcagtggtccttgctcgccacagaggcgcaggatcgatcctcgacttccctttccaccctccaggagagccgctttctccccaacactgccattctctg

SEQ ID NO: 144137 - DNA, 475 bp, Zea Mays
cgtggagcgcgccaacggcaaaattttcatggccatcaagaaaatgcttctcgacgacaagaagggtaaatgggccgacctgctacctaaagcagtctgggcgctgaacacaaccgagtgccgggcgactgggttcactcccttctgcctgctatacgaatcggaggccatgaccccacaggaaataaaacatgggtcaccacggacaagcacttcagccgtccccgacgtagacgaaccaacttccaaggacctcatcaacggagatagtgtcttcgccctgcaggccctcaacaaataccaagctcaaacaaaagcatggcgcgaccacacagtcgtcccaagagaattcaacaaaggggacctcgtactcgtccggactactcggacagagtcacggggcaagctggagccaaagtgggagggtcccttcatcgtcaagacaaaggtgtctcccagcgcgtataggctaaca

SEQ ID NO: 144138 - DNA, 789 bp, Zea Mays
catggacggacaccgggaacgtacactcgctcccacggggttcctccgtttgtcttggcaggagtccagtagacgcgggaacttgcttggtttagcatctctgcttcgcctgtaatgcgctcacttttgagcttcgcggtgggcagcccgtggaggacgaggagcggtgggtgcagtgcacacaccaagccagagggttaactgcacgagtttatcttatttctttctttctgtcagatcatacaacataacctcaagggattagaacttgcatcctagcggtgcgaatgatcctagcttcttttttttgggggggagggggggtaccagcagcatctgatggaacaagataatggtcgtaaacacttctgtcagcctggagcattagcgaaaagcacagcttctgtctggctgactgatgataccggaacaatcaacgggggagggggggaagataatggacaggtagattcagagcctcgctgaagccacccgatgccacagcttgcttaggagggaggctaagcaaccggagcgtcctagtcctagcctgtatatatctcgccgccaagtgcagatcggaatctcaccgtgtgtgaagaacaaaattttgccggccgcctttatgcttgctcttccggcgggggcgctcatgtggtggccgctttattcccgatcgttgttgttttttctgtttcgctcgcgccattgctgcgggagactcttcttctccgccgtccacttgtctagttgcagggagacccctctctctcttccggtcccggaccc

SEQ ID NO: 144139 - DNA, 289 bp, Zea Mays
ggggatgggtgcattgcgtttgtgagggaatggcgaagctcaagaactatatgaattagactggaacttagtagagggagaagggcgaggctcaccggagcaggggaaggacgcggcgacgctggctcaatcgagctcggggaaggaggaagagggtggccaaggctggtgtgagggattgggaagctcggggtggtccttttataggcgcccggggcggggaaggggcgagaggtggcatgcaccggcgagctcgccacggcggggatggtggcgcacagtggcgacg

SEQ ID NO: 144140 - DNA, 427 bp, Zea Mays
ccctgatcctccatctcctcccaggagtcccagttggcaattgcgtcagcccatgtagctaccagctcaaagaccttcagactttcagtttcttccatgcaagtgacagaactcatgacaaactcaagtaacacataagcatcgtttacgcatgatagaggtggtaatgcatagccctcctgaaatgaatgttgaaaacagtcaagcaagtttcaccacttcaatacctcaagacaacaggtcaacgacaaactaacataccatattgtcagcttgaaacaaccaagctttttgtaacatcgttcatcttgctccctgcctccgtctctatatataactatatgagcagcaggtgcattctaaagcggcaactcactacatatctgacatctcagctgctgaaccgcaagccatccatgacctctcc

SEQ ID NO: 144141 - DNA, 318 bp, Zea Mays
ataatgggaatcgaagcccggcactgaagaagctcttaaaaaccaccacctcatcatcctttggctctggaattacttcttcatccgcaaaccttatcaagttatcatcatctttcccaaaataaccaagttttttcatcaaaaccaggtcatcaggcttcacggtggatttgccaaattcgatatggctaggtttgcttggactcagtatactgtcatcctcttcatcatcacttccagcttcggcaacaatattcccagcttcggcattacgggtatcttactcaagacatgcttctcctccctcttgaacaatca

SEQ ID NO: 144142 - DNA, 524 bp, Zea Mays
catacccagcttacttgtacagtggtgtcgccgactcaacccaggttaccaataggaggattcctactgaggatttagtgagccgactagagatgatcttgagaggcaaggtatcaaatattggtgctcctgttgcatattctgcttggattctaccaccttccaagtcttttttcaattttgtgtccaatcctcctgctggtgatagtggtctgggtcttagagtgcgaccctctcccgaagatattgatgtcctggttgcttcacttggtgatcttcccaatgatgagaggcaagttcattttgagatgccaatgagtccaggtgatgcagagataagtgctatgctcgatatgttggctggggaatcttctgactcggcccctgctgaaacaatggctgttgcaattatactagagcttgaaaaggcagtggacacccgaaagcctgaggatactcgtccaaagcgtctttgccaggtcagtcgtccaactgcacctgccgaagggaagaagaagaaaaag

SEQ ID NO: 144143 - DNA, 362 bp, Zea Mays
ggcgaggcgggctaacggcggcgcgagacagctccggcgagcaatcgcgcgagcaacagagcagtaatgaccaaattaagggtgcaagcatgttgctcaccttgagggggaagtgctggagtcacggagcaacgacagaggcgcaaggatacgacagggcaacgacggcggggctccggctgcgcaagaatcgctcctgtgagcgtggactggacgaaccatagagaggaagggcacactgaagggtgttcggagcagctgacagcgaggtggaactcaccatggcacgagacggggcacagacgcgacggtgaccgcagaataggtagcttcaaccgtcggatcagagatcaccaaccaag

SEQ ID NO: 144144 - DNA, 330 bp, Zea Mays
aaaagaggaagaagaagagaaactcactcaaatgaccaaaagccagataaaatccaaacaagtcatttagagtaagcaaaacttggtccccaaagaaatgggcaacgactcaacacgaccaagcaagaaaaggctagccctcaaataagaggcaaaagcagggctcaacaccactagccagaagtcgaaagctcatcggaccacaaaaagctttatcggagcataaaaaccaattaagggcataaaatcagcacaaaagttaaaatcaaaactagttcctccaaaaacaggcaaacggctcaacgcaactagcaaaagctccaaaaggct

SEQ ID NO: 144145 - DNA, 354 bp, Zea Mays
gcagaagtcgcctaagggtgcagccggaccagcacaacaagtgcgaaaaaaaccgaagtctaccgcgaagactatccgcacaaaagtcgcctaagggtgcagccggactagcacaacaagtgcaaagaaactgaagtctaccgcgtagactatccgtgcagaagacgcctaagggtgcagccgaactagcacaacaaaagcaaaaacgacaacaccaagccgtccgcgccaagaccgactatacgcgcaccagcacagcataacaaaacacaccagaccaagtacacaacgccttcgcaggcatagacaaacgagggcatacaacctcatcatacaagcctttacacatataca

SEQ ID NO: 144146 - DNA, 803 bp, Zea Mays
gctggagcagttgcagcctgtcaaagagtctgactgggacggttgctgagtgagatcactggacaggtagtgccgccactggttctcaggatcgacaacaagtcggccattgaattggccaaaaatcccgtccttcacagccgcaacaagcacataaatatcaagtttcacctcatcagggactgcgtggaaaagggtcaggtcatcctggagcaaattggaacgggacaacaactcgcaaatgtgttcaccaatccactgggaaagatcaactttgagaaactcaagacccaggtgggcatagtggagattaaacaagagcacccacattaaggggaagagatgttagaattaatgtatgtgctcttgcgcttaatgtactagaatagtatagatgagtctttagacttctagacagtcagctgttgctgacagctggctagcagcagtaggtagctgtcaaacagtcgtaggtactgtagcagccgaagtactgtagcaaccgcccttgcatgccctacgaataggcatgtacccctctcatgtataccaaggcttgtgaaataagacttccgcatacaaacaactctatacttcatctgaaggcagtgtgtggtgtggctgaggggaaggaggtgctggttttgctaacataggtgtctggcctttgtggttacatagaaacaagtgtgtgtttgatagggctgatccctctcttgaggtggttcagcaagcctttgttgatgagatgaagtgttggatcctagcaggagccattgaactacatgacctaggtataggag

SEQ ID NO: 144147 - DNA, 311 bp, Zea Mays
agaacatgcgttgcgacaaagaataatgttactaacgtgtaatcaacgttaatataaagctgacgcgagtgaagcacatcgagacaggtctatggcgcaaaattcattgaataaccaacgattcatggattaaatgacatggcacatttctattggacgaaaacgaggctataccgggagtcgtagagggcacaaccacagaagacctggatggtgagatttcctgtgctcttcttcaatcaacacgcaggaacgaaccttcgcagggagaacgaaatcgcgcacaaagcgcttgacggtccgccgcgcag

SEQ ID NO: 144148 - DNA, 343 bp, Zea Mays
ccgctgttgggcgatgtttcagagcagttccatagtcttgtttccaagctcatgaccaagctcacagatgctgcagtgaagaatatgggcaggtatgagacaggccaaggctggctcactgagaagagccagactgtatatggacttgtgcagtgtcaagaggacatgctgaagggcacttgccaggattgcttgagtagtgccatggcaaagagggagcagatggttgaccagatgggtggtgcaatcctcggcgtgggatgcagcttgtggtaccaaacagaagttcagttctttgctggcacaccagcgttgtcgttaaatatgcccacacgtaagttca

SEQ ID NO: 144149 - DNA, 599 bp, Zea Mays
caaaaagggaaacaaccacccaattcccctcgcaaatgaacagaagttttttgatcaaggggtttggtcaaaatgtctgcaagctggtgagtggtatcaatatagcgcaattcgatgtcgcctttcttataatgatcacgaagaaagtgaaagctaacatcaatgtgcttggtcctcgaatgtagcacatgattcttggcaacacttatggcactcgtgttatcacaaagcagaagcacatgatgaaaatccaagtcaaagtcccgtaaggtagccatcatccaaagtaactgcgaacaacagctagcggcaacaatatactcggcctctgtggtagacagggcaacactagactattttcaagaagaccataaaaccaatgaagtacccaaaaactgacaagtcccagaagtagacttgcgctccaaaaggcaacccgcaaaatcagcatcagaataaccgcataaggacagaacgaatgatgaggagtaccacaaaccaaactcgggagtgaaacgtaggtacctcataatccgtttcatagccattctatgagatgtgcgtggggaagcctggaaacgagcgcacgaacatactgc

SEQ ID NO: 144150 - DNA, 1040 bp, Zea Mays
ggctgcttgcctatcacaggtcctttgtgtggaggatctaattcaaagaaattcagcacacaacattgcattttccaatcactatctatgtagtgtgcaaccaaacacatataggacaatgtttgattagaagtccatagatcagtagtcaatgaaatataatccactcctttaagggcctttgatagtttttctttttcagactcatacactttcaagcattctgctctaatggttttcctaccaatgaactcatattgtggattcaaatacttcatgacaatgttaaatcatgtatgctcaaccattctaaatgggtactcatgaactataatcatcttggcaattaattttctaacttgctcatgattataatctctaggggatgtgatagtagggagaccagaacctgattcacctgcatttgaaggagcaaagttgagaagagattgatctagtttcttttccaaatgctttgaatatgccccacaactcttcatatgcctcgataatgttgatgtcgttgacccttgcatgtaggcataccttttcttacaatacttgcactttgcctttaatgtcttctttccatcttcggatgcatctccaacagtcactttatcaaaaacttcccacactttggatttagagttgttatcctttactttcaccccccttacgccttttcttggcttttcttttgtcatcattatttgattccacaacatcaatctctctccaacctaggacagtcatttcatcctcagacatgtcatcgttcttgtcaaatgaattgctttctgaatctatctcattactttgattcacccccttcccttgcacactagattccataacctagcaatttatgatcaacaatacataatgtgttaactgcaactgcaagtctgcaagataaaactgaacaaactgcaaaacaaaactgaacaaactgctgtcgagcggtggatgaggaattgacgatgctcaccggtggtctatgaatgaggaaccggtcgtgcaggcgagcggtggatgag

SEQ ID NO: 144151 - DNA, 360 bp, Zea Mays
ctgctgcaggggagaagcataatcaaaagcaaaattaccatggtacagatcatcataccatccatcattgttaactggagtttcttgacgaagctctctatgttgggcccttgtccttgatcgtcatgcacgaagtggagcatttcttcagctgcttcgtcgatcttcctttgaagttcggttaaccgaagcatcttttctcttttcctttgcaactgatgatgtatagcttctaaatccctgatctcttggtccaattcttcctcctgaggtgtagggctggtagcttttctcttctggctcctagcctctctcagtgagactgtttcctgattggtgtctagtggctgcagagcagcc

SEQ ID NO: 144152 - DNA, 570 bp, Zea Mays
tgccttgtccgtgatacaccgaacacgtctgatgagtacatatgtctaaggtcagttctgcacgttttatgtgtatcttgtcccatgcatcgtacatggtggacactagacacgccggtgctacttacattcataatagggcacactcctgtcaagtggcttatatatgtttctcaacagacacgtctggtgctatccgtagaccattggtagaaccatgtccccgccctgacgtctataggaaaattgtccaaaattattgcgccgaggagggggatcaaacccatgcgccctggtagaggcagcggacgacactgctatgctttgctagccacttgagcccaagcaagtttgtgtctaatagtcaatagatgttataaatatgggtagagtgggtattcaaaataataaaaaataatcatgtcaaatcgggtcggcactatgggctgaaacaacagcctaataatggcacacctctcgggtcgggctaacacgagcccaattttaatagtgtcgggacagaccacgacacaacccatttgaccatctatatcgatgccccaatccgcg

SEQ ID NO: 144153 - DNA, 445 bp, Zea Mays
accatcttgtgcctcatcctcttcctggatccacgcttggtccaacgcctgcttggatcggcgacatactttgggccatcgtatggaggccactcacccaggtcacggtaaggaataaatcttggactccaagtcaacactagcttgtcaatagtaaactcttggggtatcctcctctctaagtcaaagttgcgatctcgggcagctgcaattagatgagaacatggaaaatggtactgcctcggtgggccacaattacatgacaagtcattaaggacaacaacatgcttcctggactcttgtgactcgccgtcagaagtagtaccagcttgaaggaatacctcatatgttcctgactgtaagtcaaaacaatcaacagtgtgtgtgttcgccctttcctttgccttctctaagaaagtcttaggttttggagcccatctctctc

SEQ ID NO: 144154 - DNA, 398 bp, Zea Mays
aaatattagaaatttcgaaattagaaaagaaataaaaaagaaaaaaaccagcccacgttcatgcaaacactggcccacacccctacgtgatcaatggacccaggttctttgtttttttgttgttcttattattttattatatcatgccggagtgacatcgtgttgatgtcatgaatgaggtcatcacgcaaaccacacccctcggccgtgcgtttctccgtgtcgctgctgggctctagaagctttcgtcctttcggctcggaacagaaacatgagctcggcgtaaccgcctcccggtagattcgatgcagtatatatctatctctattagcttcccatctgtcatcatccagcgtcgtcagggtaacaaccaggcggacctcgtggcggcttctgtt

SEQ ID NO: 144155 - DNA, 648 bp, Zea Mays
gctgaaacaaattatagatagataccacaaagttaaaatggccaatgatttggtgagcccatcagtacatatggcatatgaatttgtaaggtgattgccatatttatgcagtaccatgtgatgcaaaaagcacatgcatacacaacaaatggaactatttctctacatcttaggtcctgtttggaacttctagagctaatagttagttgctaataattagttcattagctgacttaaccaagctaacaattagttcattagctggctaactattaactctatgggttccaaaatagggccttagcaaaggcatgaccaaccaagctggatgctgatattattttacatcaatgaaacagggaaaaccagggcttaaatttatgacatacgagcttaacaggaaaactgaaatgtttttttctcaaaaacataggagagctgtgctttctttgtattaagaagaaaaggagagagaacccttgcagacacacaccaaacccaaaaaaacaaattttagatgcatgctaatctgttgcatctcaaggattctaccatttttctaaaatctgtagggggtcagacctagtgctggagactagcacacgagtggggttagaaaaaagaataaatcaagacaagccgcaaata

SEQ ID NO: 144156 - DNA, 421 bp, Zea Mays
aagaagatgagcaggaagtgccagaaatgtggcatagctgatgatcacaacaaccgtacgtgtttaactgtcgaggataatagggttcgattggctaacctatctggacgtaaacgaggacgacctcctggttcaaggaacaaaatcatagctgcagccccacaatggaatgagacatcaacgtcgaaaaaacgaacggtggatgtcggagatgatgattcatctggtagagagtagaagaccataagataaaaatatatctggatgtaaatgtgaaacctgtgtttatttcatagtttccataaagtatcataaatatacttgcaaactggcataaacgtatgtgtcatttgtcataagctattaacaggtctgtagcaaactgagtgtacatagacttagcatacatgtatgtgaaaaa

SEQ ID NO: 144157 - DNA, 994 bp, Zea Mays
atataggccaaatgttatgagagactcggatgctagaaaatggttggaagccatcaccagcaaggcataaccttatattgcgaggctcagatgcaaaagcagggtggagctcatcaaaattcttccacgctttggaatcagctgggtgccgcatcactccgtcgtccactctaccatcattatgccatgtcaagaaagtagctattcttcgagacatatacaaccgttggagtcttggcttgagaggaaaataacgtaaagttttttcagggattttttttccttttgtcgattgtttgttttcacctgagtgcttgtcctgcttccatcttgatctttgacatatcttgcaaaaatctgcatttgcttcttctttccaatacaacatgcaatcatttctacaagcgtcaatttttctataacttagtcctagttcagtaataatctttttcgcctcatagtaagaacttggtaaattactgttatgaggtaggaagtccttcaggagtatatctagtaaatctgtaaaggacttgttactccactttcccatattcttaacattgagcaatttaactagtgcagataacttagtactattggagccatgataaagaggcaggttcaaatcattaagcaagttgtagaacttcacaacttcaccaattggttgatcttcaaaaaaatcactagtggttggttctgtcattgtatcgttgccaggatggttagtcgaagggaacaaatcctccatcagctcctgcattccatcatgtgaatcatcatcatcttccacttccaactcattctcagtttctccaagaacttctccatgatgataccaaaaggtatagcttcttattattccataggctgtcagatgcgaatagactacatcacgggacatgttgtatgtattacaacacttgatgcagggacacctaattttacccccatcacctgacctactgaatgcataatccaagaacttggc

SEQ ID NO: 144158 - DNA, 668 bp, Zea Mays
gtatcgaggcctcgctgattcgaccggggttaccaacataagaattcctgctatggatttggtcagccggctcgagatgatactcaaacgcaaggtgtcgaacatcggtgcacctgttgcatactcagcctagaatctgcctcctttcaaggcttttaccaattttgtgtcaaatcctcctgctggtgatagcggtttgggccttagagtgcgaccctctcccgaagaggttagtgctttggttgtgtcacttggtgaaatccctgacgacgagaagcaggttcatttcgaggtacccttgaatccaaatgatgcagagataagtgccatgctggatatgttggctgaagattcctctgatgcagcccctgctgaaacactagatgcagcacccatcctagaggctggcaaagctttggatactcagaggtctgatagtgttcgcccaaaatgtcctcgccgagccaatcaaccaacttctcctgctgaggggaagaaaaagaaaacgagacgtcttcgtcgagtgtcaagcttggatcaggatgttggtccttctgctcctgctgctgaggaagtgccagtgccagtttttgctgaagctgaccccaatgggtgtgacttagatgatgctgaccccaatggatgtgatccggccaaagctgacccca

SEQ ID NO: 144159 - DNA, 675 bp, Zea Mays
tattgaatccatcatacatcgcccttcttctattgtcatccatttccaaaactaaataacccaatgtataaaaaatgtgtaaataaacatcattaagcatataaacgtaaatccagactgtgtataataaccctattaaaaagaatcactagacataaaaaattgtttaagcaaatattgaacctatcattttaactaacaaactaacatccttaaccatattgtacgaatgctttgcgaacataagaaaatggaaaagctggccaaagctacaaaatctagggcttgtcctatcccactaccaaccacttacctgggtctgacgtgtcatggcctggatatgcacgccttttgtgttctctatgactattctaataaaccaataatccacctcaaacccaaacctccaaatttggcctccccggatttgctatatcatcccccccaagctaggtgatcttagcaagtgggacccagttgtacaaatttgtgagttgagtcatgtagttctgctaggtgagtggtcatggtttgttgtttccatgagtaacgttgtgctcttctaagttcagctaaacaaaataaattttacaggtggtctgtagtttgctgaattcactgcaactaattttattcaggaaacatttatgtgttatacactagcaatctcagtta

SEQ ID NO: 144160 - DNA, 374 bp, Zea Mays
gcttacttgctaattgatggcttggcgctagctagaaaggtggaatgcctgtgatagacattgttcagttttccgattttatttcagtatacttaatgcattatgtatatcaatatccaattttgaaactatctttttggatggaatctttgtcttcgtgtgtccgcttggaaaaaaatagggaccttttttgatctcttgctttagcatcataggtagttccagagaagcaactgcttgcctcctcggctccatgatgcaatgtaggcctctccttcacatatttccatcccaccaagctcgcttggtcagatgaacatgtcaagtgttttttatgtagtagctaattgtcactaactttttgtaaaaccagc

SEQ ID NO: 144161 - DNA, 393 bp, Zea Mays
ttcgaagcattgtatggacgaaaatgccagacccctctcatgtggtccaacgtaggggaaaaggcactggaaggacctgcccttgttaaagaggctaaggagaaagttgccctgatcagcagaagattacttgaagctcagagtcggcagaagagttatgtggacaacaggcgaagagaactcagatttgaggaaggagactttgtctacctcaaggtctcctcgatgcgtggtgtcagaagattccaagtgaaagggaagctagcaccgcgattcgtcggcccctatcccatcattggtagagtgggacccgcagcgtaccgtcttgaattaccagaatccatgtctgatatccacaatgtgtttcacgtatcccagctccgcaaatgcctg

SEQ ID NO: 144162 - DNA, 390 bp, Zea Mays
tagaaagagaagcattgcgtaagttttggcatcgtatgatattgatgtgaagtcatgacatcaaagccttaacacgcatatttttatataggttcagaccgcggtgtacgtaatactatatgtcctctttgatggatgtatttactttgatggaacaagttacataaccaaaaagaactagagtcaagctcactatatatacttctaagccatttgcttcctctatgttctgtgttccttgttgttgttaggataatagactatgatgaatgccctagagtgaatcttggatcaaccccttgagtgttgatatccgctcacttttatatctcaagaaagcggcaaagcttacatgcatgttctacttgtgggctctacttatcatcaaac

SEQ ID NO: 144163 - DNA, 563 bp, Zea Mays
ttatacttaccattaggtgagtccaactgtattgtccgttgcaacgtgttgatcaccgccccatgctgacgaagccaattcatacccagaatcacatctatatcttgattttgaagaactagcatgttggtagggaacatgtgaccaaccaactttatgggtatctgatataccatttctttagtatgcaagagtcctctaggagattgtatacaatacccagtatccaccacttccataggtaactggtgcttcaacacaaatgtccggtttatgaaggtgtgtgaggcaccagaatcaaataaaatacttgccaaatgattggcaaccggaaaagcacccatcataactggttcaccctcaggaatagctttgattttggtataatggacctgacccagtttaagaacaatcttattcttccttgctttttgctggctacttcgagggagattcacaagtgattgccgcgcatccactagcttagagaagcgacaatcctgagtagagcgtcctgacttaccacacttctcacatggtttggcattggatggaatattttt

SEQ ID NO: 144164 - DNA, 518 bp, Zea Mays
cacccgcgcctgcctataaagcccaccctgtggcctcaattagacgctacctgacccccgccacaacacccgaagcattgccgccggccgatcgccttaaccgagcatgctccgcgtgcacgtcatcgtcgtggaatcactgcacgcaagcctcaacggccagttcccactggcccgagcacctcagttgctcccccatgccttgctaatgctcatagaccccatcattcgagctatactgcgccggaggagctcgccaccgcacaccgacccatgtcctcccgccggagcacgtgaaccagagagttcatagcaccaccatcaaatctaagttatggccagcttcaccaagcccccgtgatcctctcgagcccttcccctagagtgctactacaccaggtaactggaatcaacttcaaatccgagttgaggctcgcctgcgacatctgcccgacagtgctcgtggatcggctagctccgctcgccaccggccaacccccaccgcctccaagttcgcc

SEQ ID NO: 144165 - DNA, 1254 bp, Zea Mays
aatttcttcaaagaatggtgacataaatttaaaaacatcttaagtgcttcctttttctatgtgactgcacaagacacataagaaatgataatttaagatacttgcacttaaaagcataagtgttaccatcctttgacagtcctctacgttgtaggtcttgattttccgcacatgatgattcttcaattcctacaacatcaatatcttctccgagatgatatgagttttgaatacaataaattgaagtaaccttgggtcaatcttgaatatgtagatcatttgaagattgatagcttgagttgataagaattgaattaactccctcaagcaccccaaggtttcataccatctccttctcctacaaagcttgtcaagcacattttggtacccatcgcttgatgggtccgttaaggttagtaaacaaagatctaggaacccaagtgtcctttgtgctagcgcttggtaaactcgttacctttctagcacaagttacaatcttgggttgcctagttatatatgaatcaaatgacaagttaggagtgggatttttactaatgggacaatctttgcattgatgtcccttcttccggcatgtgtagcataggcgttttccaagttttgaagatttcttctttccttgtttgttgcttgctacatggttagtaaaaactttcttttctaacatcatgcctttttgttttaaatagggacaagttttaactaagtgtcccttctttgagcatttaaaacaaagtctatcatccttgttaataatcaagccatttttaatgtagggacatgacctaatcaagtgtccctcttcaaagcattcactacacttcttatttatcttagtgtgaagtgtggcttgatcattaccttggatgttaccttttgtggaggcgaggttgaggcttttggaggaggtattgaatttcatcttttgtttcttcctcttggcaatcctcaagtccttgacattttcttcaagggatgtagtgcatgccacggttgttcccgtctcaagcttcttcatcatgtgatcacggttatcttgagaaggtcgagcaatgcacttccctttaagttgtgtcaagctcatctttagcctctcattttcttctttaagcttttgataggtatcatcatttgttcctgcaaattctagctcaaaggaagatttgcttgtcgacggacaacaagcattagcacatggtaatatagtttctatttgaatacatgtgcatgagtgag

SEQ ID NO: 144166 - DNA, 417 bp, Zea Mays
gaaaaccctagagaaaataaatagaaaaggcaatagaaattccaggaaaataggaaaagccaattcagcccaaggcagcccattaagcccagcccgcgcgcgcccctgtgcctgacaggtggacccagcctgtcggcgcaaacccgagcgccctctctccctcgctctctcgctgctccgtgggaccgacctgtcggcgccgttgctctcgcccacgcccgctttccctctctctaccccaccaaccccacctgtcagctcgtccctaacctcccgcccacgatctccccgtcgtggacgcgcccatgtccgcgcgttcttcggctacaaccgagccctcgcgccccttttgaaccccacgtcctgctcatctacctcccctcttccatttgcgccctctgcccagctctctcgccc

SEQ ID NO: 144167 - DNA, 1019 bp, Zea Mays
aaaacaatgctagtataataataagctgtctacctaataaagtagctagccagagtgtggcgtgtcgtgtgtcatgcattatgttaccgcaataggagtgtataatacacggcgccacctctctctctctctatatatatatatatataaaagcagcgaagacgacgatttattaacatggcttttccatccatgcttccataaactaattgggtgtttaattttgtgaagcctgccgacagattttctctctctcctttcatccattctcctcatgtcgcaatacacgtgtaacactgggtccaactttgaatggaagttaatatctaaattcgaggatagagaaacaactagctatccatactattttgcgtggacaaaccttgctagtttatctacattatattgtgggaagggaaaaacaggcgactcttttagttatttgtactggattattgcaatgtttctttttattgatttgttctcaagtgggttaattattattagcagggttgttgctgatgttgttggctgaaatgttttttttttgcactgctaatgtatataatatattgctttcattaaacctactgaagcttatatactatgttagggagaacattgcatgcaccgtacctacctctaattttcaggtgcaggtaagcaaacaaacaaacatagcagtaacacgctacagtaaacttttgtcggcacaactcggagcccacgaactaaattaataaaatcagatgaatggaccttaattgtatgtgttttaattattagagggcaggagcaggggatgtgcatataggaggattattattagcgtgaggacgtatcggctgggctccatttgcacacttgcgtcactctctcccttgacccccaccctagctagctagctcttggtcattagcaaacaagttaaagctaaataatgcagccggcgggcggacggatgcactgcatcgctgctgctgggatgatgacttaattatctgctgctgaataatgaa

SEQ ID NO: 144168 - DNA, 1417 bp, Zea Mays
aagagtcttcggatgaggatttggattattttgcggcattggatgtggctgcggtggaggcttcgccgcgtgtgatgggtgctgaggttcccggtccgagcgctgggcgtaggcggcgaagggcggtggcgaagcgcagagtgagtgaggtggagggtggtcatcttcgtgtggacagggctggtaagcgggaattgttgtcctcgccagctggggcgagtgttggtgagggggagttgcgaagtctgtttgagggtgaggagctgaggataatgctgtttaactatagggagatgggtatcatcccgaaggttgaaccaatataaggtgtgatgccctcgctgtacgtatgtaactatagtttgtataatgaggcggtgtgccttcgctgatccggtcgtgcccgtaggggacttgtgcactaggtctagcgcgtttattatgtcggtccggctgcaccctcaggcgacttttgcacggatagtctttggaggaagacttcggttttgcgcacttgttgtgctagtccggctgcacccttaggcgaattttgcacggaaagtctttagaggaagacttcgatttttcgcacttgttgtgctagtccggctgcacccttaggtgacttttgcacggaaagtcttttgaggaagactgtttttgcgcacttgtttgtgctggtccggctgcacccttcggcgacttttgcgcggagtgtcgcacgagagggtagccagcgctgcccctcgcggtgactttgtattggtcgaatgccgaagaccagcgatgcagtcttttttcgatgtaatttttgcgggggattttttgcgtgtatattacatggctccgcctcgttaaaaacctcacccccgggaggaaaagagtgcgggccggaataaaaactgtcttgcgaattacaagggcgagctggccctgaggagtcaaacaaaaaacttgcgaagattgtcaatgttccaagaatgctctaagtcttcaccggatggcgttgtgagcctgtacgcgctgggggacgccttcgtcttgacgatgaaagggccctcccattttggctctagcttgccccgggactctgtccgagctgtccggacgaggtctccttcgctgaattccctcgggatgactgagtggtcgcgccatgcttttgtttgagcctggtatttgtttagagcctgtagtgcgaagacgcggtctccgtcgatgaggtccttcgaagtaggttcgtctatgtcggggacggctgacgtgactgtccgtggtgacccatgttttatttcttgcgaagtcatggcctccgatccatataggaggcggaaaggggtgaacccagtcgccttgcactcagtcgtgttcagcgcccagaccgcttcaggtaacaggtctgcccacttgccttttt

SEQ ID NO: 144169 - DNA, 316 bp, Zea Mays
gtggtttaggaattttggacctggaaattttgggttgggctctaagaatgaggtgactatggttaaaaaagatccaacctgatcagccatgggctgctctagatttacaggttcactctaattctatgtccatgttctgcatttcagcttattctgtgttaggtgatgacagcgcattcaagtcagcaagtttgaggtatgattcagttctaaatttagtgttatgtttctttttcatcctcctttttttcttggggtgtctctgaaaggggtgtgctgctggttctagcaggacgctgcgacactttagcacgac

SEQ ID NO: 144170 - DNA, 392 bp, Zea Mays
aaagcgccgacaagcggggccggctggtcagacctctggcacgtgtgtttcgtgtgagtcgctgtgtggtgggccatggcggtcagctcgatccgcttcctcccaatagaatcgccgagcatggcggacgacgcggtcgtcgtgcgatctcacgcgttcctggccaagtcgtgccccagatttcggatccgaccctctcgaacaaactagctcgatcctggactccctcccctctccaacaaactagcaccgaccctgagacgaccaacgccaactccattgccgccgcggtaacaagaactcggtccgccaccatcgaacgcaagaaccacgggcattcgggcggccgtggagcattctgtcgctgcgtcgggacccatagaagcttcgac

SEQ ID NO: 144171 - DNA, 466 bp, Zea Mays
tcctgctgtaagatgtcacactttattaccttcaggttgcaagaagtaccaatttaatgaacatcttcaggattattaggtagacagtatctagagaactatatcagtctccatctttattttttaatattgatagacctctgcagaaggcaccaaaattctgttgttttgtgtgcttagtttgattcgccaggtctatgtttttaaagcaaacatgagttctttatctctcttttttcaactgtccgatgcacattgtaattgatttggataaaggcagttaaactataattcctgcagtaccaaggtttccgcgttgtgtttaaattattaatggcaggggccaaatcccccatcccccatgatgccctccactactttaaccgacatgatgtcaaactcaaggagcttcacttgatcggtataccaacaaggtttattctattgccatagtcagatatatctg

SEQ ID NO: 144172 - DNA, 405 bp, Zea Mays
caagcggatttcagcaggtttgggccgctttgaagagcgtaataccctacttcctggggtagctttgtatgtgagtggagttacatgtggtgtctatcgagttgtgggatgctaattagatgaaaatggaggagatcgcccttgaccttatatacacgaccgtggggtgcttcccgacatgttgatattacttttcctgcttatctcctagttagtagcaaacaactttcactatctccagcgttttaggatgtcgggcgcgggaaaagcgaacgaccttggcacgatcacgtccacgccgcgactagcttgggcgcgagccctttgcgctcctaggtcagcctgcttctactgtttccaagctgcgactgccatgtggccccgagcgaagttttcgcccctgag

SEQ ID NO: 144173 - DNA, 434 bp, Zea Mays
gaaaagctcttaaggtacattgtggcaatgtggcagcatgtgaaaggtcaggaacttttctttaggcaacttggcagggacagctacacagatacccaaccgtaagtacatcaagcagttcctatttctgaccttcttattggttgtgtcaggttcagttcaactggttcttatgtactgtagtgttcaggatatgttaacttaggacaacattttctgcccctttaactttaagtaattgatccgtaactgtttaaattgtagttttgttgtcaacatctttcaactcaacggtattggtcaaagagaagaattcagacgtcattctgttgacagcttgtagccttgtaccatgcatattttgtgctcccaaaatattttttggaaagcagaaaaaggccaattttctctatacacttataagctacaaaaat

SEQ ID NO: 144174 - DNA, 614 bp, Zea Mays
gctgtctctacgatttcggtgctcgctgacgtcgtagcttgtttgattaatccttaccctagaaccatttaaagattgttcgtttcaattttacttttatgttgtaaaatcttatgaaacatctcgtataaatcagtttatatctccggtctctagaagttggtttataaaacaaagctggttgagagtgtgttggaccctggtttctaaaaaaccaggttatagcttttttttaatacacagtgactagcttatccttccgctatttttaaaaaccagggactcgggagaggagagggtgcgccggtgcggcgagcggcacacgagaaggacggcggtccacctcaacgtgtactactaccctgccagtggcagcgccagttgatgtgtctcgcttgctagctcgcagtcgaatgttgggctgtcggccgggtcggtagctcaacttgtttgggcgtaggcggccgcacttggatgcgcgatccgtgagcatgaggacatctcgtgacccggccggccttcgcttttacggaccggctggggactggccggctggctcatggtcctttgacttgcattgcattaaacaaagtctagtactactactctaccag

SEQ ID NO: 144175 - DNA, 536 bp, Zea Mays
gcttcttatcgtaatccatctttagagtttggtaggcttcacgagtgttggcctcttcgccttctgctatttcgagactctcttagagggacgccttctcctttttaagttccttgacttgttgctctaagctttccacctgggagtttaggtgggtgcagtgggaggaaaggtcatcatagtggttatcgagagtgtggagatatccggccatgtagacgatggtggggtcatcctcagtatgatctcttcctgacagggccttaagtattttcctccaggtaggggtatttttgttgctgggtgggaagtaacgaaggggggtttcaaagacctctctgctgtagttttggcatagctgtcggagggctttttgggtgacattttggcaagtgtctgggaagcggtgtccggtgaaggtgacttggaaaggagggtggttcgggtagtttcggctttctcccaggtagactgccatagagcacttctcagttccattctcgtggtattctttccagacgtactccggcttcttg

SEQ ID NO: 144176 - DNA, 457 bp, Zea Mays
aacaaaaattctctagactttcatttgtgccccgcgtatgcctcatcgctgagcaccacgcttcaccgctaggcgcttgccctgcctccacccgctcgggccgctccacacagccacgcccatgcctgcctccgcacgcacgcacaggcacatcggggcccatctcaagagctcttcccatccacatgcacatggggcacggtggcaacatgcccagtgggctatggcagcagaccaagagtgtgcaatgtggctcgtccacaaacttgacgaggagaaaatgctactgtatttttgcttgtcctctgccataccttactttttattcgtgctccgccactaaattaaacaattgtgcatgcagatgtacaaccaaacaacgcgagattagaggaaatttgatttgttgattttttttatgagaatgtttatgaaaatgattgttttttttatttgt

SEQ ID NO: 144177 - DNA, 433 bp, Zea Mays
ctccaatccaagattacccaaacaaggtctaagggggtgtttggtgtctcttcaaaaagacacctatttatcaaaggagatgatttcatttatccattatgaagacaacatcaaaacatagattaggtagttacttgtaaccaaagggtgtgtcctttgacatggatgtagtggacacttgtctctagaattagacatctattcattgcacctttctctttataaatatgtacagagaacaatacaacacatcttcccctttataaatatgtacaaagaacaatacaacagacacttcttccatttcctttactcacttttacttctaattctaacacgttattagacacgtagactctaaagaaccgcatgagatgagaaggcacgaacaggaggcagcaaagccttcgatccatcataatgtctacgggag

SEQ ID NO: 144178 - DNA, 356 bp, Zea Mays
attaaaacgccaaaaatgttgaaacgctcatgggtggaattttaatttttaaacggtttaaacaacataggtaaatttcaatatatcataattttagacaataacatagtcaaataccaaacaaccaacataagttcacgtaataatattgtgcaaaatgacatgtccacaaccacattaccacaatagcacaagttcagctaatagcgagccgacaaccacaaacaaagtgcaatgagatgtctagtagttcacaatcacaaacatagcacaaaagcaactaaagtggaatgcaatgtccacaaccacaagcacacaagtgttactcaagcactcaataaccatcatccaaatca

SEQ ID NO: 144179 - DNA, 496 bp, Zea Mays
ttccaggtccattatgaggtcattggactttttggatattacgacgatgttgtccacgtagacctctaggtttttctctacttgatctgagaaacagtgaagtatgcatctccggtacgtagctcctgcgttcttcagactgaacaacatcgagaggtaacaaaatgtgccaaagggggtgctgaatgttgtggtgtgtttattgatttctgtcatggcaatatggtgatagccatagtatgcgtccaagaaggaaaggagctcgcacccagcggtcgagtccatgacctgttcaatacatgggagaggaaagggatcattggggcacaccttattgagcccattgtagttgacgcacatcctctagctctcgttcttcttcttgacgagcatgggatttgtgatccacactgggtgctttgtttcccttatgaaccccgccacctagagtctcgctacctcttttcctatggccttgcgtttttcttaatcaaag

SEQ ID NO: 144180 - DNA, 665 bp, Zea Mays
ctctggactgagcctcaaattcataaaagtacaggggtctcggggtaataatccgcagacacagagaacaggcccccgcggatggcgggttgattctctggaatctcaggggctctttaataaaactgacccgcgaaggggtatggactaacgtgggccgttcgattagaattctagggcgcagattagttctaacttaactgaagcggtacacgatactagccgccggatccgagatccacggccacggtttaatgagactcgatctaatctgatgcgcacaatacgggatcaacggctcggatcaacgcagtgaaggggtacgcgacttctaatcccaaccgtgcattcacgatctaacggacacaattctaaactagcgcgatccaatctcctctgcccagctccaatccaacggcgcacgtatgttcttccacctccttcccccaaacacccatgcggctcagagcaaagagcccaaggcagcgcagatcaccggtacgcagagatccggcgacccagcgcaagaacttcgatccgaccgtcactacctgaaccagagggcaaagcaaacttcgagatcgaaatcttaccacgacccccctagtgctcccaatcgccagcaaacgacgcgcctgaaccctggagaaggtgctcccccagcc

SEQ ID NO: 144181 - DNA, 277 bp, Zea Mays
gcagcaaaaccggttgaatcggttttataaccggttgaaccggttttgggttcgctgtccagctgccactcctcctttttctccttcccttccctctttcactctttacccgttcatttcttacagcagccgtcgcctacacttttcctctctctcacacacacactctccccacacccccaaagcccatttgtgccatcaaatccttgggagtttgttggagatttgttcctctcggcctcctccatcaactccctcactttcgttgggatttctg

SEQ ID NO: 144182 - DNA, 512 bp, Zea Mays
atggattagatctggatgactcagattatatcgcgcgaagagttaggcttgctcggatccgcgccacccgatccgcaatgcacggcccggatttaaaactttagaatcacttcgtggccacccatcatccgatcgacggcacagaaccaattgcctaaagcggtacgcttaaactaatctgggccgtccatcatgcatcgacggtcagaacactgtcttcttcccacccgcgcccagacggcggcgcagagtgccctaggcagcgccatggccagcgttcggccaatcccagggttagggccctaataactcaattcctacggactacgcgttgcccctagcgcaactaactggatgcgctactcaccgaggttggaggcgacaacagcgacactacccacggcgagaggcggctccacggcgaatttggttcgacggcgagcaattgatcggctccgagcggtcctccaagcttcctcgatatctgcaagcccgcggcgaggttctccctt

SEQ ID NO: 144183 - DNA, 364 bp, Zea Mays
ggaggatgatcaaccgaggtggtgaatccattgctcaagtgcaggtttggtggtctggtatggcgcgagagctcacaacatggaagtacactgaagcacttcacgctaagttccaggcgctccagcttgggggcaagcttctttccaagaacggggaatgtggaggtctacgaaggctagatgatggaatcacagaggagaagaagacacggtctgcacgggaaataagctagaacaaacgatattttgggccacaatgggctgtgtgagtgttcaatagattgtaaaagcccatgtaccagcgttcaaacacaaaaaaggagcacacacaacatgatgtacatgtttcatgaagaaaataata

SEQ ID NO: 144184 - DNA, 328 bp, Zea Mays
ccgccgtgcaccgtggtctttgccgccgtctcgggtcggggttggggagaatcacgagcgtcgtcagatcccgattgaacgacgtagattagatgcggtgaaaatgattcggcctgggctaatgatagacgtagatcgttgatcgtaggatggggagctcgggtcgatgctggattcgtttggaccatagaatcaagatccgagcgcttgggaccgcacattaattcctcgcggtgctggtttaatcagggccatccagatctaatcctacggccgaaaacctagataccccttcggccgacagctttacaaaagagcccctctgttt

SEQ ID NO: 144185 - DNA, 873 bp, Zea Mays
gtcagatctaaaccgacggcccagattagacttctcacactttgaaccgatacacagcaatagccatacgatctgtgatcaacggaccgtgttcaacataaccgagatcaacgtgccaccctcggatcatggatccacagtcgtgctcgctcggctgaaacggtacgcacggcttctaatctccaccgtcggtaaacggatcaacggcgtgacacccttctactaccgccaggagcgcagcacggcgacacagggccaactgcggtggtccatcgccgggaaatctcgatcccaggccacaccacaccaaacacccgaatccttggttctacacacaattggattgatagcgaattgaaggagggtaattcatccaggcgcagataactcacctaaactggcggcgttcaacagagggtgaaaggtcgtgcgcccctttggtgagcaattcccggccacaggctcgccgatcctgccaggcgcggagcggacgccttcgccacgacaccgcgaagcccgatgaccaatgttgggcaccgaggatctccacagaacgacggcggtgtaccctttttcgtgacccggctctcggcaagaatccctgaaacagcgcaagcggtgctggtgggaaagttgcgagggtaggatgaggaggagagaaattgtggtgctagctctaatatccctggaatcggtcggactcgcacccggctttccgtgatcgtgcccgcgagctccgccgaggtctccatgaagccgttgaggacggatctggtgagtgggggcaaccggcagcgagcgaatcaacgcgacacagtcaacacggcggagttagcgcgcggcatgagaccgacgtgccgggtccactagtcg

SEQ ID NO: 144186 - DNA, 309 bp, Zea Mays
cttctccctctttttctcatttgccttcatataaaaccattcacttttccaaccagttggccacttagtacggaagctaagaactagtgccttcgtatcctttcgatacacaaaattgtagcaaccaaaattctcaggaaggccatctgctctggccttcgtctggtaatgtagctcgtgcacccgacagaaagcttcggcattaggactcataccctggcttcgaagggcccaaatgtagacactaagtctaacgattgcattgggtgtcagttgatgaaagtgtatttcaaagttcttcaaaacctc

SEQ ID NO: 144187 - DNA, 442 bp, Zea Mays
aacgtaggggaaaagcactagaaggaccttcctttgtcaaagaggcagaagagaaagttgccttgatccgcaggagattacttgaagctcagagtcggcagaagagttatgcggacaataggcggagagagctcagatatgaagaaggagacttcgtctacctcaaggtctccccgatgcgtggtgtcaggaggttccaagtgaaaggaaaactagcaccgtgattcatcggtccctatcccatcattggcagagtgggacccgcaacgtaccgtcttgaactaccagagtccatgtctgacatccacaatgtgtttcacgtatcccagctccgcagatgcctgcaaacactagaaagtcacatcgaagaagaggcagtgcagattcagaaagatctttagtaccgagagaagccagttaagatccttgattcagctatccg

SEQ ID NO: 144188 - DNA, 531 bp, Zea Mays
cttcggggagctcggttcttcaccaagcttgacttacgtagcggctaccatcaggtgcgcatgcacccagaggacatcgatacgacggccttccgcacgcaccatggccactacgagttcttagtcatgcctttcggcttgactattgcaccatcgacattccagatgcttatgaatgatgtactcaagccgttcatccgtaagtttgtactggtattctttgatgacatattaatctatagctcatccttggccgagcatcttcaacacatgcggcaagtattctagttgttacgagagcagaagttagccctaaagcgcactaagtgttcctttggtgagacacagtgggttacttaggccacatcatctcggataagagagttgcaatggaccttgccaagattgaagtagtggagtcatggccaccaccgcgctccatccgggcgctcagagaatttttgggactaactgggtattatcggaaatttatcgctggttatggcactgtagcagcccccttgacagcac

SEQ ID NO: 144189 - DNA, 308 bp, Zea Mays
taagaatgaaaaattcgcaggaaagtggataagggaattgccctatgtcgtttggagcctaagaacccaacctagtcgagctctgcatggaaacactcctttcttcatggtctatgggttggaggcagtgttacccaccgatctcaagtttggagcgccaaggttgatcttcttaaacatagcagaagtcgaagccaccaggctggaggacattgatatactcgaggaagaacggctgaatgcagtaatccaatcagcatggtaccagcagactctaaggcgctatcacgacaaggccgtgcgacagc

SEQ ID NO: 144190 - DNA, 344 bp, Zea Mays
gttttcaaatgcagggccgggaccttctgtgcgactgcgaataaaacggctgcgtgcagtgtaatttatctctgtgtgtcccacgtttccggtagcggttactgtcgctgattagcgtcggacttctccatgcgatttaatactatttcagctagtttattcgttttgattcgttcgtttgccgccttttggagatcagcggcgtggtattaaaaagctcggccgacgtggacctgtttggcaccgtacgggtagatatctggatgagcgaacggggacgcgcttgtctcgcgcatcgggtcgtatctgtcgccaacacactccaaggaaaggaaagaagagga

SEQ ID NO: 144191 - DNA, 466 bp, Zea Mays
atggaaacaccaaataacaatgcgagcacaaaatggacaccccttaaacatcctctagcgccacataaaaccagaaatcccaccagttaccccacttgttcttggcacactgaacaatttcaactacttcggccaacttcttccaagtccatggtgtgaatgtgcaagacctaaattgggcaatcaatccaccaatcttcttcttctgccaatgaaacaataattcttggtgaatacctcaacagatggttccccaccatatgaagtcaccgcccagactataacacccctggtgttacttagggtttacactctagagccacaccctaatctgtcaccacatgtggaatagagaaatctttgatgaacacaatttggctaccagaggattagctagtgtttaagttcatatggtgcttaccttgaccatatggtgctcatgacaagacaaagatttcagaaacca

SEQ ID NO: 144192 - DNA, 685 bp, Zea Mays
cggaggttgctgggcgcggccagctgcgggcccatgcgatcggacggtctagattcgtcgaaggcagaacgacagaacgggtaggctacccttgcagccttaatatagaagtatagatatagattctgtttttttattaattcgatttgtgaggtttagaaccaaaattattttgattttctgaaacatcaaaattaataacgactaattcggttccaaccttaatatagaagtatagatatagattctgtttttttattaattcgatttgtgaggtttagaaccaaaattattttgattttctgaaacatcaaaattaataacgactaattcggttccaattaattccggttcgattttttggttttagtttagtttgcatagaccctgcaccaggccccaccacctgccagccgagccaagccattcccacggccccaccactttgcaaacttccatccgacccctccatttcctcacgcatccccactgagcactgacccccacgccgccggcgatgagcgcgaagcagctctgcgacgccctggccgccgtggggttcgacgccggcgacgatcctctcgacgcggatagcctcgagtgggcgtttctccagggggaggactcccgccggatgcttgcgtgggtctgtgcccggctccgccctggcaacgtcctctccgcc

SEQ ID NO: 144193 - DNA, 2856 bp, Zea Mays
cgcctccttaacttcatattcttgtatccttcgtacaaaacccctgttgttgtcatcgaatggttcgtccaattctattgtagcactctcattccctccattgaacaatttgttgaagtactccttccatctgttcttgatctcttcactcttcactaatagttggtttgcttcgtccttgatgcatttgacttggttgacatcccttgtcttcctttcacgaatcttggccatcctatagatatccttttctccctgctttgtgtccagccgttgataaaggtcgtcataggcttgaccccgggctctactaaccgctcgctttgcagacttcttcgctatcctgtacttctctatgttttctgcacacttgtcatgatgtaagcgtttgtagcaatctttcttctccttgatagccttttggacatcttcgttccaccaccaagtgtcttaacaaaccaaaccaatataatttgttcggcactctacttgccataacaaaagctgtttagtgtttacagttgaaaaacatgcacaaacaaatggactaattctgaagacattatagttggtctaaaattcacaaaaagatagaaacagaagcaaattgtggtatagcaacattgacaataatatgacaaaatcaattccgtggtgcactacgagagttactagaatttcaaggaatgaaatgcagggcagaaacaaacctttcatcacaatctgaatcagggtcacacagatccttacgagcaacaggctccatccagtctgttatcacgtgtgcgcttgtaaggaaagaatcctgaactttatcctgcctgttttgagaaaatgtgctctgtgccatgtagtcactggctatcacagaatctgaacatggcttcaaagagcttgaagcaggtggacagtaggcagagctcgaagcactaatagagatatctgcaatattatgaacacaactctgttcgtctactggctttctttggagagaatcccatacattcatgatccaccggatgctgctgaattgtaaacgtaattctaatgaatcaactgatacatctgcatcaattttctcaaagctcaagcaacccttattccatgggatgcttaaattgagtttccctgagaatccaccaatgggaccggttaagactgcggtagtactatgatgtgctgaaatgtcagctgttcctctatttagatcattttgaagcagtgtgtcgacatcatccatcttcaaaaactcaatgactgcctcacggaaagttaaaaagttgtccagtttaaatagaccaagttgggttccaaattccaactctttaattcggaaaactagagatcgactagtttctggaaatctactactcaaactggtttgaggatcaaatatgacataggcattctttaacttgatattaaagcttgtcagaaaccgtttgacggcattggcaattctctttacaccatcatccacatctcgagatacagaagtggaacactgattactatcggattcatttctttggatcttgactaaagtgtgtgtgtcactagtactaccagagacagagcattcagtatgcacatcatcaacttcacttgcaacagatggagaaagcacaagctccaattcttcaacaacaatctcgcagctagcagcgaatcttactagcaaggattttattgatccttctttcagcgtaataggggatcctgataactgaaataatgcagaaaattaactgatgatttcactataagacaggaagcaaacaatttcacttccgcaggttccacaactttttttggtgggggcattcaaataagaaatgattgtggtgtgctaagtacaacagtgaatcaaattagaagaaaaaatagtgagcaaagggtattgaagctacaaagaacagcaagtaaaatcatagactaactggtcacatgatgctttctgctaaattgaatataacactagccacactcggcatttcagtgtgtgcaaactttacattgtaatgtatttcaatttaagatgcttcatatgaatgaactacaacaaaggtgcatagcctcttctcctgcccccaagatcttattatgttgctattccgtaaacttttaggtacaaactaacctaataaaaaaatactgaagcataccatgcaacaacaaaatgggattagtcaaaattgacacagacattaatcaaaaaaaattctacagctcaacttcttttcggcaccaatcttcagctccagcataaaaaagccaaaacccctgcctcaataccaactaaacttcgaatagtggtcaatcatgatcagaatttaaaatcaaacaactaaacccacccggcaatcaaatcaactattcctatcttcagtaccaagttctgggcttccccacgccaaaactcgatcatccagaaaacagggtgtggcaatcggcgatgaaactatcgcaaaacctagcctcccctgcgccttattgaaagcggactgcgacggctccaatacacatgcgacggctccaatatacaggggagaacaatacacaagcgggagggaagaaaacgcaccttacggttgatgaactcagcgttgagagcgaggtcgttgagctgcagcgtgccgtggccaagctggatgtcgaactgatcgaggtccaggtcgccgaggatcagatcccccagccgcttcttgagcagcgacttgcagacgcgctttagcagcgtgtcgggacggaagccgtccaagaaccccatcgcttcccctttcgcggcggcgtcggtggttgcggagaaggaggctcgccggcgacggaagcgatagttgcttggttcgattgata

SEQ ID NO: 144194 - DNA, 408 bp, Zea Mays
gtgaccactatgccctgctaacggagcaatcggcttaagtcggcaacaacttaagccggtgcaacatgctcacgcttacttaactcagggtgaccactataccttgctaacggagcaatcggcttaagtcgacaacgatttaaggcggtgcaacatgctcgcgcttacttaactcggggtgaccactatgccatgctaacggagcaatcggcttaagtcggcaacgacttaagacggtgcaacacgctcacgcctacctaacctgggatgaccactatgccctattaacagaagcgatcgacttaagtcagcagcaacttaaggcgatttgacgcgcttacgattactcatatagggatgacttctatatcccataaaacaagtttcaaaaccatcacacaacatttt

SEQ ID NO: 144195 - DNA, 323 bp, Zea Mays
gtgagatccacatggagctgatagttgtgcttctctatatcttctgctcgggcaatcatctgacggtggtgccgagccaataaatcatactgcgcatctagggtgagcaggtatgcagtgaggtacacgactgaggggtcgtcctcaagcagctgctgcccttccaatgcacgcatcctggccatccacacaggacggtttctctgaaagggtggaaagaatctgagcagcgtgtcggccacttcttcttcataaatctgacacagggccctcaatgccttacgagcgacgacttggctggtgtctttgaatctgtgccccgc

SEQ ID NO: 144196 - DNA, 601 bp, Zea Mays
gtattcaataagcaatttaaaccgactgaaaatgagtcaggcaacagacatcgcttcgcgtaacacgacaccatttggactaaggtcaactgctcgagcgatatgattacaccgcgcggtcacatcaagtaactattctaggacagtgtgctaaacgctctgcgtatcaagacgtcccttggccatacccattgtggggacggccagaaattttcaatagattttctaaacaagtcacatccatacagtatacgcaatgaatgtattgagacagaaggaagagatcgatagagatcaaaagaaatccaaatatagctactgaactgcaagtctagtcagcagaggcattgaagcacagagcgaggtgaagaccagccgagagccatctacagacgtccaatctatcaccgatcaaataaatttcaaacctaagaaaagcgtagacagaccacattgtttgaattcgcaagaagcatgaaaaagacaaaatgctgatttctaaagcatgaagtgaagataaaatgttgatttctaaagcataagataaagatctttgagtggattattttcaaaaatccactcaaagctcggggctacaccg

SEQ ID NO: 144197 - DNA, 440 bp, Zea Mays
tgaaagatcccaccgccgtcgtgaacaccttcgccccaaatttgcaaagcacacgatcggtttctttaaattaagcactccactcgctccgcttctctgttacgcgcccaacccaccctcagccagcccctcttatgtaccatagctcccagtcaccggaatcccccgagcatggtcaccggcaccgccgagttgagccccaccgtggccagcccttctcaggttcgttcatatccctctggttcccgttttagtacacctctggcctgtagatactcacgctcttgaccaattgaacgctaccacaatattgttctgggaatgtcgtgttgccgcccggaaatgccgccgtggacacccctcacgtcggccgacaatcatgagctttcttcgcccaaatttgcgcaagcatcttaatcctggtgagacactgatgctct

SEQ ID NO: 144198 - DNA, 490 bp, Zea Mays
gtctggacacggtgttaagtgagcaaggactgggtcgtcatttccttagcgacgcgctacatcggcgcccggatgtagtgaaaagtgagcaagggtcttcacatctctctcaatgggtggggtcttcacatctctctcaatgggtgtgaagggtaaggaagctagtcaaagtgtcaaaccaactaggcttcatgtaggtagttggaacgtagggtccctaacatgtagcttacaagagctagtggatgtagcaattaggaggggtgtaaatattctatgtgttcaggagactaaatggaaaggccagaagacgaaggaggtggaggatactggcttcaagctttagtacacgagggcaagttcaggtatgaatggtgtcggtatcttgaaagacaagagccttaaggatggagtcgttgatgttaggaggcaaggtgatcgaattatcctaatccgactggtagttggagatgcgggtttgaaagtgatc

SEQ ID NO: 144199 - DNA, 506 bp, Zea Mays
ctaggggttgtcttacaagtttcagggacctagatgtaaggatctccaatggctgaggatggcgggtttgtttaacgaaaagtcgagggctcttttgaaacgttacgaggccgaaagggtattggtggatctcggccgttggatcaaactcctacgcgccagattagaacatacttcaatcgaacctgtacgtgtgcgccaccgttggatctaggatcggcgctgaggatttagttacccaatgatctacccacagccttcggattttagttctatggcagtggttggttggatcgaactggttgttcagattgactggtgaccgttagatcacgaaccgacggttccctgaccctcttcaaccccatgtaggtggacacgttggtgctcaatctagcttggcggcggccatgactggcgagattcgctccagcgccccagtgcatgaatccgaaattaactaggtgctacgtatgatcgggaatacaacaagcccgatgagggtt

SEQ ID NO: 144200 - DNA, 625 bp, Zea Mays
ctatgaaagagtgggatgctccagaatcgaaaagtacggtagcgggagtaaattcaacaaggaactcaccgagcactactcccggagcttgctgagcctcctgggcctcaacgtgattcactcgtgcccttccttgatactgggtcttgttctgctggctgatggaggagggcgccttgggggcagatgctgaggtattcttggggccattcaccgagttggagtaggtaggtcctgatggcttcagctggggacagttgttcttgaaatgactgggatctccgcagtgccaacatgcattcgccgggggttggttgcttgcaacttagggggcatggaaggagctctgactctgctgactgaaccgtgatggggtgggtcccagctggtctactgaagcttggtgccttgggtggaaatccaaaggatcgagttttctggtgccggtcttgctgctgagcctggaggacttgaaattttctcttgagatggcctttttcttcctcctttgccctttcaacttgcatggccttgttagagaggtgagagaaactgaggaagtcttggctagccaggatggttttgagttctggcctgagtccctttaggaagcgggccatcttct

SEQ ID NO: 144201 - DNA, 640 bp, Zea Mays
caaaaaggccaccctagtgctccaagggattgagttagaaaacagtgaaatagggctgactttagggctctgtagatccaaaaatattaagaatttgcctagggccagtacatcaaatttgtagagctatgaaaggggaataactttgctatagagattaaaccatggtcacatgaagaatttggagaaaaatgagcccaaagttgggctgtcacactaccctaagcctgaattcagattgacagtgggattggatgaacttagggctcaatcttaagcaagatcttgtgaatttttgtgggggcacgatgtagcaaagttggagctggtctattaggctacaattgctacagaacaatggtcttgttgccatgtaaaatcaggaggaaattcgccccaaacttgggctgtcaggctgactgaagaacaatcccatggtacagtaacagataggatcaggttctgatcccctcgccgccgatgagccacgcgcggattcgtgctatcgccgtggtgattcgcgctcggatcagttggataacaccggggatccgtaaatatcacgccgtggatacgctccgaccactattttactccggccaccgtacccgagcagaccacagttgagttggatgggttc

SEQ ID NO: 144202 - DNA, 378 bp, Zea Mays
cagccagtaaagctcataatcttcgggattgcagcaaacctcttacaggccaccagctccaagaggcagagggggaagaagcttcggaggaaggtttagcactcaacctagaagattgttctgcttattctgtggggaggataagggacacacaacaaggacatgccatgtcacgatccaaaagcagaaggagatcgctgaagccgaagcacgacagaatcagccgaagcagaccttgcataatgcctcatgctattcgtcgtatatccctgaatatgtgggcaaccagaaacccacgacatcagttgcttcagcaagtcattctcaagccaacaacatcattggcacctaccttggctcataaccagcagccagaag

SEQ ID NO: 144203 - DNA, 583 bp, Zea Mays
aaaaaataaacataactattaataccttcttgttgagtatcacgctgcgtggcagcccttagaacttcgtcgatcatttcgccaaatgtctcagatagttcaatctgcttagcaacaagcatccgatggctctgctgaagagaagcacaatacttatccacctctttgtcatgcgcatcaaacattgattcaaacatgggccgatgctgggaggcagacatttcagcttgttgccaatcaaatgctttatgcgtggcacatatatgttgaatacttcagaaaccgatcgttctggtgcaatgacataacatgtctctgtgcggctacgaaactgtttaaatccaagttataactgttagcatgtattggaattttaccatctgcatgaataggaaaaatatgtttatggctaacctttgcatgaccaaatggttccccagtttggcgagggccacgtctgtcacccctagccaaatctcttattgtctcgttgtcaaaatacttgatgcggggagtaccatacttgttctcaggtgatgcagggtggtgtaagtggtcaagataatatatctgaaccaaatag

SEQ ID NO: 144204 - DNA, 408 bp, Zea Mays
atgtacgcaacgcaagaggcaggctgcaagccaggaggacaggggagcaatgtcctgtctaatgcttccctaattctataggacatgttagttttttagctaattcccatgtaaataatgcaaaaaatgcttctaacagcctccttaatctaattggccccctaattttggatactggcttcacccctgctgcaagcaacaccatggcagtcctgctgcagcacgctaatacatcaggcctgcgagaacgtcgtcgtggcactcacccccaaaatggtcgctggtggctccaccaaacatattttaacttatagcccctcctttgatctaatcctggatccaccactgatctctactatacttaaagcagcaccagtttcaacgatcagcgtcatctttttacaaaaa

SEQ ID NO: 144205 - DNA, 1467 bp, Zea Mays
atttggagttcatatgcattttctatgaattatacaagttttaacatttatttatgcactaaaaatcgatttctgatattaatttctaattttcaacgttctctggattgggccacaaataccaggaaacataggggtctcggtgtaagagtatctaagactcaggaaaccccaggtgtggacggcgggttcatttcggataaccctagggtctctttagaaaaaggtgcaggccgaaggggtatcgcaggttatggaccgtccggttagatttcaatgctcccgattagacttagactgcttcctgtagcgacatgcggatatggccattggacttgggatcgacggtcgcaatttaatgaagcgaggcgcaatccacaccgtaggattgaagatccacggtgtccactcacctacgcgaagagattcatccactctaaccacagccgcacatcacgaaacggacggcggatatctcatccccaagttcgtgacctcgccagtacagcgccgccggaggccacggccagcgcactccggcgagcaaattccggtaaccccagaccctaatcctagttcgaattgacaccaggcaaagtgtagaggaaagcggagcggtcgggggggtgagcttaccaatgacggcggccgaagagtctctgcccacgagatgggggtatcccgcggcgagcttctcacaccggtgagaaattccaccccacctggtcacaggcggcccctaattcctcctctaccacctccgccgtggcacagcgaagcgccaaagctcgaccaggttggttgaataggcgcgtaggtgccaatccacggtggaggtcacgcaaacgttcactctgcggcaacgcggcggtggcttgggttgtgcggcgatttctttcctgggaacttctgagtgcaggaaagcgggcgtagttgcctttatccagctgcgaagggcacggcaagcgcgagttcgttggcaatcgtgtgcaacaaccatgccgacattcctggtgaggggctcgcgtggtcattgggtccgcccgacgcggcgctcggagcgggggtgggtgaggggtgctgccgtcctgggtttggcttaacgttctcccgctcgcccagtccgtggacgagtccccgttcgtggtcaacgggaaaaaatcgcgccgagtagcggtgaaatcggccagccgttgcgaagttgggggagaaggttctgacatgggggtcccagttgcggtgaaaggcagtcggcgtgggaagcagctttgaggcggactggttggacccgcaactcagtgagcgcgcgagatgaaaaagagtctggcggcttgggtccatgagtcagagagcgggcgcgagcgcgagggacagacaggtggggccccaatgtcggcgccaatggtgagtagtgggcagcgcgctgtgaaaacggaagtgggccaaaaacgaagtagccggcccagg

SEQ ID NO: 144206 - DNA, 354 bp, Zea Mays
gcgagggcatcacacgttacattggctcaaccttagggataatgcccatctccctatagttgaatagcattatcctcagctcctcaccctcaaaaagattccgcaactccccctcacctacactcgtcccagccggcgaggacaacaattctcgtttgccagccccgtccacacgaagacgacttccctccacttcactaacccttcgcttcgcgaccgcccttcgccgcctatgcccaccacccgcactaggaataacttcagcacctaccacgcgcggagaagcctcctccgcagccacatccagcgccgcaaaataatccaagtctttatccgaagactcctctgtccaca

SEQ ID NO: 144207 - DNA, 332 bp, Zea Mays
cgagaaccgaaggtaaacacaagggaacacgagaacctagacatgttcacgctcttaatgtgagataataccctatgtcctatatgtttgtggctattgatttatgatctgatgtctaccctcttggggtgcctcgtccctcactttatagtccaaggatgacgatagttttagaaaacttatctagtgtcatacgagataaggactaggatcagcctagaatcattctccctactatctaagagatctatatctatctttacacatgggttcttttataaaataagacatacatgtaccataaagaggccgctcttaccaggatatgtcat

SEQ ID NO: 144208 - DNA, 447 bp, Zea Mays
attttatcagttaattctatagttggcacaaagcaacatatggtacacatgtataactaacacaattttattgtcttgcagggcaacactagtgagatacagtctcttgcgctgcattatatcacattccatccgaagaacaaagcattatcgctgcttgaagacatcaaaagattcaaggtctaatggatgcagtttagtttagatatgtaatatattgtgtatacaatggttccataaacttcagatgagtcatgtgtgtataatatgggcaaagacggtagacgtttcttatgttatgtcaatgacaacttggacaacttggggatcagcgatgtctaaactggattattgtaccccatgttattgatcttcatgtgtgtttcatgcatttaattctgccaatttcctgtacaattttatgttgtcaacaacctcgtgttaagc

SEQ ID NO: 144209 - DNA, 676 bp, Zea Mays
atccatggtagcagggtgcatctcatcagctcatataagaacttcgttgctgaggtgaagtctacaggagagcgcagcgagccgtctttgaagggtggcttgaagagtgctacgacatgagcggtgctagaagcaattctgctgtgagggtggcgaggagggtctgaagtaccatagcaaagactttggaacctcatcgactgctcagagaaaccaaagagctcccaaatccaagcagtatgaatagtgacatcctcacgctcaaagcgaaacctaatccactgatggtcgggatcaatccaaacagtagcatagaatattctgacccgcttctctatgtatcaaccaccaaaagtcagcagtgagtacagacctagtagataggtgatatggccctcaacctcttaaccaactgttgaacacaaagctgtcaggtctagtcgatggtgagccctcaaggcaatctgagctatcagctgagcacggtagaaagactcctgggtccgagtactgaagagaggagcgactgtaggatttctctgagctggaaaccaggactccactggcacgtgtttgaaatggcaaactctagtggaagtggccctctgaaggtcaaaaagtcggggatcctcagcaattggtcgaacctctttctcgtcgcgctctcgaaaacgat

SEQ ID NO: 144210 - DNA, 668 bp, Zea Mays
ccgccggctgcttcaattcttcggcgagtagatatatatatagcaggtttgcttagtaacaataaaactaattcctttaccagatcccttccgcgtgcaccaagctttttaacctgcctggagtgcgtgctccagcctcctccagtacgtgcgcatatatataccccggacgtacgtatgcaaatgcaattatgcatctcgccaccgactaccgtgtcacacggcatcagctagccgcctagctagatagctagtatatgcgtggtcttcctgccacggaatacctagcttgtgaaacacgtatgatcccctcaccttgttgtcccctaataaaataacttctgttggcgctacacagtactaccgttgatcactagcatacagaggagctctgtagacatgttgtgaacctatttatactagcattcaaacaccctcttaattaagtcacgactgtcgtttagccttttccaaaactgctctccgtgtttctgctgccttttctttttattttacaagctgttgcaggatgaagaaggatcaacaggaaggcacgaagaaagatgcccctcgcgtcggagggtgaaaacgactcctaacgggcatgtaacttggtatcacacgtgtaacctttgcatgtgacatggaatcactttcgcacctctctt

SEQ ID NO: 144211 - DNA, 581 bp, Zea Mays
gggcagtcacggtaccaaacagcacatttatgattgaaatcattcttttgccttttctcggcgtcctcttggcagtcatttctggttttgactcgggttgcatgctagccaagggaacttcgccccgaataggcaatttagttacttcctcatcatcttccttctcttttgccttttgttttaaacatcctttaaaacaaagcttcatgccctaaaaagaaaataagaagttgtttgcaccttcattgcttctaaaggaccggagaccatcggctcagaagtcgactcggtcttgatagcggcctcttcaataaatgcaatcatcgtaggcagctttggctcgatcgcagacaccccattcaaaatttactttttgacgcttcgatgtaactttcacccttttctgttttggggcgtttgttggtggtttcaaagacatttttcttttctttgccctaccctatgccaggagggggtagtctgggtagacaaagcctatggcatcgaacactcaattcaaccttctttttcctcgagccttgaaggtcgttgctagagctttgtcttcatttttacgaatt

SEQ ID NO: 144212 - DNA, 338 bp, Zea Mays
cgtttcccagtcactgctctgtgggctcacacccggggggtcttcttctttcccccgcatgactcgctcgctcgccagcaggccctccgcgcgtggtgacttcgtcccctgatgggtgggggccagcaccggagtcgaaccaggctcacccgtcagctaaatggtccgcttccactggagcgtcttccccggaaggttgttactgctgcaccgaactccccgaaatctgctctgcgaaccgaccctgccttcggctcttcccctgctctataaatgcttgcgtcacgattttccctcgccatcatccgtgcgcaccgaactaccagcgaagcagtgga

SEQ ID NO: 144213 - DNA, 366 bp, Zea Mays
tgtctgcctagtaaaagatgtccatctatagtcttgaaatagtaacttgatgtgacagggaggtgtaatactccgtttgagcagttgaccttgattccatctggtgtcgtgttatgtgaaatggcgctagacgcctcactcatttctttggaggcttgtaccgctattgaattcttgtaactgttcggtgagcgggtaggaagtgaacggtcgtctgtcggcccctttaaatatcccactcgccttggttgctctccccactcattctcattcagtcgctttcttcttccttgcttcttctccttccgaaagagtgatggctggaggaaaaagaggcaagaaggggtgccgcccgattgacgggaa

SEQ ID NO: 144214 - DNA, 662 bp, Zea Mays
cgaggaataggatgacggtacctaatggtgatgttgttaatggctctacaatctacacacatgcgccaactaccatttttttgggaccaaaatgacaggtacagaacaaggacttaggctctcacgtacatacccatggtccaaaaggtcttggacctgtcgctgaatctccttagtctcttcggggtttgcccgatatgcaacacgattgggcaaacttgctccaggaatcaaatcaatttgatgctcaatcccgcgaatgggaggaagtccaggaggtatctcagcgggaaaaacattgttgaatgcctgcaaaaggttaatcacaggcgcaggcacaatgctagcaatatcatcattggaaaataaagcgtctgtgcacactaaagcatagcagcaagtatcatcagcatgtatttcagcaatatcagattttgtaacaagcattacatgagctttcaaatgaatggcttgctgattttcagatttaacaggtggttcattatttgtatttgcagctctatccttgtcagcttgtacaatcttagcaggagtcaaaggaagcaaagtaattttcttgcccttatgcatgaaagtgtatgtattactccgaccatggtaacatgcatcattatcatattcccaaggtctacccaacaaaa

SEQ ID NO: 144215 - DNA, 499 bp, Zea Mays
ttgatctagcgcgtttattgtgtcggtccggctgcacccgtagtcggtttttgcacggagggtccggctgcacccttaggtgacttttgcacggatagtcttttgaagaggacttcgattttgcgcacttgttgtgctagtccggctgcacccttgggcgacttttgcacggatagtcttttgaggaagacttcggttttgcgcacttgttgtgctagtccggctgcacccttaggcgacttttgcacggatagtcttttgaggaagacttcggttttgcgcacttgtagtgctagtctggctgcacccttaggcgactttgcacggatagtcttttgaggaaagactcggttttgcgcacttgtagtgctagtctggctgcacccttaggcgacttttgcacggatagtcttttgaggaagacttcggttttgcgcacttgtagtgctagtccggctgcacccttaggcgacttttgcacggatagtcttttgaggaa

SEQ ID NO: 144216 - DNA, 343 bp, Zea Mays
gtccagtggatgtttctaatgcagtgaagagagctattgctagatcgctcatatcaacgtatggcggaaacctaaccaacgacgtcggagaaatatcacagtggcagtcgatccacaggttttcttgggcgctcgagggcatctctcagtctcagctggaagtcatgttaatttggcacgtcgcaaccgagtctttgcagttcatttgtatagatatatactatgcgcacttgatgtcacataactgcttccgtaccatgaagtcaatatagagctgagacagaaggtgtaagaacgcatagagctttcagattgggttcgaacatttacgatcagatgaagc

SEQ ID NO: 144217 - DNA, 567 bp, Zea Mays
ctctgtgcatctattcgttgcacgggtgggctagcgggacccactgcctcgccttcgacgggagctgaaaccgaactaaagttcgttgcaacggctccagaaaactcgcctcgttccttgctaatcctcctgccgccctcgcctttcgctcggatttggtccctcctgccgttctacaaagcctgggcgccatgccctctgaccctcgcgtgctcgctgagatggttggtagccgcgaccatggtcgagcgcagtgatgagagagagaggttcgccgtcgcacgcaaagctgttcttccatgcgcgcatggatgctcgtcacggcttcgcctgggtggaattaagctccggttcaccgtaattcttcgccggtgtggaagctccgccgcacaccgtggctagtgcgttacccgcaaaatctctggtatgttcttcctccatgagattcgacttcgtttgcacatcgcgttgcaccagggagcactggggtcggtgaatcgggtccctgggcatgctgctcgccggagggcgccgccggggcatcacccttcgccgtcgcgcttgggt

SEQ ID NO: 144218 - DNA, 445 bp, Zea Mays
gctggagttgagaagtccgtagcagattacttcagagagacataccagctggaaatggactatgattttctcccatgcctccaagttggcaatgatcagaggccaaactacctccctatggaggttgccaactatgaacttaattgaactgtggccctatgcatggaggtatgttgtctgctcttgtttcttaatttccatttgcatttcaggtttgcaggatagtagctggacagaaaaaccgcaagaagttggatgccaaacaggtctctaatctagcgaacttaacctgccagagcccagatacacgtgagaagaaaattcgtcaggttctcgctgtttctgctttttctccttcttctgttttacctgatctatactgtggttaaacaaattaaatcctttttcttagtttgttgagcgtaatgcctacagtagagctgag

SEQ ID NO: 144219 - DNA, 609 bp, Zea Mays
acacttgatgcagcgaatgtcagttcattacgatcttggttgcgaaggaaaagtttgagatccttcgcgatttcaccagaccctgggtttatatgggctcaagtgtgaggtaatcactacggggcagatggtttgcatacttgatctcttataaatctggttgagtcgccgaagctggcattagagcagaactggcatgttatagttcatgtgggcattccaaactaatttttaaaatgggtcttacaaaactaagtatgtgccaactgtcaacccttaagcccatgtaaggactttaggtggcttagtgagtgctaaccttcggaagggtttcatgcattgtgctttattttattgattatatgaggtggttagtgtggtatgtcgttgtttcgttgccaaggtaagaaaggtaagtgtaggaccatgcaggccaggtctagtcggctgccctcatgtgtgggttaccatgtgtgttgtataaggactgatagaattacttacattgttgcatcatggggatgggctggaatgaacttttctgcaggtacactaacctcgatatgagtagttcgtgtagttgcgtaccgatgagtgaacgagtatgcc

SEQ ID NO: 144220 - DNA, 605 bp, Zea Mays
atcatcaggaatttctccaagcaaagcaaccaaagcactaacttcttcggcagagggtcgcactctaaggcccaaaccgccatcaccagcaggaggatttgacacgaattgagtaaaggtcttggaaggaggcaagttctaggccgagtaggcaacaggggcaccaacatttgacaccttgcccctaagtatcatttcaagccggctcaccaaatccacagcaggaattcttctattggtaacccgggtggagtcagctaggccttggtacaggtaagccgggtatgccctatccttcaatggctgaatattcttgaagacaaagtcagcaaccacagcttctgcagtcagacccctctccttcaataatccaacttcagctagcagaactcctgcttaagccacatcctggtatgtgggggattcggtccagctcagagtgtgaacatccggctgtctccctgaccgtggggggagagaatttccatgattctcaacaataaaccactccaagcgccatcctttaatgctgtccttgagggggatgtcgagataatcagttttccttccgcggcgcatctccaagcttgcgccccccaccagct

SEQ ID NO: 144221 - DNA, 418 bp, Zea Mays
actgacaaacaaggttatgagcaatgatggcacaccaggttttcagtaaaattagaatatggatatagaatttcaccgtttttctggcagagtgcaaagggcattggtttcgcaaatactagctggtccaggaaccaacctgctacagctaacagcttattgaacgtgactgctgcatatgacagttgacttatgtgctctacaaatctaaaccagcacagggaacagagtagtggaccttgaaatgatgatgtggataacatatgccaatgaaggcactgagttacactaaatatgcagcataaggaaatgcttctgtgtaacaataaagaaaatatttgttaaatcagtttacagatgaaaataaaggatgacacgcaagcgtatgtatttgttcttcactgagactttagttgtg

SEQ ID NO: 144222 - DNA, 344 bp, Zea Mays
aatccaatcagactctcggccgagttaatcgctcgatcgtccgttcgtccgaactctattcgctttgttctccatagaaacaaatttcgcaggagcagttttattccgggaaataatttaacgcgacccgtttgagtgttttaggccaagcccattccagcccggcccatttggcccatgagaaaaccctaaccctagtgccccttctataaataggacctctctcccttgcaaattggcaaattttcactcccacccctcaaattttccagccgccactctctcttctcctttctcctctcacgcacaacttccttcttccctgtctcttcttcctcgcggtt

SEQ ID NO: 144223 - DNA, 348 bp, Zea Mays
catcaataaagaaggcttcaaagatactcaacttgttcatgattgactagcacgctttcttaactcggggtgaccactatgccctgctaacggagcaatcggcttaagtcggcaaagacttaagacggtgcaacatgctcacgcttacttaactcagggtgaccattatgccctgctaacagagcaatcggcttaagtcggcatagacttaagacagtgcaacatgctcacgcttacttaactcgggatgaccactataccctgctaacagagcaatcggcttaagtcggcaaagacttaagacggtgcaacatgctcacacttacttaactcggggtgaccactatg

SEQ ID NO: 144224 - DNA, 401 bp, Zea Mays
gccggtgaaagattggatgagcgattgcctgaagaaacaaaaaacctgcgcgtcgtagcaatatgtggagttctgggtaggctgcactcaaatcaaggattagcacaatcaaactataatgcgaagttgaattatagtgcaaaacatgaaattatgttgttggcaacacgtgcaaaggacgaatgggaaacaaactgctgcaacacataattaccgaggaaggggagcaagagtatgcagaaaaacttctcggcgccggtacactgtcttaacatttttttttgatttttttggagcaatcatcaagcgctacgtgggtgacctatatagaacttttcgagagctttccagaaaaaaagagcactacaatctgagttctgagcgaaaagttatggtcgttt

SEQ ID NO: 144225 - DNA, 409 bp, Zea Mays
cggcgggtgaagcagatgatgggggtgctccattgcgggggagtcgtagctgcaccagcgcgcccgagcaacgtggtggttgttcacctccgcgtacaagaggctgcaagacatggcgcccctctgcaacgctccgtccggcgctggccctcatctgcggcgaccgtgcaactaccacgactactctccttcgtacaagggggtctgctggcctcgccaccatcttctctagccacaccaccctttgcgcactggtggccgcaggaccatgaggggctgcactacatgggattcacttgctgcaagcaacaccaacgttggcctccacgggcccgcctccaaaggctgctgtgtctttacctccatggttttagctcgcactctcctcttcactgtgcaacgtttcctt

SEQ ID NO: 144226 - DNA, 655 bp, Zea Mays
accagctggacccactccatcacgtttcagctagtagagtcagaactcctttcaggccccctcggtcgcaagcaaccaaccaccagcaaatgcctgttggcactgcggagaccccagtcacttcaagaataattgcccccagttgaaggcaccaggacctacttactccaactcggtgaatggccctaagaatacctcggcacccgcctccaaggcaccctcctccaacagtcagtagagcaagacccagtatcagggcagagcacgagttaaccacgtcgatgctcaagaggctcagcaagctccgggagtagtgctcggtgaattccttgtcgaatttactcccgctactgtactttttgattcaggagcatcccattcatttatagccactagttttgtggaaaagcatggaatcccctctatgcacctagaaatcccattggtcacccgaaccccagggtcagaccttctatgccagctcaaatgctcccaagtcagaattcttttaagtggggtagtgttcttggcagacttaaccatcttgccatcccaagggattgatgtgatcttaggaatggattggctaactaagcacaagggcatcataagttgcgtaagcaagaccgtccttctcattgatcgccaaggaaaa

SEQ ID NO: 144227 - DNA, 568 bp, Zea Mays
tggcacaccgaccaaatcatacgaatcgtaaactactagtctccaactcacaatcaccatgcatttacttcccaaccatgaatacatacatgtttatcatacgaacagagcatttcaataattatcctaaaacaattaactccattacacaacttgtaccacaaatctacttgacttacttgaagcgtctactcgacatcgtgagcacaatcatacactatatgcgaagcataatttaacgaacgcataatacgcattgtcacgactcgacttatgaatatagagaaagcgatgactactttggcatgtcaccacttctctatttaagccaagacaacttctatctacaatgaccaatcattcatgtcgagcacactttattttaccatgtcttgcatacaaccatatggtggcgtgcactcgagacacttcaatcaatgtggcgcgaccactaatatataaactccgatactcatgtcttaataacacatcctccacgcaaactagcattttctaaactactcgtcacattaacaaatatatcccctatataatcacgaatcccatc

SEQ ID NO: 144228 - DNA, 385 bp, Zea Mays
acgaaaatggcgacttgaagaatggagttagggtttaagtgcgtcagatttaaatcgtagaaatcgaggagaccgcggaaaaaggagaaatgggaagagcaagtccgcgtatgagaaacgacacataaacaatggattcgtgggtgtgctctatcggaatagtgaccccacgtcagatccgccaagaacatagttcttttgatggccaaaccccagtctcaacaaggtgaaaaagatctaattcagagatggacatatgattaccagtgaatggaagctggctgttgggatcgatgggcggaatgatcggagcaacggtgctctgtctcttccgcttgggagccatcgcaatctctcgggcggaatgagtgggctcaagaattca

SEQ ID NO: 144229 - DNA, 655 bp, Zea Mays
ctaatttacactacaatccacctaatttataccccaatccacctcaacacatgtgaattggaggccaatactagattatccaaacaaagcctcaggtgggttcataacaagcttccaaacctcgagtgcatggtcttccatctccttgatagcccagtttagggtctcgtaaggactgttaaacatgatgaatgctgccatacaattcctattttacattaggttcacaataaaaaaattgtcacatgtagtagtcaacaacacttggcaatgagtaaggatttataggaggttcaactcaatgtagcacatgcacggtgcattggcagacttgtccgtaaactccaaatggtacgtcggtcgagggcttctacaaactgggtggtgagtggtgactaaatcgcactacgaccaacgtcctagccatctctgattacaaatcgtacaataatcgcgacctcaatattcaaacaataccacacaccctatgaaatccaataggaagtggaatacatcttgcctcttctacagagtctgaatggattcaggctgaagatgcttactttgaagggaccttcaccggagctgcccgacaaaccgaggcagctgagcggaggttttcctcccccaaaatccgacgcgaacaaccacttgc

SEQ ID NO: 144230 - DNA, 400 bp, Zea Mays
gttgttttagctttcttattctgtgagtgcaattgtttttgagcttcggctttctgcagtgattattaccgaaatggccgaggataagaaaagcgtagatcccacactcgctggttttactaagccatggaatggaccaacgtagaaaaatcactaatgaaatgttagctaggctatctggtgattcaagcgacatcgagggcttcgatgttgagagtgagaacgaagatgccgaagatcagtcgtggaggccaagccacgttgtttttgggaagtcaactatcagacaagggcaaattgaagcgatgaaaggcaaatattttcatgatgtgtccatagtgagggctgggggagaacacaccgttccccatcctgaaggtgatgaagtggtctttaggag

SEQ ID NO: 144231 - DNA, 349 bp, Zea Mays
ctataaaagagggagtctagggcttcatttggagaggagaagacttcatagattttcatcatccatggctttattggcactcacctcaatcaccaggaacttgggaacctctccctctctcgaccggcttgtatcccctactacaagcacctaggtgcaagtaatataagtctcatccccctctgctagaagtagggccttctcttgcccaaaccaggataaaggcttgtgtcttcttgcatcactcatctagatttgggcacgcaacactaattcactagttggtagggccctcaggttaaaacaccaacatttggcacgccaggtaggggctcgctgcatgtagaca

SEQ ID NO: 144232 - DNA, 293 bp, Zea Mays
cctgaatggaagtgggaagaaataggcatggatttcgtgaccggactgccccgaacgcagaaagggaatgattctatctaggtaataatcgatcgtctcaccaaggtggcccacttcgttccagtaaaaaccacttttggaggagccgcccttgcgcgattataccttaaggaaatagtcaggctccatggcattccacggaagatagtgtcagacagaggaacacagttcacctcaaaattttggaaaggcctccagcaagcaatgggcaccaagttagatttcagcatcgc

SEQ ID NO: 144233 - DNA, 421 bp, Zea Mays
tctccgtggccgtccccgtcaccaacgccgtcactttcgccgccacggccgccgccgccgcggcccttggcgagcgcgtccggccagcgcccgcggtccttggtaccacgctcatcgtcctcggcgtctgggtctgcatctcgtaggcttaggctgaagatctgcttggtttagttctggcattacagtcgtcgcatggggggaaaaaaggaagttttgagggcaattctcagattccatttcactcctctgtgctgtgttgccaattgccatatgagtgaattattcccagtttgttgatggcagcggcgtttcattagctagatggtcagaatataatgcagtttcattctggtaattttggttactgaatccatttctgcttaggtgatgaatgaatataacactacggttccattca

SEQ ID NO: 144234 - DNA, 455 bp, Zea Mays
ctagctaacagactggggaataaactgcaatctatggtctcccaaaggcagagtgctttcatcaaaggccggttcatccaagacaattttatgattgtgcaacaaactgccagactcctccatcagcaaagacaagcaagaatccttttgaaactagacattactaaagcttttgactcagtttcctggcctttcctcctcgaagttcttcagaaactggggtttgggcagatttggatgaatgttctgtgtggactgctatctacctcgtccacacaagtactgcttaatggtgttgctggcgaaaaaattcagctcaaaaagggtttaagacagggagaccccctctcacctatgctgttcatacttgtcatggacgtgctaggatggttaatttcaaaagctgatctagaaaatctgttgcatccattggcttctagacctttgcaacacag

SEQ ID NO: 144235 - DNA, 453 bp, Zea Mays
ggaggttgtcatcatatggctattgatatcaaggaggcagattcactcgagactatcaaggttgtgtcagagtttctggatgtgttcctgaaagatttaccaggtatgccacctgagcggaaagtttagtataccatagagcttcttcctagcatcgcgcccatttcaaaaagagcctatagggtatctggaccagagttggttgagctcaagaagcagatcgattagctgttagagaaaggttacatcaggccaagcacctcgccttgggtcgcccctgtcctgttcgtggagaagaaggatggcaccaggaagatgtgcatcgattatcgagttctgaatgaggtcatgatcaagaacaagtaccccttgcccagaatagaagatctgttcaaccaactgagaggagctagcgtgttctcaaagatagatctaaggtcaggttatcaccag

SEQ ID NO: 144236 - DNA, 584 bp, Zea Mays
catcaaagaggcatcggttcctgtgcttcaaaatggaccaagccagcaagccaccaggatcactagggagttggagctttttcttgttgtcttggctgtccaacgagaagctctacaccaccaagcctggaaggacttctcatcctgggatggctgcagcaattgcatagcacacctgtgtaggacagcataccaaattggcctggagaagatgcaattcaccaggattggccgatcatctcgtccgcttggtcgcacagaagacaatgggctgggtgctgcagaccttgctttgcccagcatcccgtcatccagataaagatcttgcaccgcaggggcgccaaggtctttcacacacatttacaccctcgaagaaggttgacccagtaaaaaaaccgtcgttaggctaattgtgccgagtaagaaccctaggttgacgctgtccagatatgcacgtaggccgattctccatgtataagttaagttttaagtttaaatttcaatttctctaacatttacgattttctccatcattctataaaatttgaactcaaaattcaaattgtatatgagaaacaagaaat

SEQ ID NO: 144237 - DNA, 388 bp, Zea Mays
gaaattagggctgagtgtcctggaccgtggatgttggctggcgacttcaacctcatttataaagattcagataggaacaacaataatttcaataaagcaatgatgggtagttttcgaagattaattgaggatatggccctaaacgaaattcccttgcatggcaggcagtacacttggtccaaccaacaaaatgtgcttgtactggtcaagctagacagagtgttttgttcagtggattgggagttgcacttccctaatgttcttcttcagagtactgcctcacaagattcagatcactatcctctactcctggggcttagggataataaatccagaaaaaggcgtttccactttgaatccttctggaccaagcttgaggggtttcatg

SEQ ID NO: 144238 - DNA, 668 bp, Zea Mays
gcaaaattcgtcacagggaaaaaactgtgagaaagaaaaaaaaaggttagtaaatctcccaacaataggaacatccctattaagtggagaggtcagactgaagggcatacccagaattgttcagaatgattggtgtgatttggaattgtcagggtctgggtaaagaagtgaaaagtgagttcctttgggatattatcaggaaagagaaaattgattttattggtctacaagaaaccaacaagaaaaactttgatgactcttggttggacttcattagtggtaacaggaattttgtttgggtctggtctccccctaatggtaggtcgggaggtttgctggtagggtttgattctgatatgtttgatgttagagagaaagaatagggtgaatttatgattcggactctcgtgattcagaaagaatcaggatttaattggaattttatcaatgtttatggggctgctcaaaatgatcaaaaacagaaattcctgagtgaattgtcctccttctgttccaattgctctcatctaatgttgattggaggcgactttaacattcttagaaaagattcagaaaagaacaagtctggtggtaccaataagtggagttctgtttttaactctattattgatgttcatgatctgattgagttggatctaagtggtagg

SEQ ID NO: 144239 - DNA, 371 bp, Zea Mays
cttgagtaagcgtgatgcataagcaataactttctcattttgcattaggacacaccctaagccttgccttgaagcgtcacagaagacgatgaaatcctggtgtatatccggtagtgttaaaacgggcgcggtcgtgagcttttcctttatgatctggaaactttcctcacactttggggtccacacaaacttattgtctttcttgaggagttcggtcataggtcttgctatgctggagaatcccttgataaagtggcggtaatatcctgccattcacagaaagcttcgaacttcactgacgttggatggctgcttccattttgatactgcttctaccttggacgggtctacttctattccctcttcagtca

SEQ ID NO: 144240 - DNA, 350 bp, Zea Mays
gccggtgcagccggactagccgttccgttcggacgcaccggccgtcaactgccggtggttgcctgaaacggacgaccgatgccacgtgctttttgcttcgtgtgtgcgttgtgcaggctagagagatagaaacgcatggtttcctgtgccctgtgtggtctccggatggcaagtcgttgtaggatgcggtgaaacagtggcttgcctacttgcctgtatgaacacacacttatatatattggtttctaatgactttggccaaattacagttgtatatggttgagtacttggcttctattgtcagtacgtactgaatgtatgtatattgtaatgcggaaaatgaattatat

SEQ ID NO: 144241 - DNA, 346 bp, Zea Mays
ggagggtgcgtttgtcaacccgaatggcttgacgagaaactcaaatttcccgcagtgtgtgtggaaagctgtcttgctgatgtcgcccggactcatgcgaacttgatgatatccgctgcggaggtcaagcttggtgaagaacctcacaccgcagagttcatccaatagttcgtctactactgctctactactggaatgggaaaggagtcctttaccgtcttgctgttgagctcgcggtagtcgatgcagaaccgccatgacccatccgctttccggactaggaggaccggagaggaatatgccgatgaacattcccggatgatgccttgctgcagcatagtctcgc

SEQ ID NO: 144242 - DNA, 358 bp, Zea Mays
ggtggtcagcgaatcttcataaaatttgcacgtcctctgcatgcgcggagcgtggcccaggagtcttcacgcccacacaaccgtcttccttgctcgctcccagttgcgcctaatgggtgtgcttgtctttttcagtaaacagttccatgagttcaaatggcgtcatgatgcgaataactgacctttgatgtcgtgtttgctagaaatgtgccgtttcttggatatcaaagcgacgccttgattacttgtgatgatacgacgtacgtccggagacgaaggggcaaaccctccttttaataaatatatgggagtccctggtgttgccttcatcactcgtttcgttctcatttccttgaag

SEQ ID NO: 144243 - DNA, 527 bp, Zea Mays
tatccatcccatgacccctgactaaattataaaagatgatcttgctcgggcttcaaaaactacaaagcaacatgcacctacgccatccacccctgttaatgctgaaatcaagttgcatgctccggttttacttgctacacatgctgattttgatgacctacgtgatactcacttgccctgctatgcacttgtatgttctagtatgctcgtttcacttgatgatgccccgcctttggatattccccctgttgtttctaaccttttgcaggagtacgctaatgttttccccacggacttgccaccgggtcttcccccgcttcgcggcattaaacaccagatcgacctcatccccggcacccagctcccaaaccgcaccctgtaccgtacgaatccggatgagacgaaggagatccagcgccaggtgcaggtgttgcttgataaaggttacattcgtgaatctcttagtccttgctcagttcctgttttacttgttccaaagaaagatgggtcatggcgtatgtgtgtcg

SEQ ID NO: 144244 - DNA, 485 bp, Zea Mays
gccctctgatgtgcagattacgatcggcagtgaaaatatcttcgccatggatgaatttggggtaccgtgaccgccctgtcgccatacccacttgccggcgacgtggctgcgcggtcgtcgccgtggttgccgccgttcactcggttgtgccacgccttaggctgttttaccacgtcgtcttgagccgtggaagttaaccagtgatagtcgtacgcctttgtccagtgaatgccatggtagatcgccacggtgactcatcccctctcctcagccgccaacttctctcctcaaattcggagccaccattcatggataatataaattgagtgttcagcgtgctccattaggttgttacgtgcccagtgcatcgctcctcgcctccgatcatccaccgtagcgcctcaatttgggatttcccccaattcggttctccgcgccgccgtgagtcactgcgccatggaccgccgtctctaggtacgctctca

SEQ ID NO: 144245 - DNA, 516 bp, Zea Mays
cggagttaatctccgaggagaaattcgttgaacaccgatcgtccgtagccttccaactccacacaacgtctgcaggcattcaacgaagcatccctagcacccatgcaccaaggcaacaacacaacgagctgcaccgcagcggagcttccttctcggctttcgcgctgcggcatttggctcccggccatggcgtgtcccttccacttgagaatgccgcagaccccgctgggcaatgacacgggtcagccacgacgatgtgcggcctcgagtaattaggatagaaagtcttggtttaatgagctctagggagttgatatttatatagccgaagtcccaacagacgcggaatttatggagatatcaaacggacattcggatatcaactgatcggataagctctcatctcccatgcaaacaaatgacgatattcatgcacgtgtacaggtgtttggctgagatccgatccggtgctaaaagctaggcgattctgtggcatgtattgaaaagccatgtatt

SEQ ID NO: 144246 - DNA, 595 bp, Zea Mays
acgatttcggctgttagattcaaaatcaagggctcttgttagatcgttatttaaaacgaaatggcaagcaattgtgatcgtaggatcgtggatcagtggtccgaaattcacccacgacacgtgttggccccaaccctaggatcatggagcaacgtcatggatcaaaggggccagccgatatctaccagatctaatcacgttcgttccttccacgatcgacggtcccgagtgctttcttcccccagctagcgcccaggttgcggcgccccgatccccacggcgccgagcatcacaccggcgcaggccaatcttgctaccctcctgaccactcccccaaccactcggtgaaaacagagcgagcatgaaggcaaacatcagggaacgtttcttactagcaatcgaggcagtgtctagtccgaccacgcaacatggcgggtccgcggcggcacaacaccgatggaagtcccccattccctgggaccgaacccaagttctactggtggcaatgcgcttcagagagtatggaggaactatggggagaggactcaccaatcatggttctgtggcgcagccggttcacaacgatgaatttctc

SEQ ID NO: 144247 - DNA, 345 bp, Zea Mays
gtaaggtgcctgctaccttcagatgactagccttgactctctggcaggtgtcgcattcggatatatacttagcaatttccctcttcattctggtccaccagtacaaggatctgagatcatgatacatcttgttactgccggggtgcatggaaaattttgaaaggtgagcttcatccaatattttctttctgagctccgggtttttgggaacaaccaatcggtccccaaaccataggacccctttgctgtcctgacagaagcatttgtatttttgtgccttctgtttgatcatttccttaataacttgaacacccttgtcaccaatctgtgccatgactatctgct

SEQ ID NO: 144248 - DNA, 293 bp, Zea Mays
cgcccgatggcatacaccaaattaacatttgagttacgatgttttgtgtatcagtttatgcaactatatttgcacgctgcggtatcaatgggcccatgagaagatttgcttccgcgatctgggcatccgtactaggtccctacacaatattggagttacgtttttgtatgtttcagtttgcacaacattattgcacgtgtcagtcaatgggccctcgagaagatttggttccgcaatatgtgcatcgggccctctatcacattacctttttcacgcatccttaataggttccc

SEQ ID NO: 144249 - DNA, 272 bp, Zea Mays
tgatgacggatgtctagtggaacacattttttggtcttgtcgtactttccacctttaaacttataaaacctaaatgctctgtgatctcaagtagaatctctatgttatttcaaaattttctcaacgatataagtatgcttgcatgcatagaaaagacttactgctataagataataaggaattttgcataggttgaagggtcatagttcaaggagtcgagcaccagcacctttccaaccttaggataaatgaggaagcatatccaatggtcc

SEQ ID NO: 144250 - DNA, 1017 bp, Zea Mays
ctgcagccgatgagcttgaaatgtatcctttgtggcttgattctttgtattctaactcggttgccattgatcccatttgacttgaaacgttgtgcgccggtgacagcggcgcgttgcttttttcaggtgatgcaagtatggcaggaaggctttcatttgcttccctgtaagtgttgatatgcatggttaatattttttcatcatttgcaacccctctatcctgaatataatactgactatattttgggacaatcagggggagagttcttgtttaatgacacagtagattgggttcccagctgaaatggaatgtactattcgtagatatatagaagtctggaagtgctaaaaatttctggtgtcagctggacctcgccctttacctggtacatatcaaatgacctttacaagtaaaccacatcttgcatgatggagctgctgtcttgaaaagcttgagcgctgtcatcgactttggcgtgttcatttctctacagtttgagagcatctgttagaatgcgcgattgcaaggtatgctcttaagaaattgcttggtctgagtatgctatagcttcctatccatttcttgttagaagagaaaatagagtattctgttactgcaaccacataaccagcttgtaagaaaacttgtttaagtatcccaggtcctcaagtgtgagagagtatggtgacgttctggttaatcattcagaatcatggaagtaagatgtgcatccaatttaaggaagtagagcgattttgttagtctgatccgtacctagagaagtgtcggtctgcagctgctcccatgacaaactcagttacgttattaagagagatgagctcctcaagtccttcagctacatcatccgtctcgattattactttcgcacaggcaacctgaaatgtaacagcctttgccatctgcacatacgcatctagactcttctcggcctttgctcgcttctgctttctgtactccttgatttcttctggtttcatgctggtatgactcctgtc

SEQ ID NO: 144251 - DNA, 610 bp, Zea Mays
cgagtgcgcccacgtccatggcttggtccttgagaatggcccccacgtcctgcaatgttagcggatgcaaactgctctctttcttggattaaatccattcttgtttcatagcttagcatctcagaatataattcttcaacagagattggctccacccttgcaacgagggcagagacaagcaaaataaactcacgatccaacccagtaatgatgtattcgacgagttgtcgtcttcgagaggacgtcctgctactgtcatatcatcagcgtaccccttcatttttgcaaaatattcagcaacattcacgttacccttcttggtcgtcgagagagcgatgtggagattcacaacccgggctcgggtaagcgaggcaaacattgcctgattttttctccatgcatcggttgtcgcctcagatcttgagatgtggaccagaatttacatggagatagacgaaagcaggtagctaaggacctgttggtcccgagcatcccactcctcgaacaccgaatttgatgtcttcttgcctcctgcgtcagcgatctctttctccgttactggtgtggtaccagtaagatggcctatgaggcgacagccacgcatggctgc

SEQ ID NO: 144252 - DNA, 277 bp, Zea Mays
aatgagatttgggcactcggctcggaaacgatcgctcgaaacggggaatttggtgaaattaaagcctggaatatcggatgggcgtgaaatttgtcgaatatgttactagaggtgttgtgaaagtgcctaaaaaatttgggttcaattggagcattttttgctggtttaggcatttcaccgagcatgtggtgtgcgaggatttagggttttggagaaatggttatttgaggctgtgaaaccctccctaaggagctgagaacctacaaggatgatcaag

SEQ ID NO: 144253 - DNA, 657 bp, Zea Mays
gcctgggcgtccttgtcgctagctggagggcttggatcttccatactacggctcgggccgggcccagcgcgtcggtggcggccagcgtgtccgtggcggtcggcgcttcacgcgtttctcctggtcagtgcccctcctcagttctcgctgttgtggtccggtgcccgtgcccataccggcatgtgaggactgttcaccgggttccaaaattcgataaatccgcgccttgtcgtgcctttgaccgtgctccgtgtccgtcgcgtgctttctcaacagcgtcggtgcactgtttgttcgtccttcgtcgagcttcctgaacagcgtcagcccactgtgttcctgtccttccactgcagctcccatgccgctgctttctcccaatcccattatatgaagtccctctgctgttgtcttcctttcccccaactggcaggcgctcctttcttctcgtcgactctgtcgccgtcgtccgttccttttctttggatccctatttcttttgttttgattcctttccgtctctgcaccagattcatgtgcattggctcatcgttcatgtcgctcgtgtagatctgccacgttggagacctggtgaacacgcacaagtcctgaaatcgtgcagtctgtcccttcttcagctatttgaggtaatccttg

SEQ ID NO: 144254 - DNA, 465 bp, Zea Mays
ccaacccagtcgtcgtgccgaaggccaacgggaagcttcggatgtgcatcgactacaccagcctgaataaggcatgccccaaggacctgtatccactaccgcgcatagattagattatggactctacttcggggtgcgacctcttatccttcttggacgcttactctggtttccaccaaatccggatggctaaggaggataggaggcataccgcttttgtgacagtagatggactatactgttatgttgtaatgccctacggtctgcggaatgccttgccaacttttgtccgggcgatgagcaagaccttcggggacctgatccgggataaggtggagatttacgtcgatgacatcgtggtcaagactagggaaggatcgggtatagtggaagacctgaccctggttttcggcaagctgcgggcaacccgcaccaagctgaacccggagaaatgcatcttcggtg

SEQ ID NO: 144255 - DNA, 562 bp, Zea Mays
gtttttgcaatgtgtttgatgtcgagcgctcactgctggccaaagcacctcgagtcaagaatagactgtatttgctaaaaactagtcttgcagcacctgtctgtctagtagcaaaggttgatgatgtggcttggatgtggcatgggagatatggccatcttaattttcaggccctcagagatcttagtgtcaagaaaatggtagaaggcatgccattgattgatagggtggaagagttctgtgatggatgtgctcttggcaagcaacaacgacagctgtttcctcaagtggcaaattacagagcagacaagaatttggacctgtttcacacagatctctgtggacagattaggcccaagacaccaggaggtaagagttatttcatgcttatagtggatgatcatagtagatatatgtggatacaacttctggcaacaaaagatgaagctttcagttgtttcaagaaggtgaaggcgctagctgaaactgagtcaggtggcagactcagggcatttcgcagtgacagaggtggtgagtttaattctattgacttcaaggagta

SEQ ID NO: 144256 - DNA, 597 bp, Zea Mays
atggcccagagtcacccgcgcgctgaaggggtactgccacagtttctagtaggggttgatgcccatgaaagcctcacatagcgaaatgaagcacactatgaaatggactcacgctcattgtgtggtgaccatcgcaggaagggtctatccctaaaccgtgcacttgccgaataaacccccaagcaatccacatggattactcggagggcttaggtatacatctagtagatgtgcttgcgcgcaactaggaaatacggtctttaacccaaaaactagtaaccatggactcacgcttagtgtggacgaccattggtggaagagtctgtccctaaaccacgcacgcgccgaataaaccccaagcaatccacacggattactcggaggctcggggggctacatctagcagatgtgcttgcatgcaccagaaaaacataagacctcgagcaaaaacctctgcccaactccaaggagtcgcacgaaggctcgggggctgccgtcgagtacctaggaacatggtacccaaagtaggcccataacctcgctaccagcccatttctcgagcaaacccactccatagagcagataaccaagtccaag

SEQ ID NO: 144257 - DNA, 652 bp, Zea Mays
aattcctcggtggttgataatgaatccgagcaacttccctgctggtactccaaagacacatttttctggattgagcttccaccggtaccacctcaggctgttgaagaccagctgcagatcctcaatgaagttttctgtcttaatcaccacatcatcaacataagcttctacccgcttgccccagtgaccggctaagcatgtttgaatagctctttggtaagtcgctccagtgttcttaaggccaaacgacatggaggtatagcagaaagctccaaacgacgtaataaatgcagttttttcctcgtcttcttttgccaggctgatttgatggtatctagagtagcaatccaggaaggacaacatagaacatctggcagtcgaatctaccacttgatctattctaggaagttcgaagggatccttcagacagtgtttgtagagatctgtatagtcgacgcacatgcgccaatccactttattattttttagtacaagaacaggatttgctaaccactcaggatgcagtacttctctaatgaaccttgttgtgactaagcgagatagctcggcgcgaatagcttctctcttgtcaggcgtgaaacgacgcaacttttgtcggatcggccttgcctggggatagaccttcagtttg

SEQ ID NO: 144258 - DNA, 331 bp, Zea Mays
caatggcatacctaccagtagcctacccagctccaaatataatttgcatctgcacatagttttcaattggcacattgaggaattcagcatcctttgggttgtcttttgtatggcatagcaggtgttcatcatcaaggatgattgtgaatgtattctcatcccaatgagcaccgcttaggtcctcgagcctacaaaccctgatccatttttgacgccacttcctcaaatgattgtagacctgggtgcctgtgacctcttggccactgaattcagtcagtgcctcggcaacagagttgacatggacctccttgaaccctttatccgtttttac

SEQ ID NO: 144259 - DNA, 489 bp, Zea Mays
gtaaccagtaattgtcaaggatgctggaataatatgcaacttcatttgctttcgtgccttttctgtggctggtgtatacattttgcatgggcgtcttcaactttccttccctctcgggtatataaccaatgcttcctcgtgttatgatgccaatatgtttgacaaaagaagcatgcatttcatgaatctactttgccgatctgtgtaattccattcggtgcttcctatttcctttattctttttctcttttgggggaaattgacatccactcattgttatatggcactatcacagtggtgatatgcagtgggtccgctgtcctaaccacatgcaccatacctctttaaaaccccagcctaatgtgcatcctccagtccaaggccactaggagtttgtaatggagaacaatacccctccaaagactgggacgggcttcttaaaaacttgcttcaatggagttaatgctctctcaggttcttagtttcttc

SEQ ID NO: 144260 - DNA, 409 bp, Zea Mays
cccccctctaggtgctctcagcctcgacgcccctctccgttctttgacttttccactgactgtagtgacctcgaacttgaaacgcctgtcgtctgcgacctcaccccctctctgcctcttccttttccacctctctatctagctcttcgccgtcggtgaatcgatgattatgtgagtttgttcccgtgtgtccctcctccgccggtcaccgttcttgctaatcaagtgtcgtcttctctggtggttcttgtttcttgttcttggtgtacgtgtgctcaccgtcttctccggcaccaggctctggttgtgcaggtaaaatcttagccatactccctaacattaagtttctcgttctcgtagtttgatgttgtttttcctctcgttctcgtagttcgatgttgttttccct

SEQ ID NO: 144261 - DNA, 390 bp, Zea Mays
gaagctgtgagaagcggacaaatgggcgtgtgaactaggggctcatgacagatactggtccttcctggtagccttcgtctgataggacaactcgtgaatattacaaaaacaatcaacatccggttccaatctctggctccttattgcccaaatgaaaattccaaccttgatcaatgcatcaggggtgagctgatgaaggaaaatttcaaacttcttcaaaacttcgactagaaacctgtgtaaggggaaccatagcccaaccttcatgaagcttcaagaaaccactacttcatctttttaggaagtggaacagtattttcaccgccgattctcactatagacacatcatgaaagtattttcctttcatagcctcaacatgtcctttcttc

SEQ ID NO: 144262 - DNA, 631 bp, Zea Mays
gacgtcaatctctgaaacgccccgcacacggacacaatgttcataacttgcaacatagcaggctagaaaatacacaaggctctcgtagacaatgacaaccaagcagatatcgtattcatgcatgcgttcgacaagatgagcatgaatcccaacctgttgcagctagccaacaactccctatttggatttggaggcaaggccacactcctcctcggtaagataaccctgccactatcctttagcgccaccccaaatgcacagacagaacaagtcactttcgatgtcatcgatatggtgtacccttataatgcaatcgtaggcagaggggtaattaacattttaggcagccattcatggactttacttatgcatgaaagtactcagactgcacagagtcatcgtcatttttgaggaccagcaagtagcccataatatagaaaaagactttgtcccaggtcagcgcaatgtccactgcctgggcacaaacacagaaagacggcctccgacacaaccaacaaatggagacaaggaacccaaccctatacaaagtaacgaagaagccagaaaagtacccctcgatcctaacctacctagtcacatggtgttaattagcgaaggcctgaccaggcaa

SEQ ID NO: 144263 - DNA, 450 bp, Zea Mays
cttgccttctctgcacctttcttgtaccagggttgcgctgggtgatgttgcaatgtagagtagtaggggtagagctgggtctaggatggttagtgtcgcgagatcagataaatattattttaaggactcaaaggccgcagcttgctctgggccctaggtgaagtccttggctccgtgtagcgtttttaggaaaggaaggcttcactcgacagattgtgagatgaatctgttcagtgcagctagtcttcctgtcagccgttggatatctttggttgattgtggtgggtccatgtccatgatagcctagattttgcttgggtttgcttcaatccctctgtgcgatacaaagtaaccaagtatcttgccttatcggactccaaatatgcacttctccgggttcaagcgaagtttggcctcacgcatgttagagaatgtttctgcaaggtcgga

SEQ ID NO: 144264 - DNA, 448 bp, Zea Mays
tatcatccagattgaggggtgtgttaaacatagaagtaaattacctgtacatggaatgcctgcatgcactccttccttagatagctagaccgcattcctgtaatctcgtgcatgctttctttcctacgatagctacactgcctgccagatatgcacgcatgtaattctccttgtacattgcctatataaaggaatagcacagccctgagaagcagtgcattaaacctagccaaacaaagacctctgctagagctgctcctgcatgctggccatgctgacgcccccaaatgtggctttgccgctgagagctggttgggcgctatacttagtttgccactcaagtaactcaagacggttgatcttatttttatcatgagtgacatgtaataatcattaaggtggttgcttcaccttgcgtagcgacatgtactctagattgaactcgaac

SEQ ID NO: 144265 - DNA, 629 bp, Zea Mays
ttgcacttgttcgactgcacccatggggatggagttctctttttcgagacccattactgaacgaatcctgtctgagtaccagactgttaattgtggcgagtcgcaggttggtctgctatgaatagggtaatccttggcttaggttaatttattagtacaatgcatataattaatatttggtgcaagccaccttgccagttctacttaaacatcacgtccattttcctaaaaataaataaggctgccttcctaccgatagcctaagctggttcatcgtggctgcaaggatcaaggaatgttgatggacatggcatcgacgtgaagcccatcaacgctcacctgccctttgcaacctccatcctttggtcgtgttcgcaggcctcaaataatcaccgttctcttcatcaatttgttgctctctaatctatacactcgcagcttctactactagtcatggcgtcatcagtctcctcgtcacaagtaacctcttcatttttttcccaccacgatcacatggctgccttctcttggcaatccggcccatttggactaaaaattagcatttttcacacgtccttttgtctaggatactgcatcctgaatggtggagccctaacggtgctgctgca

SEQ ID NO: 144266 - DNA, 619 bp, Zea Mays
gaagcttcggtggacatccgagggtgtgggagcaaccagaaccatgggaaattccgcatcgcgggagcacacagccgcggagcatcgctcaccgtagctagcattcaactctacctcaagtgcggtaagaaggcctctaccgagttcgctgctatctcttctacgcatagcgctagggaatcgagaattgaatgttgtgggcactggattgggaacgcgctggctataccccgtcgtggtgtgctctacgccgcaggtgggtcagccgatggggagaagaagctgggtgggccgttggatcggcaatggatgggcgaggggtcgcggaccggtgatccatcctgaacgatcgagattaaaacgtcgacaccgtttcgagttgatcgcttccacaacgttgatcttcacgtctagggtcgcgatcgagtccatgttactttgaatcgccaccctcggttccggatctatgggttcatataagcatactacggtgatctaatcggggtcgttcaattctgatcgggtggctgataataaaccatacttcttcggcctggtaatcttgctaaagagaccctgccttatttcaaaaacaacctgccatccttttctatagaat

SEQ ID NO: 144267 - DNA, 273 bp, Zea Mays
gatcagactctcgaagacatggtcccagaagatctattgtcagagccggtagatggtggaatgatggaagtttgcgctgatgtgcctgatgccgggttagagttatcccgagcagcatctcgtgcctcgtcgaccttggagagcggtattaagagtcgagaggctgatctggattgctctgttcccatggaagttgttgaagatccttcagccttagaggtggcagctacagagagctcggtcctcaaggatggagctagcgtttgcccagcc

SEQ ID NO: 144268 - DNA, 438 bp, Zea Mays
ctttagagctatgtagatctagaaattcaaagaatttgcctagggtcaatatagcaaagttgtggagccatcataggagaacaagttttattaagtaactgagcactggtgctgaatagaaattggtgaaaatgagcccaaagttgggttgtcagtcagcctaaagtctgaagattgattaacagtgtgcaggatcaactttgggaccatgtggagctcgggttaatggatgtttggcaaaaacccctgtgacaaagttcaagctagattgataagctacaactttgatgcagagtactgggttagtcgccacacaaaatttagagaaagttcgccccaaacgagctctgtcagaccaaccgatgaagcctctgatggtacattggcaaaaaatctacagattctatgaatctcgccaccggtgacccttcatcgtga

SEQ ID NO: 144269 - DNA, 373 bp, Zea Mays
ggggactgaccggaaaagggttggcgacggtgaagctcgtttcacggtggcggaagcttgaattgggggaaattggaaattgggactcactgggggatgatagctaacgattcttcgtgtctgggttcgcgataatctaacgcagctaggggacggctcaatttataggcgtcgcaagcggtggccgggaattttacgatggacgcgcgacggccggaggtggagaagatactggcgcacgtgaattcgtggcatctaccgtggcagttactccgacgagccacgaagaggcacaagggttcacggctatgcagtggaggggctgagccacgcggcgcaaggccgggaggcggctgtcgccggcgagcatatc

SEQ ID NO: 144270 - DNA, 320 bp, Zea Mays
atcaacctaaatgcctcaagcatttgtatattctctaccactgtgtttctcggatttcaactaaaatcggctcaccgacgctactcgtttccaaataatttgggctacgacaaacatttatctaagactatcgacttaagtgatcaacattcgtctatggcacttagtcgattaacaacataaatatgacactattaaagcaaatcaccacttcaccaataccattcaagtagaaactatcagctagctgattaaatcccaaacctatccttcacataacctacgaactgacgaatactagacgatgcgattaattcaac

SEQ ID NO: 144271 - DNA, 458 bp, Zea Mays
gggatcgctctgttcctaacaagaatcgagagataatcgggtgggatcatggccggttcaggcgactgaaatagatgagccatggtaaagtgttttggatggatcagaacgccagctcagctcgccgtcgttgatcaccgtccggaatcgtgcagggtgttgggtggataacaccgggaaaaaggtagctcgtacgtggcaccctctccgtgctcggccggagttactcaccggcgggcgccgtgactcagtggattccgccgtagtggcactcatgccgtagttctccctcactgtatcactttccgacgtggtaagcatgcgcgtgtgttactatccgtggccgggggccatccgttgggccgccgtgcctataaattgagcagggggtcacggcgaggtgctcgctgatcttcaagtgagctcagatacaactagaaattcacactgtcctctcc

SEQ ID NO: 144272 - DNA, 829 bp, Zea Mays
ataagttgaagtgatgagccatagaagtttgaatttaagtttgaattcaaatttaacttggaaatggagaaaagaaaatagaaaataaaatggaaaaagattaaaaccttgcctgggcctcggattccccctttcggcccaacttcagaagcactccgcgcggcccactacagatggccctcgcgcgcgcttgaccggtgacactgccgcgtgggcccgcttgaccagccgcacacttcgctcacgcgctcaggaaaggaacagtcgctggcaaaccggacccgtgtgtcagctgctgcaaccgctccgcgagctcgccgcaacggactgccgcgcatggcgggcacgacgccggcgattcttgcgcgctcagcccttgaccacgccgggggataaaatcccagggaccctaacctctcctccgttccatttccccattgagtttgcactaacaccgagcttctagagccgccatcgttgaccagtgaggaaaagtgaggatccgccgccgacgagcacgagaatcgtggtcgctcgggtatccgtggggtattctggagcggtgtcgtggttcctgcgagctccgtaagccatcagttcctccgtcggtgtctctgtgcttgggcaattgctcgccgggtcgagcgattcgcagctgcgccgtgcctcaccgaggcgaccgcctctgggggccatgggtggggtcgggggccatcatcggtgtacaccgaacatgggcgcgtgatcttccagcatcggacggaggagcaccgccggcaatcactcaccggcgctcaaccagccccgccgttccgccgtgcgccgtgga

SEQ ID NO: 144273 - DNA, 318 bp, Zea Mays
gcggaaagaaaagtgacgcagagggcagccaagagcaggtggtgctgtgatgcagtgttacagtgggtgatagaaaatccttctattggtccagccgcacttattaagaagattcatgagaagcataacattcaagtgccttacatgagggtcttctatgggaaacaaatggctcttgataaaatctatggtccatggaaggaaagttttcaactattgtactcatttaaatccgaagtggagaaggcttgtcctggaagtgttgtgcagattgacaagcacaaagtagtgtacaatatgaaaggtaaaactatggag

SEQ ID NO: 144274 - DNA, 395 bp, Zea Mays
ggttatgggttaccaagtaggcctccatcaacttctggacatgctcatccttggcttgcttcagggcttcaacaacaatgacttcacgactttccaaggcagttgcacgggcttgagctatggtgagatccacatggagctgacggttgcgcttctctgcatcttctgctcgggcaatcatctaacggtggtgccgagccaagaaatcatactgtgcatccagggtgagcaggtatgcagtgaggtacacgactgtggggtcgtcctgaaacagctgctgaccttccaatgcatgcatcctggccatccaaatgggacggtctctttgaaagggcggaaagaatctgagcggtgtgtcggccacttcttcataaatctgacacatggccctcaat

SEQ ID NO: 144275 - DNA, 349 bp, Zea Mays
caatccatgtgtccggaccgcctagatcacgactccaaatactaggaccaggctaagcgaccacacagctccggaccactccatggaacaggtgtgcattctctagaaccgaacccccggttgacggacccacaggactatagttccgaatactagggtatctgtcgatagaatggtggagtgtgcaggcttagggtatgtaaccaagctaagcaactacacagctccggaccaccctagtaggcaagtacccgttctccaggactggtccccaggctgtcggacccccctatcgaggggccccaaactgcaggcctggctactcaatttggatgtccatataccagca

SEQ ID NO: 144276 - DNA, 315 bp, Zea Mays
gcggttctgccacagctagtatcggagcaaataccaccacagagaaggacaataaaccatgaataccaattttcaaaaatctacaacttgcttagaaactagtatgaatcgtcaggactagaacgctagacctaggacgaaaggccttaggaatagagggagaactaggtggctaattaagtaggtcatgtgggccagtatttcgattcttagaggatgccctaaaaagcacccttttattcggagaggagacgttattttcagcatgcatgcattataaaactaaaagggttaagaactgaagaagtaaaaaaa

SEQ ID NO: 144277 - DNA, 876 bp, Zea Mays
agaagggttggcgggcgctccaaatgaatacattgggcaccaacatgtggcaactgctaacgcgaaagcaattagtgacctgatcgctgaagttaagaaggtgaatcacaacttgagcgagatgaagaagattgttggagctttttgcgctactatgattttaatttcctcgcttttctttgtgatgaaatgtaattgcaagcatttaatttgaagtgtggcaggtttgtgtgttgtattgatgtgtgaacttttctagtgcatgctatgtagtgattggtgatctgtgttgtagtgatgtgtgaacaatatatgctagtctggcattttgtctggaatatttgagtctggcactgtctggaatatttgagttggcatgttgtctggaatatatgctagtgcatgctgtgtgaacaataccttcagcaagcccaaataaaaaaaatggaaaaaaaagaggacttcaagagtcgaacatagaacctttaggatagtagtacagcaccttaccactacaccatccacatgttttcataaatagtggcacaacaattattataccatcctgcactctcaaaaagttttttcttattttgacataagatttgtcacacatgttcctttaacacgtagaagcctaagtcatgcgaaaacttaattttttttgaattattcaccatattacataatttaaaggtatagttgaaaataaataaataccaaacatgtccaaaaaatcgtgaaatttggtgtggctccatattatggtcatggaaggttaacataaaaatttcaaaggatttcgtgaaaattcgtgtagacatggttcacaaatgggcacatctcctatatagtttcatcacatcctacatgaag

SEQ ID NO: 144278 - DNA, 304 bp, Zea Mays
gttgttgtcacgttgagcttctgggcagcggtataaacgtgtcgctggactgatgattcttgcacaaataaggcgggaatgtggtcagttcttgtggagagccattatatttctacacaaactgctgtaactgctggattttggtgtggcgtgtaacggttagtggttactggttagtaaacactaggatagtggtcttatgtgaaatgtccattggatttaagcatcttgtattcttgtgatctcatatacatggatcgtgggtggtatcaggcattgtcaaccattgatacgttacatggtc

SEQ ID NO: 144279 - DNA, 544 bp, Zea Mays
tagttggcgacgaagtggttgcagaagtcaacccagttgtcgatgaagtgccaggaagatgacgaagccactagagcacgtcttgccctagtacgatgggagatataccgccatgacgtcctccgatgccccggtggtgtgggctaccgtcgagtagacggtcagcagcgaccggggtctagcttggcctcgtacttatcgacgttggagaccttgaagttaggcagccactagaccgcccaaggctgaggagtgaaggccgagaccctgaacactcctagggcttcgggatggtcattgtggtcatggtcgcagcagtggtcatgtggtggtgacgggcaacatggatctttcagccggtctcgagcagatcggcatagcctcgggctattcgtcgatacaatgatggagttggcttggtatatggctagccgccgtgagatgccatggtcctgcttgtactcctctcggtgtctcagttcttctttgtgtcgacaagtgcgcgacccctcaatgctggcacgtgtgtcacgtcgactattga

SEQ ID NO: 144280 - DNA, 539 bp, Zea Mays
ggaactatagttctgtgggtccggcaacctgggggtccagttctagaaaacggacacacgtcccctggggtggtccagagctgtgtagccgcttagcctggtctcgtaccctaagcctacacgctccaccactctgcgacgagtgccctagtatttggagctgtgatccaagaggtctggacacacgggttggcttctctgttaaatcctgcgggtcctgtcgcgtgaatcaaaggataaaagataccagttagtgggtcctatgggtgcactgctaaagcttcctagccaaggttgtgtgcaggtccaggtcccagtcgagactacctcctaggggccaggtcaccaattctttcttaagtatactggcatccagcctcgacacgtcgagcctacatcccaagggggccaagtactagggagaagttggtagcgacgcacacagcaaagacaaataacatacagataagttctatcactgttagaatattacttcccaaaagtatcttacaaaaccagaagatgttacaagccgcacc

SEQ ID NO: 144281 - DNA, 337 bp, Zea Mays
ctctggccctagctattcgtttgtttcagagaattttgtgtcgcgggctggtctttcggtgcagaggttgggtcacccaattttggttagttctgctagtggctccattagtagctgttcagtttgttaggggtgttccgtcattcttgctgatgaggtcttttaggccaatcttgttgtgatttccttgggggcattcgatgttatcttgggtatggattggttatctcagtatcgcgcagttatattatgtttttggaagacagtgttattgcaggcgccgtcgggtagggaggtgatattcttgggaagttctccaaagttcacgttatcctcg

SEQ ID NO: 144282 - DNA, 632 bp, Zea Mays
aggatatttctctctcaacaaacagaaacaaacaagaaagggacgccgtcctcatagcccatagagcacgaccttgtttgttcctgccattgctttctgggatacttgatagatttgcattgtactttaagctgcgagttgggatgggcatatatagtcgcaaggtttaggctgtatacatggcagcgcgccctgcagattattagatcatccacatagactcccaccaccaggagagaatttccagccccttttctgtagacagcatgttccactacacacttgttgattagctgatttttgtgttatgtgtaatctaggcttttcctatttgctttcttgattagttgatttttgtgttatgtgtaatcgcaatttctgtcatctactagttgcctgcatcagtgaattgtgacttcagttggtaaagccaaactcatggttcagttggtaacttgcttgtgacttcagttggtaaaccaacttcgacatcagctagcatcccatcgtttacaacatttttacatccaagtttttttttaaatggtctggttgtagaaataaagaaaaaagcatgcacatagattatggtggcgcgagtgctttttagctctgtctttcttctgtattta

SEQ ID NO: 144283 - DNA, 764 bp, Zea Mays
tccaaagcggaagataatgcgttatttgcggccttcggaagccggaaaaagaagagactaaatagagtttttgatgccatcggattcatgtatcctgactaccgctacccgtcacgggggtaaaaaagaaaaagtgtaactttcgggaaagatgatgcttcagctgctccaagcgagcctgcgccgaagaggaaaaaggtgaaggtccttactcgccgaccgcgcttcattgaaccagccatagttcccgaatttggtggtgagacctcttcgtctattgaagccaaatgacctgttcttacacagaagaatgaagagccggctatgatgccgaaggccgatgatattgaagagatagaggctgagagaacaaagacattagaagttataagcccttcggtaggaatatcagtgccgaaggcacaaaaagatctcacggcaactcccaagagaaaaaggatggtcaatgtactagatgtgctggagacaataaagtcttcaagcaccactccgaggaaaactgtcgaagcatcaaaaaacgcaaattgagacaaaactatccgaagtcgaaactgcaaagagccagaccgagaccgaagctgggccttcagagcccgtcaaggagaaatccttgaaaactagaaaagaggaaacataaaaagaaactgcagagcaaattcagtctgaaaaaactactattcctactcccgaagcatcttgccaagttcttgattatattgtacgacatgcttcgggaaaaaggc

SEQ ID NO: 144284 - DNA, 1537 bp, Zea Mays
ggcgcaccaatacagagaaggtcgaggtttattctacaaaatctaccagacacaggcttcccacgcactggacgacgggttatttataataaagggtagggtttcttttgcaaagttgaatggccgaaggggtatgatgacatgtggaccgttggatcagcggtcaagggcccggattagatcggcggaatactgaatcggaagggtacggtgaccgtaggatcctgattctacggtttagatttaaaataccccgcgatcgcctcggacccgcacgatcgcgatccaacgcctagaatcgcccaggccgaatcgttccgtggatccaatctcgaccgtatactctaggatctaaggctaatacgctaacacccatgtgttctcatcacatccgaccaatgatgatccaatggttagaacatcgcctccctcctcacgatggacgctgggcaacgaagcgcctagcgcagcggtgtcctcgccggagtaccgcgcgccggcaaccccagtgcccaaaactgacgccgccaagtgaacaaaaagggcaggaaagatggcgatcctgatggagtcacacataccgtgattcgcgcaacgcgggccccagcagcagcgctgggcggaaatcagattacgacgggcaatcgccggtcctaggtgccaccttcttcactctgttcgccgcccgctggcttcgatggatgcctacgaatgcccctgacgccaaaatcgagcaccccacaccggcgagattgcaggtcgacggcggcaattgccttgacccacacggtggaggggatttctccgatgaagtgctcagccacccgattaatcatgcgagattggatcccttgtgttgctgatcgggggagaggaaaagaagtttggttttatagctgtagtccggatggaggagcaatcttttcccaccggaaagctcggccgccgcccgcctggtttgttgcggtccgatggggaaggttctgacgggttggccccatgcgtcagaggaggctgccggctgaggttaaatggatgagggggcatgaggtctagtctttatatcctgcgcaaagcccgactctggtgcacagcccaacccatgaacgcgctaatggcggttatggcttcctaacaaactttgacttggctgcgatcatcgtggtttcgtcgagaggacgaggcgtttgtggcacaggggccgatgcatgcgggttcagcgacatgcacaggtggttgcatgtgtgcaacactgaaatctgtttgatgcatgcggccaggtgaataaacaaatggaaaacacgcgtatggataatggatcggccaggagaaattggccaaaaggctattatgttccttttttctttccttttcctttctattttcgatttcattttcaatttaagtctaggtttgaaatgcaacttcccatttagatgcaacaatcaaaatagtcccaacatgatgcaataatattttattattttcaataatactaatgcttacttcatgaaagagaaaaagaaaataattcatg

SEQ ID NO: 144285 - DNA, 459 bp, Zea Mays
tagccctcaagcccccgagaggagtgtgtctcccttcgtgagctgacaacaggttaggcggcccttcatccttccgccttccaagtgatcatggtgtttattcctcctcgggactagggttgtttttatggtgattggtcgtctctcgaggtggattcaggcgcttccccgcccctttataaatctcgagcggttgttcgcatgctggtcaccctcggcctccctttcgcttcagcctcttccttgagcacacctccgaccgagttggtggtcagaactcaggtcatgggaatgtagcgctctttgggccacgagcctaggtaggcttcttccattaggttcccttgactcccttctcacgattgacatcgttttccctcctcctttcatcgcactgcggtcaccaccgaccaaggggttgcgtcatcacccgtcagctcactatggctgggctcctcg

SEQ ID NO: 144286 - DNA, 466 bp, Zea Mays
gtttggtgttagtaaaaatactcgtcatagttcagttagtgaattccaagcttccaactaccctttagtagtgtgcgaagagtgcaaacagaaaagcgttatcctgatgctcgtacaatgaacccatttgttttgtgttcttttctttccaaacagggattgccccccagaattcagggaagctgtctcaaacctgatatttgctgttgctcggtatcctgatttacctgaactttgtgacctaaggcacatattcacagagagatatggaaattttgttgagcattttgttagccaggaggtacgcaatatgatgctaatatgttgttattgaattgtcttatgcttttgtggtcctctgctttacacacaatattattgcagtttattcggaaacttgacagtacagagttcactaatgaggaaaggttccaagtcatgcacagtgttgctgaagaattatccg

SEQ ID NO: 144287 - DNA, 568 bp, Zea Mays
tgtgtcccgaggaccagatcgaagcccgctagtggcatgatgtagaggtcgacgtagaacagaaagccctcaatggagatcggcgcttggggcaagactcccaggcacgcgatatgcagacctataggttcgtgtggacctattggccacccgcgccatgagccttggtcgagcccagacctataggttcgtgtggacaatcgcctcctcgtcgatgaaattgtgttgaactggtgtcgaggagagcgatcagggtcgctgcgcccaccttcacccggatatgcatcgtgccacaggcccggacacccgcgacaacatgcagggagaatattggggcgtctgcagcagggttagcagcctcgggtgcggcgtccgcgacgtcgagctcgaccccttccacgtagaagatgcggcggcatgtgcggttgtggccccgaaaatatttctcgttgcagttgaagcagagtccgaggcggcggcgttcctcctgttcctccctggagaggcatcgcccatgttgtcgatccatgccgagttgggtggcaccgaccggaggcacaggcatggc

SEQ ID NO: 144288 - DNA, 437 bp, Zea Mays
agcatcaaaacacaacctagcccagtgccagaggcatcacaatacacatcaaatggcttgttgttgtcaggttgcgccaacacaggtgttgtggtcagatgctgcctcaaggtgtgaaaagcatcttcacatttctaaccccattcgaactttgctccctttttcaatagttttgtcatgggtttagcaattcgggagaaatccggaataaaccaccgataataccctgccaatcctagaaaactctgaatctaacggacattggtgggtggcttccaatccatcatgtcttgcactttatctgggtcaatggctattccttcttgcgatatggtgtgacccaagaatttgatttccttcagccaaacatcgcacttagataatttggcataaaggcgatgctctctcagacattggagtacgatatgtaggtgacc

SEQ ID NO: 144289 - DNA, 383 bp, Zea Mays
aaaggaaatcggcattgggctgataagcattcaactaatctactagttgggaaatttgtcaacataattggtaacactagaagtttgtcgtatatggaggagttgtctaagaaagatttcgtgctggtatttgccaaaccgttccataaccatgaacccaaattctggccaagacacactcataggaacgggggtgcccgatcttccattaggtgaaggtaactatcgatttggtagagatgtcacacagacgatccggcttccaatcaacacgactagaaccccacaatcgcagcaccacttctcctctggttatcaaccgtgcactgcgcgattgacctcgccacgagggctaattcctgcctgagaatcgaagacacaag

SEQ ID NO: 144290 - DNA, 381 bp, Zea Mays
gttgaaggatagggcatacccggcctacctgtaccgaggtctagctgactcaacccgggtcaccaatagaagaattcccgttgtagacttggtgaaccggcttgaaatgatacttcgaggcaaggtatcaaatgttggcgcccctatcgcatactcggtctagaacctgcctccttccaaggcctttactcattttgtgtcgaatcctcctgctgctgacggtggtttgggccttagagtacgaccctctgccgaagaagttagtgcttcggttgcttcgattggagaaattcccgatgatgaacggcaggtccactttgaggtgcctttggatcctagtgatgcagaaataagtgctatgcttgatatgctggctgagga

SEQ ID NO: 144291 - DNA, 537 bp, Zea Mays
tttatcccgaaaggtgttaagtctgcgcataaataagagataagtgtattttgtgtagtgtggattgattttgagtgcatgtgtcgcaagaaatgaattagtgcgcatataggcaatgaatgggtgtgatgaaatggtgacatgcctttgtagtcatcatgtcatctgttggtgacccaactgaaggtcgtagagaaaggtcgattaccagtgtgttattattgtcaccttgaggttctgtatgaattgaaatgtgaagtagtagtgctcatgtgttgtctaatttaaaatgcaaattgttggatgattattgtggtgaatgcgttgattagttgggtatggtggttctagatcgcgaaataacttatataaaaattagcaagtctacttgttagttctcacttggttaatttaactctaacaattgcccaagtgttagaataattcaagtatctataacgcgacaattcttgaatggtatatgagctgaaatttattaattgttgttttgggctgcacgtactgttttagttgtgc

SEQ ID NO: 144292 - DNA, 387 bp, Zea Mays
gcctaaggtgctcataggtcatgattgggaagtggaccaactgtgttgtggctcagtgccaggcatggttaaatgcggtcagttatttatgatgagtcagtctagggctgggcatgggacccacttgagtggttcccttccgaacgctcggcctcccatacaggttccaccatgcccgacaccaggctcggtgccgcggggttcaattgggggcaggtcctttcagggttgatgcatccacctctcccaactgaccggtaggccctagcgaccaggggtccttcccctagtgtgttccctaaccgacgagtccaggggaccgaaggtcattcccccaacacatgtcatgtagctcaaatgtataggcctaagggtgtgaattgtaat

SEQ ID NO: 144293 - DNA, 2016 bp, Zea Mays
tatttcttgtacaagcactccacctcaatcaggttgcaagtcctacttttgctagttcgcggtcggaagaagccatagccatccaggaagaagaagccatagcaaaagcagctgaggggggattagagaagaacagcagcgcatcagatagggagaattgaagctgatcttttgtatcatatatctttcctgcatgcttcatcagtccgacacttgagagaggttcgagagagaagttattaagctgcctccacactggtagcaagtgattgcatgcatgggggataggacatggcagcagccacatgcgcaggcttcttccccagacgcagggaccaaggtccaagcttcatcatcgtccgtccatggcaacatcatgtaaaccctaacacacatggatatatagctggattcggatcttgctctattttcttgcgaatatatagatatatagatggatcggaattgaaggtttgctttttttttttttgcttgcttttgactcctttcttctgatttctgaagcatatggtggattatatatactgtggcgtcaatctcttctctggttttcatcagatttttaattttccacggtggatttaatttaactgttcaacatagaatttgctcgatcggaaattttgtctttacataaacttattttttttattggtagcatttccagtatatcattttagtaactgaccaaactaaaatgatgattgataccagcctaatttataattttgcgtgtattgatttgtgcaagtgcagcagaaaggagccagctggaggcggcggatacgacgacatggccgagttcgatcaagcgctcttcctctatcttaacagcagccaggatcaagcatcagttattcaagatcaacctcgtaagccacacacttaactcccttagcttatgcatgcatatacatgcacgggctgtatatataaggggataaactttattgcatagtataggttagatcatattgcctccattttttatttatttgacgctaattagtccaattttgtactgaccggcgacaaataaaaacaaacaaacggagtaagggagtacatggcagattaattaattaattaaactcaaacatgccattctgtgatgcatctaccctgattggacatggctcaaaacaagaatgagagcaaattaaagatgcgatacaatggcgtgaggatcagacctctcaatcgtctttccttcttttttgtatgcaaagcttgttctctctgagtccgacaaaagccaattttcagagaaggaaaaaaaagaatctctgctagttcaaggagagtgacatgtaacaaacacttgctcgagtatgtgctcatttcattccagataggtcattttctttctgctgaaataacgcagttgggcagagatgtgatttctcatagtctagatagctctttcccttcaccacgtatccacttccaacaaccatatacacacgcatatatacgtgcatacattattcccattctccgcccttatatgtgacaatctaataactagttcaatggactaattagcttagagcttgtttgatagcaactaaaattagtactagcggattcaacctgcaaactattagctaggaattgctaataactgtttaggattgttaatagtttataaatatgtacctttgatttattatccaaccacctattagcagattaattgaaacaatcttcatttaaaatcatctatagctaaaaaaatagcagctaccaactcttaaaaactatattagattgtattttaagaatatattacatctgttcttcaatatttgtcgtctgttaggtaatttttgaactaagaaaccgcgacaaataaaaaagaatggatcggtcatttgttagcatcgctatgccatctctcgtacatgtacacttattagcttctagtttaatcgcagaactttgtgcagaaactctcaacatcttcccttctgaaccaatgcatgtcgtcgagcc

SEQ ID NO: 144294 - DNA, 355 bp, Zea Mays
cacccttcaaaatttatcgcacaaccaaaatcatcacacttgctaatgacaccaacaatacctactgatatgttattcacatctcgagcacagttacacgccacatactagtttctaacataatcctcatataactcgtaattcaaactactctccaacaataaatcgcgcacgacagatttcgccttaactggttaatttatttggagcaccgcctagcgtaccactagtaccccgcattttgactcgacatataaacatagaggaagggatgactactgcattctcataacaaattttagcacaattatttatgtcaacaattatcgactagacgagtaaaacaccaactgat

SEQ ID NO: 144295 - DNA, 389 bp, Zea Mays
tgggagtaaggattgtttgacacccaaccatggccataacatgttggtactgccattcacaatgataagaatcattccccatttacagagtttgtgttttccaacctataaacgacataactcaagagccaagcctaacccaagtagacctatgacctatggtttgatagtgtcattttagttaaatacatagcactatttcccaagtttctgaaaaggagattagtagattagtggtttactgatcttcccatttctctcaacccgtgaataccttagcattagcgacacatcagttagtgaggatgtaaatgaattaaagaagaataaatccaacctcaagtatcctaacagcaaggcaaacacaatgatcgtcttcgccaaaagca

SEQ ID NO: 144296 - DNA, 639 bp, Zea Mays
gacacgccggtggatgatgaccggagtgtgtagaggggcccgacgctgtcacctcgggcgagtggggtcctggtggacagatccttcacagaaaaaccagaagggtcaaattcaatggaacaagaattgtcggtggtgaactgatggacagagaggagattgtggctgatgtgaggggctatgagaacgtcgttgaggtagaacggtccaggaagaactgaggcacccacagaggtgacaggaagaggtggggtgtgaagaaggaggtgggtgggagtgagatagcatgcttgtagtgggagtggtgtgataggatgcaccagagtcgacgacccagtcagaggatggtggagccaacgccatggtgttgtaggcggcggcgagggcgttggtgtcccagccactagggaacgggggccatggtgttgtggtatatggccccgtagactggagtggaggtggtaccggggtcatcggtggcgcaccataggcaggtggcgtggtcatgagagccgatgccagagccggagggcgaggggcaccaggagtctgacccggccacatggagatgatgtcggtccagggattgtagaaggacagccagttctagccgccgcctcggcccgtggtacctccgtg

SEQ ID NO: 144297 - DNA, 857 bp, Zea Mays
agtatagcaacctacggaagtacatgcattttgcaaaaaccaatcagaaagtatagtagtacagtggggatagaacatggcaaaatggaaggcgatgcattttaaaagcaaaagcaaaaccaaattatcatgaagttcgggagaacaaaggatggtagtgcagtagtagtagtcaacaagagtacacactagaataaaagaaagatcaaatgaaatgaaatcgactagtgtgacacatatataagcgtaattcggcaacgggatctcagttttttcatgagtgcattaatcacatgtagatagtgttgccagatcagaagataagaaatgtgatgcagtggtaagcgcgagatcagttgattcgcctaaatgccagtctgcattgaacaagaacactcacctcatttaaccacacagcccacacaattaaaaacacttggctccagcgccgaacctgctgtatttgctagagtaatttgcaagcaccatgccgatctaatgctccatattctttggctccctgtggccaaaaccagtccatttcccgcaacaaaaaccacaaatccaaggagaaggaaattacaggagcccaagaagggctccaatgaatcaattccatgtatgctgcatgcagtaccaccagcccaacaacaattaccttgacaaaacctagttctctagtcaatgttaggaccaagaaaaccaagaccgccggggctgctcatacgtcgcctccccacgggtacggaggcgagcggtggccagcgtagcccgcgcccatgtccggaggttgctggtgggagggcgccattgggagctgcggctgcacatcttgcccaccagccgaggtggcggtg

SEQ ID NO: 144298 - DNA, 411 bp, Zea Mays
gcttcaacagaagccaccgagatctctggcatcggccttggggcgaaaatcaccagccgaactcctataaattcacatgcgctcgcctccgaatatcccaagcacagagacagtttcgtcgtaccaagtgagagagggaattcatcaccggaagtcaccaagcgctgcagatccgcgcgccatcgcgggttagcaatctgctgtgttgccgggaccttgaatgtgggtctggggtttcacctggacccggggcgcttatccatggaccagcagggccaaagaaacaaggagggatcgagcaattgctcagcgacgttcgcaccgtcatggcacccgcctcatcgcgtggacggacctttcgtccctctaattcaaggtatgaatgccacagtggatctcgttgtgttcgag

SEQ ID NO: 144299 - DNA, 452 bp, Zea Mays
ccatgcacaactaatttggggagaggtggagaaggcagtgcgaattttgacttcaattgaactcactgaagaagttgtgagtacctcgccgcggtctatggcgctatttatagccacggcagtccggctaacgatcagcggccgcggattgcattgttcacgcatggctaccacgtagagaaaaggcacggtaaggggaaaacgaggcatgggtgacaccgcggcagaagtgaccgagccacggcgaccgccggtgggatatctccggccacgcacagctgggttcgcgggatggtgccacgtctgaagttatctctccgcgatcgactcccttcaccagatcactcgagcacatccagttcaacagtgccttagatctttatcagcgttcttcagatatttacagtgtttggatcttcagcgttttactgaaccgaccacctataatcccc

SEQ ID NO: 144300 - DNA, 377 bp, Zea Mays
tggggcaccaaggctgatctttgaaaacatagctgaggcagaagctactagactggaggatattgatatactggaggaagaacgattgaatacagtaattcagtcagctaggtaccagcaaaccctgaggcgctatcatgataaggccatacgacatcgatccttcgcagtgggagacttggtccttcgccgaattctaacggggaaggacgacacaaattatcgccactatgggaagggccattcatggtagcagaagtcactcggccaggatcatatcgacttactcaaatggatggcacagaaatagggaattcatggaatatagagcatgtgaggaagttttacccctagcaagatttcgaaggctatcgggg

SEQ ID NO: 144301 - DNA, 735 bp, Zea Mays
gtggccggttgcgccatcgatgtcgtcgtcgttagcaactaaacacctcttatcctcttgacataaaaaatgtgggaaatggccttggattcgcgtgcgcgggctgtgggacagatcgaggacggaggaggccaggataggggcatgctgcaatggtggtgatggagggtagtgacagcgccagtaagatcaccattgacgtatgtgtcatggagaaggtcgagatcttgactctagtccattgagtgttttttctttttcttcttggtggttcaaggattcttgtgaacacgtggatgctagatgttttgtattccttttttgattctcctgattattgataatcaattcgattcacacctaattaaggatgtaaaaaatcgttgcccaactgaatcggcacgcctccatccaataagcgagttatagacctgtttcgctatctggtgggtgggttggcccaatcatgtctagcctccagcatgcaaagggccatgaaaccaagatagcctgtaactgttgtgccgagagatgttgctgcttggcaaagtattggcatgcttcacacttccgaacgagatatactgcatcttgattagctgttagccagtagaatccagctctaaaagctttcccgactaatgttcttgacgcgacgtgaatgccacactgcccagcatggattttcatcagcaagtttctacctcgagatatgtcaattcacttcattaagac

SEQ ID NO: 144302 - DNA, 590 bp, Zea Mays
cttgactacttagcggagccgaagacacgctcaatttataggatccgtgaatttgagatggcgcggtggcggttggagaaagaggagagcactgtcgcaagagattggtggctttcaccgtggcgagctcaccggcgatcaccagatatgtgtaatacgagctattgcgacgtggtaagacaccaaggcacatggcgcatggccgatagttggctatctccggtgagttcatctgaatcggccgtgagtcaggcggacacggcggtcggagtgaaacagtggctcaagttcatccacaaggcaatatttactaccccgagcaactattagtactccattgagcacgaatcacattgctggcgacaatcgcggcgtaagatcatcggcgacgatattcagtggattggggatatttccagtgcactgtaccatcagtttctcattcagtcatcctgacagaccactttgcagagcctaaatctcaaattttcatgtgaatacttactaatccatcttaaacaaagttgtagctcaaccaaccagctacaaatcgactatagtaactatcctcaatcgagcactagatccta

SEQ ID NO: 144303 - DNA, 622 bp, Zea Mays
cagcaccagcaggtaacggaacaacatcccatgtacatgtgcgatgaagggcattcaatccatcagtcatatcaagctgccactcaggtataccagaagcctctttataagatgatggttcaacaatgactgcaccagcacggggaaacccataacgttctggagctgcaatagtgccacggtcacgaagatgatacccctgattaaaaacaacatgagagtcatcattgttagtacaagtatcagcaacaggatcatcatcaagactggccgtgggagtagagcgaggacgacgaatgtaagtctgagtgacaagtggtttggaagagtaagactgagatggtgtggaagtggaaggtggtgtgatgggaataagaacatctggggtagaaacagtagatggtggtactgatgaagtttgagaaatgggaggaaggctcatgaaggaggtagactctgtggaataaaaagaagaatgggtggaagagttgtaaaagaagggtcagttttcattaaagctcacatctcgagaaatacgcatgcgacaagaagatgaatcataacatcgataacctttatgttcagggctgtatccaagaaaaacacactcaacagattgagc

SEQ ID NO: 144304 - DNA, 350 bp, Zea Mays
ggctaggtgagtcaaccgtgcgcggcttgtgcaacaaaatgttgacaaagaatacaaaggtgctaagaggtctaactgttgggccagagcaccaaggtgtcaatatgtaccggcattggatatccacattagcaaaaccagcctagaaccacctcaaggggtatagatggcttaaacatgtttaaggggaaaatacatgttttatagtccgtgagcgaagtagacaccatgccaaatgtcaaggggctatatagacttttcttttccaatacaacgaatgatcaaatagaatgcatacatggagttttactcagttttcgaatgtgttggtgataacatgcactagtttg

SEQ ID NO: 144305 - DNA, 720 bp, Zea Mays
ttaatttctgcaggttgtatcagtttatcttgcctcaggagctttgttaattaagaatttgacatcattggcatatggcgtcccagaagagttgtcttctgatcactttctcccaggagattgtagatggggtgcctctgtttgtttcatcaaactgccttcctgtaaaagctttgaaatatgaacctgctggttattcgttccatgctgcggcaatgaagctgcttggtcttgcggagcatgaagatatagaaactgatgatcacagcgtttcatcggatgacaaaagccaagattttaatactgcttctgatacctttagcagcaaagggaagaagaagtcatctggcagtcaacagcaggaccactatgctttgcttgggttggggcacttgaggttcttggccactgaagatcaaattcggaaaagttaccgtgagatggctctcaaacatcatccagataagcaggctgccctgattcttgcagagacaacagaggaggcaaaacaagcaaaaaaggatgagatagaaagccatttcaagtccatccaagaggcctatgaagttctcatagaccctacaaagaggaggatttatgactctacagatgagtttgatgatgatgtcccaacagactgtgccccacaagacttcttcaaagtttttggcccagcctttcatgagaaatggacgctggtctgttacccagcctattcct

SEQ ID NO: 144306 - DNA, 434 bp, Zea Mays
cctgaagttggactgtcagactgcttgaaatctgaaattcagattaagagtggaatggcatggagttagggctcgaatttaagcatgatccagtaagaatttggctatgggtgctagaacaaagatgaatatggtttaatggtttacaactttgatgcagacagtcactctagttgttatacaaaaatcaaagaaattgttgcccaaagttgctctgtcagacttgtatcaagtaactaaaactaaacctgaagacagaaatggtcacagtgatatgggaccaatttgagcatgccataactttgaattcattcggtttccgtcgtgcacgtgggcagaccgttctcaaagtgttcaagccaaagtgaagctcgttcctaggtcgccttgggtaggttattctccccctgttgctcgactgagcattcgccgcc

SEQ ID NO: 144307 - DNA, 543 bp, Zea Mays
aatctaaacagttaaaaaggtttcatgaacttttggattacctaatctcgtttgctagcgaatttagaaacgttcggatcacgcgcgtaagtgaaaatgaaaatcagaaaacttatgattttatgtaaaatttggagccccgtgttgtccgatcagaacgatgcgccagctgattaagtgaattgttcctctcagcaagttatctttggcatcaaatcaactaaacgatagctggtgaggatcgtaaaaattagacggaactaaatacagtctaaaataccgaagtcaatactattttggttcggtccatttatttctcgcctcgatctaaatcttcaaaagtgaattaatggtacggatttcatctgactttagagtatccgccaaatcaaatcttatctaaatattgaatctgaaattgttttggaaaagcagaaatatctcacgtacgatttatgagaacgttcatctcccttggccttatcctctccatcaagtgtcgtaccactcctttgaacaacgctccagccatctctatccttt

SEQ ID NO: 144308 - DNA, 430 bp, Zea Mays
tgccttacggccgtggttgaacgtggcaagctctaggggagtgccgtgctcggtgccatcgttgatcgccagctagggccggcaatggttatcaccgtggccgcggcagtgactcaccgcggctataaattcaccacatcctcgctcccttcgctcaaatcaaccgagctccgaccttcatctccaaattgcgaagccatagccaccactctcgtctccgattagcccccctagccgaagaatcgccgttttcccccaaattagttttccaccgccgcaaaagtaccctcgccgtggccagccacttccaggtctgatcataccttacttgttcttgttttagcatctttatgtactagttatgctcaccaacccacccaatcgagctaagaccccatggatcgccgggaacgcgattgattacccgtgg

SEQ ID NO: 144309 - DNA, 290 bp, Zea Mays
ccctgctaacggagcaatcggcttaagtcggtaacgacttaaggcggtgcaacatgctcacgcttacttaactcggggtgaccactatgccctgccaaaggagcaatcggcttaagtcggcagcaacttaagccggtgcaacatgctcgcgcctacgcaattcagggtgaccactacgccctattaacagaagcaatcgacttaagtcagcagcgacttaaggcgatttgacgtgaatacaattactcatataaggatggcttctatatcccgtaaacaaatttcaaaac

SEQ ID NO: 144310 - DNA, 467 bp, Zea Mays
gactagttggttagactcaagatatgtttgtctaagttatataaacaccctcaagaccagtcaaattcaattgaagaagatttgccaaagtttactgagaaacaattaaactatggtgcactggaccagtccggtggtgtattagacctttgtgcgcagagatggcaggaactttggcttcgggtgtctggcacactagaccggtttggtgactatccagactagtttttcagagagggaagaagttggacttagctggtgcaccgggcccctggtctgatgcactggacctgttagagagcagtgatcatcttcagaattcaacgaccggatctgatgtggcaaggttcggtgtgccaccagactaacattattcatttgaccctgtcagaacggctccctgcaacaatagtctgacaaggtctggtggtgcatcggaccagcactgcaggaggtccagtgcaccc

SEQ ID NO: 144311 - DNA, 939 bp, Zea Mays
aaaacttcttgtggcactgtaaggagccagatggtcgatcaggaggtattttgttgggtgttgatttgaatgtgtttgatattggagggattgacgagggagagttttatgttaagtttactctgtgtaataagagtgatgcttttaaatgggtgttggcagcggtttatggacctgcacaagtggataagaaggagcttttttggctgagttggtgcagtttactagtcatgcgactctgcccctcgccataggcggtgattttaatattcttaggaatcaaaacgagaaaaataaacctttgactgaccaacgttggcctttcctttttaatgtcgttattgatgggcttaacttaaaagagatagagatgtcgggtcgccagtttacttgggcaaataaccttccgaatcccacatacgagaaattagatcgggtccttgtttcaacggaatgggatcagaaatttccattatcttcggttgttgccctcaaccatgatatatctgaccatacaccgctgttactgaactcaggggaagccacatcttgtccctgccaacaaccttttaaatttgaattaggttggttgcttagggatggttttcatgatatggttcatgacatctggacaaatgaagtcagtggtcaaacacctatggagaagtggcaaaacaaaataagaagattacgtcaacatcttcgtggttgggcaaaaaacacctgtggtgcttataaaaaggaaaagaagaatattttaaataagctggatttgttagataagaaggcggagtatgacaacttgttggcacacgagttagatttaaagcagtgccttcaaaatagattagctgagttgttgagggaggaagagattaagtggtatcaacgagcaaaatcgactcatttgcttcagggtgatgccaacacaagatattt

SEQ ID NO: 144312 - DNA, 663 bp, Zea Mays
tcctattgctcagaggaggaaggcttccctcaccttcttcggagttgcgcgctacgcttggggatccgcaagaagcccgaatatgtctggaaggagtaccgtgaaaatggaatagaaaagtgctctatggcggtctacttaggagagagccagaactacccaaaccaccctcccttccaaattaccttcatcgggcacagtttcccagacacttgccagagcgttgctcgaaaagccctcaaacaactgtgccaaaactatagccgagagatctctgagacccccctccgatatttcccacccagcaacaaaaacacccccacctggaggaaaaggctccagtctctgtcaggaggagatcccacagaagatgaccccactatcgtatacatggccggatacctccacaccctcgacaaccactacgacgagctctcctcccactgcacccacctaaactcccgagtggaaagcctagagcagcaagtcaaagagcttaagcaagaaaaggcatccctccaggagagtctcaacatagcagaaggcgaggaagccaacactcgtgaggcctatcggaccttgaaaatggactatgacaagaagctaaagaaactcgcccccaagaagaaaatccagaagaagaccaccaaccaaggatgccag

SEQ ID NO: 144313 - DNA, 424 bp, Zea Mays
gttaatgttgacatgtggttgttaatagtcatgtctgttatagctaaaaccaaggttgttgatgcctcatatgtggtcgctaaaagctgcaaatttggttgttgatgctttttatgtggtcgttaataccccataactaacgaccattatatatctggtcgttaatcgaataacgaccggaatctacatgtggtcgttactacaattaacgacggaacatttaacgaccatcgacgaccacatttttgtggtcgttgtttacatttgacgaccacattttggctattaacgaccacatatcctatcgttaatactcatttctcttgtagtgattgctcttgcgcaaagaagaaactagaaaaattgggaaatatgttgtttgacatttttcaaacagagtggtaataaaaagcacccactaagc

SEQ ID NO: 144314 - DNA, 409 bp, Zea Mays
ggagaaatctctctggacgacacacgcattcacccaggatatgtcttgatgatgtttgtttcctttcatgagcttacggcgaagagcgcgaccaagtgtgtgttcctccatcgtgagcgtggtgtctgggagtgggactcgctgcgtcaccagaagggcctgcttgcccaagcaaacgagcagcttgctcagaagagcactgaagcagcggatctctgggcactttactcgaagctgaaggaagaggctgcctcggtacggggagaagtggctcctctggccgagagggtaagcgagatggaggaggatcttagcaggatattcggtaagcgggagaaattctagaaccaggccgtggaaaccttttcccaagctgagacccttgctaaggaactcgaggcgtagcgga

SEQ ID NO: 144315 - DNA, 541 bp, Zea Mays
ctcgatagccttgattttttctgggttagcttcaatgccccggtatgaaaccaggaaacccagcagctttcctgcggagacgccgaagatgcatttctccgggttcagtttggtgtgggttgcccagcttgtcgaagaccagggtcagatcttctactacactcgaccccttctagtcttgaccacgatgtcatcgatgtaaacctccaccttgtcccggatcaggtccccaaaggtcttactcatcgcccgaacaaatgttggcagggcgttcttcagaccgtagggcatcacaaataacagtacaacccatctaccgttacaaaagcggtgtgcttcctatcctccctagacatccggatttgatgaaaaccagagtaggcatccaagaaagacaaaaagtcgcaccccgaggtagagtccacgatctgatctatacgtggaagtgggtacgggtccttggggcatgcattatttaggctggtgtagtcgatgcacatccggagtttcccatttgcttttggcacaatgactgggttgg

SEQ ID NO: 144316 - DNA, 632 bp, Zea Mays
tgggcggggggtggcgagcgacgacgtttgggcgtcgtggagatggaagtcgcttacctggactgcgggattaggattcggaagcgctggcagctgtcgctggagccgagggtgggggggcgcaggacatgacgccgagagcccctcacggagcgcgagctagaggaagagacggaggatgaagagagatgaagcaagggcaagcgaggagagcaacctagaagtctccagaggcgataagaaccatgggcacacgagagagaatgcggggaaaatgaaccaacgatccacgatcgaacgactaagaattttttggctgacgtggatgggctcgtaggcgtcgtttccatccgactttaataataaggaaatacaactgaacaagttggttacgatcagggaccgaccattacgaccctaggcatctcctcgtggctatataacccgagcaccccctccttatccatcttgtgcctcgaacgactaagaattttttggctgacgtggatgggctcgtaggcgtcgtttccatccgactttaataataaggaaatacaactgaacaagttggttacgatcagggaccgaccattacgaccctaggcatctcctcgtggctatataacccgagc

SEQ ID NO: 144317 - DNA, 617 bp, Zea Mays
cattgtgcacatcagatagattatcaggtagctcgagttgataggacatctctccatctcgcctaaaaactctgaatggtccaataaaacgaggggacaatttgcccttgactttaaatctcttcattccacgaagtggtgacaccttgaggtacacatgatttctttcctcaaattccagtggtcttcctctattatccgcatagctcttttgtctggtctgagctaccctcaaattctctcgaattatacgaacttgttcttctgcctcttgaaaaagttcaggtctaaagatctgttttcctccagtctgatcccaatatagaggagttctgcattttctccatataaagcttcaagaggtgacatcttcagactagcctggtaactattattatacgagaactcagctttaggtagactcttgtccaactactaccatgctgaagggcacaagctctcaacatgtcctccaatacttgattagccctttttagtttgtccatcagtctgaaggtgataggttgtactaaaattcaacttcgtatccatgttctcatgaaaacttttccaagatctggaggtaaattgtgatcctctatccgaaacgatcttct

SEQ ID NO: 144318 - DNA, 362 bp, Zea Mays
ctcagactcaggtgcaaggcgaaactgatggcaataaaaaaggggaagggatggagaaggagaaagtagagaggaaggagatggcttcaaggtctgagatgtggcaacattttatcaaggtcaaggatgacaaagggtttctgagggctggaaggtgcaaatattgtcaccgtgaaattaaggctgacacaaggggacatggaacatctgcattgaagaaacactttggtacatgcaaacgcaatcctcatgttttcaacaaggactcgaagcaaggcaccttgcaagcatgtcatggggaagctcctgccacttggaggtttgatcaagaagcacttagagatgcctttgctgagatggta

SEQ ID NO: 144319 - DNA, 1733 bp, Zea Mays
gattttttacagaagttttgcaggcaacaaacatttgcttcacattggtttcaaattccactattccaatgcaacaagtttgccacttgaagctagaacattatatcgaatattgcaacaacccagaaaagaaagataaatacatcataaagttacagatgccaaattaccacagttcgcatgtaagtctgtaagacttatttgatctagtgaaacctagttctttctcagatgaagcaacttactgactagttataaaggtgcatcatggaaaccaacgattaattgagatcaggggcgtcttatgaagagtatagtgcacattactacggcactaactaaagttacttcttgaacaggaagatatagcgcacagtgctggagtaccaaacattgttagaaccagcggtggtctagcatggttgctgtgctgcactctttgtcggcgttaaaaaacccaggccttcaggcccacgagtcaatgagagcggagatggtctagaaccaaacattgttagaaccatccggacctaaaatgcgcatcataaatttactcgtcgatgtttactcgaaacaccaacactctttatattcaactatgcataatgcactcagcatgcaacatagtgataagattagagattccaaaaaaaacacaaatcttagatttagtgatgatgtgcattttattatattaagagggagtagcacaattacagtccaataagttctcgaagttaccatggcaaggacaaattatgttgccaaaattaaaaaaaatgactatatttcgtagcatttcacaatcttcgtgtcagaatcaccatcttagttattccaccaagaagtatacagtacagctagttcggtttgccattcagcaaagaacagtgtggttctaggatatccctattttacaatctaaaggttgagcaattcaagggttgtgacttgtggcaagcgaccaaaatgttgaagcaatcaaagaaccttccctagttcacaacaatctctggttacctgtgtaccgtgactgaccaaaaagaacaaggggttgggggcaaacctgttgaagaaccccccacccactcaaatcctttgttgggactcaatcaccagtgcattgagcatgatatgcatgacagcgtcatacacaccaccatcataatgcataccatctgctgtgcactgctgcccgcacccctgggtgagcttccccacatcaagcagcaggaacgggccaccatcacggcgcaaaacacccctccgatcgacctcacgatcataggcatgaagcatggtgccgttcatgtgtgccctcttggcgtctgtgttgagcatgtggttcaagaggtgcggcaagccaagccagaacatatgtggtggcggcacgggaagctgcgagcggagcgactctgcggcgcccgcgacggacgccagtgcatcgccgtagctcgcggcgtccgtgacgtggagcatgtgccacagcccggatccgaggacgagcacgtcggggagacgcggcgcgaggcgcagatcctcgcggagcagacgcgtgaggttgctctcaaagggcgcccagacgaagtccacggaaatgccccgcgcagggacggcagcgtggtagtcgctgtgccggcggaagagctccggctcggcggccgccgccgcggccgggtcgagcaggaggcggagaagcgcgaggacgagcagtcgcgcctgcgaatccccgg

SEQ ID NO: 144320 - DNA, 726 bp, Zea Mays
ggacgccctcgctgccagtctgccacccttgtcgtggcacaatagatcgtctccgatgttcgccgacgagagcagtccgccgccctgtcctgggagaaggaggtcctcgacggtctcgaacaggatttggccgctacgtagaagcgggccgtggacgtcgcctctcaccttcacgctcaagccacggtcgttcagaacgtttgctcccttgtgacgatcattcttgaacccatatccccgagtattgtctacgctcggtggcgtgatctgctattgctcactctacgccggtatgccctcgacgatcatgtcacctctgaccacgtcgacccctccacgtatcggtaccaattcaacgacatcgttttgtcctggttacttggcaccatctccaatgacttgatggagatcattcacgagccctcgaacatgacgctccaggcatggcttgccatcgagaaccagtttctcggacaacatgaaacccgcatacttcacttggaggcacaatttcacatgttcatgcagggggacctcagcgtcagggactactattgaaagatgaagacaatggccgacgcccttcgagacctcagtcacgatgtctcggatcgtcactcgtcctcaacctccttcgcgggctgagcaaacgcttcgaccatctcaagacgtttgtcaagcgtacagtcccattccccacatttcaagctattcggaacgatcttc

SEQ ID NO: 144321 - DNA, 487 bp, Zea Mays
gtgcaatttactggactccctaaggagctaagagagtgctcggtaatcaaggtggttggttctatgttaggcatctcaaatgaggtggatatggtgtttacgaggaaatttgatagggcaaggatgcaggttgcagtgcttgacccgaatttgattccacaatttatccatgtagtaattggagattatttgtatgaactgaaattcaaggtagaggtggctggcgatggagagcagcctacgcctatggatatggatcacttcggggcaaatgatgatgatgaatttcatgagcaaaacaaggatgacaatttgggtgacaaggggaacagtaggtccaaactgctggaaacttcaaagggttcagcacgtgtggttaacaaagtgtcagcctctaagcactgcagcaacaattccaatggtaaatcactgagagtgggatatcagctgttgtacatggccttacgtagcaggatttggaacagca

SEQ ID NO: 144322 - DNA, 620 bp, Zea Mays
cgacgaccgctcctcgccgtgattcgtgccaccgttgttgcgattcacgtcgccggtgaccagataaggccgtcggtaaaagccatgcgctggacgccactccggtgaccccccaccgtacttcccctctgccttgcggctggaaccgataagaacgccggtgaaccgtcgtcgctcggtcttgcgccacgtgtccggatgctttaccacgtcgcggatagttacgctaggagcgtccggtgatcgtcggagataccgccacggtagaagccacctagcgcttgcgccagtgccttcttcttcctctggccgccgcgcgtctcacccgattcaccagccaccgctcactatccctataaattgagcccgcggttagctgcgctacatcatcacgaaactagagccccaatcccaccctcaatcgttcgctagagctcatgaattttgaatttcccccaacacagttctccgccgtcgcgaaagagtacaccaccgctgccagcttgattcaggttagcacgagtccctttgctgcttgttctagcatccttaggtaccccgcaaacccctcgacccctttaattgaactgtaccgccagggatcaccgggaacgcactca

SEQ ID NO: 144323 - DNA, 620 bp, Zea Mays
gggacattagcggcgcttggggtctccttggcacctccaccttcaacgggctaggtggtgctagggtcgaccatggttgtgctggtagtgtcctagtggacgctcctctgggccccagcaagcgtcgaggcaagctcaaagttggcctgttcgcaagcatacgtggctctgaacgacgtggcggccatgatgattccgtgcggcctcggcatcttgagcttcaagtacatgtagtttggtatgccatgaatttataggaccctaggaagtctaccacctctaactgcagtcgttcggtgtgaaaattggtggggttctcgaaggtgacgagcagagtgatctgcccgagtgggtaggcctggtggcctagaatgacgccgaactaagatgcagcgctgagcgtgtgaatgtgatccccaaaccatcgaaaatctcaatgtacatgatgttgggactgcttctctcatccatcagcaccttggtgaggcactttgagcctatgattggcttgacgatgaggggataggacccaggatgtgggattctatcttggtggtcgcggcggtcaaagacgaccgggaactccaaccaccgaggtatcgcggcatggtgggttctac

SEQ ID NO: 144324 - DNA, 415 bp, Zea Mays
gtttggcctcatcggcgcgtacgccgcggggagctgccgggacgtgagcacttccatctacgccgtggccctggccggcgctgttctcgtctacgttgtgatccacgtcgtcttcttcacgctgggccacagcgacggcgaagcttccgccgagaaggaggtaaaggatgccgagtcggtgaagaagcggcgcaagcggctgcttctcttcgcgatcttggcggcgaccatcacttaccaggccgggctgacgccgccgggcggcttcctggccaagtacgatccagtaaccgggaaccacgccggcgaccccgtcctgctcaacaactacccacgccgctacacggcgttcttctactgcaactcggtgagcttcatgctgtccatcgcgctcatcatcctgctcgtgaacccg

SEQ ID NO: 144325 - DNA, 472 bp, Zea Mays
attagccttactgcgtatttcgttttgcgtttgtcggtagagagattgggcactttgggatgtggttggatgaatagctcaccgccgcgcgccgccgtgcttcgtgtcctggtctcgatgtcaccttcaaccaatggtaggtggccctaatcagtgtgctagcacttgggcatcgcgttggaggcttcggattggggattagcgcactagggtgcccgggttcatctcgccggcgacctgcgctccgccgtgcaaatcgttggcctcggctctgttgcgtgcgcagtgggaggatgaagaagccgcttgggccgttggattgtattcaacggtcacgattagatctcagagtaattatgtttgcgtcgttggatctacatctaacggttatagagggatcaagggaatagccttcgcgtgtttaatactgtccgtaagatcttgatcgggcggctcacgataggaataggat

SEQ ID NO: 144326 - DNA, 300 bp, Zea Mays
ccgccactgtacccgaaccgtcccctcacccctcgtctgcccgagccatctcgtcgtcgtttgctccatccccgccatcatggcaagctcatcagggctcgttgtcccctcccttccttccccctcccgggcgcctataaaagggaccgcccgagctccatttcctccacaccagccccgaccatctcctctacacctccccgagtccaattgagctagcgccgccgcgtccccccttcactccggtgagctttgttctcctctctctagtagctttcggtcgaattaacttggtgcttg

SEQ ID NO: 144327 - DNA, 502 bp, Zea Mays
tattcctagtgagtaagaccctcttcctttctcacctgttctctacaattttttttcaatatttgagcattacaaatagaagtttgttatcatgctcaatcactttttcaggtatgttgggcctgtcattatgctttgttcagaaagaaggggcgaacagctagaatatacatttatcgatgcgtaaacctttcttgcttttaattctcagttttgttaagtgctcatctattctttgctttttattcatatggcttattttgatgcagccaaagggctctgttgaagtaccgattaccattgaaggagataattgtggacttctacaatgagttgaagggcattacgtctggctatgctacttttgactacgaagattcagagtaagccctgttgtgaatgcaataacaaggcatggtctggctaaactttttttttatttctggaatttacaaatgagaaaaatatcatgtttgttatttcacttcctcgtatgctttcg

SEQ ID NO: 144328 - DNA, 374 bp, Zea Mays
gtcctccggtccgtgaacaacattattcgctcccttctctttcattaccatgcccctcatcctttctgggttgaggcctttcacaccaccgccacttatcttttcaacgccaccccgccaaaaccctctctttctccaccccataccaggccttgcatggtacaaccccaaactgcaatcaccttcacgtctttagctgtcgatgttatccaaacctctccgccaccacgccacacaagattgctccccggtcttccctctgtgtgtttcttggctactctagtgaccacaaaggatacctttgtcttgacctttccaccaaccgcatcatctctcgtcatgtcaccttcgacaagtccttcttccccttcgct

SEQ ID NO: 144329 - DNA, 487 bp, Zea Mays
aaactgcagtagcagtggatgtgggcggcagatgtcgtcgcgtcagtgtcaaagaactagcgctgacagagaggcagggacctagcagcgggggagtggaggagccgaacctagctgtgcagccgtcgaggattaagagccgtagtggctgggacctagcagcgggggaggggaggagccgaacctagctgtgcagccgtcgaggattaagagccgtagtggctgggggatctacgtccctggcggcggctgggcaatctgtgtcccgggcgctggcggctggggatctgtgtgcctatgtctgtggcggctcgtctggcggcgagacgaggaagaaaccaatttgcgtctgttttttaatcgtctggaatacgcggtgaaggaaaaatttggcgccagattaatttttgggagctctcaggagttggaatactctagctaaatatattgataaaatggggtaggatagaaacttgataaatttatt

SEQ ID NO: 144330 - DNA, 475 bp, Zea Mays
cacgtatatgactgtggcaaacgaagtacctaaagaaaattctaatgatgagcgaaagaaatgtgaaatggacggaatatgtccagaaatttccatcggcagcaaaaggaaaaagcagagcaagccaaagaagaaaaacaaacctagcaattcagaaggtggcccacttgccatggtactatggttcagagttgtgcttgatgaagctcaaacaataaaaaattaccggactaaagtgtctagagcttgttgtggactgagggcacaaaggagatggtgcttatcaggaacacctatacaaaacaaaattgatgatctgtatagctatttctgtttcttgaagtatgaaccttactcaaaatttagtaatttcaaatatatgatcaagcaccaaattactagagattcagttcgtggctataagaaacttcaagctatcttgaagataattgtactgcgacgcacaaaaggtaag

SEQ ID NO: 144331 - DNA, 505 bp, Zea Mays
gcacttgttgaagagtccaaagcatcatattattctcccgtgcgtgcgtgcatgcgccgctgtcagcggatcgacggccgaacagcacatggatggaagggaagcttcgtcagagcattttaatctgttgtgcatgccattttgtctgaaatccccttcggccagttttgcgccctttttctgctactgcttttcttattctccttcgcggattcctgtctctagcattcaagttttctttgtgtctgctgggcgccgttgatgcgtgagaccagcgctgcaccatgcatcgcgtgatccagcgaacacgagctttgccgtcaccgttttgatcttgtcgtcccattaaagcatcagcttggagatggattctttattcccttcacacaatcaaggcaggtccatcacaccggatcaccattctcgacacctttcggcggctacttatgctggttcgactgccacttatctgcatcgactatactattattctacagctacatca

SEQ ID NO: 144332 - DNA, 545 bp, Zea Mays
cggtgcaacatgctcgtgcttactcgacttagggtgaccactataccctactaacagagcaataggcttaagtcggcaacgacctaagacggtgcaacatgctcacgcttactcgacttagggtgaccactataccctactaatagagcaatcagcttaagtcggcaatgacttaagacggtgcaacatgctcgcgctcactcgacttagggtgaccactataccctactaacggagcaatcgacttaagttggcaaagacttaaggcggtgcaacatgctcacgcttacgcgtcatagggcgatctctatgccttaccagctgatcaattgtcataaattatgaaaagactccaaaaaccagcatgccacgcttacttctgcaaacgttcatagcgatcgttgaattctaacaatagaaacaaaatgttatagctttcaacaccaagaacacatcctaatatcctaccgagtattcgaccgcactgatcacacacacatatagttcacaaatacatttagtatcttctaaacacagcaaaacat

SEQ ID NO: 144333 - DNA, 691 bp, Zea Mays
cgccggctgttcttctgaatcagagggatttcgtcctcttcttcatcatcctcatcaacaacacggacaacacacccattggggtcagtgtcagatgggtcacacccattgggatcagcttcagtaaattcaggcacgggcacttcctcaacaacaggagcagaaggaccggcacccggatctaagctagacacccgacgaagacgtctcttcttctttttctccccctcagcaggaaaagaggcttgatcggctcggcgagaacgttttggacgaacattgatagacttctgagcgtccaaagctttgtcagcctcagggatgggtaccaccaccaatgtttcagcaggagcggcatcagaagaatcctcagctaacatatcaagcatggtacttatctctgcatcactgggatccaaaggcacctcaaagtgaacctgccgttcatcatcaggaatttcttcaagcgaagcaaccaaagcactaacttcttcggcagagggtctaggcccaaaccgccatcaccagcaggaggatttgacacaaaatgggtaaaggccttggaaggaggcaggttccaggccgagtatgcaacaggggcgccaacatttgataccttgcctctaagtatcatttcgagccggctcaccaagtccacagcaggaattcttctgttagttacccgggttga

SEQ ID NO: 144334 - DNA, 981 bp, Zea Mays
cgaacatacagcacaactaaaacggtgcgcgcagtccaaaacagaaatcacaaaatttcagcttctatataattcaagaattgccctgttttagagacttgtgttattctaacactttaccatttgttagagttaaattaatcaaatgagcactaacaagtagacttacaaattttatccgtgtcattatgagcactagaagtaccatatttaattaacaacacattcttcccgataatcggtattgaagtgttgtccacaccataatttgcattttaacttagacatcatatgaacactactactttttacctacgaccgtaaccatacatatgtagactacaacaagcaattcaccgtgattaggagcttaaccacgccatctaacaattcggttaactagagcaacgacatcgccactaaataacatacacgtcaacttgccttttattgccgcaatccgagacataacatatactacaacatttttataaacccacagattcacaagtatattcgcacatcgaccaactcatatgaatcgtaaactacaattttccaaatcgcaatcaccacacatttacttcccaaaccatgaacgcttacatgtttatcctacgaaccgggtatttcaataattagcctaaaacaactaactccattacatccttgtatcacaaacctacttgacttacgtgaagtgtctactcgaaattgtgagcacaatcatacactatatgcgaagcctaatttaacgagcgcataatacgcatcgtcatgactcgacctataaatatagagaaagcgatgactactctagcatgtcaccacccctctatttaaaccaagacaatttctaccatcgactaagagtcgtaagcattaaataccttactactttacatgcacaaataaccttcaacttaacacaactgacaccgatagaatttttactaaactcatcatacgcataaccctgtc

SEQ ID NO: 144335 - DNA, 847 bp, Zea Mays
ctgctttcaagcagctgcagatcccgggatcccgactgggaccctctcgcccgttctccggagtgggccctcaaatggtgtatccccttgggagcatcgcactcccggttacgttcgggactgaggaaaacttctgcactgagaacgtctagttcgacgttgcggaggttaacctccctttcaatgccatcattggcaggccgaccctgtaccggttcatggccattgcccattacgggtatttggtcctcaagatgtcgtcccctgctggggtcctcaccgtgcggggtgactgccccactgctcttgcagctgtcgagaagttgcacaccctagcggcagaagccgctcgcccggatgacggagggagggacctctcgacttcctgtaccaaggcgcctgccaaggtgcccaaggtgcaaccatctggtgcagacggcgtccccgtcaagaccatccggctcagcggggattcctcccagaccactcgcatcgcgggagatctggaggaaaaataggaaatcgcgctcgtcgccttcctccatgcaaatgccgacatattcgcatgggaaccatcgcagatgcctgggatccccagggaggtgatcgagcaccatctgaagatccaccctgacaccaaaccggtgagtcagaagcctcggagacagtccattgagcggaaggatttcatccgcaaggaggtccggaagctgctggacgctggcttcatcgaagaggtccatcacccagtatggctggccaatccagtcatcgttcccaaggctaacgggaagcttcggatgtgcatcgactacaccaacctcaataaggcctatcccaagtagag

SEQ ID NO: 144336 - DNA, 1068 bp, Zea Mays
tgtaaagtacctcctccgttctaaaattataatctcatagtgtaaaattataatttcatatcgtgtgaagttaaaatatagtacctcttttttcagtccacgttcgagaattaaatgataacgaatatagacatacatataaattatattcataggttcattaatgaataggtgtttagtcaaacgaattatattttgagacggagttagtatgtagctaataatgaagtgttcatgattatttgtctcgtcatttacccatttcgtcagtgtcaaagtaattttgactagatgcagcgaacgcaataatgatcgagaggtttcctgaaaacgagaaggtatacttcagtttttgacttggtggatggcgatacaaggaataattaacctcatagtttttgaattatgttacgcctaatggcctcataaactctaggttaccctaaaaaaatgtcatgttagtgttatcctaccacgtaaccttgatcctcaccatgcttcttgctatggaactaggttggttagaggattccaaaacaatctaatggataccatagaagaatcagagcatttataccaaggattcccatgtcccccctcagaagacattttgtcgccattgaattgttagaaagcagtttctaattagttctttgatgggactaacggggagggtcaaacagtagctttgtttttaaaatggaggggtaaaatcaatacgatatcaattataaggtcagaaaagggtataattataatttcctacaaggatatcaagttcgacatccctgaatttgatgaacaagacttcaattacgcgttgtcgtttggatcggctaaaattaaatcagcttaaacaactgagcctagacaactgataaattcgaagacaactgagaaaattaaagagcgcggccagagaagcctagacaactgaggcacatacagacaagctcgactttactgaggtcgaagacattttgttgccattaaagtttaagtgaaagcagtttctaattcttggaatgtgactaacgaggaggggcaaacatcagctttatttctaaa

SEQ ID NO: 144337 - DNA, 377 bp, Zea Mays
tccatccatcctggctaggcgatgacagctgctgtttcacataggatgccggaatggcgagacacgtttttggaccatgggtgctgtttgcaagaagctgagctagacgtcagtggtagtatagctttgtgtgtggtgatggcaacttgtatggctaatggggaggtatttggaattggcagtgtaactagctagggtcgctacagcgaatgatgtacatatgtattcttttagcactcgttcgatgattcatattccatgtaggttttgatgggattaaaaagaaaattataaatttttttacctttgaacccactaaatcacacctaaaccacatggactgaaagcaaaacgaacaagtcttaataaggtgttaa

SEQ ID NO: 144338 - DNA, 940 bp, Zea Mays
ctatttttgcgaattaatggaacttcttcttctttttcttcgtcatcataaaaaatgcggacaaaagatggtgcaggatcgcacccattgggctcagctgcaacaggattacacccattgggttcagattcagtagggccgcacccattggggtcagtcagtgcacgatcacacccattggggtcaacttcagcaggtacaccaccagtgggatcaactccagtaaagacctctgccaatacttcttcagcaataggagcagaaaggctagcaccctaattcaagcatgacaatcgttgaagttgtctccttttcttcttcttttcttcagcaggcgcagctggacgactgagttggcgacgacgctttgggcgagtaccctcaggcttttgggcgtccgttgctttgtccagctctggtatagcggcaacaaccattgtttcagtagggcccaagtcagatgattctccagccaacatgtcaagcattgcattcatttctgcatcatctggactcgctggcatctcaaaatgaacttgcctctcatcattgggaagatcacaaagagaagcaaccaagacctcaatatcttcgggagagggtcgcactctaagacccaggccactatcactagaaggaggattagacacaaaattgaaaaatgacttaggaggtggcagattccaagcagagtaggcaacaggagcaccaacatttgatactttgcctctcaaaatcatgtctagccggctcaccaaatccttagcaggaattctcctattggtaacccgagtggagtaagtaacaccactgtacaagtaagccaggtatgctctgtcctttaggggctggatgttcttaaaaacaaaattagcaaccaaagcttcagcggtcagacctctttccttcagcagacagacttcagcaagcagaaccttag

SEQ ID NO: 144339 - DNA, 328 bp, Zea Mays
tggggagatttatgctgctgcataatttttgctcttgaggtatcctagaaattacagtagtcgattggtacttgctagtgtatctaaacaacttggcgtacctccatgatctcctttaatcatggattgtgaaaccaccatttttgggtgttggttacttcgtgacgaggggaagaagacaccgagtggcacggtatggaaggaactcaccgattttctaacctactgcattatgatctcttctccttatttttgtatatttcttgtttggaacaaacatttccataagaacaagtaacattctcttgtgttataagctgtttgcgtg

SEQ ID NO: 144340 - DNA, 373 bp, Zea Mays
atccgatgatcttagccgtcagattaggaacggacgccccagattaaatctgaccaacccgaaccggtatgcgtcacgagcgctcagatctatatccaacggctcgaatttaatgaagccgagatctcgccgcagccctcggatctagatcaacggctaccgctacccgagtccgaatcgttaccctggatcaaatcgcggccgtatatcatgagatccacggtccatacactaactgaccctgagctgttcatcctgagatcaacgacactggtgttttctcctttcttccgctcatccggtgagccgagcacccaggcagagaacgcccacgaccgcgccatatggccgacgaggtccgcagccccaaacc

SEQ ID NO: 144341 - DNA, 549 bp, Zea Mays
atggagttcgtgataccgtagtagttgacacagtgctcgtcatgggaaaaaggctcttacggggtgcgtcatctccattgtttttatgacgttgggaagtcctatgtcatagatatcgaggtaagagctgagctcgggcgaggcggaggtccgtccgaggttgtgaccgagccttgtcttgagacttgatgatgcacgccacagtcgacggaaggggagcaggtagccgaggcctagttcgggtgaggcagagtttgcgcccgaggtcgagtttagtgtcgggtgagatggaactcgcgtccgaggtcttggtccacgtcttatcgtattacgtgtcccgttaggagctgtgaggaggcgtgcgctcgcgtaatgatgaaggtgaatctttgacaagaccaccgtcctattgaaagacctgcagcccgacgtgaggtagctgcgcacattaatacgattgtctcccaatagccctcgggcaagctttgtctttaccgcctgaggcaggctcggacgagacggacgtggccgccctggggtgagggagcc

SEQ ID NO: 144342 - DNA, 731 bp, Zea Mays
atacgtggtatgccggtcactgctatagtaacatttaccttttacaagcttgtggcatggtttaatgatagacacacccatgcagttggattgcagaatcagggagagagatgggctccaaaacctaagacttttctagagaaggcaaaggaaagggcaaacacacacactgttgattgttttgacttatagtcagggacatatgaggtattccttcaagctggtactacttccgacggtgagtcacaagagtcgaggaagcatgtggttgtccttaatgacttgtcatgtacttgtggcgcacccaggcagtaccattttccatgttctcatctaatcgcagctgctcgagctcacaactttgacttagagaggaggatacctcaagagtttactattgataaactagttttgacttcgagtccaagatttattccttatcgtgacgcgggtgagtggcctccgtacgatggcccaaagtatgtcgccgatccaagcagtcgttggaccaagcgtggatccaggaagaggacgaggcacaagatggttatggatcaggttggtggtaggagtagaaggggaaggagaacaccatttcttaccgaccccgaacagtatgagtgtggcaagtgcggtagacttggtcataattcacgcacttgtcgttggaagattagcgaggtttgtattgtttagtttaatgatacaaccttaattttatttaataaggc

SEQ ID NO: 144343 - DNA, 505 bp, Zea Mays
gaattttgcacagaagatggtgtcagctgcagcatgtgctgcgcagtatgcatcccaccaatctgcagcagggccagtgaggcgacccgatgcatatagaagtttctccctatcagtgcactgagctatattgaacatcttttccatggactttaatcagttgtcaacttgcagtgggtctggggagctagacaaggtgggtggcttatggctcataaactctcggtgcttatccctgggtggagttgggttggtggaggtggtagttgctgtcattcctatcgttcttgatggatttcctgacgctcttgacacattttttgacgctcttgatggatttgcgcttgcatatgtgtcatggtgctagccatctgctgtagtagttgcatccgagcggcagctacaacatctgtcctagccggtgggggattcagaggaggattcatctccgattatggttgggtaactatccttctgcgacgaatacgagtaggtagatcaagac

SEQ ID NO: 144344 - DNA, 370 bp, Zea Mays
ccgatggaggattggcttctggtggataaggtggtgctttcttggatccatggcatcctgaccgtcgaactccaagacatcgttcatgtgtcagacgacacggctctcggatctggggtgcccttgaggctcagttcctcgacaaccgccagactcggattctgtacctcgagaccgccttctggcagcttgctcaaggcgatctctctgtggatgagtactgccattagatgaagaccatggcggacactctttgcaccctcgatgcccccatcactgatgagagcctcgtcctcaacctcctacgcggtttgagccctcgcttcgatcgcgtgactcccatcctcacccgcatgaagccgtttcccac

SEQ ID NO: 144345 - DNA, 319 bp, Zea Mays
cagtaactcttggcctagttgacctctacatcaaaagaagtcaaaatagtgactgagaaagcgagtactccctccatactcaaaattaaggtcgtttaggacaccatttgttataccaaggagcgattaattgcatgtaatttctccgtatatgcccctattaaataggcatcaggtccacttcaatcacaactgcatggttgggtcaggtcgcggttcaaagccccacatcaccatttttttcctcgagtttggtttaatgcatggccacgtgcaggggctatttggtccagcgcagagcaaaatactccaaaacgac

SEQ ID NO: 144346 - DNA, 307 bp, Zea Mays
gtgcaaatcgaaattatgcccaaaaactctagacactgcgaggtcaggctgggtagtatgagaaaagagggagaggaaggtacaatagagcgagtcgtttgaaagccaccgatcaaacaaaaaagaagtggatctaccatccctgacatagatgagtatggtctctgaagtgatcaataacataattgtagacacgacccaagtacgtgggggaggaggggtgggaaccaagtccggatcgttaccctcgaagcaccagtctctccaagggacataggggccatggagggctttgtcagcgaacttg

SEQ ID NO: 144347 - DNA, 608 bp, Zea Mays
gtttatatgggaaatatgagtgaagtgtgtgcttggtttgaacttaggcgaagaaaatggaatttgggcactcggctcggaaacgatcgctcgaaacggggaatttggtgaaattgaagcctggaatgtcggattggcgtgaaatttggcgaatatgtaactggaggtgttgtgaaggtgcctgaaaaatttgggttcaatcggagcatttttggctggtttggacatttcaccgaacacgtggcgtgcggtgaattaggtttttggagatatggccatttgaggattaaaaccctcccaaaaggagctagaaacctgcagggatacttcaagagagacataggaacatctctcaccacatggattcacagaatttgataggaaattgatttgtgcactcaaggggtggaataagctttacagagctgtgaatcagagagagaggagaaggagagctgctcaccagaagggaagggaggccgagcaggagcacttccactggagcacggccgccggcgaggaggtgatcgccggagaggagagcttgatcaccagaggagggcagagagccacagagtgggagaaaatagagagcctctggctcggct

SEQ ID NO: 144348 - DNA, 345 bp, Zea Mays
gttatatcattatatgggttggcggcccactgtctccactctccagtccacagtagaaacaagctctactgtctgccactgtgccgccgcacagtagaaagttagaaaccctaaaacagtaaaaccctaagccgccgcctctgccccctctcacactctgctccattgctggcctgcggccctgccctctactccggtggtcctcagctccggtggccctgccctctgccctctgttgcactcgcctctgctcagctccggtggccctgccctctgttgcgctcgcctctgctcagctccggtggccctgccgtctgccctctgttgcgctcgcctctgctcaga

SEQ ID NO: 144349 - DNA, 293 bp, Zea Mays
gtttgttttgatgagtgtctcctctagcttgagaagcgtctcgccttattccttgttccttctcaacagcttaaccaagagtgctttgtcctctttgttgagatggatgtagaaacgacaaatctcctcttcttccacatcatcggtctcattttccctgtcattaatgtcagtggaagcaaaacaggaaaatgtaccttgtggtgatgaatattcatccttgctatcatcctcatactcctcctcatcattgcttttatctccactatcattgttagcaataagacatttat

SEQ ID NO: 144350 - DNA, 359 bp, Zea Mays
actattgtctgcactggcaaaagaggaaaataggaaataaggttgcacaatttggatcgtgcaccttcacgctgaggactagaaatacttcggcataagtcgtggaaatagtcccttgtgctcggaacaagtggggcaacttgtgggacttttggttttatgtctctggtggggaagtcgaagatctccctgggctccctgcagccattatgtgctctcactgctatgtggcgttcccactgttcgagttggcggaggatgatgaggacaaaggggcccttcggtacgctgcctgcatgaatagagggcgcgatctggttgaggaattcattggatatggagtatggcccttggcgcac

SEQ ID NO: 144351 - DNA, 388 bp, Zea Mays
agagctgacatagcaaataataatattgaatcagcgagcagatcaaccttatggtttgtagctgattgagcaaacagtgcacataacctagaaatgagttgatcagtttcagtatcattcattgcttgcagttaaaaagcaaccggataaaacaaaacactctgcatagaaattatgaaatgatcaatatgatgatctcacccttaggcccacaaagtaacttatcatgatggcaattttggcatacatgtaggaagacatacattccaaattaagcccataaacaacttattagggtgacatgatatgacgttttctagaattagaatagatggatgtagagcttcatgtaggtaaaattatttcttgcagacaaggggcagacagc

SEQ ID NO: 144352 - DNA, 675 bp, Zea Mays
atttaacgatcggtaatcaatacacattctcatactcccgtctttcttagagacgaacaggactggtgctccccaaggggatcagctgggacgaatgtatcctttttgctggagatctgcgatctggagcttcagttctgctaactcggtaggagccatgcggtatggtctctttgcgatgggtgccgttccaggaatcagatctatgtagaattccacttctctttctggtggcattcctggtaactcttctgaaaacacatccatgaattcttcgaccactgatatgctttctgctgttagattgaacatcatcgggtcattggcgggtggctgggcctgacaagagactgactttccctagcggtcggtgaggaggactgtcttgcttgcacaactgatgatacccttgtgtttagttaaccaatccaccatccctaagatcacatcaatccctttggatgacaagacggttaggtctgccaagaatactaccccacttaataggattctgacttgggagcatttgagctggcatagaaggtcggaccctggggtttgggtgaccaagggaatctctagaggagtagagggaatgccatgtttctccacaaaactagtggctatgaaagagtgggatgctccagaatcgaaaagtacggtagtgggagtaaa

SEQ ID NO: 144353 - DNA, 370 bp, Zea Mays
taagcgtgagcaagtcgcaccgccttaagtcattgtcgacataagccgattgctccattagtagggcatagtggtcaccccgagttaagtaagtatgccaattgacagcgaacaatctgagtgcctttgaaacctttttttattgatgatatatttctcgatttacagaatacatcgtcgttccaagagcttctgggatgtagctaggggtaaaacttcctgaggtgttctatgttccatgagttcccaatttccgtgccgtccatctgagtgagacgatatgatcccggccgagtgacttctgctactatgaatggtccttcccatagaggtgacaatttatgttgtccctcccccgttagaattcggc

SEQ ID NO: 144354 - DNA, 633 bp, Zea Mays
cgcacatatgagatgcacctggctttatcctttaaattcgggtgtgacacatattcaggattggccttggcaccaagctccgagagcgtctcaacaccattcgggccaattgttacaacgagctagtcaatttgtccatctcacaagaagattgtattatggcccatagagcagaaaagaagaggaaaacacatgtggctggaccctctacacagccttagtgttttaggatcttgtccaacatttagagcaagggaccacagcagcaacagggaagatgggtacttaggccaccatagcaacaagcacccaatcgttctcaagccctagctttgaggaatgacaacaaccagcctccacaacagcagcagcaataccatcagggcaatggcaacaaatgttgctcttgtggcaacacgggccactatgctaaggattgccctcggaaccagccaaagccagctcagaatgcaaatcagaaccagggaaggaaaaaaagtgcaagtgaggcagggcaaattgaacttcaccacgttaccagaacttcccgaaggagcacccgtcattactggtacctttaccgtttttaatcagcctgctcttgttttatttgattctggcgcatcacataac

SEQ ID NO: 144355 - DNA, 430 bp, Zea Mays
gagaacatcgttgagaaagaacggtccagggagcaccgaggcacctacagaggtgaccggaaaagtggaactgtttccaacgacgatcgaggtagggtgtgtgaggggaggtgagtgggagcgagatagcatgcctgtggtgggagtggtgtgataggatgctccggagtcgatgacctagtcagatggcggaggggccaacgccatggtgcgatagtatgtggcggcgagggcgatagggtcccagcctccagcgaacgaaggccacgtcgtcgtgggagacgacccctgtcggtacccagaatcaggggtaccctcttctacagtatgaaggtgttgtacatctacgacgtctccaggtcacacggagaacggctcccgaccccaccgcatgggcaggtctaaaggcaccacgtggcaaggaaaggta

SEQ ID NO: 144356 - DNA, 779 bp, Zea Mays
gaacctagaagttgtttcctcaggtaccttgggttatatttcagtagagcccactctacatgagcagataatcatggcccagattggtgacaagggtgttcaagtcatcaaggaaatgctcgagaaaatggtagataagtacaaatgcttctgtcaggatagcaagggagttctatggtttgaagaccgattggttgttcctaagaatcccgaactcagaaagaaaatattggatgaagctcacctttccaaattctccaaacaccctggtagtaacaagatgtatcatgatctcaaatccttgtactagtggaccagaatgaagagggaaatttttaagtatgtatctgaatgcgacacttgccagagagtcaaagctagtcatttgaaggtagccggtaccttacagcctcttcccgtaccagcttggaaatgggaggatatttgcatggattttattgtaggtttacccaacacatcccgacaccacgattctatttgggtcattgtggataggttgaccaagatagctcatttcttgccagtacataccacccacatggcagagaagtatgctgagatctatattgaccagatagttcgtttgcatggaataccaaggactattgtgtcagacagagaagcaccgttcgtagcacgtttctgggagcaactgcaagaatcacttgggacccatgtaataagaagctcagcataccatcctcaaacagatggtcagacagaaagggtgaatcagattttggaagacatgttgaggg

SEQ ID NO: 144357 - DNA, 359 bp, Zea Mays
ataaaattgcacagttccattttccatacctttgcctttttgagagtatttgttgttaccaattcagggctccttacgcatctcatagctcaaaagggcacgacatggatttgaaattctcacaataccaaaccagggcaatcatggactaaacaagatgtcatgtttgcacatagcatgacttacacacagttacatgttttatccatatacaccaagagggttaatcgctgtggatataacgaatgaaagagctacccatgaatgattcaaaagatatatcctatagtgcactagtcatgattaaacaaacatcattatggttcatttagcacaggcaatcataaagcatcattatt

SEQ ID NO: 144358 - DNA, 453 bp, Zea Mays
gaattctgagacaaatgagcctgaagttggactgtcacattgcttgaaatctgaaattcagattaacagtggaatggcatggagttagggctcgaattcaagcatgatccagcaagaatttggctaggggtgctataacaaagatgaagatggtttaatggtttacaactttgatgcagggccttggatgtgttgccatagaaaatttagagataatctaccctaaacatcatctgtcaggcactcttaagatgactctcatggtacagtagccgatcggatcaggttcagtgaacctcaccgccgatgaccgtcgcactgtgattcacgtcgattgtcgggattcgtgcgctatggattgtggataactgtgggcaggtaaagatcttggcgcctggatcagcttgagttcggtcgcgactaagcccgccgtacccccttgctcatcggtgg

SEQ ID NO: 144359 - DNA, 352 bp, Zea Mays
cacgaatagatcaaatcgtggattccacctccgggtgcgacctcctgtctttcctagatgcttactctggtttccatcagatccagatgtctagacaggataggaaacataccgcttttgtaacagtggatgggcttcactgttatgtcgtaatgccttacggtctgaaaaacgccttgccaacatttgtacgggcgatgagtaagactttcggggacctgatttgggacagagtggaggtgtacgtggatgacatcatggtcaagactaggagatggtcgaccctagtggaagacttaaccctggtcttcgacaagctgcgggcaacccgcacgaagctgaacccggacaa

SEQ ID NO: 144360 - DNA, 518 bp, Zea Mays
cagaaggggagtggatttggtcgcggagtgaagcttatcaaccacgcctggagccgtgcaacatggccagaccgccggtgtcgccgtggtactccggcgacctcatttacgccacgtcgtagctcgttaccacatggtagtaaccgtggcatgcctagactcaccactttagaaccgttgcactggcgagcgccacgactgacccactagtgacctcccctctctccgaccgccagcacgccatcccaaaattaggagccaccgctcttggatactataaattgagcacaccgctagctctgataggtaatcacgaagctagaacacccgctcctgcctccgattagccaccatagctctctaattactcttttcccccaaatcggttttccgcacgccgtgaaccaccgcgtcgtggccagccttctgcaggttagctcaagcctccttgattgatgttctagcctccctcatgtcccctattgctcacagaaccatccgattgaactagatcgtct

SEQ ID NO: 144361 - DNA, 507 bp, Zea Mays
agataatatttcagagtagtttaaaaaatgatatacaaaatgaatatagcgtatagacggagatagtccttccacccttgcaagccctacctgcaccggcaccactggcttggcttagtgtgtttggtttcggaacaaagtgggttgggtcgaaacgacccattttgtgggttggatcggactcgtttcttgtttggtttaagtgacgggttgaactcaatttcttgtttgattacagggttgaaatgggttgaagctgcaccgtctcttgtttggtttcgtgatgatggatgaatgaaggacaaactgaatatggtcaccttcatggtcacaataccacaataaggatgatatctttaattctaaatgatacaacattcaaaataaataaaaccaacactatttcagtatttgagaaatccataagcacaacgaaagatgggtgccgctgcttctcacctggtggtgtcggtaggggacatggaggtggtattggtggatggtggc

SEQ ID NO: 144362 - DNA, 379 bp, Zea Mays
tggagtttctaaactagcctttaagaacaggtttggtgatcagggatcacgaggtgatccatggggaaaaatccctttactattcaaaattgaataacaaagaggttcctctgccatgaatccccgtgattactggtcacgaaatcagctctaaggatgaggagaaaagtcgtcttttgcactgctgctgcctgctgcttcaattatcttaaatatatgcatgtacaaattcagaagtaaaaaggaagtctatgttatgtgtgagcattgcatattgtatatataccatgtgtactgagaaggaaggcaaagaaggcgatgagatggagatcagacacagctccctccatggccatcgacgctgctctgctgccctccc

SEQ ID NO: 144363 - DNA, 450 bp, Zea Mays
gagggtttcaacctctaaatcagccatttcactctcaattcaaaaccccgcagctaggtgctcgatgaaatgcccaaaccagtcaaaatagatcaaattgaccccaactttttccaacacactcctaccacttccagtaacactctcgccaaatttcacgcctatctgatatcctagacacctgttacaccacctctctacctttgtagtgaacctttctgagccgagtgccaaaaattcattttcttcgccaaacctcaaaccaagcacacacttcactcctattcactcatatatacctatctgtgaagtatcgactcaattccaagtcatttcatgcctcatttcgaatttcaaactctctatggcacaattcatcgttcaaacgacgttctcgcgtcgtttgacctatgtttctctaaatcactcagtttttgtgtcataactctg

SEQ ID NO: 144364 - DNA, 499 bp, Zea Mays
ctcgccaacaaccacttcgagggcccgctgccggacttctcccagccggagctcaggttcgtcgacgtctccaacaacaacctctccgggcccataccggtagggctcagccgcttcaatgcaagcatgttcgcaggtagcaattcgatcgatccgtcgattctcgctcgcctcatctttaattttttttccccggcctctctgtacgttttgttgatgaacgacgacgaccttacatgcaatgcaggcaacaagctcctctgcggcaaaccactagaagtggaatgcgacagctcggggtcgccgcgcaccggcatgtcgaccatgatgaagatcgccatcgcgctcatcatccttggcgtgctgctctgcgtcgcgggcatcaccacgggcgccctcggcagccggaaaaggaagccgaggcgcgcggccgccgagaggctgggaggcggcgaccagacgccctccaacccgaagctcaacaccgcgccggccgtca

SEQ ID NO: 144365 - DNA, 425 bp, Zea Mays
caagagctcaaggaagaaaattagaggctaagaacgagcttgacacaactaaaagggaagtgcactgctcaaccttctcaaggtaactgtgattacatggtgaagaagcttgagacgggaacaattgtagcatgcacaaaacccctcgaagaaaatgtcaagaacttggggaatgtcaagaggaaggatcaaaagaagaaaatcaatacctctaccaaaagcctcaaccacgcctccatgcaaggtaacatccaaggtaatgatcaagccacacttcacactaagaaaagtaagaagtgtagtgaatgcattgaaaaggggcacttgattaggtcatgtccctatattaaagaaaatggcttgattattaacaaggatgataaatattgttttagatgctctgagaagggacatttagttaagtc

SEQ ID NO: 144366 - DNA, 403 bp, Zea Mays
aatgttttgccagaagaatttttgggcggtcttcgatgttattgtggatactgccctggcctcaatccactttgtgaaatattcgacagcgacgaaggtgaacttgaggttcccttgagctgtaggcagtggtctaatgatgcccagcccccagcgttgaagtggccatgtatgggcgatgagtttggtgaattgcgaagggctgcctgagtgaggggagaacttttggcatgcttcgcatgaccttgtgactcgattggcggtgcaaattattgcgggccagtaaaatcccagacgaatcaccttggcagcgagggccctaggtcttgagtgggagccgcaagttccgctgtggacttcgcggaggatttttatgccttcggtttcaattatgcacttcagc

SEQ ID NO: 144367 - DNA, 496 bp, Zea Mays
caacaactgccactcatctcctcaaacgcctcccctctaagacagttagtcaccctactcccacttcactttgtacggcacaacccacttatgcccatcttcgggtctttggctatgccttctatcccaacacctctaccatcacacctcacaagctcacccccacttcactcgctgccttttctcagtaactcctctaatcacaagggctgccattgccttgacctcctcacccaccacatcatcatctcctatcatcttgtcttatttaattatcatacgctgtcttgtttaattatcatctgattagttaattagtgtgtttctggttctccgagagccaatggtagagcatcaacttctctctcctccatttcctatattcatagatgtaatagctcttttagggaagttggagtggaattgggttcagaccccaccattcctgctcaaaatttggtttcgcggtgctttcctgcattcgaacggtggtttg

SEQ ID NO: 144368 - DNA, 390 bp, Zea Mays
tggatggttctggagtatttggcttgtagcatatctgtttttttaatgaaagagaaggtatggtggtgtgtttgggacaattacctgcctttcatgggtgaggattagtttgatttgggaaatcgggtctcttacaaccctatgcaagtgattaaattggacaaaggtgagctgcaaaagtgaaattaaggttaagtaggtggattaatgcaggttaaattccgatgtcataaccttgtaaagcacacatcatggcaaccagacggcatcttgtgttcttagttcatcctgcattcctgcatcacacacagctgaccaaacagaacactgacttgtatcttctcttcttcaaaccagtttgggttgaggctgtattattggagtcactgc

SEQ ID NO: 144369 - DNA, 458 bp, Zea Mays
ataaatgaatcaatgaaatggggaaataaaaagggtacttgttcttgcatctgaggacctacaatccttgtagagctttaggagcatgggagggcggcgtccagatctgcaggcggaggactagctcgcccgattagctaggagaggctaagccaaggaacctttacaaggggaatcaagtagagacagaagggtggaaaggtggatggattgaggatggacgaagcagcaagaagagggacgaggaggagaccaagcacgaaggaagagacacgaagcaagcaaagtcgatgtcaccattcccttggccttgatcgtagtgtcggtagcattgaccacatacctccatctcctcacgtcgatctcctctaggcataacaccacatccctagttatctccaccttcatagtcatcgacgctagaaccttagcgcctagggtggtatccttcatcattc

SEQ ID NO: 144370 - DNA, 663 bp, Zea Mays
ctggtgggttggggagcatcgcctgacactggagaatctcgccgtgaaccaaattctgtgggaaattggctgaaccaccgacaatctctcaccggcgctctgtttccgccgtggaaacctgcatcaccgtggtcagacgctctccgcgccgagacgaccggtaagaccccccagcgtactcgccatcaatttcttatcgcgtagatcgtctcagattaggggattggtgctcttgtgcgcggattctgtacctcgccggcgggagccgccgcgcgggctacgggcgccgccgtgctcagccagcagggtaggagaaggcctgctggccgttggatcggttaggggtgtctaggattagatcgggatggcggtaggatattgaccgcagatccgagaagtaacggtttagattagattatgtataccccttcgtccacatagaatctcggtcgtggatcactcgatcgacggttctggatgagcactgtttcattgaatcgacgaagttgatcgtggcccttgatttctaatcctgcggcgggggatccaccgtaacccttcgtcgtggcactttcgcaaatgagaccccgtagttttatagattgaacccgccgtccacccgtgacattggattgggtctcagatttcttgcgcaaaagtccc

SEQ ID NO: 144371 - DNA, 547 bp, Zea Mays
ctcggatccatgtttagggcttgagttcgtgggttggtgtggcctggaccatggcctccgccgtgggcgctggacgccggtggccctggtcgctgggttgaagatagaagaatggccctggccgttggatcataatcaggcactgcgaaatcgaatggtgggcgctctgtacaggggattgcatagcgagcgttgatccgtggatggacggatggggttagatcacgcgttaataaaacctagaccgtagatgtgagatccagcggtgcagaatcagatctgcggttcattaaatccaaatcgtcgatcatggatcgaacggcttcagtcgcgtactggttcattaaaatctagattcaatccaggccagagaatcccgatcggatggctcagattagaagataccccttcggccgcgcgtcttataaaagaaccccctggaaactagagattcaacccgccatccatattcaactgttcactgtgtcttgaacattttacccccgagccccctgcactctctaaaaatagtgcgcccagtccagag

SEQ ID NO: 144372 - DNA, 364 bp, Zea Mays
cataaactctccgaacgacgcaaggaggcagcagaaaagtatttgtcacacttcatggtggatcgccaccagaagatcatccgtcaaggggagatcgatatgaaatctctcctacctccacttcagggtcctgctgtaagtactccagatctatctcttacgactttcatggatcaacgaggagatcaattaaagcaatacgcagatgaatctattaaaatgcatttacgttcatacgagaaatcaacggctcctagttttccatcgcgtgagtctaatacagagccacctgcgccaagtgcatcgactacaaatgggtcacccttgacccaaccatcatatggtatgccgatgcacgctttcg

SEQ ID NO: 144373 - DNA, 343 bp, Zea Mays
ggtggagaaaggatggggcacattcgaatgaatggatggttgtaacaaaggcttttcttgagcacgctttcaaagatgcaactggtcgtctagtgaagtgtccttgcaatcgctgcgagaagaattggcctcagaagaaggaagaaatggagaaacacctttgcaaaagtgggtttatgccgaactaccttgtatggtaccggcatggagagtctattggatatgttgacgcagaggtggaagacgacatgttgcatgatcttggtagggaggttgaaatgaacgctgaggagctggggcagcttccacgcgatgctcaggaattcttccggctactcgccgc

SEQ ID NO: 144374 - DNA, 430 bp, Zea Mays
taaatagctatgccaaaactacagcaaagagatctttgaaacccccctccgttactttccacccagcaacaaaaatacccccacctggaggaaaagacttcaggccctgtcagggagagaccctaccgaggatgaccccaccattgtctacatggccggatacctccacactctcgataactactacgatgatctctcctcccactgcacccacctaaactcccgggtggaaagcttagagcagcaggtcaaggaacttaagaaggagaaggcatccctccaagagtatctcgatatagcagaaggcgaggaggccaacacccgtgaagcctaccgaaccctaaagatggattatgataagaagctgaagaagctcgcccccacgaagaaaatccaaaagaagaccaagaaccaaggaggccaagctgag

SEQ ID NO: 144375 - DNA, 288 bp, Zea Mays
atcagcccatgacctctcctgcgagtatgcagcaatcgccatgttccagctgttcacattcctgtctggcatctcttcaaacaattcccttgccacacctgcacccccctgccgcaagtaccccatcatcagcgtgttccaagagattaggtccctttccaccatcctatcaaacacaacccgcccagactccacatcccctgccctgacgtagcacgccaccatggtattccccaggaccacacttgtggcagacatttcgtcgaacaccctcctcgcatccgctac

SEQ ID NO: 144376 - DNA, 468 bp, Zea Mays
cactgcatttatctagcatccctagagcaccaaggaggaaagccgaccgtgggtgctgctgcgctagcaactcagcgggagggggaaagagaggcggggttcactgttgcactcaaagagtgggtgccgtgcgagcgtggccaattccccaccaggcagggacttcgccaccgaacagatcacgacgtcgggacctcgggtgagtagccacctcggaattacttccttttctccatcctatggcttttgcacggtccgtggaggatcggtatccctgagcgaagtttaggtgtggaccgtgactggtgcaccaccggagaacggcggtgtcgtgtactggtccgagctgtgtgcacgccggttgaccaatgggagaaagagagtactggggagggcacgacatctatgcatgggcggtgtgaggttgaagacgccagggcatctgtggattaggaaatagacggtcga

SEQ ID NO: 144377 - DNA, 514 bp, Zea Mays
gaatattctcatctctttcaaaatctttttgctttggtcgaattctctcttttgaaaatattttcaaataagaatttttttctgtttgataaagtttcataaaagaatctcctcttagctatcatgagggttttaacaagtttgaaaatttgtaaaacttggtggtttgcggttcttttgctttggcaaaataaattctcccttttggcatcgaacaccaaaatagatgacatatgtggccttatgaataattctcccccattaaatagattatgtctatgaaagcatgaatcaaagcaaatgatctttgataccgatcgaatttgtagtggaagcacttttctttgcccgaaaccttcatttccctttcaatttgagactacacacataatagacttgaacataatgttagtatcaaaaattcaaattatagactatcctcccctgaatatgtgcatagaagtgatgatgcttgtttaatccttgcacttggacttgtgaggcctagagattt

SEQ ID NO: 144378 - DNA, 672 bp, Zea Mays
attgctccgttgacagggcatagtggtcaccccgagttaagtaagaatgcaagtcaatgaacaaactgagtatctttgaagccttttttattgatgacatatttcccattttacagagtacatcgtcgtcccgatagcctttgaaatacagctagggataaaacttcctgaggtgttctatattccaggagttcccaatttctgtgccgtccatctgagtgagacgatatgatcccggccgagtgacttctgctactatgaatggtccttcccatagaggcgataacttgtgccgtccctcccccattagaattcggcggaggacgagatcccctactgaaaaggatcgttctcgcacgactttgtcgtgatagcgtctcagggtctgctggtaccgtgccgattgaattactgcgtttagccgctcttcttcgagtacatcaacatcttcgagcctagttgcttcggcctctgctatgctttcaaagatcaacctcggcgccccaaacttgagatcagcaggtagtactgcctctgacccgtagaccatgaaaaaaggagtgtttccatgcagagctcgactaggttgggttcttaggctccaaacgacgtaaggcaattcccttatccactttcctgcgaacttctcatttttgtcgaagacctttttcc

SEQ ID NO: 144379 - DNA, 402 bp, Zea Mays
aaatggctagaattatgtattgcggactgtctaggccaagaggtcggactgtccacagagctaacagaaacttgagcataaatgttgcatttttgtgttgttggaagtgtttgtactacggaccgtatgggacaagtggtcagactgtccgacattattggctagaaacttgatttggttaagtccctggtgcgctgtgaggatcgtccggtcgagggggggtggaccgtctgcagttgaccttgataaatctgcgcaggtgacttagaagttaggcgagatgctctacctagtagcactaacattttttttttgctgagcaagcataataagtttgctagatcctgtatgatctaattttatgtgttgtccaaccagactcatgcagatgcttttcttgtg

SEQ ID NO: 144380 - DNA, 677 bp, Zea Mays
cgcggcgctgaccgatggagcccgctggcagccgcttaccgcgcgcacgttcgcttgattctccgatgacgtctagggcccgcgtgtcagtattggtcgtcgtcaacagctcgcccgagcttcgcgcagaggatggcgcacgtcgcagaatcctcagtcaagggcgcccagatcctgcggcctcgtcgctcatataaatcaaccggtcgcgtcgcgtgcctgtgactgattcaagcgtgtagacaaccgtagcctaagacgagagggagaaggggggcagcgaccttgcgtcgatttgactgcgccaccgttgattcgctaatccgccatcgtcttggggtggtcgcggagtcttggcaattcgcctggttgtgcggagcgcgaccgtggcagattgaggcctggggtgcgttgaaggttgggcgaattcctcgccggagttggatcgggattggatccgcggttcaccgtcgaccggccccgccaccaccataatccgaggtgatgattccctcttcttgttcgttttgctgcacacatcgtgttgcacctttccgttgtggatttggggcatcatcgcgaccgggcgcgatcttgctcggtcacctcgccgaggcgcgtgcgccgccgcgctcggtgaaccggggggaagacgacaccgggaccgtagattccgc

SEQ ID NO: 144381 - DNA, 594 bp, Zea Mays
ggcgggtgctggggcattcttggggccattcaccgagttggagtaagtaggcatggatgccttcaactgaggaaattttttcttgtagtgactggggtctccgcagtgccaacaggcattggctggaggttggttgcttgcaacggaggggggctgaaaggagctttgaccctgctgactaaaacatgatggagtgggtccagctgtcttgttgaagcttggtcccttgggtggaaacccaaaggatcgaattctttggtgcctatcctgctgttgagctcggaggacttgtaatttcctcttgaggtgacccttttcttcttcccttgccctttccacttgtatggccttgtttgagaggtgcgagaagctgaggaaatcttggctggcaaggatagtcttgagttctggtcttagccccttcaagaaacgggccatcttcttggcttctatgctgacatcgtcaggcgcgtagcgagccaattcggtgaatttgtgcatgtactcactgacagatcttccaccttgggttagttcccgaaattcatcttccttgagctgaacgatcccttggggcacatgatgttcttggaa

SEQ ID NO: 144382 - DNA, 954 bp, Zea Mays
cgccaattactaagaagctcgaggtttaacttgcaaaagtctaccagactcagacttaacctgtggtggacagcgggttaattgctaataaacccagggactcttttacaaaacagactcggcgaaggggtatcctcaagtcttggtcgccgattaactttctacggttcagattagatttgtcacaaggctgaaacgacacgagccaatagccactggatccaagatccatgaccgagatccgactacaccaaattctcatctgaacccaccgatccaatctaacggccacgatttaatgcaccgaaacggtttacttgccgctaatcctagccgttcgggtgcacatcgacggacagcaaccgatcaccgcccgatccaccgatcagacggcggcgccgcccgcagcagtggtggcgcaacgccggcgagacccatggccacgccccgagggcccgaatctctcgtcctactgcggctacccaaccctggggtcgatgcgaacatgctagaagcgaaattaccgtggattacgccgcgacgttcactggtcacgggcggcggcggaggatgaagtccggtgagcaattcgaagtcgcgctagtggtcgaacccgcacgaggatctcacgtgtggactcccagtactacgacggagctccccgacacgatttatgggcttcagcggtgacagaattgaatatgggccgcggtggcgcacaggcagatcacacggcggcagaggtggctatgggtgtgctggtccagggttacgaaagtcaaggtggccgcgcagagcttcactttataccagaccaaccatcctccccacatcccccgtgagctgagcatcatggaaatccgttggtcaaccacccgcgccgagacccccgagagtaagatacacagggcctacaaggcgggtctcgcgaaccagtgagacgaggtgacgagc

SEQ ID NO: 144383 - DNA, 425 bp, Zea Mays
ggcccctcaggcctgggcttgggcctggagggatggatttgtcgggctcggttacttcagccttgctctgtcttttttgtaaagccagggggcatttgaaattgttctgcaaacgtaaaaaatcagaatttggtttccctctctcctcgttcccttccttcgaaagtttctgccctttggaagggtctccccgtcccttggacttcgggtcctggttccgctcgtcctcccggtctctgacgggtgggactccaccttcatttgcctccttccgtgaattcgccgaagcggtttccttattaaaaaaatccgaacaggcgccagaaacgtccttggagctcgcgttgggtgtcacttcaacaaaaccccaacctgcttctccaccctttgctctccggcgatcgtctgagaatctgtcaatggcg

SEQ ID NO: 144384 - DNA, 487 bp, Zea Mays
cccacgtaacaccttatacgactgggcattccggatataccttcggaccgtttggccaggtcgcggaccatccagccccttacgccggaccatccggatatgcgtacgcagagccgagaactgcgcaatatgcacagtttccacattcatcgcagcaacattatggtgccccaccagcaacacattataatcataccataccacctcatggacatagggctgaatactgttcggccacaagagagcctgagaggtatatggtaggagctggtgacattaataggacacctaacacacacctcaaacatccctgtgaggaaagccgacagagtgatgttaggcaacctgagatttccacccacaaactcaatggatggtcgccatacatggcggagaggatcagagacgaagtagctggggtgttcagggacaaactcggtgttagtgtgtcaggtacagggcaatcgtatcggaagccttatagcca

SEQ ID NO: 144385 - DNA, 519 bp, Zea Mays
agagagagagagaaagagagagagaggagaatacacacataagagaaaatgtagccacacaacacaagaaagaagatcacaagagtgcactctcacataatgactagaacatttcagaacggcgctcgaatctcactagaatgactagaatgcgttgtgacagagtgtagaagtgatcaatagatcttagtatgcttggggtgttgaaggaggtcgccgaggggtctttttatagccaaaatatgcccctagccattgctccttccttgtaaaaactattgaaaattagttctgctcaggggtcaccggtccgggtatagtgcttggcctccgagatcctgattggctccttctttatagggagagcaccagaccaggtccatgcacctctggactgccacatgttgcctcctcatgaagtgaccattggcgcctagaactagccgttacttggcggtccggtgcacccaccgggccatgaacaataccaatccgatgaattattaaaaataattcccg

SEQ ID NO: 144386 - DNA, 353 bp, Zea Mays
tgatgagatgagatgagatgtttctagggatttttacgattcacccactagtgtgaccatcctcctcaattctacccctgactaaatcctctactcagttttcccctcctgtcttcaacttacgctcagaactcacctcacggaggacattccgtccgttagttgccttacaggtggacccattgctctgacaagtgggcccgctctctttccccttcatccagtcttcagttcctgaattgaaaccgtgagtctgctgacaccgccgccgccagagacatcttccttggtggcgcacctccccaaatccggcgtggttgtccctgtctccggtacgtctccggtgtgtgcgg

SEQ ID NO: 144387 - DNA, 774 bp, Zea Mays
taaaaccaaaggatttttagtacactttggcactgcaatcgcacaaaattttctccataacgagaatacaaagcctaattatctcacgaatggttcatcattaattatctcaggttaacatttcaatgagaacacagagcacaaacttggcgtgggcgtgacgttcctgaggcgtcgttatatacgatgtaacgactgcgttaagaatcaagttgtaggcttttggttgtacactatatgcttacacaccttgcttgatcttcacaaccaagctctatcttttctatatctcaagctctgtactacattggagggttcctgccccttttataggatttccagggtctgttactaagtattgctataggattgaaatggatccctgtctcaagcctattaaataatgaacctaatttcttgtctccttcaggtatgctagaagaaagtctagatatcaatacatatgcatcgcaagattgaaattggtgtgcatacatcatcatggttgctagaccaaatttactacaagcaccgacataagccatgatagaagaaatcacacagcgataccacaaaaataaaactatatctgtggggcaagaaaagaaagctacctctatagtccttgcactctgcatcaacatacgaatcaaggaaacaccaggggtcctgtagcacaacataaacaaaatggcagcatcagatacgtatcaggtcgttgaacttagcagaaagggcagcaaagtaataatcacatcgtagagcatagatcaa

SEQ ID NO: 144388 - DNA, 398 bp, Zea Mays
aggccaggataacaagaaccgaccactctgaacagacacactagagagttgcaaaaaaccaaaggaaaacgaccaccagcacacacaggcgcacacactcccttccagactctaggccacgaaccaacactccagaaagaggccgcttcagatggtcccgatgtcagacacctctccaaccgccagctgggagttactaagccattgcttcagggaactgatccagcacctcgccttctcctggtctttcggctttgagtaagggagtcccaggtctgcagaaatgatatggagtatacaagatcacaggtggactgctaggaaacctcctctcgatcgccatcctattccgattacaccacatggcccaaaacagacctgcaaacatgaaaaggtaa

SEQ ID NO: 144389 - DNA, 545 bp, Zea Mays
cttggggcacatggtgctctcggaaagcagtttcaaactctgtccaggtagcatctctgatggcagcgttgaaggtatcccaccaagctagggccattccagaaagttgatgagcagccaattgaacacgctgattctctgggcatccgatggcttctaacttccttttaatcgtgcgcagccaatcatcagcatcgaggggattgctagatccagcgaatgtgggaggcttgagcctcaggaaatctcccatcctgtcttgtggtcttccgccattcgggagttgattctccaaacttctagtgaggacctcaatgagtcgggtttggttggctagaacttgagctaaatctaagggtagctccggaggtgcggggaggtgggtctcactcccttctccactggcttctccttcagctcttaggggaaaccctgctccaatcccggaggcgataggcgtggttttatccaaagccatctgccagggggagagagttactattatgcacatgccattttttcagccaagttattttattcattac

SEQ ID NO: 144390 - DNA, 303 bp, Zea Mays
aaaaagtatagacaattgcaaagtatgtgtcctggtgattgcaactgtaaatgatggaaagtaaaaaattgtaggtatgaaaaaagtgggtcggggaaaaggtctgctaaccaattttgctcttgacaaatcatagttttcgcactcagacatcagatgattccatacatatatgaattcttccgtctcagatttatcagcgttgagtactgcttcacacgttgatacattgaactgtatgtgttttccagtttggagaataaataaaaaagagaaatggtaaatgattaaattagtttaaac

SEQ ID NO: 144391 - DNA, 756 bp, Zea Mays
aatttgatcttctcaagctggtcactccaaagttgaatgttgtgttattacttaataaccatgtgtgatgtctacaccagcgtctatgtatttcactcagtgcataaatattctgttcttgcttgagtgcggtgttattgtttcactaataaaagctaataaaaatacaatgtgcttatataaactgattaaactttggcatgcataatggagacttcatataattcacagcatgctaaaatgcgctgatagttggatgttgtgttagatttgtatactggcccactatatgcagtgcaacaaataaaaacttaataatactaataattaactcgtgtataaagtataaacacacaagaaaacaaagcagagaccagatcaaatgagtatacatttttgttgcattggtatagaagcctccaaattaaggaattggtacccaatattcacctgccaccattattctatatagtgggcaacatatagtgttatgtatatttatgttaatcaatggaagatggatgtatagctatctagaaaattattggtacagctagctaaatcttgtgggccgatagaattggctagctaattgcaaaggttggttagcttagctagctatatatagattcaatcgagtaccagaatttagtgtcattagtactgatttaggtgttcgaattggacagctatattaatcacctaattaaatgtaatgtgttatgcacgtgcccttaccttatgtccaaagagaaa

SEQ ID NO: 144392 - DNA, 407 bp, Zea Mays
tggaggtaggtgctgagggaatcttggggccattcaccgagttggagtaggtcggcccgggagccttgaactgagggcagttattcttgaagtgactggggtctccgcagtgccaacaggcattagctggcagttggttgcttgcaacggagggtgcctgaagggagctctgactctgctgactgtagcgtgatggagtgggtccagatgatttattgaagcttggtcccctgggtggaagcccaaaggatcgagctctctggtgacgttcttgttgttgagctcggagaacttggaattttctcttgagatgccctttttcttcctctttcgccctttccacttggatagccttgttggagaggtgagagaagctgaggaagtcttggctggcgaggatggtctta

SEQ ID NO: 144393 - DNA, 438 bp, Zea Mays
attgcagtcctgtccaaaacaaaaaagtgactggtcagcatcaattttcactgaaataaaaatccttcaaatctatctcgatgaacctcaatttgtacctctctgcatgttctctctaccaacattccatctcttcaacgcaaaaatacaagacaacatggataggagaattaacttgagatataatatgtaaaacaaaactacatttaagagttaattgtagcaatactgaactttattgcttaatactgattattgctgcacctaggcaataaaactattgtagtagaaaaactcatctgagaaattatatcatgggtcacctaaatagaccttttatacaattctcttactgcggacggacggacccgagggttacaggcaggtggcgaagatggcatggaaaggcatgacgagggatatgtggatgggacaaac

SEQ ID NO: 144394 - DNA, 389 bp, Zea Mays
ttggggtatactccaaggccgaggacaatgccttgtccgcagctttcgggggtcggaataagaaaagattgaacagggtatttgatgctattggcttcgtataccttgactattgctacccactgcgagggcaagggataaagagaaagattgctgcttcggccaccacagctgagccgaagggcaagaagatgaaggttctgactcaccggccgtgttatattgaaccagccatgatacctgaatttggcgaaggtacttcttcagctgccaaagcaaaagaaactgttccaattatgcaaagcactgtagagccgagtgtagtaccaaagataactacagttgagccagccaaggctgaagataataaggccaaagagccacaggtg

SEQ ID NO: 144395 - DNA, 664 bp, Zea Mays
gtttggatccgaataatacggccggggttcaaactttgggtggtccagccatggcgcttccatggcgggttggccgccaccgtcatggcctgggtgctgctgcggtctggtgttgagaaggggggaagaagggccgctggctgttagattggagattgacggctaggttcggatctggggaaaatagctatgagtcgttgatcctggcgcctacggtggagattagatcaagaccgtgatgaatccgagccatcgagatgagatcgaaggagtgataatagatcgggctataataaaatctagatcgttgcttttagatccagtggaatagattgggtaccgtttcagtttgagatgagtctaatctaggtcgtctgatgtagatcggacggttgatgccacccgataccccttcggccatgaccttttgttaaagagcccctgctctttttcgtatttaacccgccatccactccagctattcatcgagtcttagaatacttgcgtcgtagcccctgtacttaccagtaattgaggcatagttcagacagtgagaaaaacttataaaataatttagaaaagggatttttaatgtgaaaacaattcctagaacttgtatagttcctagaaaattcatagggagcccaaatttattcattccaat

SEQ ID NO: 144396 - DNA, 558 bp, Zea Mays
gtccgcgggcggtggtgctcaatttggccgagccgtgttggcggccggagataaagaagaagcttgcgcggtgaattcgtgtccgccgccgtggcaacctccccgtcgacgatgggacgggtatagggagtcatggcgacgcggtggaaaggtttggacacgcggcacacagccgggaagcggcggtcaccggcgagcacatccgttccaaccgtgaggaggaaaagagagacacggggaggtcaccggagtgatttccagctcaccgtcgacgaagatcttttaccgtgtgcccttatttgcccatcccgtgcacaagtcaggccggcaacggcacgaatcacggcggaggtgtcgtcgacggtgggagttccgcgctggcagcctgatccattccagtctactgtaccatggtgaacccccattcagagcgactgacagagccttttggagcatggttttctcttaattttgaatgacaactcatcacaaaatctgcatcaaagttgtaaagcaacataccatctacaattcgactatagggatgaaacttatttg

SEQ ID NO: 144397 - DNA, 273 bp, Zea Mays
gtacgctagcagcggttggtggttactaaataataataaggttgagtaaagctcaagatggagacgaaatggatcgagcgggggaattaatgaggcaaccatgcatgccaatggcgcgcggtatagctcggccggctagcagtgatcgagtgactgagctaataatgctttgaaacaagctagagtagcctacaatgatgctggatgcatgtcctctccttttgtttaactaacgcgtacgcacggatgcgtgtgtgtagaggatcacacaag

SEQ ID NO: 144398 - DNA, 505 bp, Zea Mays
caccagaagacatactcctttgtactacatggttgcaaattagtagtgaccctattgtgcacactggacaaaggagggaggggctttgggctagaattgaaaaaaggtacaatgaacaaagggggagtttccttgtagacttaacagagcacttagcagcagatgggacaagattagagctgatgtcagtaaattctctggatactacgccagagtccttagagagaaacaaagtggcttgagtgacgaggataaggtaagacaatttgaactaatattatttatactacaactttgtgtccttgtactaattgtaattgaacatccaaatttgcagacatcgaaggcagctactttgtttgctcatgaggagaacaaatcattccattatatgcactgctggcatcaattgaagggggaaccgaaatgggagagcatctgtcaaggacattcgttcagaggattacatgcaagatctatagcatcttcggggtgtccatcagtt

SEQ ID NO: 144399 - DNA, 313 bp, Zea Mays
cgatgagggcagcaagaaccccgatgactacaacccagcgcagcaaggcaaaataggaagacaggtaaggtcgcatgggtgccttaccgtgatccatgccgaggcagttctccgctcccacatggtgcgacccacggcaccagcagcatcgaagcactaggtagccatcttattccctctggatctctccctgcgctcgaccatggtggctgtggctacgacgcttggagccgggacgcggtagccgataccctgcgcatggcccggcagcaaggagtggcaatgggaagatgcagcacgcgacgaagtggtg

SEQ ID NO: 144400 - DNA, 365 bp, Zea Mays
caaaaatctggaaactaaaatgtatggactggataccgggaactgtatttgatcaaagcagagtacggacatgaactgaaacaatgatgtctgagctgtttgtagggatatttgttcagctatttctgcttggtgtgttatccaagtagtaaacgaagtatgcttgatcggctataatcttgtaacaaagacgtgctactactttaacaccccataatttataactgcttattaacacagaataaacacccacgcctaataatgaagtaggaacaagtatatattagatgactaacaataatgaagtaaaattagaagtactcgtaggtcaaaacattaaacacccactcccacccaccttattc

SEQ ID NO: 144401 - DNA, 280 bp, Zea Mays
ggggaggactcggcaacccatttatgtgccacgaacaaggggccaacgaacacacgggttcggatcggctcgaatctagggagtagttccgccatgcgcgggattgaaggtgacggcggctacggaataagctggagacccgggaagcgaaggacgcgtggagttcgttagggaatagggtggatctccgagcggcacggcgatttgcgcggcgcacccgcgggcgacaaaccagcggagctcagttggagctcgcgtgggagatgggcctgacatggtg

SEQ ID NO: 144402 - DNA, 464 bp, Zea Mays
ctgggtgccaacttactataccaagtgaaggctggacctgataatgtctatacaaattggcggaggagaagagctccattatgtgcagtatcttgacaggcagcaagaaaatgggccacatgttcatgtggtgacccagttccattgaacttgctaaattgtggctaccgatagttgcttggaaaaggaaccatgtcaacttccgacggatatggtttcacataccctggacgcatggagtagtgtgtttgcatgtattgcgcccttacgccctcagaaatcatcctttgtatgcttttgagggagatttcaggtggagggtgaggaggaggacctccttggctagttgaggcattggcatcacttgttctatttctggtgttagccacttgctcacggagggcagccaactcttcttccttttgttgaagtgcagccatcatttgattcatttgctcttcaac

SEQ ID NO: 144403 - DNA, 354 bp, Zea Mays
caagccattacataacacaacaccctgctaccacaagctcatcacacacgagtgctatctagggtactcccgaactccttctctaaggtgtccccaaattccttgagaaggtcatcaaggctggccagggacatctcttcggtgtcggacgggttccttggagggttttcttccttctgctcagtctgacatccttgacttttggtcttcttgcagattttccttgcgggggcgagcttcttcagtttcttgtcatagtccatttttagggtgcggtaggcttcccgggtattggtctcttcgccttcagctattgagaggctctcttgaagggacgccttttcttctgaaagt

SEQ ID NO: 144404 - DNA, 399 bp, Zea Mays
tcgagtaatatccgtcagtatctgatccaattacatctctacccctaccaaaaaatacattgttgcctacgctacgcatgctcgcctacgacagtgttgctgactctattgatgagtatatcaaaatagagaaaaactcgaccttagaatgcgtcaaacatttttgtgtggccgctatttcatgttttgatgaggactatagtcgtcgttccactattgatgatcttaggcgacttttagctaagagcgagaagatgatatttcctactgtaataggaagtatagattacatgcattagaattagagaatgtccgttgcggtttgaactgttgcttgacatgaatagcgaatactaattaatatttcatccatttcaaaataaaattcgttttatcttt

SEQ ID NO: 144405 - DNA, 335 bp, Zea Mays
tatattttgattatgttgagactattgctttgtcttagaagtttcatatagtctcttacatgagaataatgtttctcatatagtatgctactacacatcaatccagcttgttaaaataatgtcgcttttatcaaggattgttgctttcatttcaaaagtagcatgcttattggattctcctatttttaagcttgattatttaatgccgttgttgttttcttgatcgcatattggttgatcattgaacaacttcaagtatcacttatgcttcttagtacctcatgtaattttaatcatcatctatcttgatatgcactaaggaaaaaggagaattc

SEQ ID NO: 144406 - DNA, 521 bp, Zea Mays
gctcatcagcattgatgtagacgtcagcctgccaaaagagttggtcgaaggtcgctgaggatttttgaggatagcccagacaaacgccctatcgtggaacccccaatagaagtcctcaatatccactgtctcagagatgttaggggtgtggtttctcatggactagaaatgtttgaggaacgagcagagagactcgtcgttgttgcgcctaatcgacttgaggtcccatggctgggtgagcttgtcggagagtgattggtagttggagacaaagcggtcgcaaaagttggcctgatggttgatgcagtgccaggggagatgacgaagccactaggttgtgtcttgccccagtacgatagggaggtacgctatcatcacatcctccgatgcctcgtcggcgtaggccaccgtcgagtagaattatagccaaccaccagggtctagtttggcctcgcacttgtcgatgttggagaccttgaagttaggcggccactggactgccccgtagctgtcgagtaaag

SEQ ID NO: 144407 - DNA, 381 bp, Zea Mays
gttggcttttccttttgattattggtcacatgaacacattcagaatgctattggggctttcgggatgctgcttatgagggaagcagatcattcaaatataacaaggttattgctcggggctagggtaatagcgcttgaagaagtgccacattttatagtcttttctgttacagaagtgtttcaaggtttttctcggaccatacaatgtgatatcattcagaatgatttacttggtgctctcccagaagacgaagaggaagtgtccccctacccaaacaatggacaagagttaccatttgacttttttggtcttggtcagccactagttcagatggaaatggggcttggtaagccaatggaaaatgttggtctcgacctcag

SEQ ID NO: 144408 - DNA, 364 bp, Zea Mays
accgcatcgaacagggagaggagagaagccccctctgtcgctcgtcgtccacaacgccgatgggacctcgatggctggtcaggggggtcttcgccttggtgcaaggaaggtcactgtggccacgcgatggaggatactccccgggcagcccaaatttctcgtcggaattaatgaccgtcgtaggtctgcatcttgccatgggcaggagtctgcgcaacgaaaactccggtgatacctcttccctacaattcgctatggcctaagaattgtgtagagcgtttcggatcgaggagtagtgcaccagagccatggatcaccgcacgccggtgagagctccgccgtcgttcagacctagtttgggtac

SEQ ID NO: 144409 - DNA, 617 bp, Zea Mays
aaaaaggagaataaaaaagccaacatttctccttttcataacatttccaaaccgtaaaccctaaatgtgtggaagaaaccttagcaaccaccaaataagcagcaaagaacaccaactgtaacaaaaggaagaaatgaagtcatttgctggaagtgtggtgatgaacttagagaggaaaatccgttttttcagctgaagggagccaacgaatgcaaaagtatcagatctgaatcgtaagaactgacttggcaaaaatgctagaacaccaagcggattacaggtggataagacggagggagcaaggacaaacaggcgcgtggcgaagacggaaacaatgaggaggaagctggaccaaaccaggtgatggaacctgcagaggcaccagacggaggaaacgaggaggagaaaacggagcaagagcagtggtgagaggaagagagaagacagaggaaaacgaacgaggcgagtgagggacagtagaagtctccagaggcgaggtgcgcacgagagagcaggtgagtaggtgagtaaagtgagccaaggatccacgatccaacggctacgaatttttggagcgacgtggataggcttagaggcgtcgtttccatccggcttta

SEQ ID NO: 144410 - DNA, 499 bp, Zea Mays
cactaacacaagttggaaacacaacacaagacaaaggaaactttgcatccaagcaacaaaccttaggccaagggccactagcagcatgatcaccatcaacaataggtcaacaatctcactagccaaaaacaaccaatcaaacccccctaacacatgcaagaaaactgtcaacctataggcataggagtcaggccaggcagaggtcacataaggggccatgaccaagaacaaagacattactgcattttccatggtgaagacattgatcactcatccgaggactaaccaatcacagtgacggcaaagagagaatggctacgatagtcctagagaagccaacaaagggtatagcccacacctatcagcaaccagtcccccatgtttccattataatcaaccagcctatcccctctatcccaccaattaccacacacagatctctaaccaagaaagattgcctcttccaccacctccacagatcattccacccacccaccag

SEQ ID NO: 144411 - DNA, 441 bp, Zea Mays
gcttgcgccagtagcttcttccctctccgatcgccagcgcaatctcttcaaattgaacgctaccgccctcggatcctataaattgagcgtgccattggctccgctatgtagtcaagcacccaacacaccaacccgagcctctgattatccactagagagccccaatttgagacttcccccaaatcggtccagaacatcgtactgagagagctcgtcgtggccagcgcgctacaggtccgttcacaccctctgttccctcgttttagtactctgatgcacccatgatgctcctcgacccatccaattgagtttgagcctgtaggttcaccgggaacatctcggtttgtctgttgatcctgctgtcaccgtgggtgtaacgccccgaattttggagttgaattttttcttttcttcactcgctaaattcgggcgttacccttt

SEQ ID NO: 144412 - DNA, 512 bp, Zea Mays
atgcctcacacttctggactaactctgctgcatcgttcttcgctgttggccagtagaacctagacctgaaatctttccctactagagtccgtgacgctgcatccacgccactttgcccaacatggatcttgtccaataacttctttccagtagccgagtgaatacacttcatgatggtatagtagaccctcctatgatgtatagtgggtcgactgtctcgcgatgcgctccgctgcggccttatcatctggttcttccttgtttcttatgtatctgatgattggctccctccagtcattgggatatgcttctgcttgacctagaacgtagcattcttccatttgatctatggtgacacttggttgctgtatctcttggacgaaaaccccaggtggaacctgggcccgactggaccccagtttcgatagtgcatccaccgctgtgttgcgatctctttccatgtggtggaattccaatccttcgaatttgtcctctagcttccgtaccgctat

SEQ ID NO: 144413 - DNA, 629 bp, Zea Mays
attcctcatgacttgccaaactatcatgtgtcctcttcaagctggactatatgtttttggcttccatttggtacagcccatgtgttccggtactgctagagtttgacatttgcacaagtagtactcctgtgagttctagcgagtcttaaaatgtcggcgagtttcagagtttaatttcagagtttcagtgggttttcagtagacgcttgtccgcgactgttgaagtttcagcaagtgttaaatttcatcagtagtgctagagttcagagtttcagcagatgcttgttggttgttttacctagaactccagaaggtgcttaacattgtctttgagttgtttgtttaggtgcaagggtgaaaagaggaggttctactggggtgatctgaagatggccatatgttccgacttccgagttgttggcgaagacagacccatcaatgatttatcgtggagtgcactaaaatttaacacgcctttaagagccttgcagtgtgtgccgcgttggacagaagtatagtaaaaaaaaatacatggtgtggaaaacaatccggtaaacaactgcggtcacaaacgaatagaagtagctagcatacggtcaatacagcgcacacacactaagggcctgttt

SEQ ID NO: 144414 - DNA, 827 bp, Zea Mays
cttggcttgtgccaacgatgacctaacgatcccaaaaccaaactacctgtcattttataggcatgccctgacccataaaacaattactattgttattggcacgttgtagtcatgaatgtaaagagtgaactgataataatatattgaaaacacaaatagggaccacatggtgggcagtcgtatcatgctgcccctttcatcggtgaactgaaagtacttcctctgttttttttcatgctttagttcaaaaataaactagcatgccacaattattcgagaacagagagagtagtaggcagcatactctacctagctacctacctatgttctagggcttcacgtactaagttccatccttagcgcgcatatgtcttggcaaacatatggttttttaaagaagttgtatttggaaaataaatcctcaagaagtgtaaaccaataatgcatatgaaacattgacatttaggtggtcaacttatattaatgatataatgtttgcaaaaaccatctcagttgtacaacttgtacccttagctactccaagccctagcgctcatagccgataaagttgttattttgtcacccctagtttgggctctctgctattatgtcgctctgtttctatggcttgtgggactatttgtgtctataatttgtgggcccaatggtaaactagagaatcagccctagccgcaacgcctgccactaggatgtgtcgatgtcgtgcctagccctacacatgagcgcctagctgtcacacactctcacgtggtcaggtaagatcatttctttggcagcatgaatgattgtgcattcggttaagccca

SEQ ID NO: 144415 - DNA, 318 bp, Zea Mays
tcctcgcatacacccacctctacactagccaaaagctcaagctcgacactagggataagaaggctaccacctcttttagacaggtacctgcaccactatgaggacctgtggggagctcatccatgtcatgtcccagcatcgcgccaacgagcaggaagcgtcaccatggtgcatatcgatgaggatgggccttgtgactttgtctccgcctccgccaccccgttgtgttccctaggagccatagctacaccccgagactggacatgttgctagtcatagggtaaggtggctactctcagtgtctgatgctccccctca

SEQ ID NO: 144416 - DNA, 804 bp, Zea Mays
gtgttctatcttggaagggtagctgggaggatcatctcgcgttggccgagttcgcttataacaatagctaccaggctagcatcaagatagcaccatatgaggccttatatggcaggcggtgtatctcccctctgtgatgggagactatgggagagagatctctggttggtcctgattgggttcagcagacttctgagaaggtttgagaaattcattagaatattttggccgctcagagccgtcagaagagttatgctgatgtgaggaggcgggacttagaatttgcagtgggtgaccaagtccttctcagggtatcacctactaaaggacttgttcggtacggtttcttcggaaagcttagcccgagatacattggaccattcactatcttggcccgggtgggcagcttggcttatcgcttgcaattgccagattccatggcaggggtgcaccaagtatttcatgtctctatgttgaggaagttcttgcgggatccagaccattacattgagatggaaccaattgctctgcaacaggatctgaccctggagtgtcgtccggtgcgtattttggaatccttggagcgtgttatgaggaagagatcaaataagtatgttaaggtcttgtggactaatcagtctgagcgcgaggctacttgggaacttgaggagctaattttgcagaagtaccctgaacttttcgttttgggtgagttttgttgattctttaatctgttatttgtcgttccgatagaagcgtcagaatttgaggtcgaattcttttttaaggggggtagagtgtgat

SEQ ID NO: 144417 - DNA, 353 bp, Zea Mays
ctgacacccacgaatgctctcaagaccaatgcacctgctcataatggagacatgggttgctttagtgtagaggggttggccagtacaccacattatgcctagaaaagaacctacaatagtaggctcctcaaaagaaacttggaggtggccaccaggacacacagcactaggggcaacctagagtccccttcggcattgtgaaacatatcaggactgaagcagcttagaaggatgccacaatgctcctaggtacgttctaaatcgagtctcatgcaataatagtacttcccgatagtagagctttgcacgtttatatctgcacatgccatgtgaaaatgaggattagaaacaac

SEQ ID NO: 144418 - DNA, 1968 bp, Zea Mays
ctctgctgtaccggggatcttttttccccttgttttttcctctgttcttaatatattagtgcacagctctcctacgtattcgagaaaaaaaaaaggttatgcactcagaggaacatacatccattatgatgcgtctctgttctccatcaggccgttttatcaggttaaacaatgtatgagtcaaggaatcccgtacatcgctatctggatgcttttctatagcacatatgatcaatggaagaagttcctgtaaccatgtagaatcatttagcattagttatacttaaataaagatggatgtgaactacgaaggttacaattaaacctcacgatggtttatgagcacataaggaacaatctttggaagtgcatctgaaactatctttatagtctccaaagcctacaggaatgaataaccgaatagcaatgagtatcaatagaagtaaacgagcctgctttatgcataaagcagaatatattaggacactgacaatcttatctgaagatttttgtttacttgggctctctagtttctcaatagataaatacatggatatgccatctgaactcccctggcttttaccagtcatggaagctccatgcagattactctgaaaacatacattattcgatgagatatttgacacagatttatcttcttttgatgtaccatagctgtcattctcaacagctgtgaaagacactggagtttctgaaactgaggaaccttcagcgctactttctagaacttggcgatctttctgcgtatcatcagtaatatttactgctgatgctagcttatttgttatggcttcagatccttttgaatcttcatcttcattattcaatgatgatgctcccacagaattagcaaaggaatgcgactttacaccatcactagttccaacaaacaattgtttgattgattgagtcccttcgatgtacatcttcagggctgtgatttcagctctgcagtcattcagctccttcctctggacatccagtgactgcctcaagtcttgaatctttgaacaaatgaaggttagaatgattcagaaaaattgttgatcatctggatgattctaagagaatattaccattttttccttgtcttttatatccttgtgtgcagcttccaaagacttccttaaagcggcaacctgactattagctccttccctgctcttcatcaaggaatcattttcagcattgagtcgttcattgtccttgagtaatgtttcattttcctgaagtatggatattttttcctgcaatgttacaaataaaatgatttttagaagttctagacttccaagtaaaagcacaagataaatttaaatttaaaattttgaatggataaggaaaaatgtggaacagaactattccatgaactttgttttgacccaagtaatcaaaaggtaaggttttatgcagacgattctcaaatgttccattcagtaactataataacacatccaggattcctattggctcagggagtcagggtagatgcagaaatttttcatctcccttttattgttagaaatgtctgctacacatatttaacaaaatgcatcaagtatgtgatgtgatagactgtatcttggaacaatgggacataagtacataactaacaccaacaagccacttgactacttccaaaaatggaacatttaatgcatgtaataaaaaagctagaccaacctaggaggaactaggtgacatatatgattaaaaagaaaataggcacccaactgttccattcagtaactaacacatccaggattcctatttgttagagtgttcatgggcctggcccattagggtctctatgttacctgtactgtagctagggttagggtttcctgtaccagtcactctctctcatgttagagtgttcatgggcctggcccattagggtctctatgttacctgtactgtagctagggttagggtttactgtaccag

SEQ ID NO: 144419 - DNA, 467 bp, Zea Mays
tcaagaaaaacctagagacctggagcacatttacacaaaaagttggtactaacctatagaatatactgaacactacatgataaacaaaaataacgatctctttgattaaaggcatctagttccatgcaatgaaataaaattggaatcaatcttgtgtgatatctagcaacaaccaaagatagtgtttaagtggcacagactgcatcagcacactgttagaaacaagttcctcctatgcatacaattacatcaaggagggacctcatagtatattactgtttgtggtccatatggaaaaatgagatgaacgaaaaggaaacagaatcatcagacagcaagcttacatagctaggattgtagcagggaagcaataccaagcaaaacacaaacccaaaagagaagatacaattagaaacaatattatttcacttagctgctcctagaacttgaggtcagatcagaatggc

SEQ ID NO: 144420 - DNA, 657 bp, Zea Mays
ttgttaatgcctcgataacaaacggtaaaaattgttttcccagttcaacacctgcaaattccttggtagaaaaatgttgtcccagtttaaactaccaaagttagataacaatatttatcctattgatcacaggtcgtcaaagacagagatcagctcaccaagcacgaactaccatcgcctccaaagaagtaagtattaaaagacattacttagaaaacgaaaacaaagtttgcctgtcaattcacatccacgacttctattccatactaatacaataataatacttacatgataaagcatacccagcttagcaaagagctaccagattctataggttccaaaaatgaagactgctagctcaccatgaaacacatgaaagtatagcaccatctatgatccttagcatatcgtcctcacacgtcctcctattctcccttgcactcgttacacaacaacaacatatttaacactttcagagcgactaatcttctctcatttttatacaggtattcgtttttgcaagcataagaagagctctatcacttttgaatataaaaggcttctgtgtacatataaagcaactattggagcctttctaaaactatattggtttatgcaacctctatgaacacactattacatgaacttgaagtacgc

SEQ ID NO: 144421 - DNA, 361 bp, Zea Mays
attttgtggtggcctcaaccgtagtgcctgccgatgatgattcgtgtggctctgtgtctaagtgttttgagtctgatgattctgggatttcgatttcgtggacggaggagtcttcagatgaaggcttggattattttgcagcgttagatgtggctgcagcggagccttcgccgcgcgtggagggttccgggggtctcccgggtgcgagtactgggtataggcggcgaagggcggtggcgaaacagagagtgagtgaattgtcgtgaagtggtaggcgtcatcgtattgggatggagtgtggctgtcttcgcgtggaccggactggtaaacgagaattgttgtcctcgccgattgggacgag

SEQ ID NO: 144422 - DNA, 326 bp, Zea Mays
gacacttgtcccaatcattttcgaagtgtagcacacatgccctcaacatatcttcgaaaatctgattcaccctttctgtctgaccatttgtttgagggtggtatgctgagcttcgtattacgtgggtcccaagtgattcttgcaattgctcccagaaacgtcccacgaatggtgctcctctgtcagatatgatagtccttggtattccatgcaatcgaactatctggtcgatgtagatttctgcatacttctccgccctgtgggtggtatgtactggcaagaaatgagttgtcttagtcaatctatccacaatgacccaaatagaa

SEQ ID NO: 144423 - DNA, 489 bp, Zea Mays
cgtggccaacaaaacttttccaatgtctggtggatgggggatgccaaagaaaaagaagaagggaataaatatgaacttgtatgacttccctaccgctttaaatttcagaaaagcttcggcaagccctatgctgaatggttggaattattagagacaatgtgcaatgagattcttggaaattatatgaagaaagaggaccagctaatggccattgccttcggtacatgtaagaaacagaggctgaatcgggtgatggatgacctgggcttcgagtaccctgactatgaaagacttgacaaagaagccggggggttgaaaagaaaaagggttgtaagtgtgtcgaaaaggcaagcgcagagatctattgaaaaggacgagaagaaaaggttgataaagaatccgaagttgacaccaaagccttcggtaccaaggaaaaggaaagttatgtcatcagaccgtggagaagaagagagaccttctccacccaag

SEQ ID NO: 144424 - DNA, 358 bp, Zea Mays
gtggggcccgcacgtcggtagctccatctcgcaactacgcgcgcgcgtgatttggtgttgtgactgacgttcagggcccacaatccatcctccctcccccttgctctcggtgtagccgtggctctgacagtgggtcccgactgacagggtcatccccttccccgcgtcgttcggctctggttgaccgcaacaaactcgacgcatctcacgcgagcttatctgagcaaactccgaaccgtccgtggccctctcggcggcgctataatacacagggccacgatctcccatctagccttctttttcttcctggtgcaatccgcgaaatggttgaccgctcatgctcccatcccccaccagc

SEQ ID NO: 144425 - DNA, 589 bp, Zea Mays
aattttagaaatcgagatggatagaaatcgacaaaacacttttgacagcttgcttacctaaaacaatggccacgccgaggcttcagctccgaccaccggtagttgtcgagggagcagatcctgctggcagctaatcttgctggctaggctacagctggggtgcttgtcgagggagcagatggccggaggtggcgtgcatggcgaggctgcaggtggaggagggcggctatggacaaagcaaaccgagggagcacgacaggtggaggagggggagggcggctacggacaaagttgtggtcggcgacaagggagcgtggtggggcttcagcagggcgggcgtcgttgcttctgcagggccagcgtcaggcgtcgttgcttctgcaggggcgggtacccggtgaggcagtagctgggtggccggtgtctttcaatcaacatttcccttttattcattcatgtcaaaatattgtaactagtttttctcccacagactttctccaaatgtgatgattttttttctaaaattttcgaaaatcctgatatatccatatattgcatttatattcgttgtattccattgtaaaaaaac

SEQ ID NO: 144426 - DNA, 554 bp, Zea Mays
taacaagtcctctgggaccatatcctccagagtctgatcaaagttggccagggacagttcttgtagaccaatgagggcagacaaagcaggagaggaaactccactactttcaccactggcgatgaactgccgactgtttttccgagtcaaaggaatctcattttcttcctcctcatcatccacattggcaacacaagcagcgcccccattgggatcggcaacagatggggcacccacatcgggatcaacagcggattgggtacacccattggggtcagcgtcggtaaatccagtcgcaggcacttcttcagtagcaggaactgaggtaccagcgtcctgatcaaaactggatactcgccggaggcgtcttcttttcttcttctgctcatcagcagaaggatcaggctgattggttcggcaagggtgcctcgggcgagtactgacaggcttctaaacatccaaagtcgtatcagcctctgggaggggcgccactaccaacgtcctagcaggagcagcgtcggatgaatcctcagctagcaaatcaagcatagcgc

SEQ ID NO: 144427 - DNA, 385 bp, Zea Mays
tcattcctggccagtattgttctcctttggtcgtgcctgctccagtcgctagaaccagtgtcgccgctcactctcatccttctcatggcacttgcttctgctcctgcacgagtccctgctcttggcctaattgctggggttcgtaggggggcctgaagccatacgccgtgaccggaccaacatcaagtcgtcctcctcaacctcgccatggtactcggccttgccttgctactagaccttagcgccatcggctcttcatccggctgtaatttcgccgtcactggccatgtccagcgtccaccttgttatgtcgtcgtggacttgtcggcgagctgccgtggtacctagaccgcacttgcctcagcttccaagatgtcgtccttcc

SEQ ID NO: 144428 - DNA, 605 bp, Zea Mays
agaaactgtaagctcactaaccaatattcgacgcctttaaatcgtctatttgtttctggagcagcaaaggattccactgcatcagggataaagcttgttcaggaacagcagcaccacaggacctcaacttggcacatactgcatcaacaaaatcctgtggtcatagacagatgagcagaagaaagataattcactagtacaaacaatatagagcaaaaaactaactcacctggagattggaaaggaatagtggaaggcaaaaggtaggaggaactagagcatggcttgacgagggaagatcaacatgaacaatctcaagaacaccacctagggtgacctcagccccaccagcagacaataggctccttgcgtctggttcgccgacctctaaggcgacttaactagttaaggtcgtagaagcacgtactgtcgtcgccccatcaaaccggattggggatgacccgatgtggacttccatggaagcattggaaagagagcacacctgaacatcttcgggggctggattgtagcttgaactacccacaagggctgggttgctaccagcaacaccatcgggggctgggtagctgccagcgccaccctcg

SEQ ID NO: 144429 - DNA, 385 bp, Zea Mays
gtgggatcggatgggtgcacaccgttggatgatgatctgatgatatcgggcacgtagagcttcacgattagttctgggccgttggatctaaatccgaaggtttgcgtggcgtaccggttcggggctggtgggatttaatcctgaccattcctatcaatcgaatggccgagatcggttcgtacccttttgccatggtgagtttgcaaaagagtccctgagttagatggaaaacaacccgctgtcctagtacagttagagaaccttcaaaataggtcatgcttttagcagtttagtccctgagcttctaagtaataatgtccgcagtccaagctgaaaggatcacgatttctaagagggggtgaattggatttctcttaaaagttca

SEQ ID NO: 144430 - DNA, 422 bp, Zea Mays
aaagggttcgttgaggtgaagcaacttcgtgaagagcgtgtggccgtcagatgagaaacctaggagttggtccattttgccctggccgagtggataggctctatgtatgtatgggatagtttagactagcaaaataaacccatataaataggtagatggctattgttgtgtgtagtaatatcttttggctatctcattagaacacttgcaatttcatttcctagttttagccataattttgagatcctcacgcgcttttgatttgtggcgtccgttactgtggatttgtgaggaagtgtgtctataaccacacgtggtttagggtctttaaaaccatttgctcagtttatgcttggtggagctttttatttgttttgtctcctctctcaatccctctctccctcttttggttcttgcgagag

SEQ ID NO: 144431 - DNA, 1007 bp, Zea Mays
ctcccattcgccccgcgcggcccaagaccccctttcctgccgcgcgcggtcacactggcgtgtgggccccactggccaattacccagtctcctcgcgcgcgcgtctcagcagcggacaccgacaggtgggcctgttttgtcagctggcttcttcctcaacagaacgcgaggctcgcgggcatcgcggactccgtgcgcggcgggattcaaccataatcgcggagacctcggcgttcgactcgggagtccacgactccgtggttaaaagcggtgcgtcgtgctccctttttcactcgcgaccaagccccggccgcagcagcaaaaacggccccagtagagagaggcggagaaggagagaagtgtcgccgcgtggggatttcggggtcatcgacgttcgagccttcggtgtagcgcccgatgtcttctgcgagctcgggggagtgtggtggtaccctcaccgcgcgggattaccatccggagctcggggaattgctcaccgtggttcaacttccgccaccgcactgtggcaggggacttcgcgacgacaatcactggtatgaaggcttcccagatactcgcctctgtctacgcatcatttatcatcgattagattcaagttcaagtgataaaatcgtcgtgtgcgctcgtcggtaatggcaccgccgccgggtcgaatgcgccgccgtgctagcctccgtgaaggtgggggacgacacctgtaccgtggatcctgggttcgacggtcaggattagttggccaataccccttcgcgagacacatctcgaccgtaggattgtaatcgggcgaccggattgattcgggatttgagggggattgtagaccatcggatttgaatccgatgaacctaatcgcgtaccggttcatttagggctcggtgtaatcagagcccttgattccagatcgggcggtcgaaatcggctggtaccgcttcgctggccactttgctaaagagccctcgggaaattcagaaaccaacccgcggtcc

SEQ ID NO: 144432 - DNA, 567 bp, Zea Mays
tagaggatcaaagctcatccagaaggggatagggtggaacaccgtccctacctccctaaccatgggaggggagctggtaggcttgccataggagcaacatgtgttggcatcattgttctaggcgtgaagctaatgccagacaggtccctcgcaagggagtctgcgtcatcggcctgtccgaaagcgtcagctgggcgaggagtgctgctcgcggcgcggtagcggttgttctgtctccgtctcctccagcaagaaggactacgatggaggtctaggtgccctctctagctaggggagcaagtgtggtcgtgatcccctggttgggagaaacggtagtcggtgttggtgtgatgtctaggcgggaggagcaccaaatcttaattaaatccaagggacatgaactcaagactcctgaaccagatcatcgtgccaagctacaaagggtgttcaggattgaccatctagatccttaatgggaatgtgatgttaacacgcagcatgcccctacctagcacgccaagttttggtgttttgacccatgggtcctaaccaacaagtgaatttgtg

SEQ ID NO: 144433 - DNA, 276 bp, Zea Mays
ggaagcagcagcaccacccgccgcaggccagcagtgccgccgcgggcgacgagtccgccgtcgacctggaggcggaggaggggtccgaggcaggccggtcgtcgttctctggccttcttcagagagaggagtcggtcggcagcgtctctgatctaccagatgtctgagcctgacggattcttttgtttttgttgcctagagatgcagttttgagcagtgagggtgggtgtaacttgtggtggtgcctagtcaattgtaagtgtgttgtatagagtg

SEQ ID NO: 144434 - DNA, 275 bp, Zea Mays
ccaacatgtggagagaagaagggagaaaatgcttcggctgtctgaactccagaagaagattaatgaagctgtcgaagagatgcgacacatcacacaagacaacgagcaaggatgaaggccacaatagagagagcttcattaggaaagcccaagctgcgatgacgtatggtatgacgatttccatcatggtaactttgcttttgatgaagcttccccctagcatcagagttgcaggctaccccatggccaccttcatacaaaccgccacagctttc

SEQ ID NO: 144435 - DNA, 522 bp, Zea Mays
aaagaggtgacatgggactgaacaagtttgctaacaaaacatataaaatctcagatgtgagtctgaaaggtcagccctagctccagaagaggcactacataagttccgaaatgcacttgggttcttaattagagataatcttgacgtcacaatccgacattggagagatgtgttagttgaggtcaggaatcaaatatggaataagctattaacgaggttcgttctgcctcggggttcagaagaacttgtgaaggaatacacgatgaagcagcttgcaatgaattttcaaaactggaggtctaagatgaatacaaagtttgcaaagaaaggcctagacccgacaaaaaatataaaatatcagaaggtcagtgggcaatatttctggagcataggaggagccctgatttcatatctctaagcgaggcaaattcggaactatctaagaagaacaagtaccaccaccacttaggcacaggttgttacaaacatcatatttctaaatggagacaaggatacaccgag

SEQ ID NO: 144436 - DNA, 422 bp, Zea Mays
agggcatcgacggtgaaggagcacagcagcacgacacaacaatgacgtcgggcaggagtggcaattgatgaacgagcagagaactcggatggtagcctgcagcgcacggcacgacaataaggaactcggatcacgaagggagagaagcgaggcaagtgacttagcagctggagcaagtgtcgagcagggagaaaagggatgaagctcagcaccatttataggctggtagaaggaaatcacggcctcgaatttgattatcgtagagaaacgtccgcacgaaatgccattaatggcaaggagaaattgtcatcgcagagaagaggagtggtggcggcagtggtggagagtacgactgggttggggagatgaatcggatgagcggtggtgagtgctccataacgctgggaggtgaagcagtgacg

SEQ ID NO: 144437 - DNA, 512 bp, Zea Mays
gccaaggggatggtcaagcaaccctctgacatacaaggcctttagacacaaaaacaggcatcgctgatttctgtcagattctggacatcaacttgttatgatgattcccatcaactgaagcatattttgacgtgggactagttgggatgcaaatcttatgtccttagctttcaaatggtatctagaacgtcgaaaatggagtccatatttagtctgggcatccgtttttgtgacccactcctgcagttcgaactggatttgcgaataaactggacttcaactccccttgagcttgggactctatgattgattggaccttgaccatatagttgatatccatataatcatcattctccccttcttggttttgagtcatcctcgactcaaagtcattggtgactgcaagaggtgttgatgtagtgcttgatgtcatccaacctagctcccctttcttgaagttgaccctgttgttgtataacatacaaagaaggacaagtggaacatgacatgat

SEQ ID NO: 144438 - DNA, 1890 bp, Zea Mays
gaaacatagtaagtaggaaactaggaattgacctagcaaggtgaagtatcattcagtcagcaaaggtgttccatttacctgaagatagaagctttttgagtcctccgtatcaacaaggttgtcaattcgttgtgccatctgatagccacctaaagtgaccacagccagtgactgtatggtcgaacaaaaggaataagtgaaaaaaatatataagatatcaaacctaatatgcatttgactctagctgaaacagactataaataaaccagcagaaagtataatgctctaaagtacagttaatggttgcgttatgtattatttagaaatgaactccacaataaaacacaccaaattaagttttgcaacagttaatgtttgatgtaataaagtaggattcttacaaataaaagtgggatggatataaatagaacacacacgcaaatttctgtaaacatcatcaggtatcgaacagatcagcaagacaccaacagcagcatatgtgacaaataaaaccacgagacatgccatactatgacaatcagagatgacagatacaacatactctcaaatgaggtgtattaccttacctgtgtttctcccctcgtgaacagagcactaccatgagctcttggaagtaagccacattgagaattgatgggccgaagttcccaaggactccgtccatcacttcgctttcctcgctgaaatttgaggcattgatattccatacaaaaatttccatattaaatcacatgaaagtcccaaggaactgtgattaccagacagaatgatgtagctcactagaaaaatcaataatcagtcacaatagaagaacaaagccatgtatcgcaggcattggcgcacatacacaatgctagactgtgagaggacccctattctaaactgaccttattagtttcattaatatcatgtttcggcatagcagaattttctcctaaatatggcaactacaattttgttttcatttacttttggatggccagtggcagttaatacctgtcgcactggcttccagttgctggacaacaatgttacattctacagaaagagttcaaagggacctttgaaaacacaatgcgcatataggaagaaagtcagatcctttgtagtaagaactagaaagtacatatgatctttcattgtttttacacagacgtaaccatatatatgtatgccgaataaatgcagacactgaaaatccatgatgattcaagatagatattatcatgattgcaatgaccagaacagtgcaattcagaagtatgggcataaagctagatctctaacaagtaacaagtttttttagcagaaaaaactctagcaagtcgatataatagaaagaagtaagcatcctgctattgatcacataagaaaggggggaaattttaggtgacaagtgcaagcaatacctctacaatgcgctttcgtaaatatttagatgaaatttccttgaagactagcttcacatcaacttctgcaaatagctgtatagaagaaatacatggaaatcagtaaaaatatgtcacctgtttaataagcaaggtggtaggttaaaactgttgagcaaagcaaaaaaggggaagcacgaaaatcaccaattatcatcacctgaaggggcttccttgaaaccggcttgatgtgaacatcgccttcatctacttctccgtcatctacaatttcatcctcatcctcatcctcaacaatatcagccaaactttcagtgcctccagataagccatctttggaaacatagccctgctcagaaagtatacttataactttctcttccaatgctgaaagagcttttcttctgggaatctttccttttatttgtaatgccttcatcaactcatctccagaaatatcctg

SEQ ID NO: 144439 - DNA, 354 bp, Zea Mays
tgcaccccatctgggggctcggaaggtggaaagacatgatgaatgcgaggagtgcgaaggcacggctacttcccgggagattgatccctttttaaaggcagatctccctactcgcgccccaaagcgtcacgggcaaagtccccgccgacgtgctctagggttctcaccctacgacacgggagctaggtcccacatgtcatacaaactgacccgaaacgcaaggagggtgaaccgccgcacacgaagcatgcaactaccccgcggataagcgctctctcatcctcgccgaaaccagcggtcgaaaaggcggaccgccacgcaagaagcatgcaaccgcaccacggttgtgcaccc

SEQ ID NO: 144440 - DNA, 305 bp, Zea Mays
cagagttcctgtccttttgttatgaggcctcttaacaggatcatgtataccttcaactttctttggtatttcaaccctctctggtgcattctgtgcgggaacatgcgacttaaccatgctcttcaaatcacaaaaatggtcatacagttcattgctaagttttgtaaatcgattatcctttgagcttctagatttgcttctttggtgcgagggtcatgagcggagattcccgtggattgccatataatttctcggcatttctcatccaaaggttcttttgctccccctaatgacgggaaattatc

SEQ ID NO: 144441 - DNA, 416 bp, Zea Mays
caaagttaaacatgatgaatctgacaacgattatgagccgtcgaacttgtcctggccaccctcgcctactgaaccactgacagatgatgactacaactccgctgaccatttcgaacaaatatggggtgtcgaatatgactctgactagatgccatcctacagcaacaatgagctgtgacttaagtcctgttttctaatgaataagatagtatagtctcagttgtaatgtgccacctaaggcctcggtttattcttggttaatagtaagtcgacccagttatgtaccaaccaggtcctgatgtgtgggttctgtgaacatgtaattgtacttcgtagtgaaatgaactatatgctatgtacctatgtgtttgattccaataaatatgttgctcgaccgtatgttcatgttatcattg

SEQ ID NO: 144442 - DNA, 597 bp, Zea Mays
aaaggaacaagacatctctcgtacaccctcttctggattgatccaaacaatccagcagggcgtctgaggaaagccccctccagctctcgtggacctgctgctgccggcccctcgtgcccctctcctggtcgtggatctcccacaccacgtggtcgtggtcgaggtcgtggtcacgggatgggtgctcgtctggcccatggtattgcagcattcttttccatgtgcaggaacatatctttcgatgtgcatgagctggctaggcatcagcgggagactaacgataacctctgccatcaagcttcttccatgggaatgccatttgcttcccgctcgcctgatgtgcctcttcatcctccgccaccagaaatcaatgaatggcaccagcaggcctatggggtgccctttatgtcagctgaagatgaagatgaagaagaagaatattttgatgatcgtgagcagtttgccccgcctccccaccaaggggatccgggtcaatcctcttcatatcctcctccccatgatccttcaggcagctatcctcccccagctcagcctggggaagaaaactttgcggctaacttggcaactcaattcttt

SEQ ID NO: 144443 - DNA, 385 bp, Zea Mays
cgatgttgtactagcgttgatgaaggaagagtcacttggggctacgttccatggcgaccccgaggaagtggtggagagggctcaagtccattgcgaactcgcgctgcagggaggcgaataggcgatcgtgtattgtagaagggtggcactggatgccataagcacgatgtcatcgacgtagagcaagaggtaaacagtgtcgtcgtcgcgttgaaggattaacaacgacatgtctgactttgcctaggaggcgatgcgactgtatcaggcttgtggcgcctattttaagaccataaaaaactacatgaagagaggtgatgacacggtgggtgaggagatcgaggcaccgataccccttgtgatcagaagagtacccgtgaaaaat

SEQ ID NO: 144444 - DNA, 480 bp, Zea Mays
agggggtcgactgtagtagaagatctaaccctggtcttcgacaaactgcgggcaacccgcaccaaactgaacccggagaaatgcatcttcggcgtttccgcaggaaagctgctgggtttcctggtttcataccggggcattgaagctaacccagaaaaaatcaaggctatcgagataatgaggcctcccgttcgtgtcaaggacatccagaaacttatgggatctttggctgctctgagccgcttcatttcaaggttggctgagagggctctgcccttcttcaagctcctacggaaatctggcccttttgcttggatcgaagaggcggaacaagccttccgggaattgaagcagcacctaacctccctgccgatcctggtcgccccagagccaggagaaacgctgtacctgtacattgcggcggctgcggaagcagtgaggatggtgttagtcgctaaaagggcgacaccagaaggacaa

SEQ ID NO: 144445 - DNA, 375 bp, Zea Mays
agtgacgctgagagaggtgcatggatccatgttgtctggtcactgacaatcccaaaaaatggtgaagtggttcgaggtctttcatcgagaattcctgctggagggcatcaatggtgcgccggagtagaccatcagaggacgcagtgagaacaatgtcatcaacatagagtagcaagtatactatgtcagtcccacgatgaaaaatgaaaagtgatgcatctgtctttgcttcagtaaaacccaatgagagtaggtgagcagcgaaccgaccaaaccaagcgcggggagcttgtttgaggccgtagagggatttcttgaggcggcagacatgatctgggaaatgaggatcaatgaaaccagaaggttgaacacaat

SEQ ID NO: 144446 - DNA, 285 bp, Zea Mays
gggtgatgctaatgaaggagagattgattatgatattattatgccatcgaagcccagccatctggattttgggaaatcaattgtgtctgaagctgatatgactatgatgacgaagctaggctacttcaaggaagtcgataaggggttggttcgctttggcggggaagagactatcccgaagccgaaaaatgatgaagttgtagtttttaagagcttcttcaaagcagggttgagatttcctctgcatggaatgattgtagaagtcttggaaaaattcgggattta

SEQ ID NO: 144447 - DNA, 561 bp, Zea Mays
gaagcaatggttcaaataatattatccattaagtttgagtgagtagaggagctaatgatctaaaccgttgattttaatgatgtgtcaagtatgtgtgtaattggtttgacggattcaggtgatttggttagtttgttttttcaaagtttaaactggtggtatttcctatattacaaagccggtaagaaacgacgcaggatatgttgtccacgtcggcgaaaatttttcaggtcgtccgattcctgatcaaacgtcatatcgtctcttagattcttttcaaatcccagctcactatgtctctggatgcttcggccgacactctccctcacgtcagctcgctttgaccccgtgcggggcttctcctcgtcgtcgtcgcttactccgccgcctcttcctcttcgcgtcgagcgctacaggtttgttccgaccttgctccctccgccattgccactgcgctggattttatccggttcggcaccattacgcctttcaacttttggttgcgttcttggttctagggttcgtgtcctctgcctgctagatctttcctcggcttcattt

SEQ ID NO: 144448 - DNA, 770 bp, Zea Mays
tggtattttgcaaatagaaccctggaataggggacttaaccctaaatagggaccaggagggtaaaacatgacccaaattgagaaaacccaaaagctttagtggaatagtcataaaatgctcccaagaatggacttgcattacatttatacccctgagataccagaaaccctaattgaaaccttggaaaaccctaaatccaaaccctaggggcctatgtgcaatagtagtgcccatttggactaaagtgtaaaaactacaatgttaaatcatataaggtcacatggttcacatttatgaaaatttgcaagccaaaccctcagttttggacaaatttgcaaaaagaccccaattgtgattccactctaagtctagaaaacagtgttatgggctcaacttttgagctttgtatctttcaaattctagggttttgccctaggtcaccacatcaaaattgtagaccaaacaaaggagaacaactttgcttaagagagtaagcatagttgttgagaagatgttggagataattaagcccaaagttggactgtcaggctggtggaactctgaaattcagaacttcagtgtaacagagctaactttggacttggatttaaacatgatccagtgtaagtttgggcatgattcccataacaaatttgtagctggtatgtagctccacaattttgttgtagagatctggacgagttgctatatgaatctgagagaaaatgaggcccaaactctgtctgtcagaccgactgatgaacatatc

SEQ ID NO: 144449 - DNA, 925 bp, Zea Mays
cttggacgaaagcattgttgacatcaagctggtgtatagcccaagtgcccaaccacgtgagagagccaatgagggaactatgcgaactgtagctggtttgacaacgtgactgaaagttttggagaagacaatactagggcgttgggtgaaatcacgaagaacccaccgtgctttgtaaggttcgagagaaccatcagccttgaatttgtgcttgaaaacccatttgtctgtctcaatattggagtgtggtggtcgaggcacaagatcccaggtgttatttgccaagagagctaagaactcttgctgcatggcagcatgccaatttgagtcggcaatagcaacccagcaacttcgaggaattggagagagcgttgtggcttcaaatagagctagaaaccgtagaccccacttagcacgagtcaccatccctcagggtcggccttggtgacgggaacagcactagcacggacggatggtgatggtgaggaagaagtggtcgacgtagtggagccgggcgcagtggagtcgggtgcggtgaagccgggtggtgacgacgaagaagcagggacgatcggtggtgcaatagcaggggctgaaccatgatcacgacatgagtagacgtgcccgcgaaaacgacaggggcaaccagaggtgccgtcctggtcggagtctgctgtctgcttgagacagctgaaggtccgccctcatcgattgatgttgtggtagaaccgatggggggggagccaggtggtggtccgaccatagccgacggatgagcagtcggacccgggccagaggatgtgcagggtgcaggcatggtgccagcaacaccaggagttcatgcaacgtttgtagtccccgtagaaacaaatggtgatagctcgaaaggaactggagccgtgttaggtatgtcgtccaaaaaatc

SEQ ID NO: 144450 - DNA, 549 bp, Zea Mays
cttatttgcgtctgcttttagccaatttggcttcgccggcgtgcagccgcgcctgctcgccgcgcccgcacggtgtccgaccatcccgacctcatccagtgcctgagctttggcccagggtgttcccccacctccactggaactagcccaagccctatcacggccgattgccccctctggcggctgggattcctcaccggagttactccggcatgcccgagaccttctctttgccgttctcccctctctacccttggattcgtggcctcctccccaccattgagttcgccgtggcgctctctccctctctgcccaactctggcaaccccggagccaccctagctcacgcctgccccaactccggcgacctcaccgccatggagaggagcagcgccgctcacagccgttcgcccctccccgtctgatccctccatccgatcttcatcgcacggcccaggtcgcgggataccgcttcgcgcacgcgcgcctgacgcccttgcccggctgtcagcgcccaattcccctggcgctgggcccgctcgatcagtg

SEQ ID NO: 144451 - DNA, 433 bp, Zea Mays
ccgccgttctccggtcttgcgccgcgtgtcccaatctcgccaccgcatcgccgtgactccctctaactgcccgtcgaccaccggagttactgccacgccactggacacgtattcaccgcgccaaggttcttcctcatctccggccgcccatactgtccgctcaaattaagcgccaccgccccggggatctataaattgaccccgcagagagcttcacaacaccatcacccacccagccaccacgtattgctagcaattgttcgcccgagctcgcgaattttgaattcgccccaaatccattctccgccacccgaaacccaacctcaccgtggccagccttattccggtcagttcatctccttctctccctcgttcaagctttcccttaagtctacgatgcttgccgagccactgaattgaactaggagcccgc

SEQ ID NO: 144452 - DNA, 322 bp, Zea Mays
ttttctccgtcgttttgttgacttgataggaaatggggttaagactgacaagggttttaaggaaatccaccttaactctgttgctaaaaatgtctctgagttctgtggccaagaagtaatatgccaacaagtgtacaatcaccttcgtaagtggaggtctaggtgggtcaaggtttgcaaactgaaggacattagtggcgctctttgggatgaggataactttgtcataagcttagaagagggtcattatgctgcttacatcaaggttaggaccaacaccttctatttttctaacctgttaatgccattcttccacttcaaa

SEQ ID NO: 144453 - DNA, 345 bp, Zea Mays
agtagcgtgtagagcgtgcacacgccgtgtacacagttttacacggacaacacgtacttttgtaaataaaaattttaaatagtaacacacgggtggcatttgtcacaaacacataggtgaaagaaatactgaaatagttctcacaatcataggtagtcaaggtctaaggcttgcaagccaatattcaaatagaaaagactagagttaccactccaacatgacaataactaaaaggataatattagactaataatattatgattaaaagtagatggtcgaggcatcaaaatcagtcatcattgactacttcttgctcttgcagctcataaccagttgtgatcactt

SEQ ID NO: 144454 - DNA, 571 bp, Zea Mays
gtgggaatctaccttgggttgttataacaaagttgtagagctaccatacaagaacaactttgttgcagaaagtaggcttaggttccacataaaaattggagaaaacagggctccaatttgatctgtcagtcaagctttttactgaatccaaagcactgttcatcggttttcagtaaaatcgccgtggataaggattggctcgccggcgataaggatgtcgccgtggctcgggtaagacgtcggcggccacggcaaaagttaccggcgacgtgtcaaagtctccctaaggtggcaggccccggttaaacggcggtcaccgtgctgtcaccggaatccaccgcgcgggtgcgctcgccagcgcagtcacagctcagggatctcatccctcctcggccggccgactataaattggaccctggcgttgcttcgtcgttgcattccgcgcatcgataactagtcacttgactcgagctcaccggaataacccacgaacatgtttcctctctgtttttactccgccgcgaggaactctaccgtgatcagcactcctcgggttagtgcatacccaatt

SEQ ID NO: 144455 - DNA, 901 bp, Zea Mays
ttttagatagcagacataatgtaatcacaaggtaggatagagtgatgagaagggtaaagaaaataacaaacaaaacacaacagaggatagagttaaaaactcgcatgtggcagagaagaggatacgaccaagggaaaaaataggtaaaaatctacaactctcagatcgagatggaagagaggagattttgaagggcaggtataagataaatatcaatgtaagatatgatgatgtcgaaggtaaagatgataataatgaaaagcataacaaaggatagtgttaagataagactcgcgaagtggcaaagtggagaaaacaataaagggtaagatagataaagtcccaacagaaaggttgaggtaaaaactcattaccgaaggatgttatgagggaacaatgagatcatcaaggatgtgccaaatagaatgatcattcatggattcgtcaagaaatcagggtggtcaagggcatgtaagctaaaatgttttgaacagtcattggggtatgaaaataagcgtacataaaaataagagtatgcaagattccaaggatacgagcatactaagaccaagggcatataaattgccgaaagatagcgacttaacaacagaataagaaatgatctcagaagacaagaaggtcatggacacataaactgaactgtttaaataggcaatagaggtacaagggtaagtactttagattaaggggtacgggtattaaaaatgcaaggatatgagcatgtcaataacaaaatgaaatagagatggtcaaatggtagcaatttaataatggacgaggaaagagtcccaaaagactaaaggctatggtcagggggcatctacaaagatgtcgcaagcacaagagtgagataagttctaatagactgagagaagtgtag

SEQ ID NO: 144456 - DNA, 360 bp, Zea Mays
catcgctggaagtctctcacgtagaccgccagcatcatcatcgcgtcctcgcccgccatcgtgccgctcaccttggccatgccctctccggacagcgccaagcgtcccttcctgcttcctccttgccctagtactcaacacatcagcgccgacgacctcgtcctggccttcatcatcagcgtcaagctgctcgcatccctgctccccaccgcaccgagctgctcacgtctctgctccgtcctccctcgtctttgtgcatgagcagctactgtacgccgtcattttcagcggcgtggtcgtgtttctccgccgaccagacacctcatcgtagcgtctcagtcctcctctgcaccagcacag

SEQ ID NO: 144457 - DNA, 706 bp, Zea Mays
aagcaccacctctttaggtaaacagtaaactatactaaggttaggacccctttcccatatgctccttagtaggcgctgtcgttatcctgctacagggctgtctgatgagcaatgatcacttatgtccctagatacgcacaatggatcacagatataatctgcatgcatattttttacctgataatagctcatcttattgtggtgttgatactttttagccatggtatgttgtgcattatttctgggttcttgttaaaattaacacaaatatgattatataacctaactgttagattatgtgtatgtgtttactgctgtaatgggccttggcccagcccatgtactcaactatatatatatacaacacccaccctgtttagggtcaggtttttcaacatggtatcaagctaatcctctcttctttcctccctatcttccttaggtgcaaccttcactggtcgcctgctcgtagcctttgctggccgcctacttgccaaccaccttcctccatggccagcctccctctcttctcccctccctttctctctcgccagtgggttgtcgttgctgccgccatcctcgcgtctaccgttgggctgcccatcaccagcatggccctgtcctccacacaggctcgcccgcggccgcctttgtccccacctcaccgctcgtccgcaccgttgcgtgggcgctcacgacttccgcc

SEQ ID NO: 144458 - DNA, 412 bp, Zea Mays
gttctccattgatgagaatgatttggttcgtttcaggggccacctttgtgtgcctcagaaatcagaggtgaagatggatatcttgagagaagctcataaaacgccttacaccgttcaccctagcgaaaccaaaatgtaccgagatctgaagcaaaacttctggtggaagcggatgaaggttgacgtttctaagtacgtggccgcctgtgaagtatgtcagcgcgtgaaggccgagcataagaggcctgtaggtttgctaaagccattggaaattctggagtggaagtgggagcatatcaccatggattttgtggtgggcttacctcgttctcctcagggcagggatgctatttgggtggtagtggatcgcttgactaagtctgcgcactttattcccatgaagaccaccaat

SEQ ID NO: 144459 - DNA, 1113 bp, Zea Mays
ctggagagaagttccgattaacccctaaaccgacctgcgggcactatatgatggcatgttagggcttcgcttccccttcccttcttcgtgactcatcgagagaggcaaacccgtgaaagataaaggggtagcaagggccaccgccacagatactcgttgacactggggttcgggctccagtggggctactcagaggttggtctagccgcatagaagctgtgtgagggattaattggagggaaactagctgaagccatatgaattccttgtaggccgaacaacaccaccgcagggccgcaactcactgcattcagaggtgtctgtgcctctagggtcggtgagtatctacccttgcgatttgtcattatctgctcgatgtatagcactttttgtctaaaagcttgaatcctgatgtcggatctggcgaacaccgacgatgtcgccaccacggtgatgcccctcgccgccgtggtttgggatcgggtggggacaatggcttttgggccgttgattccacaggaacagttaggattacaatagaacgtaccggttggggtaggatggatctgcatcgctggatggggatcaaatgtgtatgattttatcttggacattttagatcctgatcgtcggtctggagttgagcggctgagatttgtttgtcttaccggattcggggtgcgcgcagatcagtcgttggatcgtgggcgtagagttgggatcagatcttatgctcattaaaccatggccctcgatctcagatccggtgagccatgttgcataccggttcacggggattgggtgtcgatccatgctgcccactgcccacatctgatcgaacgacttagtgagcgataccccttcggcccgaccaccttactaaagaaaacctggacttatttgcaattaactcgcagtccaccacgggttaaggtaagtctgggaatttttgcaagttagctcctattctcttatgtattcttgtgcgcaatccaggaagctattaattggataaaaatatagaaaaagagtttttgcattaaaataattatagaaacttgtttaaatcataataaattcatttgaattccgttttgatccattccaattgca

SEQ ID NO: 144460 - DNA, 336 bp, Zea Mays
gccacccacgcacccgactgcccaaactccatactgtctaatgccgcgcaagggaatggcagggaggaccccgtggggatttctcacctcaggtctgggcgacgtggatccggactacgcgacgcagcggtgccctgatgcatggcggcccgacgacgacgcccacgcaccggtgtgggatcccaggcccggcctacaggacggcatgtcgagcttaggacgacgacgagttcctttctctctctgctatccatcttcgatggcgcagcttgcttggtagatggcgatggtatggtagactctcgaattcaagcgccgactcgagctatgggtcga

SEQ ID NO: 144461 - DNA, 503 bp, Zea Mays
ctcatgcccagcctcctccattgggcgctttttttctcgatcgacatgccgatctggtacggtgctccctttctcgcaaaaggcagacggcagagatggaaggaggcacgggggtttgctggtctcattggatatgagtcatcggtactagctgagtggcgactgctactctgctatgacacatgacacatggacattcttcagactggtagactggtagttgcaaaagcgggtctgctatatccactcttgctgatctgttgcgaggacttttgccggaaatccagtcataactatcacggattacatgagcccatctctagatccacgattagtcctacccaacgagttggagaagacgtgtgagtcagactaagaaatgtctgcgtctaaaatggtcacaactgtggcctccctttttcgtcatcgttaaaaaagagcacatccatctccatcaaaagtttacgtgcacgcgtattttctgtcttctgggcatcccgaag

SEQ ID NO: 144462 - DNA, 612 bp, Zea Mays
tgcagaatcaccggtgtgtcctgttcatgatcaccaatagtacgcatagtattaaggtgttgtcctccttgatttactgtcattctcgatgcctcaaatatggtctgttcatcaacccccggggccctcaaagctgctggtggagtaattgcatctacagcagtagctgattctgtatgcgtaattccatctgacgctaactggtaccctccttgttgttcttcctgcaccattgttacgatatccaagcattgatttggtcgatgaacagacgtcggcgtcgtatactcacttatggacttgtttccccatggcgccgccatcttccagagcaaatacgcccttcacccagcagcggactatcaaatgatgcgtactctccactttttttggaagattatgatttttccctgtaccatgcgtatatccaatatcgtggacgcatatttcacggcgcatatccagtacccgctgaattttaggatcgtggccgcgctgatcgtgggcgctctgatcgggggagtaacagccatttatgcaattttatacatagatttacggtgtcgtaactgtctgtttaaatgcgcttccccattttacgggttacacgtc

SEQ ID NO: 144463 - DNA, 497 bp, Zea Mays
atcccatttaaaggaaatcttaatccagctttaaagaagcttttgaagaccactacttcatcctttcctggctttggagtaatctcctccccgccaaaacgaaccaattccttctttgcttcactaaaatatcccaaattcatcagcttagacatatcaccttaggaaatggtggatttcccaaactccaggtggctgggtttagttggcacggcgttgtaatcatcttcagattcaattttcttagcatcagcctgctcggcttcagtggcaggtgcatcctccaatactactagccctgaacgcttcatcacttcagagattggagcggtttcggcaccttcggcttcctctccgtcgcgagtaaccctagctgttgaacgtactctggccatctgatgattgaatttcttgtttttcgaacgaagttgaaatttttatttaactttgccgaagctctttcttgttgcgaagcttgagaaaaatgaatagcttcg

SEQ ID NO: 144464 - DNA, 522 bp, Zea Mays
tactttcatactgttgtatgcgaggctgtccgcaaggtcatccttcgacatggcggagaggccagcttcgagtttcagaaatcccatacttttggccatctcccggtagatggatatctctttgttgtctgggagacagtataggaaatcatcttcgtccgtgccattgaacactaaggcccccttcggatattttagttcccaggcatagtgtttggcctctaaaatttcttcttcggacaatcttttccccaaagcatgtcgaataatatagtcaatatcttcggacggtgctttgggagcaagagattcagctttttccgtcacatcccgctccgctgccatgccggcattgggagattcttgctcagccttatcctcaattgcggcaggctttgtctcagtaggcactaaaggcccagcttcggcttcagcctgggccgtagcagcttcggcaactttcttcgcgggggcaggagttaatgcctttgtggtttccatgacaacgtctagcactctggc

SEQ ID NO: 144465 - DNA, 846 bp, Zea Mays
ccctccctctctctgcccagtggggccaacttgtcggcgccagttgcttcccccctgctcccctcttccctctctgcctcgtgggcccgttctgccagacgccgagccgttgccccgcgcgccccttctctctctgcaccgtgggccttccctgtcagctccgccctccccgcgtccgccatggaccagcgagcgcgcactcacgcacatcgtcgggatcctcggccccgtcgctctgcccacgccccagctccttttgagcccccgcccgtgcctgcactcactcccccgcctcatttcacgcagtcccgccctggctcgcgctctactcacgccgccagacctcgccggagacccgcgcccgccttcccggccatctagctcaccggagaccgtgccaagtcaccccgagctccgccctgaggtgagacacctatgctcgtgctcagtttccccaatttcactctgtggtcggtcaattttggcttcgccggagttcggccgtggcagtccgctgcgcccgcgcggtgaccagccaaattagcccgacctagtgccctggcgttggtccctaaggtacccctcccttcgctgaagctatcccaggccttagcgcgcctcaagccccctccccgtggccggaatccctcactggagttcctccggcccgcccgaggccttctccccgccgttctcccctctctgtcctcggattcgtggtcatttccccgccactgagttcgtcgtctcgttctctccctctctgcctaattccggcgaccccggaaccaccctagcacgtgcctacccaactccagcgacttcactgtcgcggagaggagcagc

SEQ ID NO: 144466 - DNA, 524 bp, Zea Mays
agaaaaaataaaggatgtaatgtagacgacatggctgtatagtggagtatatatgatgcaatttaaaggacaccgttgcatattctatatattaacagcgggcgcaaggaagagcaaccggactattcacgtcatcacataaattctccaccgttcgatttctttacaacggcaagcgaacaacaagcatcgctctactctccgtacccctggactcttccagatctatcggttctttacccagcgaacgcacagtcgcacacagctatttctgtttctactttcttccaccccctctccgccgcaaacgcttctcgctttgcaaagtgtctctggaatttggcctcaccggccctcctccagtccccggcgcaggccgccagctcgccgaccgccgccccaccgtggcgtcctatctcgagacaccccctgccgttctcgcgtcgtcgccgcgcgcccacaccccgaagtcgactgcgacccgacctagcagggctgctgtgcctccacaccacccaccgccc

SEQ ID NO: 144467 - DNA, 415 bp, Zea Mays
gtgagcggtggtgcgactttcctgcacccaggaaccggcgcaccggatgtatgacatgtgggcctggggccccatgccagaggttggaccactggttgcagaaaagctgagggggcgcgcaaccgcggggcggttgcatgctccttgtgcggcggttcgcctccttgaccgctggttgtggtgaagatggaagggcgaataaccgcaggacggttgcacgctccttgtgcggcggttcgccttcttgaccgctggctgcggtgaaggtggaagggcgtgtaaccgcagggcagttgcatgctccctgtgcgacgattcgccttcttcgcgcttagggccagcttgtacgacatgtgaggcctggcccccatgtcatagaatgggaaccctggcgcacgtcgggggagaccttgcc

SEQ ID NO: 144468 - DNA, 451 bp, Zea Mays
tctaaccttatttctcgtgactcgagtcaaagtatccaaaatcttgatggggtactcagcataagtcaaatcttcctgaacactaaggtcttccattggtaactgttcttcaggcaccctgagacatttcttcagctgagatacatgaaagacatcgtgaacatccgcgagatgatccggtaactccaattgatatacgacctctcccactcgctttaagattaagaagggtccaataaagcgaggggacaattttcctttgaccttgaatcttctcataccccggagtggtgacaccttcaaatagacataatctctctccttaaactcaagcagtcttctccgggtgtcagcatagcttttctgcctggattgtgcggttctaaaattctcccttatttgctggacttgttcttctgcttcttgtataatctcaggcccaaacaactgc

SEQ ID NO: 144469 - DNA, 398 bp, Zea Mays
caaatccttcccagatcatctactaaggaatttgtgtgctgggaaaaactttatctggcattgcaaagaacctcatggtagatctggggggatgttgttaggaattgacgttgatgtctttgatgttggtgccatcacggaaggggatttctttattaagtttaatttgcatgataaggcagatggttttaaatgggctcttgtctcggtgtatggccctacccaggactgcttcaaacaagaattcctttctgagctagtccgtttgagcaatacagaaactttacctattctcattgggggagactttaatattttatgatctccatctgagaaaaataatgatagatttgatcatcgttggccgttcctattcaatgcggtaattgatggtcttg

SEQ ID NO: 144470 - DNA, 634 bp, Zea Mays
gagaggtctgactgctgaagctgtagttgcagactttgtttttaagaacattcagccactgaaggacagagcatacccggcttatttgtatagtggtgtcactgactcaacccgggttaccaacaagaggattcctgctgtggattcggtaagccggctggagatgatccttagaggcaaagtgtcgaatattggtgctcctgttgcatattctgcctggaatctgccaccttccaaggcttttttcaattttgcgtccaatcctcctgctagtgatagtggcttgggtcttagagtgcgaccctctctcgaagaagtcggggctctggttgcttcactgggtgatttccccaatgatgagaggcaagttcactttgagatgcctgtaaacccaagcgatgcagagataagtgctatgctggacatgttggctgatgattcttctgactccgtccctgctgaaaccatagctgttgtaactatcctagagcccggaaaaaccttaaatgctcaaaaatctaatggtgctcgcccaaagcaccttcgcccggccagtcatccaactgctcctgccgaggggaagaagaagaaaaagaggaggcttcggcgagtgtcatgtttgaatcaggatgcc

SEQ ID NO: 144471 - DNA, 2721 bp, Zea Mays
ggcggcataggcgtgttatgctttggtggcggcacgggtaaggtgagcgcggcgtgacaacctctgcggtgacttgcgcgaggatttgcacaatagtttagtttgcacttgctgatgtcgatgacgagagcgcaacatgatggattcacaccgggggacgacggtctagagtctaacaaccagatctgttcaactcagatcggaatcgtttgtcggagatgtgctttcgagtgacgaccgtgaagaggcggtcctagaggagcttgtggctgactcaggtgtggtggcagttgcgtggaggcggcgggaggccacgcatgcacatcgacgactagaatgtcgtgcgagcgcagtgcctgcacgaaggccatgtgtgtgcaacgatcgtgcgaccatgatgtgaaggccgtgcatgatttgtggtgggtgtgcgtgagtggtggaggcggtaggcagtgcgtgtgctgcggtggcgtggcaatggtgcggcgaggccaggaacaacaccaacacagaggtgattgagagcacgtggtggcggtgcgaagttggcatggcgaagacacgaaacccacacatgggcaatggtggcaatgaggccgtgggtagtgaaagtgagcaggtggcagtggcacaacagcataggggccgcacatgctatggagggcgcaatggctgtgtgatctatagtggagtagcaacatgtggttgcatgggctgtggcgacttggaggctcaagagttgtcatcctcgtcgttgctattatgactgatggtttgccgacgatggtccaactcgactagatgtgaatcattggtttctctgcctcccctctgctatgatcgtgctatcaggtgctctattttggccgacaaagctaggatggttgtggtcagggcgaaatcctagatggcgacaattgtagatgtcgcttcctcttaggagacgtccactctgtcctatatgatagtttcattgtgtgaaaacactgtctatttgtgggccgacaatagcaccaccaattggtgttgcaccttcttgaaggtgttgtcttttgtgtctagcgccccatgattggtggtggcaaccacttgtggcctattagaagttggaactgctatgtccaggttgatgagcttgacaatgatggctcaaactcaaagttgtgtttggtttgtgtggtagtggttggcaaggagaaccatgtagactttttatctagtcggttattggacttggtggcatattggtgcttgacgagctctatcgcttgtcatagtgggttttggtggtaatgaccatacaattagagaattaatgagatttatcaagttgacaagcatgttaaataaaaagaggacaatacatgtgatagttttttttttgaaaaaggacacggcaagagctttgccatggccaaaaatttattagaaagggacacttacaaacactggataggaaagacaacactaggggagagggggggggcaaagaaaagaaaagaaacactagcaaaacagcccactagaaacccagcacgccacacaaacaaaatgctaaaacgctaaaactaactagaagctctttgcgggttgaaatcttctttgacgaaattggccacttctcgctcgctcttctcaagaccatgaaagattcttcgatttctttctttccaaatctcccaccaaaagtaaatacagagaccatcgaattccttgcgagcagttttctctacttttagtctgcacttcctccaccatccatagaccgacgagcactggtccaactttggcagataggagaggttgtaccacgagctgagccaactccaacacgattttgtgaatatgcaatcttttgctagatggcccaccgtctccggttctcgcttacaaagcttgcagataggatcattattccaacctcgcttctgaagattattggccgttagaatttttttatggagtagggtccatgcaaagaaccgacatttaggctccgtcttcgccttccaaactggagaaagtttgagcttggcaaaactcccgtggaactgagccaggtaagcactcttggtagagtattcgccatctgatgtccagcgccatctaattttgtctacttcctcaatatttatatggacttcatggatggcttcccaaagtctcacaaattcaattatttcagtttccccagaaaccggagaaataagagaaatccatgtattgtcgagcagggccttttgtaccttagtatattcctaattactaaaggatacaacaatcgactcagatgtttacatttattttacatttcgaattttagtataggaaaatccacactattgagaaggacacatgcataggtccaatgtgtaaccatgtgctcaaaagttccaccacgacatcctaaaagcctagcccgacactacctcttgttttttttcctactcttggatgctctgcttaagcaatactgttgctccttgacattgtcattgtcacgcatagctcggcactaccatgacttgaatatgacacaattgggtagggaaggggtatatctaccactttcctgctccaacagttacttttcgacctaacctcattgtgctaaactagaaagctctcttcctctctcacaccattggaacacctcgagcttctctcaaccttttcacttcaattctttgagagattgagcctttaaactgtctagag

SEQ ID NO: 144472 - DNA, 375 bp, Zea Mays
ataggaggcagaggcggaggtggaaccccaaagtcatcatcatcatgggctgctgcaccccgagtctcaaactgatggaaggtggtgtcctcggcttgagtatcaatcactggagcagatgctggcataggatcctctggagctggacgatacgacccaaagatgaggcgagaggcctcaagagtaccctggaactgtgggggccgaatcagctgagcaaagatgtggcacagatagtgagcataaaggcaactggcgacgagcacgtagaccatccagtactgtgtcctcgatctcacaaatgagcaaatccacaacatcaaactctgactgagaaactagggcaccaaggggccaaagctgaatatgagtggt

SEQ ID NO: 144473 - DNA, 1929 bp, Zea Mays
tcacccgcgagcccgggttccaccaggtgagagcgtccttaacgctagctgctgcatatctttgtctgcttactcctaagcatttgcatgcttccttctcaactgaaatactaaaaaagactcaaatgacatttttgttagcgctaagagtacacaacttgcctaataataaaaaaatgccctttataaccaccttaggtatatcgataacggatttatagtgccgcagtttgactgaacatcctgattccattccattttcctgcatcgccctggatcagggctttttgacccaacctttcaccgttccccacagtgaaaaaggcctcggcaccttttctttaaggatcccttgtcctgcgtagcgtagtgaatccaccgaagcatctttcggctgctgcaaaggcgaatatagttgcctgcctccagaaccttttctggaaaccactggagcccggctgttgcgccgtgggccgtggcggcgtgcgacgacggagtgacggacagtgtcaccgtgatgatgagatagatcatggcctattcgatttaaagttgcaggacagcgtggtgtcgcccttggccggacccaggtctacatgtccgtgaagcccttgagttgagccgaggggcacgggaaccctctctcgctctctttcaccaaccagttcaccacccccatgtggccatgtggcgaggggatcgagcaggacaagcgtcgacagaccacaagagatgactaccctagccaaccaccgctaaaaaaggacatcctctcttgttttcattttttgccggcaccacgccagtgccagtgccagattgccaccgcatttcttctgccgtgccccagccgggacgttaggatgtctctgttggaatgtgaaaaataggagaagcagaactgtagactacactctttgtagagagatgtttgaaataaatgatgtgatagaaaacaagattgacggaacgtgaaaaataggagacacaaaactgtaaatgacactctttgtagagaaatgtttgaaataaatgatgtgatagaaaataggattgacgatatgctcgagatggttggccttagtagtttctatcatcctcatccctacaccctacccagatttaaagcttataaagctatttaagagtgctcttttagcatacaacgtaacatggttggatttaaagcctaaagctatttaagagtgctcttttagcataaaacgtaaaatggttggctgggattaaatgtctctccatattagaccgtctttagctgttcatccatggtcatcatccaaatcattgtttttgccctagatcatactctgtttctccacaacttaacagtaaaaagaatctaatgtgcttcctccacaccatcttcttgacccgtcgtctccatcccttgtgctaacttgacactttcgggctaccattgtgatgtcccgtctttaccctggccatggaggccttgcctttttttccacgctcatgactcaccaccaccaccaccaccaagcctatctgctgccgccaactttccagattatcgtgttcttcacatggacctttaaggatctgttaatggtctgtttgaaagagctttaagtctgaaaatcagattgcgctgaaaaaacatgtttgagagagtttcatggtatatctactaggtcggcccaatatataattgcagcccatgagtcagcgtggacccacgcgtcaatctcctcgtctctccctcgtccttcccgtctctctcacgtctccctcgtccttcccgtctctctcacgtcgagatggagatggtcagatggagttgatggccatggaggagaagagcgcaaggcgctgagccggtgggtggcacgtcgaccacgaacgcagcgcaatgggagcgacgcgccgtgtccgcgagcttagccgccg

SEQ ID NO: 144474 - DNA, 451 bp, Zea Mays
taaactcctcctagggttttgtccattcgaatggactaaacaggcctcgaaggccctcaacgatctcaaggcctacggcctaccttacatcacgacccgtcatggtggcctcacatgaggggggagcctctcctcctctacgttgttgccacccacaaatggttagcatggagctcatcgtcgaatgccccttgtacccagagggccctagtgtttccgcttaggtgggcccaagggccaggtcccctagcttggattatagggtttcgacctcatgatgttgacgccctcttaccaacctccatcaacatagtaggggttggggcatggactcttctgtcactaccttctccttccccttttgtctgtctaggtgggaaggggcggggtcaatgatgtcgctaccaacaccggtacatctttgttcctagggatcttgatcccttaagag

SEQ ID NO: 144475 - DNA, 581 bp, Zea Mays
gttcagagaaaaaaagtgaggctagggcttaaaaattacagaggcgtacaacaacgtgatgcaaatggggttttcctgggtcagacaccgtttctaaaaagtgcttagtcatcactcggtcgttatttctaaaacgccgacgtggcctgatatgactcggctgttacttctaaaaggctgatgtcgcctgtcatcactcggtcgttatttctaaaacgccgatgtggctcaaaatgactcggctgttacctctaaaacgccgacgtcgccaagcaccactcggctgttacttctataacaccgatgtggctcagcaggactcggatgttacaatctaaaacactgacgtcacaaagaaccattcggctgttacctttgaagacaccggcagtaactcagtcgttctttctctacgtaaatgcaggcaaaattaaaatgcaacacaacaattacaagttgttactcgagcattatctctaagaacaatggctgcattgggcacaaatacaagttgtcgatcgactataaaggaacgatggaaaggcaagagatgtgcacagaacaagccgaagtttttcttc

SEQ ID NO: 144476 - DNA, 598 bp, Zea Mays
accaagaggtcgtattcgtggtttaggcttaggaccaactccacaatatgtaggcacccctggaactcaaatgaaaatatcaacaaagcttcaaatggcattgcaagctcgtagtcagtctgagcaagaggttatagccttaagacaggatatgaatccgatgaaagaaaaaatggatcaaatttatcaaatgatggtagcagttcaaggggtgcaacatatagaaagcccttcacaacatgggtctaattctcgacaggtgatataatattgcatatgttcagtcgtttatctcacaatatgggtctaattctagacaggtcctgtatctcactaacacttttttttgctttagaactcaagggtgcaccagtcagatgaggtggcacatgagaacaatggcaatgaccattcacaaaatgtggtcgaagatgacttgcaacttattaggcgagtggcaagcactatgggtcattcaaggaatcgtggagatattaatactactgaagagcaaagccataggcgagacatcgcaacagtggtacctcaaagaaatcatggatcatctgaaaatgcagatgataatcatgtaagtttc

SEQ ID NO: 144477 - DNA, 1065 bp, Zea Mays
ccccactccgcgccgctgccctggacgactccgtcgccgtcgtgctcccttacgagtgtgggacctccgccaccttcgtcctccaacattcttggtgctgctaaagaaatggctttttgcagagttgatcctacgccgttcctcccccatggcttcgtggcgcagcaagtcgatcatcgcgagataatggcacgtactgttactcgtcctcaaccttcggcgcatgaagattggggcattgtgcttgttcaccccttgccggagcatgaggtcaacttccatatcttcgatgatattatccgtgagtatttggtggaagtccggcgggtccaagtccggtgcatccagcgctctcatctggggcaggctttggtgcgattcaggttcgcgttcgacagagataacttggtggctttgggcccccagcaagcactgggattttcctttactgttattcgccacaatgagggctggaatcagcgtgccctaacctttaatcacgaatgttggctgattctgcttggtttccctatggatttctggactcatgaacacattcagaatgcggtgggtgcttttggaagggtgctcatgtgggaccctgatcctaacaatgctactaggctgttggtccgagctagggtgacttctctgcaggaagtaccacagttcattgtcttctctgtggctgatggttttcagggtgtctcttggacggttcaatgtgacattgtgcaacagttcatgcttggcgcccaacctcaggatgaggtccccgtgcctccatacccccatgatggtcaccagctcctggttgaattttttggtatgggacagccgatgccaaacttccatttccagttcgacctcaatattcctcccgaagatggaatcaatgctgaggaaaatgttgctgccaatgctgatgatggctgggacccttggcctgttgagcaggctcaaccccctgtgccagaggctgtaccaaataatgttaacgctgcgaacaatgaagaagagcagttcagctaccagctttcaggctttgaggaccttccttctgac

SEQ ID NO: 144478 - DNA, 799 bp, Zea Mays
caacgaactcccgtggctcgatataatctcagggccttgcggtttcgtgcctttgctccatccgcgtggcgccttcgtcgcgatctacgcaggcggcgggacatcgacggtcagcgcagagcaccatcgtaggtgagccacttttccctctgcgatattatggtacgcgcgggagttcgggagcgggcatggtggtcttggtcgggggcgactctaggggccagcgaaccgccgcggtgcctctactggatcaaggatgagtgccgggtggccggtacttggcgggagaaatggatatagcagtcggctgaaccggtgttgagaggttgaagacgacaagatagccatggatcgtaggatggacggttagggtattgtttggtgcatctgttcggcggtgtcgtgttctggtccgggctgtgtgcacgctggtggaccatcaggagagagagagttctggggagagcgcggcgtctagtataggcggagtgtatggggaggggtctcaagtagaagatgatcccggtccgttggttctcagatgtgtggatgagagttagttaggttgtagcatctccatgatagatctgggttgtcgattggcgatcggatggttgccctagaaccctagcgcccaccgtcgatcctggaaccagcgatcgttgagagaaaggccttgtatggttgggccggtttaatctggaccacagatctcgtatccgacggccgaaaggcaacgatacctcttcagctgtgtcggtttacaattgagcccctgtgtttagttggtttagaaccc

SEQ ID NO: 144479 - DNA, 330 bp, Zea Mays
tatagaactcgcgcccgttgtcacactggatgctccagatggtgcgaccgaactaagtagagacccaggcgaagaagtgagacagggtgggaaaagtatccgacttttgacgcaaaggaaaagtccacaaataatgtgagaagtcatcgagaatgagtaaataatacttatagccagaaatgttgattacaggggatgtccatacatcacagtgtatcagatcaaaaatgtctgctgctctagaggagaaggtgggggaatgggagcctaacatggcgacctaactgacaagcatgacagaggtgctcaaaaggtcccctacaagcagaa

SEQ ID NO: 144480 - DNA, 413 bp, Zea Mays
ctattgaaaattcctggccgtcccccacccaatgggtgttttccaatgggtgtgaccaagggacgtcttggtacgcaaagcatttagcacattgtcctggagtagtaacttgacgtgaccactgggcgtaatcatattgcccaagcagttgaccttagtccaaatggtgtcgtgttacgcgaagcggcgtctgctacctgactcgccttcaggcgatttgaattgcttattgaatacttgcgactgttcggtgggcgtggtaggagatgaacagttgccaccggcctctataaatagcttgtttgctccattgttgttttcgcacatcctctgatcgtctgttgtttctttctcaaccttctcttctattccatctagccatgggcaaggacaagaaaggtcagggctcgccg

SEQ ID NO: 144481 - DNA, 467 bp, Zea Mays
ctacattattatcatactgattatcactaattacccacgaaaaatcccagaaactgctaatactactgttattcgcccacccgcaaatctgtttttttggacaacaacatacccggattcaaacagcgatatctcctaaaatataactccgaatcgagcgcataagtactcattggaaaggtatgacaaagctatacatgattctcccactgattcccactaattacccacgaaaaattcccagaaactgctagaactactgctgttcgctcacccacaaaatttctggacaacacctctaccaattcgcatacgtaaacatctaatcgattgaattgcagcacaaataaacaagagttaatcacaaaatcaccttgacttctcctcctttcctccctccttccttccaccaaattccaattggagatttgcacccacgcgacgtagatcaagagggagggctgcac

SEQ ID NO: 144482 - DNA, 403 bp, Zea Mays
cactgatgatatttacttgatccagtttacttgatcaaatccgagttgtggggtatatggtgtctccgttatgctctaacttaacttcagaaaaggtttactttcagtgtgtatgtgtgtgtgcgcatggggtagggcgaaggacaaaaggcagtgttgtacataaataatagcttttgaaaacttggctagctgattcagcagagatgatttggcagctaggttaattagaaccaaatgattttcccatgttaagttaatttcttctttggagatggacaagagttttatgcaataagaaaaaagcaaagcagaaggatatgtagggatatgctcttacttaaattcagaagaggctctattattactttcagtgtgtatgtgtttgggcgcagggggtaac

SEQ ID NO: 144483 - DNA, 807 bp, Zea Mays
cgaaatagcttcgaagtctaagcgatagggttatctcgtagacgcaaaaaacacccttatgtgtggcactgtacccctatttatagtggcaagttacgacttcttatgaatttaaaaatatgttcacaaattctatacatatgagctacaaatcttgtgaggttaatatatatcaacttttcctctctcgcgacgtgccaatcaaccttctagaatcttctcgtctccttatgtttcgtgtgttcacgcttcagagacaaagctgaagtcttttagcttcgtcgcttccttatatgttggtgcagacgaaggtagagcctgctacctgtagatgatactagaagcatgtttaactattagcataatgtttcgaggaccttcggcaatcgaggcacccaacagggtttataaaggtatgggttcaaaagaagctctcagcatctttttatatcttgctcggtcattcgtcctcctttagttaacagggtggaactatataggagcgcgtgcggctttgcgttgttttggttttagatagtttctcacgggccatctatatatagggtggtaacgatcaactaatagaggtttggatggctttgacagcttacctcttgggtaacagtctattggcaggaatagacaacgcaggatgtttgtcgaaactattgttttatagtcgttggatgttttgacagcttacctcttgggtaacagtccattagtaggaatagacagcgcaagatgtctgtcggaactgttgttttatagttgtaagaaagagatagacccactgttcactatttg

SEQ ID NO: 144484 - DNA, 556 bp, Zea Mays
cgactatgcttctcgtcgagctatcagcgaggaagacgaaggctagacagatacgagggctctttccactttctgtcatgcaggcgacctcggaccattatgagctgcggatccagggcgagggaaaactccgatgagaaattcccgtccacccacggcatcacgagttccgattcgacttcaattatcatcctcacatgctggtgacgctacttgaccggaatcctgacccccgaacgccatccaccattggattcgcccatggtggcaagctttctctctccctcgatctgtttccctgggttatggtgcttcctatccgatagagaggaagggggggcagcccgatatataagcgcagggatgaggttcctcccaggcggagtccgcacgaacggcgagatccacggcgagttcggtagccatgcgcgcggtggagatctagagaagcacgcaacagactgagcaaggagaacgaccagacggcgggtccatgagctagcgacacagcgcggggagcggctggagggatgggcccggattgtctacgagagaa

SEQ ID NO: 144485 - DNA, 578 bp, Zea Mays
ctataaaaatcgaagggtagctaacaaaaaatagatctcgtcttctaccttcagcacgtggccacgatacatggagcggatcgacggttttagcggtgcggacgagctaagcgcatggatggatcttcctggcgatgatgacggtgttaggtgtggcgatggcgcgacggcggcagcaggcgtggagaagaacgtgtaggaatgcgacgaggctcttcggtggggagcactggcgatgtcaagcgacgcagtagcaatcacggcgacgacagcgagcagcggcaggcgagtagaacagaggcgaggagatgctgggtaagctgttgctggcagcgagggaggctcgacggcgtcgaattggcccagcagcgatggttggcaagcgacagtgcatggattatgctggcagcaggaatggggcatggggaaagcgaaggaggtcgagcacggactcaggggtcatgggcacattatttatagcctagaaagggggaagggacgtccggtgaagtagaatcgcggcggcagccattaatggcggagaaaatacagatgggttaatgggaaagagaaactga

SEQ ID NO: 144486 - DNA, 371 bp, Zea Mays
gcaggaatggttttacgtaaagaatgacctaagttagagggaggatgtgatagggattattcaacgccctatatggtctcgcttcgggattaggaggccagccactgcacttgggaatgatgtgcaagcatgtcatacagctttcaacacagtgtgcacctacattggctcaagagacttagttcaagagcacattgcttacagagtgtggccacttgcaaatgggtgggaaatgctgaaggaggctgctgctggctctagccaaggtggtttagtctacctgaagtataccttcaggtacacgaggcaatttgatgaactgaatgatgactggctaaatgccatagaagcgactagtgacgagcttcttg

SEQ ID NO: 144487 - DNA, 474 bp, Zea Mays
gtgatctcagggggtcctatcgggatttgaggcggtgacgaggccggtcgacggtgaaccacggttccgagaccaagcccgactctggcgagaaatttgcccaactcctctcggcttccccggactttatctgcaacggtcatgatccgcgtaactttgcgagttgccaagacctcctgtagaccccagaacgcgcggcggaagagcgaatctacggcggcagcctgacttggccttttgcgtcggtggagaaggtgtgaggtttgtatggtcgctggctcaaaaggggtgagaaggtgaggatgcgctggtacttatgcaggggaagaccaaagccacatctgggatctcggagcaccctccccacgttcaaccaccatgccctgccattgtcacgttctgttgcgccggcccgaaaggatgtagctgaggagctggtcccgcatgtcattgactgggatcaacacgcacgcg

SEQ ID NO: 144488 - DNA, 479 bp, Zea Mays
ggcaggttgaaagagctaacgggatgatattggaggcactcaggaaaaaagtcttcgataaaaaatgaaaagttcacaggaaaatggataagggagttgccctacgtcgtttggagcctaagaactcaacctagtcgagctctgcatggaaatactcctttcttcatggtctacggttcagaagcagtactatctgccgatctcaagtttggggcgtcaaggttgatctttgaaaacatagcagaagccgaggctactaggctggaggatgttgatgtactcgaagaagaacggctgaacatggtaattcaatcagcacggtaacaacaaactctgaggcgctatcacgataagaccatgcgacatcgatccttcacagtaggagatctcgtcctccgccgaattctaacgggggaaggatggcacacgttgtcacctctatgggaaggaccgttcatagtagcagaagtcactcggcc

SEQ ID NO: 144489 - DNA, 1675 bp, Zea Mays
aatcactttagtaatgcaagtagaaagtctattagtcagaactttggtaatgatcttataacagacattcaagagacagataggtctgaaattcctcatgtcgacagggttatccactttaggtaaaagagtcactaacccaaagttaagtcttttaatatcaagcacccctccataaaaatccttgaataaattccacagatcaatgtgaatgagatcccaaaaatcttgaaaaaattctgctggaaaaccatcaggaccaggggcgctattgtgctttagaccaaacacaaccttcttaatttcctcaatagaaaaaggtccagtgagcaaagctcgatcctcatcatttaatttattcatatgtaaattcgacatatttatactagaaggaacagaaggaccaaaaagatctttatagaaagcagtagcaactctattaataccattgtcatcaacgactgtgtcctcctcatgaactaaggagaggattttaactcttcttttccctttggcaataagatgaaagtacctagaattctcatcaccctcattaataaatttttctctcgccatttgctttctcttacaaccttcttcagccatcatattttttaaattacattccatatcaagcttttcaagtctttccgagaccgaaataccagtactttcacttttttatctaagctatcaatttttgcaataaatcttttttaagtctagaatatcttccttccacattgatgttccaccctttcaacgtttttttcaatctcttatttttctctttccaaatatcgatacttgatcgacttctgaccggaagagaccaattattccagacaagatctttgaaatccagtctaagcttccagcaaagctcatatctaaaatctcatatcaagatggaaagagaatcaattttgaggcacaaaggaacatgatcagagaaagtcctgttaagaccagtaaccgacatattttttaattgaaggacccactctggactagccagaaatctatccaatttttcaaaggtgggaggatctctgttgttggaccatgtatataatctaccactcaaatcaagttcaatcagactatgaatatcaatgatagaattaaacagggaactccaactgttagttccccaggcttgtttttatcagactctttccttagaatattaaaatcaccgccaaccaatatgggatatttacatttggaacagaaagacgacaactcaataaggaatttttgaacagcaccataaacattaataaaattccaaatgaaaccattttctttatgaaccaaaagaacttttatcatgaaatcacccatttcagtttctctaacatcaaaagcatctgcattaaaacctacaagaaggccaccagatctaccatttgcaggcgtccaaaaccaggcaaaatttctattaccactaatagagttcagccaagaatcctcaaaggatttttattagtttcttgtaaaccaataaaatcaattctttcttttctaatcaattcctttaagaattcaatttttacctcttttcctaacccctgacaattccaaataagaccaatcattctgaataattgagtttgaagtcagaggggatccctttccctttattaggtgaatacctaattttggggaaaga

SEQ ID NO: 144490 - DNA, 556 bp, Zea Mays
acagagccgacaaaattggaaagcgaatcgtgctgtctacatcatttatcggtggtcctcgtgacatgagacgtcggtatatggatgctatggcccttgtgcggaagtttgggaagccagacatattcctcactatgacgtgcaaccccaattgggatgaaataaccagagagcttctccctatgcagtcaccacaggatcgtccggaccttgttgttcgcatattccgtgcaaaactagaggaactgaagaagagattgactaagcatcatattcttggaaaaatccgagcttatgtctatgtcgtggagttccagaagcgaggtttgcctcatgtccatttcctactcatcatgcagagaaagtacaagctaacttgtcctgatcagtatgatcaccttatctccgctgagatccctgacaagaagaagtaccctgaactatacaagatggttatcaagcatatgatgcatggaccgtgcgggttgctaaatcctaaatgtccatgcactaagggtcgtgcttcatacaaaaaccattatcctagagcttttag

SEQ ID NO: 144491 - DNA, 532 bp, Zea Mays
ccctgcgcccattcccaacggccgaagcgagtcgcgaaccccttgccgtggcttccgagtgagtccttcgggcgatgcgggtggatcgcgtgtcgggggaggggagggagagaaaccatgggcatggccatggcgcgtccgccgtcgggcgcgccaccaacagcgcctgggcgtcttgccggggatgacgagtgcttggccgtcgatccagtgatcgtgggttgtaagcaggcgtgcgcatcatgggagcaagagtgaatctgggccttctgtgcttaatcgaacggtcgtgatcagatctttggtatttgatgtctacaccgttggattctgatctgaggatcttgattgcgtaccggttcacagttatgaatatataatctgatccgtaggtagtcgatccaacagcccagatatcacgataccccttcggccgcctattatgcataagagcccccggattttcctaaaaacaacccgcggtccagtactggattcactgagtctgcgtaaactttatgctttagcccct

SEQ ID NO: 144492 - DNA, 424 bp, Zea Mays
gggaaggagaacgacggcggtgaatcgatgaaccgcggagattacggcggtggaagaggtgggggcggtcgtcgatggcgatcgcaggagcgaatgacggcgacggggaggaactgattattttagggtttgggtggacccgagctgaattaattgaaaggggtctgttgtgtgtgattcgttgaccatattagctcggtcggcccgcgggggagcggcgagggactgtgggtccactagtcagcgcacagtcagtgtgaaggtttgtttactgcgtgatcataatacgcataaatagctgtgcaaagtatcgtaaacagtttacaaaaaataattaatcaagaccaacgccaaagtacgtaatataataaatcctaaatgatatgtagttgttaacatcgaagtatacaatcataaataccaa

SEQ ID NO: 144493 - DNA, 418 bp, Zea Mays
ataggtgggagaaaatgatggtggttgtagaacgtctgataggaaaggttgagaggattgaagaggtgcagcaaaggttacttgggcagacggagctgactgcttaagttgctgggcatgctgcagaagagagagtgataatagcttgtcagatggaggaagtagggaaggagatggctaggatgaggttggaagcaatggcaagagatatggagggtttatcaggaggatcgatagaggaggatggggaaaacagaaggagggtgccacaacctgaagaacgaagaggaatgcagggaggtgtgaatggaggaataagggaaaatcaaggttgggagatgggggagagggagacaaatcgacaagatgttctcaaactaaatttcccttgatttgatggaagagaaccagccatttg

SEQ ID NO: 144494 - DNA, 469 bp, Zea Mays
cggcggagatctcggttgggcgactccaagatagttagactagctaggagttagttgggagtcttgcgcacgcaatgatgcctgagagagatggctggcatgcagggcccaagcaccagcgagtgatggaggcgcaggatccatggcagaagtccgcaacggccacggcgtgaggttgatgttgaccgcgtgggcccaacctgtcaatggcaaaaggcacgcagaccgtgtagtcgggacttgtccagtggggcccacctatcatccacgaagcgcgacggggcaatgcaatgttgaggagcgcgcatgtggtgccagagattctccaaatttattcatatatcacttagcacaattacaaatcttgaaaggggcaacactttgacattttttttcgtgacacataccgatccttctagctaaatgatatattattcttccttgtcagatgtaccaatcttcagggctg

SEQ ID NO: 144495 - DNA, 798 bp, Zea Mays
gaatccgtaaatcctaggattatgaatcctatccgtgggtactttgagcctataaatatcagcctccacgaccgccccatcagggtaactcaatcgtggtgccaaacgacatcttgtaatctatcgcggtattttgggccgccaccgtcgaactccgggtgaagccgccaccgttgttcgtcactcccgcctccgctcggcgtctgtggtggggtctgggagtgccaccggtgtgcgtggatcgtggtcgggcaagacctcagccgtggtggccatcgatgtcctgtgaattgttcatcggagatccaaatcgtcgtggcgccgctttccatcgtgaccggcattccctgctgcatcaccggcggtaactttccttcacctgggttaacaatcggctgctctctgtgttgaatcattttgcatagggattgctcatgggtttggccgggtggccatcgccggtgtgactgacgcctctgctcggccgtcgggtatggacgaaacacaacgaccgtgggatcctattcaacggctaggattagatgggggtgtccactactagatcttggacgaacgggtcagattagaagtagtatacgccttcaccatattatatctgagtcgtaggtattggaatggttgggcaggattggatcgtggcgtggtcgtgtgaggaccgctgatccatgatccaggggccacagttgatcgccgttccctttaaatactagggtaatccgggctgttcaactgtgatccgatggatgagatccgaggataccctttcagccatggtcg

SEQ ID NO: 144496 - DNA, 457 bp, Zea Mays
gccatttgcgcttgccttctgcctttgttttcgcaacctgagggagtagacagagaagagaaaaccgcgcacctcgtcccctctgctcccaccgctcccgttcggcgatggctgataaggcgaccgtcattccgccgcgcgacccgtggcctttctccaccgtcactgcggaggatttgcaggcccttgttaccgagggtttgctctgtcctctctccggcgggccatagcctgagtggttggcccctgggagcgaggccgacctgactccgccgccggggtacgtggtcagtttcacccccttctatgagcgggggtttgggatgccggtgagctgcttcatgcgggcgctctgcattactgcggggtggagctgcataacttcaaccccaactccatcgcgcaggcggctattttcgtggcggtttgtgaggagtttatggggattgacccccac

SEQ ID NO: 144497 - DNA, 537 bp, Zea Mays
gctctaagctttccacccgggagtttaggtgggtgcagtgggaggaaaggtcatcatagtggttatcgagagtgtggagatatccggccatgtagacgatggtggggtcatcctcagtaggatctcttcctgacagggcctaaagtcttttcctccaggcaggggtatttttgttgctaggtgggatgtaacaaaggggtgtttcaaagacctccctgctgtagttttggcatagctgtcggagggcttttcgggcaacattttggcaagtgtctgggaggcggtgtccggtgaaggtgacttggaaaggagggtggttcgggtagcttcggctttctcccaggtagactgccatagagcacttctcagttccattctcgtggtattctttccagacgtactccggcttcttgcggatccccatgcgaagcgcgcaactccgcaagagatgagggaatccttccacctctgagcagtaggatgtcctaatgaccaaagagccttccatctggtagaggaaaagaagggtctgtaaat

SEQ ID NO: 144498 - DNA, 509 bp, Zea Mays
ccacggccttagctgaggttaaagaagcaatgggtttgaactctatccatttggtgaatttgtcgattgctaccagtacatgagtgtatcctccttgagctttcttgaaaggtccaatcatatccagtccccagcatgcgaatggccaagttactggtatggtctgcagttgttgtgctggtagatgttgttgctttgacaagtactggcaagcttcgcacctctggactaattcggctgcatcgcttttcgctgttggccaatagaatcccgacctgaagatcttcccgactagtgtcttggatgctgcgtgcattccacattgcccagcatggacctcatctagaagttgcttccccgtagatgagagaatgcatttcatgaggacacccgatgcgcctcttctgtatagtgtctccccaatgagtgtgtagtgaactgactgtctaacgatgcgctcggctgcatttttgttatctggttcctcttcattctttatatatctgatg

SEQ ID NO: 144499 - DNA, 490 bp, Zea Mays
cctgatgatgttagcacggaagccaaaaagatggcccatttcttgaaggggctgagaccagaactcaaaactatcctcgccagccaagattttctcagtttttcgcacctctcaaataaggccatacaggtggaaagggctagagaagaagaaaagggtcacctcaagaggaagtttcaagttcttcgagctcagcagcaggacaggcaccagagagttcgatcttttgggtttcctcccaaaggaccaagcttcaacaagccagcagggtccgctccgtcacgtttcagccagacgggtcaaagttccctccacaccccatctattgcaagcaaccaacctccagccaatgcttgttggcactgtggagacctgaatcactacaagaataattgtcctcagatgaagacattcgtacctacctactccaactcaatgaatggccccatgaatgctccagcacccgcctccaagacaccctcctccaaca

SEQ ID NO: 144500 - DNA, 356 bp, Zea Mays
gcaacatatcattggtggtaggtaagaaacaaagcaggtggataaggactgaactaaacgagctttgctatctatgaattgataaaagatttgtcaggagtaaaatagaagagtcacgaggtcgaaagcataaaatgaaggtatatgacagatgagagtgagcaagtgtgattaggagtcaatttgttgaacgtcgattgagcacaaacctcaatgggaggaacaatgggtactctctgagagccaactctgaatgagtcattttggtgaaaggggatatcaaactacaacacaagtactagtatggttctagatggcacaaaaatgatgagtagcaaggagctatgagtttggaa

SEQ ID NO: 144501 - DNA, 850 bp, Zea Mays
tcgcggggatgtgtgggcataagaacacctgccaccgcctgttcctcaaccatccagccgcgtccagagggagaagaagacagaaagtgagagagagagaccagggccgccacgcgatagactgggcgttcgcgtcactggtgatctgagtccgggtcggggtgcgcagcggaagcggggtggtgccactcgcgggcgcaacggaaagagccgggcgtcgcagtggcgagaattgctcacccgagcctttgccaccgctggaaccgaactccgccgcgacggggctgcccacgttccaatagtcggtgagatatcctcccctagccctgcgatcttctctacttcgattggagcccgtcaggatggagttctgagcggatttcgggctatgggttctagccggggacatcctccgtcgcgttcagcgatgccgcgccgccgcaatgtcgtctgggcggggaagacggccttctggccgttgatcttggcgtgtgcgctgtagatcgtggcgcactgagcggctgcgatggctcggtgcttacgttgaccgggaccgtaggatcggaattgatcgggcacgattagatcaggggaaattaaatccgagccgttggattgtgatcgggtggtcctgggcggctgataccccttcgcggtgcgggttttgcaaaagaacccttacggttttggagattagaacccgccgtccactgcgcattaggcctgtgtctgtgtggcttttgcgccgttgcccctgcctttcttagtattgctgcgcccagtccatagctctgagaattcaattatttaactttagaaattgatatttaatgcaaaataaattctagaa

SEQ ID NO: 144502 - DNA, 581 bp, Zea Mays
tgttgcagctgattttgggtagaggttgctgacttctgggccatgatttgggatttgctacatgtgaggtatctcttgttttgttgtgccttgatcttgcgatagtgtaggtcatcgaatcttacatacttcttgaatagctgatataactcttggagcgaagacggggggggtctcgagtgcaatggctatactggtggcctgtgcgtaggccaattacaacgtaatggatggcgtctccgtactcgactaatggcagttgagacttaagtgacagaaacttgttgtaataatcttgaattctctccttttccaattgtcagtataaggatagctttgtgaagacatcaatttgttgactataccgttgaagttgagcaggaacttctctcggagggctatccatgattcaattgatagcaagggcaaccttgtgtaccatgttagtgtggggccctcaagagagatgatgagtgtcttgtccatcacattgttgtcgcctccgttgtatgctaccggtgcctagtaactcctgatgaattttgaagggtcagccttgctgttgtatgttggcagtttcc

SEQ ID NO: 144503 - DNA, 962 bp, Zea Mays
tatggcttcaccggtgattttttgctacatcgccggtcaagccgtattcagtggacagggagcgtcgtcggcacataccccacgtttacatgacctattgaggtaagggaaggcgggactcaacgggtattcatcaccgaatatggggccgccaccgaggatccatacccagccatgggcagacctcactgctatcccatctctggtattgcttgtcttcgcaactttgccctattctcctcatagcatatgacctagccgcactcgaattggctcaacagaacgccataatggggcgctcaccagcgcggcttcgccgtaaaagctggtggcatcgggtgcccggcacgcgggtcggtggagaagatgatgcgtgaaccattgatcgtggcatcaatgatcaggagttgatctcgtgtgtttggagatctaaaccgtggttctggcaaatggcgtctgtgatttaattgtgatatagcggttccgccgtggcaggtggtcgttgatcgttgatcggagggttgtgagcggtttagatctcataaaatcctggtagtcggatctcgatccgatggctatcctagtgtaccacttggggatggttgggatataatcctagccattgatgcatgatccatcgaccctggtaaccagataccccttcaatcgcgagaaacttgtgaaataaaccctttgttttaaagtaatcaactcgccatccatcgttatttagagaaccttacaaccagacccaaaattttatgaaaggggccctgtagtctttggggtttaacgctcagtccaaatgatattaaaattctataaaatgcagtaaaggaaatggatttttaatatagaaataattctagaatcttgtaattaattcattttaactcctttttgatccattccagtggcagtattctcacaataatattgtttatcatctagtaaccatgtat

SEQ ID NO: 144504 - DNA, 463 bp, Zea Mays
caatagccatcaggccagtctgaagatgtcaccttttgaagctttatatgggaggaagtgcagaactcctttatattgggatcagactggagagagacaattctttgggcctgaactgattcaagaagcagaggaacaagttcgtataattcgggagaatttgagtgtggctcaaaccaggcaaaagagctacgctgataatagaagaaggccactggaatttgaagaaggagattatgtgtatctcaaggtctcaccacttcgtggaatgaggagattcaaggttaagggcaaattgtcccctcgctatattggaccattcttgatctttaggagaattggagagatggcataccaacttgagttacctgctagtctatcagatgtgcataatgtgttccacgtgtctcaacttaagaagtgtctccgtgttcctgaggagcagttacccatggatgagctc

SEQ ID NO: 144505 - DNA, 352 bp, Zea Mays
gatgtcaagatactcaacttttctgcctcgacgaatctccaggctagcacctccaacaagttgatgctgtcctccagccatcccggggcgacagtggtaaaggtacttccaaagcccaaagtgaggaagaatcctaaggaagacctcacaaagatgaacatacatagcaatctaaagtacataattgggatttaaatgggtgagattcaaagaataaaaatcgagaaggccgcggaagaaaggagaaactgacagggccagtccccggatgagaaatgacacgaagataacagcctcatgagtatcctctatcgagatggtaactccgcatcagattcgccaggagcacaat

SEQ ID NO: 144506 - DNA, 526 bp, Zea Mays
tgcggccacaattttccagaaggctagggggtcacatgtcaatttcaggacctaactgtgctaatctttctatacccggggatggcgggtcaattaccagataccccagggtctcattaataaaagtggtcggctgaagaggtattttgaagtctcggccgcacgattagatcagagtggcccagattagctcgagtcttgagtgaaccgttacgcacatcagctattgatccagagatctgcgtcacagatttgatgaagttttgttttcctatggatcgtccgatcaccaccccacggccctgatttatcctccgaggaggtatctctacttcttatcataaccgccagccctgagatggacggtgcagagggcatcttctacaaccgtgccaggacgcacaaccgagcacaatggtgccacagctagcgcggcggcgcacagctcccgcgacggcgaccatggtcagaatcccgccatccggcgaactagtccacaaattcatcgtaaacgcgctatagggag

SEQ ID NO: 144507 - DNA, 365 bp, Zea Mays
ttcgtgttttaaatgcgagatgtgcgaataatcggttagtgtttcactcgtctaatcgctaagtgttgtcataaataattgcgctaaaattgggttataagaatgcagtggtcacgtggtgtgtttgggtgtgacaagtagattaggagtgtggggtctgtcgaagcactgtgatgtcaaacatgtatatcgaagtgcattgtggtggtaattgcgttaagttaatcggtagtgtctcgagtgcatgccacagcatggttgtatgcgagacaaggtaacataaggtgtgctcgacacgaatgttcggtcgacataagtaggaaattgtgtttgcttaattagagaggtggtgacatgccgaatta

SEQ ID NO: 144508 - DNA, 571 bp, Zea Mays
ttttcagtgtgaaaacagcagtgtgtttgttgttctgttttcagtgtgaaaacaacagcttctaatctgttttcagtgtaccatcataatcttctgttttaggcttcaaatgtgttttcagctcatgtgttttaggcttcaaatctggcacggcagtgtgaaaacagcagcttcaaattgtggtgtccatttgcaagctgaaatcagcataccaaatgtcttctgttacagcagtccatttgcaggtgaaatcgtggtgtccatttgcaagctgaaaccaagctgtttccatttgaagctgaaatcttctggacaactgaagtgcccagcttctgtccgaatgtagtacaaatggacagtaaacagcttggtgtccaaattctgttacagctgtccaaatgctgtccacatgctgaaatgctctcttctattttctagaatgcccagctactgtccaaatggactgaaaacatgaaactgaatggacatacacaaataaattcagaattttgaatggactgaatggactgaaaacatactgaatggaaatattaagataaccatacaaaag

SEQ ID NO: 144509 - DNA, 282 bp, Zea Mays
gtagtcgtgtagttggtacgcggagcctcgggcgaaccgtggttccggccctgtgtgatttagggaagatagtgagcacgtttgatttgtgacacaagcgttttaggtgtgattaaggatgtactcagggtacccctaattatggcacccgacaagtaactcacggctgacaatcaccttcttagaatcagcacacattaaacgatatcctttgacaccagaaccatagccaacaaaagtgcatttttgagctctaggtactaccttcccattgttaacatg

SEQ ID NO: 144510 - DNA, 636 bp, Zea Mays
tagtatttcgcttatctttcctgggtctactttaattccaccatcagtaacaatatgtcctaggaaagcaacttccttcagccaaaaatcacacttcgagaactttgcatacaattggttgtcacgaagcttttgtaagactagtcttaaatgatcttcatgtgcttcttcattcggagagtatatcagtatgtcatcaatgaatacgaccacaaactgatccagatattccatgaatactttattcatcaagttcataaagtatgctggtgcattagtcagtccaaatgacatgaccaaaaactcatataatacatatatctcgtagtgaaggctgtcttgggtacgtcttctgctcgaatatttaactgatgatatcccgaccttagatctattttcgagaatatcttagctccctttatctgatcaaataaatcttcaatccgaggtaatggatatttattcttaattgttacttcattcaaacttctataatcaacacacattctcctcgaaccatctttcttgctcacaaatagaactggggctccccaaagggatgaacttggacggatgaaacctttttctagtaattcttctatttgtttcttcagttcaactaaatctttgacatcc

SEQ ID NO: 144511 - DNA, 633 bp, Zea Mays
ttcatacacaggattagagatcttgtctccatccttgccgttgatctcaacagcaggcttgactgccttgccagtgaaataaccttcaaggcgtgcgacgcacattgtcgcggtgacctgagctttccatgttgtataattgtgtttagcaagtttctcaaaaactggattggtgatcatgggggcaagtcctgacgtgaaggaggaagagccagccatatttctgtggattggatcttggttaagctccgattaccatgaaagaaatcagaggcacgaaagtattagtggaaacagatgcacaatctttgtgctctgcctttgtgttatatagaggtgaccaatgcgccaaggattacaatctgcaaccaccggatatgcatggccaaagatagctcaacaaccaaatctgaactaacatgtgaagggttatcttgtggcatacttatctcaggttgttgctgtttacatggatttacatagataacaaccaaactattttatctagcagtagctactgtgaggtattggaccataacacatggtctcgcgggtactcgtcgaaccgtacgatggtacatagagatggttgttgtagttacaacatctatatctctccttgggagctacaaa

SEQ ID NO: 144512 - DNA, 822 bp, Zea Mays
ctctctccgacctcgacgcccctgtctttgaccgcatcttggtgctcaatgtccttcggggcctaactgcctgagtcccaagtatgccaatctccggaccatcatcaccaggatgatttggtcttgtaaaagattgtcgcagacactgctactcctgactctacgaccaccgctctgtacacctctactacagctttgtcgactacctcatcaccttctcgtcctcctgcccagggaactcgaccacctacccagggaagggtgccgggttcaagtgctggtcgtcgcaacaagaatcgtcgtcacgacaatgtcgtggtggtggctctccttggcattccgtctacaatccctggacaagtacaatccacatgtggcctagatccatgtctacaggttcctctcctcgccctagacaacagcagcaccatcctcctgctccgtcgcagtcctacctggctgcgccaggactgcctaccttgcagctggcctgctcggacccctcctgtgcccctgtcggcccttcctgcaactcctgcaacatctccagctcctcaaccttggcctccttgggctggatcttgggatcagcgagctctcgccatcaccttcagtacaatgacacttcagccaccagccaccgttactgattggattccggaccaaccataccacagctcatgctggtaacatctctctctttcgacctcctggcctcgctactccttctatcattgttggaaatggtgccactctccctgtcacctcagtaggcgacacggttttgccaggacctttatatcttaaaaatattctccacac

SEQ ID NO: 144513 - DNA, 385 bp, Zea Mays
cgaaggggtatccagggtgtctggccatccgatcacacctgtgcggcccagattatatcgaatcccaactacatgcctagctgcgcccacaaccattggatcccagatccacggcgcacggcgcacgatgaccttcactccctctcggccacacgatttcctttcaacgcgccagatccaaaacgacgaaggggtacccggattctaatcatgaccacacgttcgaggatcaacggtcggcacaatatcagagccaggacctaatctaaccctccgacgcagaatcaacggtcagggtgctttcttccttctctcgctcacctaggcaaatcgcgccaccgcctgtggttgcccatgacggtgcgcacaccaccggcgattcacg

SEQ ID NO: 144514 - DNA, 708 bp, Zea Mays
tggagctgtacaaccattcaacagttgtagcatatgcagcaatgcgacattcaatcaacagctgacattgaacaccttagcaaagaccaaacagcgagcggcagcagcctggaaagcagcttaaacccttacacgaacagcacacaggccaaaagagttttgcagcaaagagtttctgtgtcgctaacttgctattgcttgcttgcttagactggcttcaacggcgcacgctccggtatctgtggcggctacagtttaccgccggactgttcatcggttcacgctaagtccgctacagtgcaagcggatgacagaggacaccgccagatcaaggggtggtgcagccggccctcttcccttgatgtgcgtgcacggtggtgtttggtagtggatgaaaaattggtaatggatgataaataggtatgaaaaataatattgtatggaggtagttggatatagggggagaatttaggggaaaccgctgcagagagtgaaaatataggaggagaccggttgctgacgtggcggaatagtgggatatagggggcaaaatatagagggaaccattgaacacagtcttattggtccttccttgctcgacgttgacagcacacagccgcacagcaggtgccaggtacttgtacggacgctatcagcaataagccaggaagcagctaagcaaggaagtgaaggaacacgccagcaact

SEQ ID NO: 144515 - DNA, 642 bp, Zea Mays
ggatcttctttactgccacacatgtgaaattgcacaggatcttctttaccccggcggcgtgggcggtctgaccatcgatccaataagaagcgaaggccgacaggtaatacgcacgagcgctggctaccaacaaccttcaccatgaaagcaagacgtagagcctagttcgcagtttggcacaccacgagtcccagtctgtgatccctcgcacggcacgatggattgattgattcgtcattggttgcaaggtcaatcccgcgtgcccggccgaaacgatctcgtccctggcgggtccggtctcgtgcgcgtgcagtagttagagagaaatttcgatgtgtgcgcgtgcagtagttatgctctgcaatttcgtgcgtatacagtcagagagcaatttcgagatcgtgcgcgtgcagtagctatcctctgcaatttccatgcgtgcctgcagtagtcagagagcaagttagaaagcgagccgagcctttgagatgttcttggatgtgcttagtctatctacattactttcttaatagtttgtagttctagacagtttcaggctgcaaccaactttagtaattgtttgaagtattcaacttctttcatgaattttaggaacagacgactcttttgtttattgttatc

SEQ ID NO: 144516 - DNA, 456 bp, Zea Mays
cgctggggacctgccacagtatgtcgcccttctcgggtagctcgaggtcgcgctccacttgctcaccgacacctgtggccttgccatatagtggttagctgacattgtcgcaacactggcttggaagagaacacgtgaggccaagacgggcgacgatcacgcccgcatgcatgactcgtgaaactagggcggctctggcgcacccgttgggcagcagccacaccttttttcctcctgtacacgagtcatggagatcaataaagagaggtataggaacgaggttatagtatgacgagtgggtccaaatgaaccagtaacggtagtagatggcatcagtgacggtgatggcttttaagggatttagaatctaaactaatggcatcgaaggaaacttataacttttgatggcatatagagaattggtataggttatgatggcactgagggaattttctc

SEQ ID NO: 144517 - DNA, 311 bp, Zea Mays
atctttctagcacaagagttaaatttgagtctcctaagtgtatcagaatgaattgacaagttaggcttagtaattttaccctctggacaaaccttgatctttctcatgacaattatagcaaatgcggtgcttgtccttacaagacatttgcttcttgttttcatccttattaatggtcatctttattgatggtgcaaatttctctatcttcttacgagggcatgattcctcatgacccttttctttgcatgtatagcatctcataattcctctacattttcttttcttgaagtacatggagtcattattag

SEQ ID NO: 144518 - DNA, 676 bp, Zea Mays
atgaatcaaaggaattccaagatacatgaaaggcaatgtcccaattccacaaccaaataaatgtgaatattgcaattcatattccttagctaccccatagcaaaatagctcacttttgtggaaatttattttaagcccagacatttgttcaaaaacagtcaaaagtaatttaatattccgagcatgctcaagattatggtctaagaaaaccactgtatcatcggcatactgaaggatagataaaccctctggaatcaagtgcggaacaattccatggaactgattttcctctttcgctcttgcgaaaagaatagctaacatatccgcaacaatgttgaataatattggcgacaaagggtctcctcgacgaaggcccttgtgagtataaaagaaaggacctactccatcattcactttaacaccaacatgacctccagagaatattttttggatccaagcgcaccaagatgatgagaaccccttcatacgcattgcttgctggagaaaattccatttcactttatcataagctttctcgaagtctagtttaatgataacaccatctaactttttcctctgtaattcatgaatggattcgtgaaggataataaccccttcaagaatattgcgaccaggcataaaagctgtctgggaggggctgacaattctgtgtgct

SEQ ID NO: 144519 - DNA, 354 bp, Zea Mays
ggctacgtcttcctcgtcgtggccgcggctatcgtattcatgaccaattgggcgctcggcaagcacaggcgtctcaagaccggaaactttcctgctgaccgtcacttccgtaggcgtagcttgctctctctttgtcgccgccggtcccttggcgatcactgacctgtacgtgctgagagcagtgaccagccccaattgcagtgtctctccagcattccagcgccagccagcgtaacagctccaacatctgcacactggaggttctccatgtaacatatttgacatttcaggacgtataaactaaacgaatccacggccacacggtcttaggatattctctctctctctctcggt

SEQ ID NO: 144520 - DNA, 884 bp, Zea Mays
gaaaagatccttgggcccctggggggcactagtctgcaaaaggacgaggggaagatctgcccaggaaggatccaccctcagatagccctgaggcaccgagcccggggtcggacgaggcggagccagaagggggcttgggcgaatcgagaggaatccactcgagcagatttcacattaactgcatctggtgccaagccatagtgggagagtcggttctcctcccactaatgacctacggggccaaggcctacaacccactcttgacctatcaaccctaggcttgagtgcactgaccgtctatagggcccacaacatgacgagcatcgccaagacctaggctatggaggccaagggttggtgtggcatagagacgataacgatgatgtcgaagctcttcgccacccatgtcgtcatccataaagagcgcaaccaggaagcccagacgactgaggcacctgcggataaccatgactttaccagggtagaacaccccattttaccacggcatcgtagatccttccttgatcggtagtcgacccccaccttggccaataaaaagggagaggtcggccagaagacacatgaagacatagaaaaacacccatatacgaccacactagaagacccagaggactacagaggccgaagccatggagcgaaccaccatgaagcccaaggcttagcagagagcaccagattcatagtccttaggtctaaccacgcataagagacctaggaggtcctccctctctcgcccacttgtaacccctaatacgagcattgagcaacaaaggtgccagtagcgcgtgcgtcaaagactagatgtagagatattctacctaaatcagtataaatcttgtgaccatagggcacaccatctgaac

SEQ ID NO: 144521 - DNA, 279 bp, Zea Mays
agcaagagtcaagaccccaagagcgaactttcctttcctgcgatggcaattcgcatgtggagtaccggtgctgtggtacgttgctccagtaactgcgctgctctgaactgtcattctatgaaaggaagaattgtactgtaattcagttcggtattcactgtcattcggcgggggttgtttttcagtttcagatgaagagcttgtcctgttgcctgttggactatacatgtgcaattatgcagtatccggatccaattgtagaggttgactagtctggag

SEQ ID NO: 144522 - DNA, 446 bp, Zea Mays
ggatagggttcctcgctgacctaatagtaatgggtaaccgagatgcgactatagatgtcatcctagggatgaattggctaaccaaatatcaagcaagtcttaggtgtgataagaggacggtgaagttagtgtccttatcaggagaggaagtgttagtggagttggtcttgtctgaaccaaggaaatgaagctatcaccagatcaccgcccatactaaggcaattgggccatcaaaagctatcaatgtagtatcggaattcctagatgtgtttctcgaggcgttatcaggcatgccacctgaaaggaaagttgaattcgccatagagcttatacctggcaccacccctatttccaagagagcctatcgagtgtccggaccagaattggtggaactcaagaagaagattgatgaattgttagataaaggctacatcagaccaagtgcc

SEQ ID NO: 144523 - DNA, 514 bp, Zea Mays
ctagacgcgcagggtagcagaagacgtctcaatgtagacgaacacgtcgagcagtgtcgtgcagtcgccggcgtccttcacatcctcgcctggttcgtcctagtgctccagatgcagcacctccgaggtatccacacgtacagggaggaagcgccgcgtatcgaactgctaggtttgcgacgacgactatgcgagggtgagaggcgagcaactactcgtttgctggttacgaattagggttaacctaactacgccccggtcctcattatataggcgttatggtgggcttctgactccgaggcccaccagtaaacctaaggcccaatctaatttcggatccaatccgagttaggcttccttccccttaagtgtgtgaccctataggttcacgaacaaatagacatggcccgagtactcttacttggccaaataattgacaacggcttctagcaaaacatgtcaactcctatgcgcacgtaaagatcatatcagttgaaccattgcaacatcaagt

SEQ ID NO: 144524 - DNA, 389 bp, Zea Mays
tcgaacagcttgcacatgcatgtgctcgggcatgctttttgacacaagctatataaggcagtggatgtgggggaggccatgcttctagaattccacaatgcataacactgcagaaacattcatttaggcagatgtcatgtacaacaaggtggaagcaacacaaatcgactttggatgagcgacgtggcaaatgactcttaccagctataatgtgaccaaatgtcgtcccttctctagctaacgtcggctattagtttctcaaccttcatatggaaaccagaccaccagatcagagcgatcgtagggttgttggccatgctcaaaatggagggcataagctatttcattcaaccttgtgttacatgtgaaagttacaaaaaaattcggag

SEQ ID NO: 144525 - DNA, 756 bp, Zea Mays
ccgcgcagaacctcgagctagagcatcttagactagggcatcttagaggacgacatcttagactagcatcttgtcatatgcttgactgccttgggcagctataaatatgtaacccaacgacttaggtgggtatggtgttgtgtgagaaataaaactagaaaattgtcctaactcctagtgtcatcccctcgatgagattaagagttccactacttacagtccatccgacagtaggcatgcgtcggcacggccacgtcggtgaggacatggtcgtcgagggcgtagcggtggagagtcagtagaacctgatcacgtcagtgagtgtactgtgctgagtccgtatgctggggagccccgccgcctgaatatggaggctgacgataaccgacacgtcgggtgcgggaagggcgacatcatcgtcgatcttgtgcacagagtgggagtcatcacccgggacgccccctgaacgagtggacgggcgcgatgagctggcactcgagggcgtcgattgttgtgtgctcttgagaggtggttatcaccgataggtgactgtaaaccggtggcgagagcgtgtcgagccacccctcgagagggtaagatccatcagtgaagggggagtgccactcatcatacctatgtagggaaagtgaggaaccagaagctcggcacgacgggcatcgacatcgacagaggcacatgtgtcgcaggcgtggccttccgtagcgtggtcgcgtagacgacaacatggaggcgggt

SEQ ID NO: 144526 - DNA, 395 bp, Zea Mays
ttccactccaccacagccacaacattcttgggatcaaccgcaatgccctgttgattaatcacgtgccccaggaaagccacttcagacagccaaaaggcacacttcttcaacttgccatagaactgattcttccttagggcacccagaacgagacagagatgctgctcatgctcggcctcggtctttgaataaatcagaatatcatccaggaacatgaccacaaagtcgtccaggaattcatgcaacatcctattcattgcttccataaaagcagcaggggcattagttaagccaaaagacatgactatgaactcataatgcccatacctggtgcaaaaagtggtcttctcaatatcctcctcacgaatcctcaattgatgataacccgagttcaa

SEQ ID NO: 144527 - DNA, 559 bp, Zea Mays
acagtatgcactggttgctcacacatttccatcatttcagagactgctcgataaggctcttgctattgaacacaagtgtgttcaattgggagatttgaagaggaaggccattacccaggggtagggtagcagtagtgttcgtccttgctatgttccgccacagggtacaccgactcgttcaggaggaggaccacacccagctcagtacactccataggggtctccacggacacctcccactcatcaggctgctcccactagcaccccgacgaggtctacaggacagaagacaggccctacatgtttcaagtgcagtcaggttgggcacaatgctaatgcttgtccggtggggaattctggtacaccaactcagggcaagcaacagactcctggcaagggatactctatagccagggtgaatcaagtcagcgctgatgctactcctaatggtgctgacatcgcacttggtatgttttatattaatgcaattcttgcaacaatattatttgattctggtgctacacattcttttatgtctgctcgttatgccaacacaaat

SEQ ID NO: 144528 - DNA, 699 bp, Zea Mays
ataacttctgccaaaggcctgaagatttggagggcaacagagaagacccacgacgcctaaactggtagacttcgctccaagaggcgtctatgtaacagagattaccatcggcagggcccacctataagtggcttgggagggtatcaactgtagtgtaaccgagaaatatatggtcctgtaattaccctgttatactatgtatggcgggaatatagttggtagctaggggcattacggtacttagtttaccaacccatggctaccccgatcctgtaactgtctggacacgcttagtaatacaatctcgccagcagtttgtcacttgattgtgctactcactccccttgttcccgagtgttgggttacgaattcccgtgctaatagctggttttatcatgtggggagatagatggtggatcagaataaccaagaacatgctgtgatgcgaggagggcgacaaacctgttgtagctgcgaggagcgaggcgaaccgactgcggcgacaacgaggaagatgaaccactcttgaggtgtcggaggcactcactctaccgattggcggctgcaatgtccgtgatggaaactcctcgttcggctgcaagggaaagacgagccaaaagatgggatgataggggagggcaatatggtcacacaagggagtaaaggaaatagagaaaataaaaataattagaaaagggt

SEQ ID NO: 144529 - DNA, 333 bp, Zea Mays
caagttgtttatcctggttcgggcgagagaaagccctacttccagcagagggaggacgagacttatattacttgcatctaagtgcttgcagtagggagtacaaacaggtcgagaggggaggatcccaagtccctagggttgattgaggcaagtgtcaatatcgcagtggaggtgaaaaccgtgaagtgttcgcccgcctccctgaagccacagactcccctatttatagcctcaaggagggctgccatgagtgtcggggttggccgggtatgatgaggaggcaaggccgagcaccttcagacggtatggcctgtggtatgaggcttgtacttg

SEQ ID NO: 144530 - DNA, 737 bp, Zea Mays
cggatattgattcgcacctcactctgcctgattccccaagtgctcagaggattcgctatgtgcttggatggccagggtggtgtgttgaatgagcaatggggtaggtgcacggtatttattctaagcaaagggtaatccggagtccgaggatcacgatcgcgattgatttggtgattttattggaatcagttacctcgcccagcgctggaggcggccacaacagccccaagatcggagcaggcgcgaacgggagggtagagcggcgcgcccgactctgtttacctgggagggcgagtgttgcgcagggagaagcggaagatccgatttttttttgttgactgggcaaggacgagcatagccgatccgatccagagctccacgcgaaacacggaggtccagtggagtcacatacgcccaggccgccgccagaagcggagttgatacgaatcgcgacatcgggaaggggacgatccgccatggggcccacgcaccagcgcctagcgagagaaagagagctcgtgccctagccgccgtagcactcgccagggaatcactcggcttcgccgcatccaccgtccaccagacgccaacactgccatggttcggtggaaaggttggggatgacgaccgcgccccatatgtcagtctcttgaagcaaagagaaaatgaaaaagggaaggaggtggagtaggccgcacaggaggaaaccgcaagtgggctgaataggtggtctcggc

SEQ ID NO: 144531 - DNA, 1020 bp, Zea Mays
ccgggtgtgacatacttcacaggcggccacatacttagaaacgtcaaccttcatccgcttccaccagaagttttgcttcagatctcggtacattttggtttcgccagggtgaacggtgtaaggcgttttatgagcttctctcaagatatccatcttcacctatgatttctgaggcacacaaaggcggcccctaaaacgaaccaaatcattctcatcaatggagaactcccggggttaaccatcgcgaaccctctttcgagcttcgtgcaataaatgatcctgctgctgagccgcacgcactctttccatgtgggaagattgaataagcatacgagtctcctcactagcggtgccgacatagcacaaagcgatccccaaacggtccagatcagcgatcaacgacaaggccacttttggaaccccggacctgctaagggcatcagccaccatatttgccttccccaggtgataatgaatggacaaatcataatctttaatcaattcgagccatctacgctgcctcaaatttagctccttctgagtgaaaatatacttgagacttttatgatcggtgtaaatgtcacaagcctcgccataaagataatgcctccacgactttagagcaaaaaccatcgcgaccaattcaagatcatgagttggataattcccctcatgcttcctcaactaacttgagccgcaacattcttgggatcaaccgcaatgccctgctgattaatcacatgccccaggaaagccacttcggacagcctaaaggcacacttctttaacttgccatataactgattcttcctaagggcactcagaacaagacggagatgctgctcatgctcagcccggtctttgaataaatcataatatcatccaggaacatgaccacaaagtcatccaagaactcatgcaacatcctattcattgcttcaataaaagcagcaggggcattagttaagtcaaacgacatgactatgaactcataatgcccatacctggtgcaaaaagcgg

SEQ ID NO: 144532 - DNA, 459 bp, Zea Mays
cagaggccttacttcaggctcgcccgccggcttacgtcacgggcaacaagccacgtggtagcatcgggtctccgcctgagcgggaagcgcaagtgcacaggataagcctggacacgtgtcagtaccagacccttgcttaggccagggtatcccctgtcctgggacctcgttatgggtggtccgaaccttactcggagggatccggaccccatccaagggacccgacacgctacttgggagtcccggaccgtattcgggggtccgggttgtgcgtacaggggtccgacgcttcctcgtggaggtccggtccaactgattgcaccctgggatgtatcatcttttctggtcacgtggcgccccttgagccatccacatggtcgggtcgggtgttgttcaccgcgcggctagagatcgccgcacgggcaccgtgtcttcatactatagtaaggggtacccctg

SEQ ID NO: 144533 - DNA, 739 bp, Zea Mays
ctcgccgcgggtggaggtcggcgaggtgtctgatcttcccagtgcgaggaccaagtgccggcgacgaagggtggtgtcgaagcatagcgttggcgaggttttgcgaagtggtaggcgccgtcggatggggatggaacgggaccatcttcgagtagatcggtttggtaaacgagagctactgtcttcgtcgattgggatgagcattggtgagggggatctgcggaatctttttgagggtgaggaattgaaaataatgttgttcaattatagggaggcgggcatcatcccgaaggttgagccgatgtagtatgtggtgccctcgcgttgtctggcggtaatggagggcgtagttgtgtttatttgtgcggtgggtctagtgacccttcgctgagtgtatgtaactacaacttgtattgtaatgtggcctgttggccttctttgagtgagagactgtgtcgcacacttgttgtgctaatccggctgcacccttaggcgacttttgcatggagtgtccttttggtaaaagacttcggttgatgcacttgtcgtgcttatccggctgcacccttgggtgacttttgcacggagtgtctttttagtaaaagacttcgattgacgcacttgttgtgcttatccggctgcacccttggacgtcttttgcacggagtgtctttttagtaaaagacttcgattgacgcacttgttgtgcttatccggctgcacccttgggcaacttttg

SEQ ID NO: 144534 - DNA, 551 bp, Zea Mays
tggagagttcggctacccatttggctattctagcagatgcctctgaatttttgaataggcctcccagacctcaatctgaggtgacccgtactttgtgcgcctcaaagtagcgccttagcttgtgcgaagccatgacgactgcatttgctatcttttctaactcagtcatgttgcatttagaggtggtgagcacatcagagacaaaatatactaggcattggtgggtcttgccttctctgcacttttcttgcaccagggctgcgctaagtgatgctacaatgtagagtagtaggggtagagctggatctgagctggttaatgtcactagatcatataaatattgttttaaggactcgaaggccgcaacttgctctgggccccaggtgaaatccttggctccgcgcaacgttttcaggaaaggaaggctttgctcggcagatcatgagatgaatttgtttagtgcaactagtcttcatgtcagtcgttggatattttcggttgattgtggcggggccatttccatgatagcctggattttgcttgggtttgct

SEQ ID NO: 144535 - DNA, 644 bp, Zea Mays
tagcattcggttcccaacaagtcccaacatcatgccactgttgactgagacgacagtatttggttcgcagcaagtcccaatatcatggaactgtgtaattttgtcagtaggaactgctgttttgaaatctggaagctagaaagcctagaattctttagtaagtagtattgataagatgttttttaacaaacacagggaagtactgcaatgtaactctgcaatagatgtaggaagatggtagcttataagttatcattacacacatggagcttggatgcgatgcttttatagttgctgcttccatgtcaaccttctattgtaccttcagtgagatcatttgaagagttgtttttgagcttccatctttttaacacagtgccccctcccacataggtttctgacatactgttccactaatttgaaagttcctttttattatcaaagtaacttcaaagctctaagctttgcaccctgatgcagtttgcagaaagtgtatatatcagaagtttgatgatgaggaagtagaatgctgcccagtatgtaaaattgatcttggctgcacacctactgagaagcttaggtatacatgctctcatgattctgtattttatccattgtgctacgttctatcttaaggtcatcat

SEQ ID NO: 144536 - DNA, 725 bp, Zea Mays
aaggacctctacaaacctcgattgatttcactatggttactctttatgaaccccacacaagaatgagcataaagcctaccacaatagccaatgattagatacaacaacaatcaccaaaagtccctcaatggtcctccacaaacaccaagttaactaggcgacaattgacaagagcaacaagaaatcttatgtcacaaaggccacctagtgccaccatgcaatatctcagatgccatgcactagattactctaaatctcacacaaatgtgatcactaagtttgcaagtgagttggagatgtttctcaatctccaaagggtgtagttataaacaatgaggaccaagaaaacattcaaggtttgccaacacctttatttatgagcccacaacctcaactagcagttggaagattccgcccaaaaaatggaggcaccaaatatgtttgatggagcactagagctcacatcacacgacaaatagttcccctcgaatagtaacttgaaaaatagtcatttgaatagtaagacatccaatggagaagttcagtgctcacatgatagccctagtaagtgtcaacaactaacttcccgcagagcagcctctcttgtagaatggtgttgtgcaccatcccgtgcctgcactggacatgtcatgtgcacaatctcaaacaagccatcaatgcaaattgcactctagtgttctaccatagggagcatcagacatgtc

SEQ ID NO: 144537 - DNA, 504 bp, Zea Mays
actactacaggtggaactacatgagagcgttccccgaggtactaccgaactctttctctaaggtatccccaaagttccttgagaagatcatcaaggctcgctagagatatatcctcggcgtcggaccaatcatctattctggggggaggtggggctggaggggtcttcttcttctctgtttggcatcctcggttggtggtcttcttctggattttcttcttgggggcgagcttccttagcttcttgtcatagtccatctttaaggttcgataggcctcgcgggtgttggcttcctcaccttctgctatgtcgagacactcctggagagatgccttctcttgcttaagctctttgacctgctgctctaggctttccacttgggagttcaggtgggtgcagtgggaggagagatcatcgtagtggttgtcgagggtgtggaggtatccggccatgtagacgatggtggggtcatcttctgtggggtctcctcctgacagagcctgg

SEQ ID NO: 144538 - DNA, 557 bp, Zea Mays
tcttgcttgattttcgagcttcgtcttaaagtcaagtgcttgttccatgtctgaagagaagaagatgtctggagagaagaagatatccgaggaggagaaactgtatgaggagaagaaggttgcggacccttttcttgctgggttttacgaatctatggcaaagacaaatatagaaaagatcacgaaggaaataatggcggatttgtctgaggattccgacgatagcgatgactatgatgtgaaaagtggagatgaagattctgaggaccggccctagcgaccaagccataccatcttcggaaagtcgactattaagcaaagtcttgttgacgccatgaagggaagatactttcgtgacatgtctattgtgagggttggaggagacagcaccgcccctgctcctaaagaaaatgaggtggttgtttacaaaagctttttgaaggcgggtcttcggttcacattaagcagatttttggttaaagtgctaaagatattttagatctttattcatcaacttactcccaaagctataattagaatgggcttgtttgtttggg

SEQ ID NO: 144539 - DNA, 454 bp, Zea Mays
gcacacttcggcgataccgtagtgcttcttctacggcagcatcgtgctccgtccaagtccaagccagcctcagacgtacattacatacgtgggattctggcagcctctgcaggcgtgctgtggtttggattctcttcttagttcctacttcgtcttcgacggcggcaaggcgacagtgaatgcccgtgtcgttgccgaccggcccccagcatggtcgtggtacgtgttgttgtccacagaaattggcggccagttgaggatcgcgtgatgtaccgccacggagctgaacctggaccgctttacgacggcggcggcgacttcttctacatgcgagactactacgccgtcgtgtcaaccgcatgggcggcgtgcgcgtgtgtgggctgcgccgtggatgccttgacgtggtgttcgaccgacgtagtacgacgacggcaatgcatgcaggatcaca

SEQ ID NO: 144540 - DNA, 399 bp, Zea Mays
tttgtgtcgcaatgtgacttgtcagaagggtaaaggtgttatccaaaggcctgaagtagtgaatgatctcaatgcagctcctatgcagatctcagatggagcacccaagactaaccagcatctgccatcaagttctggtggtgctgccttggacatagtttatggaaactcttcttacactgcaatggatatagatctcaatgtacctcttgatgtgacaccccaagaccttgagaacagtcatgctgaagcttcttccatgggtcccagtgatcctcaccaggcaacacataacgtaccacaaactactcagccgcagactgctaatcaaccagcagcctccattatgctttttggtcgtgtcatctatgaagccctgtccactggtacagcaaaccg

SEQ ID NO: 144541 - DNA, 782 bp, Zea Mays
cttggtcccataccgtgagcctacaccttacactgccccataatagctgacctagtactttccggaccaggtacctaaaatcctacacctcattcaaaattaagggtcggatctcttaaactctgcctggcaaaaactcggttatataattcaatggaatgagtatagcaaagctaagatctcaagggctcactgctacgcactactcccgagccactctcagaataccttacgctcctaagcaatattcttaaaccatactcaagagttgctccctggactaaaggcaacccccacgtctgggataacctccatggagccttagcagctcggggccaggaaagagaaactcttggcttccgagatcggataacacgagggcaagaccactttctttgtcttaggcagcaacaacagtatgccgacaagcaaccactcgacatgaaggcatggtgctactgcacaaggctagcatttctagaacaagacgcagataagaccctacctgggggttcgctgcttcacccaagctgggctatcttgaatacggggtacccactcctgctatgtcaatgtaagaccctagtggccaccattgaggatttcatgagaaaccaacccaacgcggggcaaaggcccaccatatggagtcgtggccaggccaggcttgtctcctcggctagatcaccgtctccaccaagccccataatgagaaggaatcaacaactttagttataagtctgggatcctacaaataggacccagacctccttgtgggccca

SEQ ID NO: 144542 - DNA, 339 bp, Zea Mays
ccgttttctgttttgctgctgtgtgtctcaccattcaggacgcgagggcttttgatatgtgtttgtgctgtttacgattgctcaccggatgcatgctactaggttttcgctgattgtaagttctgatgcgctcagtcgattagctacgagcacattgtgactgtttggtcctatgggcaccaagtttctagtagcctatgtgtgcggataggtttaggtctagggtcggggcttatgttttaaacaactatggaaaattgcaggccagccatagtcctggttgatgtttgtcagttacacggttcacgcgtgccttagttaattcgtttacttttctgt

SEQ ID NO: 144543 - DNA, 912 bp, Zea Mays
gcacgatacccgcaccgcacctaaaacctcggcaccgtgtgcaggagggaaggaatcactgccgcaaagaccccggacatcaccgtcgtcgctcgagcctcgccacgcgatccggtcgtgacagtcgagtcatgcgggcccgtgcgtagttcacccgaactggaagtaggcccggggaggagcgagaatccttcacccgcgtgggtcttcgatgccgtgccgcggtggagtgaggacgatcttcctggcaccatcttgatctctggtaagtaccctggtctgtctagtacatctgtaggatcgtgtgacaccggccgggtagcagttggttcaacggtttgccggtgattgctcaccggacctcgtccgcgccgcggggccaccatggggggtagattgacgccggcccattgtgatttagcgcgtgaggtggtcacccagctggggtgcaatcgtagcttcgtctagagcatgtccaatcgaagtttgggagctcggtgtgtggaacgggtggcgtgttccgcggtgggttgtgccgtgcggaagaggtgccgctgccacctgggaacgatgaagggagaagacagcctctctgtcgtccatccaagtttggacggtagagattagatctgggggaagatgatgagttgaccgttggatctagataaatggtatggatttgatgggttggggaaatgtcgtgatccattggatctgtagagagcggccaggattagattcacatgaggcaacgttaagtctcatttcataaaatctgagccctcagtttagatcgaacggccagcggtgaaaccctctccgatatctaatctaaaccgtaagatgtggatccaacggcccactatcgtcgatacccttcagccgagtccttattcaaaagagaccctgtca

SEQ ID NO: 144544 - DNA, 385 bp, Zea Mays
cggcgaggggcgtggcggcgcctgcgggcggcgggtggggagtttcggcgaacgggtggtgggcggtggagagtgggtgtggtttgcctttggccgtcgcgcgcgcggggcaaggcagaggcagaggcagccgccgcagtggcatctagagacgaggcgccctattggtggctggacagtggactactggactccacgaccaactcctcccaactcaaacgacacggagggagagctctactcctaataattccacgggccgcttcctcctcctgccggccgctccgtctattggtgacctcgcccatggcgtgtgggtggcttcatcctgtccctgcaggggccgccacggtcgccgccctgtggccgtgcttcctttccccgg

SEQ ID NO: 144545 - DNA, 349 bp, Zea Mays
tttgcagaggtagaaaacttttgtcttctacatcacatcattgtgccaaagatggatgatacattaactgttcgaggttgctcaagaggtcgtggtggacagttggtaacatattttcatcacttcaaaaatgaaatctttaatgttgtccatgaccaaataattgtggaactaaataatcgttttgctgaaaggtccactcaactattgagatgcattgcttgtttagacccacgaaattcttttgcaaactttgatgaagataaattaatagaacttgctcaaatttatgctgttgacttcacccaatatgattgcattgtcctttgcaaccaacttgagatgtttg

SEQ ID NO: 144546 - DNA, 498 bp, Zea Mays
aaataattacgtcgcattaatagatataatccatacagtgagcttttaacgtaaatattcataatcatcaaatagtatcatgatcataacatttcaatatcatccattatttatgtataaatgttttacaatcctgccaaattatcgtcatccggaccatgttcttcagaatcagtatgtttatgtttttttgatgtggatgtctcattccactgtggcgccattgttgaatttttgtttctagacccaggcggtcgtcctctttttctatcggcaaggctagccaatttaaccctattttcctctacagacaagcaggttcgactgttgtgtccatcagcaatgccacatttttggcactttcgagtcttcttcttttctcctttcgcacccagttttagaactctttgttcactagtttttattgtccttccctttggccttgcattaattggacgcaataagcttatgctatctacatcatattccagtctctac

SEQ ID NO: 144547 - DNA, 785 bp, Zea Mays
tggggtcgtttgagggccagggaagggctctggatctgtgcctaggcgtgtggcatgggcgcgtgggatagccgggactagaactcgatccgagcgatggcaatggctcaccggatcagtaccgtcgtcgcggacccaccacctcgcaacaacaacctcacctccgctctgatccaaggtgagagacttcccatatagtctgtcatgtccttcactacgtgtaccattatttggttgcgagtttggtcgttgggtcccctgatgggcgagtcacagcaatggcgccaccgcgacatgtttccgccgccttgtttgaccactggggggagggccatgcgcagttgggcgttagatcatggggcacaacggggattagatctgtacgaatccccttcacctgattgatcctagtcgttggatgataatcggaccgttccgtatcaattgtagcctaggtgggttgtggggcatcgattttcgatcgggcgacccaagtaacgtaccagttcgctttatgttatctttgatttgtgcgctcggatggtgatccaacggacctaattacagcataccccttcacgctgcaaacattataaagagcccctcaattttgtgataatcaacctgtagtcccctttaacataaagaatgtcacaattaggtccttggttcttacaaatccaaccctgagctttaagataatatgagccgcagtccaaataagcaccaaatttaatcaaataaatctaaatgtgaattttagtaaagaaattaatccctagaaa

SEQ ID NO: 144548 - DNA, 433 bp, Zea Mays
gagacagggaaaatctagaagggaatcgttacaggcgtggtgctttgatttatatcccagggaagaagaaacgtacgccgaaagaggaattatggggaggagcaattgtagccattaatggagatagaagaaactgtcgcggaggaggggaaacggtctgcgacgcgagcgcactggggaagaaaggggagaggacgtgtcgtggacggaggttggcgagctccactttagggaagatgaggaggcgggcatagggagccgaaaaaccgatcggcagcgaggtcgcgtcctagtggccggtcatttttcctcagagctagaaacgattggaagcagacttggctaggtacgtgagggactgctggtgggccccacacacaagtaactaggaagtagaataaagaatggaagagagacgtgtgactaagtttgg

SEQ ID NO: 144549 - DNA, 387 bp, Zea Mays
gagacgagggacggcgttgggcgcggatggtccagcgaccaacggacggcgtaactccggcggcgatgcgtttggacggcggggaaacaacagtagggaccggcgtcgttgtgcgagcagtagaggttcgacgatgatggtgtgcagcagcggcacgacagtagagcctgtgcgcggagcagttcgggcaggagagcgcagaatcgagcacgaaaagagagaagagggagctcggggaggagaagggaagggagttcggtgtccaatttataggcaagaagagggagagagagatagggtcggtgtcttcaatcggccatcaatggcgttcatggaggagaaggagtaatggggaagagtaacggacgcattgaagctccaataacg

SEQ ID NO: 144550 - DNA, 519 bp, Zea Mays
agatagagctgagagccggagaggtgaacgccaaagtgaccggccggagcggagaggtaccagcagggggtccagacaagattgaaggcaccactggagcgtgaagcggaggaggcggagcagactgaaccggaggtgctgagataccagaatgctggagcatgagagccatgaatgccctattctctgccctatcctgaataagctgctgctgaagagcatcctgcctgtcctgcatgctctgaaacatcgagagcatcctgtcggataaacgggcctgctcggctgccaggagagcctgctgctgggtgagagtctgctgctgctaggtgagagtctgaagaatcgaagcaagggcagggtccatagcctgaggatgaggaggggcagcactagaactcccagcctcatgatcatgtgagcgtggaggcataggaggcggaggcagaggaggaaccccaaaatcatcatcatcttcatcatcagcagctgtaccctgagtgtcaaactgacgtagag

SEQ ID NO: 144551 - DNA, 641 bp, Zea Mays
ggtgaatgactggatctagagtataacggtacaagaagagatacaattatacaataaccaaccaagcaagatgtcctaaataactaaataagcattacgacaagcaaaaacaccatattgaacacaaaacatactgtaatacatggggatctagagtataaaaatacgggaaacacgcaataaagcttacaatcagcgtaatgagagaataggggaggggtatgcctaactatggaggtagtcggatcctccgagagtaggcattcaagagaagagagggaacgaaggatctacacaagaacagaagtgaatcgaagtcagcatattccaaaaggcatgaaattgataaaattagaggagagggatgtgccaaatcaccgacacagagtctagtagcaatagctacttaagtcgatgcaccagtaaggagcacaagtgagggggacatgatggataggagaggagataacaatgagaagagggtgtggagtggtgaggagaggcgcgagccacatcgtcgagtgcgggaggggaaccctagtgagatgcatggttatatgccctggtcgcgcgggagctgagttaggccaggcttgggagcgctctcattttcgaccattgttcccaagcctggctagagg

SEQ ID NO: 144552 - DNA, 494 bp, Zea Mays
ggcggacaccaaatcggacctaccccgagcatttcccctaacttaattgtgcaaatggtggcctattctatcctgcccacgagaaccgcgaaggccatgagcatttgatcgcgttcccgatgattggtggtctctcagttcgaattggtgactcggtaagcatcacagagctatgagagtgctcaaacgagggagagagagggatgagctgaccggattggggctggccacggtgaagctgttcttcgcggtggcggcgacaaatttgggggaagtttgaaattggtgaactctggaggatgattgagggtgggagtgggggctctggtttcgcgatgaggtaacgcagctgcccggaccataaatttatagagggcttcgacggtggcgctcaatttggccgggcagagctggcggccggagataaaaaaaggaccctggcgccgtgggttcgtgtcctcagtcgtggcgagctcaccggcgatgatttaacg

SEQ ID NO: 144553 - DNA, 387 bp, Zea Mays
caagaactttgttttgctcaagttcccatacatggtacgtgcaaaaggcatggacagaggagtatcatcattctacctgggcatggggaaaagaagccttgcagatccacctctcctatgattctgtcaaagaccctctctacgtctagcagagtattgatgcagcggtacgcacggtaagagcagggttaaggatcaaacatacggataatatactgcgtctgggggttggctgttttggccgccgccgtctctccataccctgcttcttctacctctggttcttcctctgatcttcccttctccaccacgtgctaacatgtgggcaaggcaccagcatgggtccgagcccctgccgctcgacggggacaggaacttggacgctga

SEQ ID NO: 144554 - DNA, 539 bp, Zea Mays
cacgagttacaaaatgacaagtcaaactcaaacgtgagcaaagatccatggacgaaaattcctagcgtgatcgggccatcgggccgggtcactcgaatgctcacagagtttcagtctcacaccactcagaaagtcagactcatgcagacaaatgaaacttccgcttttgccagcgcacctgtagccgcgtagcgcctaggcgcctagcgcgaccgcgagacgcggaagcagagcagagtaaaggaagccggcctcttccaaaaatcgagcgtgtcgagattcgtgtccgcctgctgacgcgggcacgactcgccgccgccgcagtcgcaaagcggaagcgcggaccatcttctcccgggtcgaatctctccaccgtgtaacacacagccttgacggccggcccgccaccgcgagatgcctcggaagtcgcacaaggcgaggggcgcggccgcgcacgccgccgttggtctcacggccgggccgaggcctcccctgaaggccacggccccaaaccctagcgccgccgccgagcttcccca

SEQ ID NO: 144555 - DNA, 331 bp, Zea Mays
tccagaggctactggataaagctattgctttggaaaataagagggttgagcttggagagaagggccactaactagggacaggctggaagtagtacccgtccccgttatactactccttaaagcacaccagctcgtggcagtttcggtcaacaaactcaacaaacccaatctgctcctcctcaagcaagcactccagctggacctgttgctcctaatacatccacaaacaggtcatgcttcaagtgtggacaggttggacattacgccaactattgacccaattatggatgcttatactacgccggctccgatgaagcaaggtcagacctcg

SEQ ID NO: 144556 - DNA, 577 bp, Zea Mays
cagctgcggaccactggttatttcttataaagcgtaaggattcttatgcaaagatccatggctaaaggggtatcttgtttccggagccactaaccaagggcccagattagatcgcccataacccgaatcggtacgcgttgataaccgtaggatcgaaagtcgatggcccagatgaaaaatacacgcgatagtaccaggcccgcacgattgtgatctgacgcacctgatccacacagatctaaacgctatgttggatttaatcacagccacccgcgcgctgatcaacggtcccagatctctacgtccacacattccactggccggacaaatcgtagccatccatcaccagatcaccggtcaggacgccatcttcctccctccggagcaagcgcggcggtagggaataccgccgcagcggcgccatcgacggtccctcccccaattttgaacctaagccaaaactctaatccaaaggacgatacacggagcggggatgaaggcaaggaatgaggtagcgttctcaccgggagttacacagcacagaacctcgaccacggtgatatccgggtcgcggcgg

SEQ ID NO: 144557 - DNA, 435 bp, Zea Mays
tggagaccaatggtgaacctccatatccatgactaaatatgggtcgcctctaggttccaaattttctttagtgtggctctatagaccatgaattgtacgacaatgacatgaggtacttgcctttagctatccacactatatcccaagataaatccacgtgattagtgagtcaccattatgtactcatcttgtcactcccatacttattatatacatgagtatccaaaatatgggttgttagtactagtgacaaacaatcatagtgtataagtgattttgaagggtcatgaaaacttctagaaatgccttacataacatcttgcctgtaagagatgtaaccgagattgctgataaatgttgataaaatgagtgataaggagatatagatcttctcatctttaatggagagcttgttggataaacaaagagtggatt

SEQ ID NO: 144558 - DNA, 493 bp, Zea Mays
cttcgttgagccctaccggtccaaacccggcccatctgtgtaagctgtgccggggctcgacgaactgaaatttgaggctcggtctaagcccgcattcgtactatgctagttcgcccatatttttcatgttagaccatactttcgtctcctattttcgggccgtgctcagtaaccaaaaggttagacccatattttcagcactaatgtaagggcagccgttcggatactgagactctgagacaaattgtcacaaggaaacatggtacaacagattgtattcacccttaacccacatgcattgagctgaattcggatgtaaattatagtagattaggttgaatactaaagtacccaaacaaaacctacggaggcacagagcaatcgaccaaacagcacaagcataagggcccttttgtttccctttcctgattattatctgagctggattctcaacaaaatactcatacccgagtagcagcatcacggaaaccac

SEQ ID NO: 144559 - DNA, 990 bp, Zea Mays
aattcagtgaacttagggcatctttggagccttatatcttttaatccatgaataatttgccctaggtcaatacatcaagattatagagctactataggagcctaactttgcttaagtgattaagcattgttgttacacaaaaagtgaagataattagccctaaacttggctgtcagactaaaactccctgatattcaacaaaggcagtagattggatcaactttggggtcttgtggagctcgattaaatggatggttaaataaaacctctctgacaaagtttgagctggattgataagctaaaactttgatgtagagcattgatctagtcaccatacaaaatctggaggaaattcgccccaaacatgatctgtcagaccgactgaagaagttcctgatggtacagtgaccagaaagatctgttggtttagtgaatcggccgctggagaccccacatgtggattcacgccggtgaggtgattcgtgctcacttaggcccggataacgcctcggggtagaaagatcttcaccgctattgagccatgggcactattccgtccggccgccgtgtccgcttagccccggtcgcttcgaatctaccctcgccggagttggacacctcgcggtcttgtgccacatgcctcggcactttaaccacgccgccatgactcatactaacctatcaaatgatcgccggtgaggttgccacggttatggccaccaatcgtgtgcgctagtgcacctcctcctctccggtcgccgcgcgtccccatcaaattcactagccaccgctcaaacacactataaattgagcacaccctcggctccgttaggtaatccagcatccaatccaaccgcatgtgccctcaattactcaccagagcccgcgaattgctcttttcccccaaatcggtttccgccaccgtgaaagagccctcgccgtgactagcttgttccaggtctgttcatactctctgctcttccgttttag

SEQ ID NO: 144560 - DNA, 449 bp, Zea Mays
ctggatttctactccccccagaggaagatctggtggccttctggttggttttaactctgatatgtttgatgtcattaggcaggacaagagtgagtttatgattaactgcttgattcatcataaagctaaaaatgttgattttaattttgtcaacatttatggtgcggcccaagtggaaaataagagtagatttctcagtgagttctcttctgtctgttcaaattgcaatggcccgaccatttttggtggtgatttcaatataattcgatcaaatgaagagaagaataaacctaggattttgagtagatggagtgttcttttcaattcgattattgaaatgcatggacttattgagcttgacctctcagataggctttatacctggtcaaataataggagtaatcctacttttgaaaaacttgacaggtttctggtaaaccctgattggg

SEQ ID NO: 144561 - DNA, 632 bp, Zea Mays
gggcagcaacggcacacataggcgggcggggacgacacaacaatggtggttagggatggcaattgtgggggatagatatcccctgaatcaccacagtttggttatgttctgtgggctgcctgaaaggtccccagttggccgggcgcacagccttcaggagtttttagtcgggcgcaacggaaagcggacgaggaagacagaagcgtgggcgtgaagacttttggaccgcgtttcgcgcatgcagagaatgtgtgaatctcctgacgactcgctgacctcaaggaaagtcagcatgactccagcaaaggcgggcagactgagaatgtgtatcgcgtggtgtgtgtaactcatcttctgtcaggaataagacggaggaggggcccctacgaaaacaggagacgccattcagcagcatggccatcttctacctcaagaactccctgtaatcgcgaccaccgagtaatacacatccatcaactcacaagatgtagggtattacgccaagcgacccgaacctgtataatccttcgtgtttccttgtgcactgcacagaccatcaagttgtgatcgatctcgtcattctcccaaaagcactaaatggtataccccgtagtgtgtcgtcagtaccaaac

SEQ ID NO: 144562 - DNA, 560 bp, Zea Mays
ctcttctatctaaaatatatacagttatcacaggtgaaagagtccaaaggcattgatcgccgcctgaggaaggagcgggtgttcaatctgtttttaagcagcaaccagaagaacaccttgtgttttagatctccataaccaggagaagagagggtgagactgttggttgccgatcaagtgagaatagaccttatgagaggaaaacaaattggaagaggcaatgcagcgccatttatcattgtgatcatgcaactgaagatttgccaaaatgtcctgaagtgaaagcagctgttcaaacgcttcggcagagaggagagtgtggaacatttcattcggtggagccagccttgcttgattaatgttgatgtctctgatggaggcaaaagaccaaagctccgataattttacagatttgcgcagaccatcccaacgatcatgccacaggagagtgaattttccatctccaatctccacctgggcaatttcctcaaatacgtcttggattttgagaatatctttccaccagaacgaaccaacatgtctagctgaaggtaaagaat

SEQ ID NO: 144563 - DNA, 331 bp, Zea Mays
ggatatttgatgttgaatcttcccgtggaatccaaagaagccggggcgaaagtgggcgccttcctttgctggttttggtcagatcttgttgtgcggtctagtctagttggcgaatcgtgcttttctgcatctggtcatgtggcttatgtgattcatccaaaacatttggggagacaaacaagcagtggtccaatccaagggagagccgttatcaaactagtcaagccccgtgcttcttggatccatcggcgtgagctggccttgtaggaatcgttagccatggcgtctattaatggaggccacggaagaattttgtttgtttgtggtgggt

SEQ ID NO: 144564 - DNA, 492 bp, Zea Mays
gttgggtcttgcgcggatggtgcggattagatcgaactgccagcgaagcggtacgcgttcctggccacaggatccaagatctactgtcacaggttcatcgcatcccaattccacctagtcgtccgaccgtgaaccgaccgccgagataaactccgcgaaggggtacgtgctcattctaatctccaccctcgctcacggatccgacggctgacataggctcccatccctattcccctcaacggctcaaagggtcactggagaagacgcaggccacggcggcgccatttgtcaacaaccgcgatcacccgctctatcgcagtaatctccaatctaccggttgcaacatgtaacactgaaccgaccaaaacggggaagccacaaatcaccgaggatggcgcgcacaggagtccggtccacagtgaacagagactcggcacggccattgaattccgacgagcgattccccggtagtacgcccttccagatgccgat

SEQ ID NO: 144565 - DNA, 467 bp, Zea Mays
aaaaaaacaatgattttcttgtggaacttccattggttatcaataaaatgtgccgttacacacatgtaatttaggttggtattagatgtccatgtgtcagtggtgaggcttacgcgctcacaatgttcacctaaaaacttcttaagcttctctttgtggacatcatatactttcacaactgctctagtagttgttcttctagagggcaaaatgaaacgtgggcatgctttggccaaaaattttctaagcccaggacgctcaggcaaaacaaaaggttgttcatcttcaataatcatttcagcaaaactattccttagatcatcagcatcaaatttccaagttgaaacagtaccaacactactgtttccttgactaggttgcagttgcaaagttccttgattatcaactacctttttgtttggattctttttgcagattttcaaatgagatttcatggaggacgtacc

SEQ ID NO: 144566 - DNA, 754 bp, Zea Mays
gagcatttgatccttgcttggatcaagggatagctacactcttgcatgaatgctccaatgaggattagtgaggaatgctgactctctaaaacctcaataaaatattaaggagtcttctaacccttactttacattgcatatttatttttagcgattcaattgaaatatccatattcttacgaagcccaaccgagataatcctcccgagatgactaaaacaaccaatcctccccactatttatagaaagttattctaccttcctaaactactcatagataaatagagtctatccactcagtcaggggcaaaatggactaactcctggattttcgatctgacaaccacccactctttacgaagttgcttcgcctcgatgtgcattttgtgatgaaaccacgtgtcgcctcgattcccaccggaactgtaccgtcggatttgaggcctgaacctggtgaaaccagcaaactgtaacgctgggtgattttgagactcaaccgctgaaacatccacgtagcgtactccatatgtatccccaaccaagacacgtgtcccgccgatccacaaccacatcggcaacaatggtccgctcctccacgtcctcgtgcccgtcagtgtccccatgtgtcagccaccatagatagtctctcagcttctccagtccctcgatcaagactcgtcgctcgtccttcgccacaatcgatccattggcacgaacccgtgtaaccttcacctctgctgtcgaccaccgtctcc

SEQ ID NO: 144567 - DNA, 320 bp, Zea Mays
ccgttccttctaccagaaacgcgttgtatgtcgctgtcgcgtgggcccaccttggaagcatgcccgccactggttgctctgcctctgacagatggggaatgcttgtcagcgctttcttcctcccagagatcttttcgggaacgtgaacaaactcgcaacaaacgcgagatactagctggggtcgcggactcggacatctccgggggtttaaataaggatgccctcgactcttccgcatcaagaaccaaggccccgggcaccaccctagccaaagaatccaggctgcatgtgtgttgcgagtgaccatcgcagaacgcgtg

SEQ ID NO: 144568 - DNA, 540 bp, Zea Mays
gctggggcggatgtaccctttttgctgaagatctgagatttgaagcttcagttctgctaaggagccatgcggtatggtctctttgcgatgggtgttgttccaggaattagatctatgtagaactccacttctctttctggtggcattcctggcaactcttctggaaacacgtccatgaattcttctactactgacatacttttcgttgttagattgaacatcattgggtcactggcgggtggctgtgcttggcaagagactgactttccctgctggtcggtgaggaggactgtcttgtctgcgcaactgataatgcccttgtgtttagttagccaatccatccctaggattacatcaattcctttggatggcaagacggttaagtctgccaggaatactaccccacttaaaaggattctgacttgggagcattttagctggcataggaggtcggaccctagggttcgggtgaccaagggaatctctagaggagtagagggaatgccatatttttacacaaagctagtggctatgaaagag

SEQ ID NO: 144569 - DNA, 301 bp, Zea Mays
ctgaaactggcgtagccgaagctgccggggctgaaaccgaggccacagaagatccgaacctggaagaaacacttgaagttattgataacatacttctaaaaatgactgaggaagaatctgttatggccgcggcgagcacagctactgaaaaggggaaaaaacaagctgaagacattttggaggaagaagattttgaatttcaagatttacttgggcaagaactgacagacgttgaaaaagcagagcttaaaaaatgtaccatagcctgcggatataagccaggagctacactgttcggcgg

SEQ ID NO: 144570 - DNA, 808 bp, Zea Mays
gcctagctgactccacccgggtcaccaatagaagaattcctgctatggacttggtgagccagctcgaaatgatacttagaggcaaggtatcaaatgttggtgcccctgttgcctactcggcctggaacttgcctccttccaaggcctttacccatttcgtgtcaaatcctcctgctggtgatggcggtttgggccttagagtgcgaccctctgccgaagaagttagtgctttggttgctttgcatgaagaaattcctgatgatgaacggcaggttcactttgaggtgcctttggatcccagtgatgcagagataagtgctatgcttgatatgttagccgaggattcttctgatgctgctcctgctggaacattggcagtggcgcctctcctagaagctagtaaagccttggatattcagaggtctgtcagtgttcgcccaaaacgcccttgccgagccaatcagcctgcttctcctgctgatgggcagaaaaagaagaagagacgtcttcaccgagtgtctagcttggatcgggatgctggtccttcgactcctgctgctgaggaagtgcccgtgcctgaatttactgaaactaatcccaatgggtgtgacccatctgacgctgaccccaatgggtgtgctgtccgtgttgctgatgaaaatgaggaggaagaagaagatgaaatccctctgattcggaagaacagtcggcgctacatagccagtggggaaagtagtggagttccttctcctgctttgtctgccctcattggtctacaagaattatctctggcgaactttgatcaaac

SEQ ID NO: 144571 - DNA, 736 bp, Zea Mays
gaggccggcagccgtggcctcacctgaaggctgagttgctcctgccgcgtgtctcccctgcatccggcggtgcccgcgaacgtgcgcgttgcatccgggacggggagccactgcagccacgcgccagccgtggggaacaccacaggcgagcaccacaggacacccaccagcgcgctcgccatgccgcatggacatcggcatccacttcgcgtcgccgagaatgcatgcatcggttgggagagaggctagtcactttctcccactaataccacatttgcttttcctgttttcttgaagggaaaaagagtggtgagatcagcacaactgatatagcgtgactatgcccccaaggtgtttgctcaaatgccagtaaggtcagacactatcgtgaacgcattaggtctcttgctgctactgctatggtaaacttgatcttttctcattgcatccttatggcctcaacgagtatttattttttttgcaatagtgccacagtgccactggtgtggagtacgctgtattttgcaaggccctgaaagtctgcgtattttagtctgcttgataggttctttgatacgccgtgtaactggacagtgcagtacgtgcccagtctcaggatgagaataaaaaaaggaggaatcaagttcatccttgaacattgtccgagctgctattctcaggtttgtgcttgtgtaaatagtcttttattgtagcatacatcattacttgatccagg

SEQ ID NO: 144572 - DNA, 390 bp, Zea Mays
gctgctatcatcattgtgcccaaaaaggtactgcaataatatatgaccacaaaagctattttgttggacaaatgaatgcaacaaaacttcaatcctagactggagcggaataaccagggattagatggaagagttgggactagagaggaacaagatttttagaaaatattgataaacaccctaaaccctaaaattggggcagtaaaaaaggataagcttcaagaacagagaacggagacaatggatgaaccagcgaagaaatatagtggccttttggaacctcgatgcgtctataaataaaagaaagcgaaatctgaacatcgtacagtatgaaccattccacccaaaagaaatgagttgtccaccaaaacaaacgatctacgaacgaag

SEQ ID NO: 144573 - DNA, 506 bp, Zea Mays
ggccgcttcatcataattaccttcttcatcaatcaccgcatcatcgggaagacgtggacgaggaggtggtggtggcggtgcttgttgttgcatctccaacacagcaagtctgtcgacgatattggacaatcatcgatccagtctctcgtaagtcctgccaaggtccatgttaatgaaggcatcatgcactgacttgtggaccgtctcctccatttgctccttcaggagcttgttgtttgcctcaagatcttggcggctaacacattcatcgaagtctgtggggatccttgcttcctcgtcgtcgcctgctatcgaaacacaaaaacaggaacaaacggtgacgattatccctaataatctcactacacgctcctctcagtggaacacaggaacacactctaatgtatcttaccaagctcttacaagtgtctgacgaaatacaagtaaaggatgatacaatcggaggttggttcgtgatacttaccaagaggtagtgaaaccacgat

SEQ ID NO: 144574 - DNA, 383 bp, Zea Mays
cacgagctcactagctaatgcacctcaagtttcggtgtcgaactggcaagccaacaaccattagacctggcacaggttttcttctccattggtggcacgatgaaacgacggctgaacgagccgaaagaaatgaaacttcgggcagttccctcccaagcacccgccacacaactcgcgcccaggccacgacatctgaccggcgtcaaaacccaccggcccagcccaacccgtctgcagaaaccgttggcccaggcgcgcctttcaggtacgtccagtcgcgaccctataaaaaaaggcagagcagagagcgcagagcaaactcacacacaccaacacacaagacacaacacatccccggaacacgaacaccaagaggaacccga

SEQ ID NO: 144575 - DNA, 415 bp, Zea Mays
attccttcattcatcgttgttggaaacaggtctagtctgtcggtcacctcagtaggcgatacggtgctttctggccagttttatcttaacaatgttcttgttacacctgatatcattaagaatcttctttctgttcgtcaatttacaactgataataattgttccatggaatttgacccatttggcctttctgtaaaggagctcaattccaggaacacaatcatcaggtgcaatagctctgggccactgtacaccatcagtcttcctactgtgcgtgctccgccggctactacacactacgcccttgctattgttgctgctcatgcgtccctatggcaccaacgtcttggtcatcctggccctgacgtgcttggtaagctttctagtattgttgttgtttcatgtaataagccca

SEQ ID NO: 144576 - DNA, 446 bp, Zea Mays
cgggtatatgccgtaatatggttatactcgcggcgaggaaagatgtacgcattgggtaacacgacgcttaggtcgctgttgtataatcgaataaatgatgtattattgagcttgagtcaaaatgtgggatactagtggtacgctaggcaggcggtgttccaaataaataaatcggtggatgtggttgttgtcgtgcgtgatttattgttagtgagtagtttgaataacgagttatatgaggattatgttagaaactagtatacggcgtgtaactgtgcttgtgatgtgaataatatatcagtaggtatttgtaggtgtcattggcaagtgggatgatttcggttgtgcgataaattttgaagggcgaagaacatgtgtagtgtgtcgatcaagttaaccgataggttccgtaaatatgcttgtgatgcttttatgtgcatgataag

SEQ ID NO: 144577 - DNA, 577 bp, Zea Mays
gcttctagcttttccctgaagcatgacgaatgatgtaatcaatgctttcttttgaagcttcggtggcagcagcttcaaccttttcagacgtaatttgctctgccgctttttcttcaactacggcaggctctgtctcggtgggctctgaaggcccagtttcggtttcaacttgaatttttgcagccccgacttctgcctgtttcgtttcagctttgggttgcgctttgaaaacttcggcaattttccttgaaggagcaagactcaaggattttgctgtttctaacacaacatctagcacattcgccatccttctcctcttaggagttgtggcggagccttttgtaccttcggcactttgcctctgttgaagggatcaaaatctccggcatttttgctatttcttcaatttttgacccttcagttttattagccgtcgtctcaactagtttaactgaaggtatcttcggcattgcagccggctcttcagttctctgtgcaggaggagcggtttcttttgttttggcagctaaagaggcccctttgtcaaacttaggtatcacggtcggttcgatgtaac

SEQ ID NO: 144578 - DNA, 390 bp, Zea Mays
ttgggctatgtacaccttagtgtgtagaggctgggagtaatcttagttcacttgcataagcttgatgtaattgtgtaagattaaataataaagattcctttattgaaaaaagcccgaaaacaaaccttggccacaaacatatcatgtaagatgcaatggcagagccaggatttctctaagtatagggccagatattaaactaaaaacgatgtatggacctttatacacaaaaaactagctcttttgatagcagtcacagctaaccatactggccggtatatggacctttagaggctattcgacccaagagtagggccgaggccctactagccatagccctgtcttcgctgctggtaagatgtatacgtactgtcgtagtttaattgtaac

SEQ ID NO: 144579 - DNA, 588 bp, Zea Mays
gccgtctcctagcaggagagcagcgccacactggtgaagtcaagcctacaactcagcgaggagcaagcgggtgaaggcggcaacagcagcagcaacatcatgatggtgacgagcagcgaaacggaggaggaggccatcgactgctctagtatgtactagtgggtagggtagtggccattgtgacccggccgtccctatcgattgaggtggtggtccattttatagtccatgcaaacagtcgggcgctggtgcgtctgcgtgggccatccctctctcgtttgattagggacgcagagcagagcagcgcagagcagctagctagcgtcaccctcatcactagtagtactgtcgtacaaccagccgagcaggagggaactctcatcattatcgtaccactaccagcccagcagcaacactggctgctggctacgttgctgctacattcctgcatgcttgagcaagctgtagttgtagggaggggaatcacatcacatgagagctaaggtggagcgccgagacgagaggatacgcgacatctccatttcacctgtgctgatttaataaatatgcgcgcgattgaataataat

SEQ ID NO: 144580 - DNA, 406 bp, Zea Mays
ggcgaccgtgtgcccggattcgtgcccaccacggtgattcgtgcccaacgcagttggataacgcagaagggtaagaaatatcgcaccgtctatgaactccgatcactaatctactccagtcgtcgtacccgcctgtgtcacggccgcttcggatagactcaccagagttagccacctcgcgaccttgcgccacgtgccttggtgctttaaccacgccgcagtgagtcaccttagcccactcgatcatcgccggtgagctcgccacggtgaaagccatcaattgcttgcgtcagtgcacccttttatctccggccgccgcgtgtctttccctgaattagttgccaccactcatgggcactataaattgagcacaccctcggctccgctatgtaattgtgaacccaac

SEQ ID NO: 144581 - DNA, 359 bp, Zea Mays
cttagcaatataatgatgcatatagccataaacttgtcaggcaacacacaatggaaggacttaagttcttttagaagatgttgaatctgatgggcctattctaccatataatgatcgtcgatcatttttggagtcatggaactactccataatatacaactcactgtctgcatcaaatacaacaaattttgtcgcacatcccacatctctttgcgattcaacaagtgcatgtaagaatcaactatgtttttagaaggagcacttaccacaacacctctaaagaggatatcgatagccaaaaattacttctcctcggtagaattatgagtcattccttcagtgtcgcccactgtcgtgtg

SEQ ID NO: 144582 - DNA, 672 bp, Zea Mays
cactattgaagtagaacctaccttggagcaggaaacacacaagggtcagatcggtgatgctaaaatccaagagatcaaagatctgattgctgaaggtagaggtctagaatttacggaggataagtaaggcacaatatggtttaagaactgaatatgttttcttgagaccgacaaccttcgtgagactatattaaaggaagtccatgactctgattactctattcgtcctggtacatgtgatctgaagcaaaagtactggtggtatgggctaaaaagagatgtggctgcacatgtggctgtgtgtgatgtatgtcaaagagtcaaagcggaacaccaaagaccaactagactactgcaaccgttaaaggtacccgaatggaagtgggaagaaattggtatggatttcattaccgggttgcctcgcaccttgaagggtcatgattctatatgggtgatcatggacagattgaccaaagtggctcactttattccagtcaatactacttataaaggttctcagctgacagagttatacatggcccgaattgtgtgtttacacggggtactgaagaagattgtttctgatagtggatcccaattcacctcaaggttttggaagagccttcatgagaacattggtacgaagttgaacttcagtttagcctatcatcc

SEQ ID NO: 144583 - DNA, 510 bp, Zea Mays
cggattcgatattttagttgttgtttgatttagttgaacctaaacgaattttgccgctatctgaacattcggctagagagcagcacaatttataactatacgccttgtttttcttggatatggatcgtggtcgaatttataaaattgaactctttctgaaatcatattcacgtactcgatcgacctgaacaacatagactcaacatcttgaaagatttttaaagttcaaatttctctaatttttttaatggcttaggtagatggagacagatacgatatgaaaatcgtgattgataaagatgattaaaatttagtgtccattttatttaccgctatcacgtgttaaagtccgcactcgtggtcgagcagatgataaacacatggggtgttacaagatcgatccgggaaaggggatacttgtttttaaaggtaacttcattaagggatcggtagtccacacacattcgtagggtttgatccttcttcttgacgaagatggttggacacccc

SEQ ID NO: 144584 - DNA, 417 bp, Zea Mays
ctagtttactaagttatgatttcagggactcagattacacttcaagaaagatcaaccctcgaatcagcgcatcgcggaccattcgagcccctagtgtgggctgtctgggataaagtagattatcaaggacatgagctctttttggaaattacacatgagctcggaccgttcgggcccttccggcggacagtccgcgatacctcgatggacttcgaacataaactatgccaaagacacttttctactaccgactgtccgaaagataagtaaagaccgtccaacaccatgcgtggaccgcccgacctcgtgtgcgacccatctgcctgttgtatttagacaaacccgaaggtgccatgttcagaaaatttatttatagcgtccacatggaccgtccagaatcacgaccggaccatccac

SEQ ID NO: 144585 - DNA, 384 bp, Zea Mays
gttaaaaattagtataaaatatagatatagaacgacaaatacaactgtttattccagcttgggagtcattctgctctaaatgagttaccgcggacacctcatctgacttgactgtcttatcatctgattatgcaatgctaccttgagctaagccaccgtgttgagaaaaatctattgcaggaacaccaggcattcccatattattatcagaacacctagttgactcttccgagacatcgcacgcgtccaagttaaccaatccgttggcttccccaccattgcaggcgacttccatcagcacactacttttgcaagcctcagcctccataatagcctcacagtgtttcctctccaaactatcagttttgctaacgtccacaccca

SEQ ID NO: 144586 - DNA, 392 bp, Zea Mays
cggcagcaagcggcatccattgccgcgttgcaacgtcatagtgagacccagttagatcgtgagcgtaggtggcgtcatggtgccaaggtaagatcctaccgatagcctacccatatactggtgtggactacgaggcaaggtagatgtactatgtgcaagatcctgatgaggctttatttggatactctagtatccatcccgatccacatgtattgagatgtattggggtgtaaagtatccagacaaagcatgaggcgacaagctgacaagtgacgaggaggtaaggtgacgttggtagcgcgcgagttaggtcacccaactgatcattcgatggcggaaggagcgagcgaaccatgagtgagctagcgctagaggaaagaatcctcggaggg

SEQ ID NO: 144587 - DNA, 521 bp, Zea Mays
tccttgtttgtgcattttttatagccattggatttgcaaatgcctctctttggttctcataaagaacagcttgggcatcaatcctctctctaagatcttcatctaccaccattttgacaaacacatcattaaagcaaccccttagctctccaacatagccttcatcatcacctgctttgatgttgtagaattttccagggttcaaatattgtgctgctccatataatggggtatccatttggttcgcccaacgtcgatccacaatgttcatgatacgtttcagacatgctttcttgttttgagaatggtatgccacactcatagaaaaacttggctatctccaaacaaacaaaatttatttcttccttaggcttcatggtagcacttatggtagtttgagcaggtctctttgcatgtctctctgctacaacctcttgaggagttcgtcgaatcatagatgcaatggacttctttggagctgcaattggatggggcttcaattggaaaattgctttgtttct

SEQ ID NO: 144588 - DNA, 409 bp, Zea Mays
caattgagaaatgctatgaaaacaatggctattggtgaaataaagccaaaagaagaagatgatgataatagtgtggttgtcattccatcctcttcaaccctaaatgaagaaaatcaccaaagccaacaaaatgatgaagttgtggatgctcatgatcaagatacttcaagtcattcggtccctcctcatgcttcaactagtaattctcaaatggtatcaagaatccgtcattctattgtgaaggatcacccagttgatcaaattgtgggcgatattagtaagggtgttcaaactcgctctcgtatagcttcattttgtgagcatttctcttttgtatcttgtaatatggaacctaaccatgtagatgaagctcttcttgatgttgattgggtgaatgcaatgcatgagg

SEQ ID NO: 144589 - DNA, 447 bp, Zea Mays
caacaaccagactatccacgtcatcaaaaatttgtcccccgtttgattacaaatcaacggtccatatctatcactgcatcagtggcgagtaaacaaagaaaaaaaggacgaggctctcctctggagagttccataacttccatctgagatctgacactttgcctttggatgcttctggcttcctccgcccccggtcctcttctagtcgcttcgtcttccatcgctttcctcatctctgcatcattctttcttagttgctttgtctttcgtcgccttccttatctactttgcttcagcctaaacgctttgtctactgccgccttactcatccgctctgattgtttagtgagatacatatttttcccactccttgctggtccgatccgttttggtggatatgttatgaggtttccatgtgcccatttttacacctgcttcgtttctatc

SEQ ID NO: 144590 - DNA, 406 bp, Zea Mays
acaagcaaaggagcacgacttctcgagcaaaaggacgaaaactcacacaagaatctgcatttgttctccttctgagcagcaccatacacgttgataaagttccagataagatttttttttctatgaaagatcaaagtacgaatcatgaattcaccaatttcgttttcacgcacatcaaacacattagtattaaaaccaaccaataaaccaccagatctgccattaggcggggcaaaaaaccaagcaaaaggcttgctgctcgccagcgaagccagccaggaatcactaaaataacttttttgggtttcttgcagaccaataaagtcaactttctcatctctaatgagttctttcagaaactgagctttagaactattccctaaaccctgacaattccaaatgagac

SEQ ID NO: 144591 - DNA, 432 bp, Zea Mays
agggactgtagttgtcagctttttttcgaactactttgttcgcggctggaaatttctcgctggcacggcgcatcttgtccgcctaggctttgtgtaggccggttttaggcccaaaaggctctctctggcttgacaatccactttcaccgtgacataactaggcctattgtcgtaggcccaatgcgggagtagtaaaaatacaacgtgtgtaatttcggcccgtccgcctctcacagtttatatccttctggctgcagcgtttgtggcattggattctagttctagtctagctataatcttgaccccgactttacctaagcaacagccgacaaggatcgatcacaactgttctataaggtacaaactagaacaaaacattcagccacacgtcctttatctgttaatcatcagagctacataaaaagattaccc

SEQ ID NO: 144592 - DNA, 564 bp, Zea Mays
ctgttggaagccccaaaaatgcattatgtttctgttgtggtaggttatgcttctcgccaccgccctaacattttgcgccatatcattgacgaacgactttaacaatcaaccgatcgagcggtgcaatcgataagggccttatccgacattccgtcgaacaaggcatgatcgtcgtcggtgtcgaactgtgcgttggcggttatgcggcgccctagcttgatggtggctagctcagcctggcatagaggccacggggacaccccgcaattgagcatgtcgtgcgacacctttctcgttgctgattcgtgtcgtcgcaccaccttactctcagctgactcaatcgccatcaccgttcgctggcctaaaaatctgagtgatcgagtattcaagggttggtgtcggatgagttagaccttgcggtggcgggttgccatggagctcggacgcattactggctgtagtggcctcataagaagcagggtgtgtacgcgaagttgttcaggaaaaagggaaagtgagaacaaatgtccctacgacaatgatttttcgctaaatttggtcgtc

SEQ ID NO: 144593 - DNA, 271 bp, Zea Mays
gcataccagacgtattcaagtgtaattcttcgagaaggtattaccattgtatattagttatctctactattactattttatcaccatgtgtaatcaaggtgatctggactttattgaatcaattaaaaacattccttaggcgacaatggatgtataacttgtatgggttggctctcaagtaatttctagaaaatttatggaatgtctatttcaaccagattcttatttgggtgataaggtaatataattttttggtacacatgtgcactcg

SEQ ID NO: 144594 - DNA, 788 bp, Zea Mays
tggagattcagtcagattcatagtcattcttaatcactttcgtcctagtaattaacatggcaagttgtcgccctcctaattcttgcaatcaccgcgtgtgctgctgactcctccaccgccatagtgcatccagattgctgtgtctcatccccctcactctgtgcctcatcttgattcccatctagtcctttttttattgttgggcgacctctttttcttggagtccaacctacagttttcgcacttctctttttgtccttgttctcgaccgctctgcttctgtttgggttctgagggcatgttgtgctatagtgccccctaacatggcaggtttgacactctcttatgccctgacccccactatatgtgttgtatggattagcaggttccacactatttttagcacatttagccccactggcagacttcctacccttcgtgcgcgacactggcggttcagtcaatcttagatcagtgaggcagtttgcagaatctggattgaggcccgattctggtggtggtgtaggtccagttggcatcacaacaggttctatattgttgtcagaactttgttgtgttggtgcgatgggaccaatattccgccgtccttctgcatcttgctgcaactcagtatttgttgcttcgtccggaccaatcggaccaatctccgatgttcgtagaagctcaatcccaggagttatcatgtcgatgtgcctgatagtttcagtgtatgctctatcagatttgcttcccgctcttcccagtcgcattaactttggcagcagctt

SEQ ID NO: 144595 - DNA, 641 bp, Zea Mays
tccacagcggaacttgtggctctcactcggggcctagggccctcactgccaaggtgatccgtcaagggttctactggcccgctataatctgcgctgcgaatcgagtgacgaggtcgtgcgaagcttgccagaagttctctccccattcaagcaacccttcgcaatacacaaagctgattgcccacacatggccacttcaacgctgggggctggatattgtcgggccactacccacgacccaagggaacctcaacttcaccttcgtcgccgtcgagtattttaccaagtggatcaaggcaatggtagtatccacagtaacgtcgaagactgcccagaagttcttctggcaaaacattgtttgtcgattcggagtcccgtccgagctcacagtcgacaatggcaaacagtttgacagccaggatttcagggacttctgcttctccatcggcaccaagatttccttcgcctcagtatatcacccgcggtgtaacggcgtcgtcgagcgcgaaaacggcaagattttcatgccatcaagaagaggcttctcggcgacaggaagggtaaatgggctgaccagctgcctgaattagtctaggcactcaacacaaacgaattccgggcaactggattcactccttttc

SEQ ID NO: 144596 - DNA, 415 bp, Zea Mays
caaacacatgtatgtaatttagtgcaacattaagcattaggtacgtagaattccatcttgttttaacatcaagagctatttttttatcatatttaatgccttcttgtaaaacagccctttcaaatcgttcatgtcttttgggtgtggctgaccaaaaggcgatagtttcacggatcctccctattgcctcttctactacttttacacccattgcatcttttgcacccaatccatctttcacaataagattgattatatgtgcagcacaacgcatatgcatcaatttacccctaagcataagagaggggagaggcatcttatcttgcatttctttcataacattgtcattggtgctgcagttgtcaagagtgaccgtcgagaccttcttgtcaatatgccaatccaacagtacatc

SEQ ID NO: 144597 - DNA, 378 bp, Zea Mays
gaaacaaatgctacacttttgaagaaaaaaacaaacaagagtatgaaatatgtctcaaatcgtgaaatcctactccaatgctatgaatcttaatgagagagatgagcatctgtgcacaatctacaaactaacttttgtataatcctttgattttttatcgcaatcaactacaaccaaattaagcctccatgccaagtttcactattttttgaccacctttggtatttatttatttttctcggattggaaagtcatttaaatcatagaaatcaataaataatccaagaagggagatcttcagcggaagtaagtttacagcggttagacgaacaaatggtacaattctgaagcaaaaaacaaaatatggctcaaatcgtg

SEQ ID NO: 144598 - DNA, 397 bp, Zea Mays
cacaacaacagcataaccacccctatactcctggacctcctccttgtcactataaaaggaggagcatggggccttctattggggggcgacaggacttcactgctcacaactcacctcactccctatattgccactcacctcaatcatacttagagacttgggactcactccctctcgactcgcttgtatcccctactacgagcacttaggtgtaagataatacaaggcttcctcccccactggaagtagggtcttctcttgctcgaaccaagataaatcttgtgtcttcttgcatcaaccatccgggacaggagcacgcatcacaaatttactagttggttaggacccccaatttccaaaacaccgacaaatagggaatcaatctctggtatatcta

SEQ ID NO: 144599 - DNA, 785 bp, Zea Mays
caaagagtcacgaaagaacgtatcaataatacaagacctatgccttgggcagaggtgtttttatatagggtttgtaccttcaacaacggtattcttatgcaacatccacgacgagaccttcaaagttgcttcggcaaagaagggggatttctttctctctttatgaagcgtgaaaagaagggaaggtgttttttcgcttgcggctcaaaaacggtacgtacgaagatttcacgcctcacaaagaaatatatacatcattaaacacgcagatagttgataattgtttcttacaaaaagaagctgcatacaaaaattctaaagttagaatagacaaggtctagccatcttcttttaaaactttatcagcagcttcatttagtagcctgttaacagcttcgtcaacgactttgttaggtattctaattacatcaagtgccccctttagagatggatcgacttcagggtcatatgtctgcggagggggatagagttcagctgcaccatagtacaagtgtatgttagttccgaagctaaaataatttacgaagctaggtcatgaaagatatacctataagtcttgcacgttctataacttcttcaattttcctggcctcttccaaggcagcatgagactctttctcattttttctggtagcttcgttagctacctcttggcctcccctcaaccagactttgaaatacaactttccacttagcacagcggcttctactaaaggattcttaatgtcattggctgagatagagaatcctggcagaaccatagc

SEQ ID NO: 144600 - DNA, 494 bp, Zea Mays
ttccaccaaacggtttttagctttttaacacctcacaactcacagctcatagcagttttttttcacagccacagccaaccaaacagaccctaagactgggtttaatgcctcctcccagctgtcccctacgctaaattaaagtggctacatgacgttgcgatatggtgcaacaaagccccctacggtgccctcttagatgttgctttcttctctctccctcatttctagcgtatcgctaaaatgcatggacgcgtacattcggtcagcacttttgcctgttcgtgtggtaccattgaaaaaaattatggtttgggggtgaggtagaggaaaccattgcagctggaggcgacatagagggagagataatgctgacatggcgccatagtgggatataagggggcaaacttttgggggaaccgtcgtacatagccatgttcggcaaaccaacatccaaaccaggattggaagtaagccaacccaggatcgagtgtgtc

SEQ ID NO: 144601 - DNA, 616 bp, Zea Mays
agcagctgcagctgtcgtctcaccaagcgcacgccaactcggacgcgaaacgtgtgcgcgaggtgcggtgcgtgcggcccagacgtgcgaatggagcgtttcagctcaggcgtacggggcatcgttggcagcaacaacgacctgctctggttttggttttgctaggcgctgacaacgacctgccctgctagaacgaaccagagaaataaaaaatgtacacttacatctataggtgtacatttggattgtggctaacaggccggccatagcacacaattctaggcacggttcaggtctggcacgtgccaatctatttatgggcctgggtcggtctggcataatatatgggtcgtgtctggatctcaactcaagcccacagtctggcctgactcatctcatttaactaagacacactaagacctaagtatctgtgatccgtccgctagccaccgcccagggccaggcgcacccagtattccccatttcccctaaccctaaaccatccaatcccgatctcctccctcggtctcgcgtcgtctcggtccctcccaggctcccatcgcccgtcgtccggtcatccctcccctcccgttcccttgtccgaccatccccttct

SEQ ID NO: 144602 - DNA, 656 bp, Zea Mays
ggacacacctagatatagctcagaattaatactaagcacttatcgactcaggtgtcactagagatcaccacacctgccccctctttagattgtgcatgccctcatggagtaagctcaggaaacatcttaaccagcacattccaatcttcccaagaagtggcttcatctttttttgtccactgaaccatcacctaggaaatggcatgattccccttcttcacaagtcgtcggtccaagatcttcaccagcctcagtgctccttgctccagatttagtgttgttggtaattcagagaaaactggtcgataattgggtgtaaagggattcaaccgtgaaacatggaaaactaactgtattgaagccccctcaggcaactccagctatacacttcactatcttgaaagggccaaagtaccgaaaagaaagcttaggacaagagcgaaacacaaccgaatgctgcacatattgttgtaacttgagtaagaccatctccccaacttgaaaaattcgatcagtcctcaatttatcaacctgttgtttcattcgattttgagctcaggccaactacactttcaacatctccatatgacggaatcgagcctctagcatttcagacacctgcacatcactagaattatgcactgctagagcagcag

SEQ ID NO: 144603 - DNA, 333 bp, Zea Mays
ttcaatagctgaagaggtctcaccgccaaattcaggcactatggccggttcaatgtagcgcggtcggtgagtaaggaccttcaactttttcctcttcggtgcgggctcgcttgaagcagctgaagcagcagccttcctagaagttgcaccctttcttttctgcccccgcggcgggtaccgatagttagggtacacaaatccaatagcatcaaaaaccctatttagtcttttcttttttcggctcctgaaggccgcagatagtgcattatcgtcagacttggagtatgctccaagtagttcatcactagtcatcgtctggttcgataaattggt

SEQ ID NO: 144604 - DNA, 621 bp, Zea Mays
tgccgctccagtaattctcaccaacactgcctttgttctcggcgtggaagtcacgagctccttatcacctgcgccatggaaggcgactcgaagtggtcggtaacatccaagcggcagggtaatccaaccattcctcttgtcttgtgtcccgaatgcggtctctacattgtactgtagctcaagattcgtaaataggatcatggaaatcaagggaggattttctacaaataatgttgagattgaaattaatttccttggccgttttaaccggcatttaaactaatttgtattttgtttggttcactaacaaaaaatggctctagatgcaccttctggcgatgtaaggaaaactacttggacatgattaataagatacagaagaaacatgaaagtttggagggtgaaacagagaagaaaattggatcgaagaattgtgaacaagagttgcagatgtctgttttagtcggattaggaaaggaaatagtccagttactaatcattgttgcttttgtgtgtttgcatatagtgtgcaatgtgtaccatgtggtacataattgggcacctcatgtttatgaaatgtgtctcaaatctaagttttagtatatgaacttgtgtatctga

SEQ ID NO: 144605 - DNA, 458 bp, Zea Mays
aataatcatccatatgcatggctacgcgacgcgacgcggcgctgttgcactgccagctgagctctgtgcaacgacgaccaaaacaagctaatcctctgctgcccaagttggcggtctgctaatctcgctagctctagctagctgtcgggaggcctccggggaaaaagaacagcgcaacgcaagctagcatcgcctttctgcaggcccgcaagtgggtctagtggggattgcagtaaagtgtatagtaatccaggataagccgccggcgctgcttttcggcatctgattagccagacaggacgttgattagagccagttgcacgcccacttctggcaacacacgaaccgggcatcagatcaggcatactattgaacactcctcctgacgatcgggtacggaatggccgccgttgcgttgttggggcgctagagctacccaccgtgcatgagtttaattt

SEQ ID NO: 144606 - DNA, 283 bp, Zea Mays
ccaggacctccttttctgtaaaaggggagtccaaggcagccaagttgtatctaggtaggccaagagctgccaggtcaattgttacatccctctgtccatcctgcccaataagatttttgtagaagaggtccactgctgcagctttctcactctgctcagatagaatgtggccgccatcaactaacttggcaacaaaattcctcttcttgcgatgcctagcatgaatgtgaaaaaactttgtatttgcatcaccttctcctaaccatgtgatcctagatctcag

SEQ ID NO: 144607 - DNA, 753 bp, Zea Mays
gccggaacaaagacccaagggtgtgtttatcgccgcgggaaaggaacattggagttgatcggatacagtgatgccaatcacgccggagacggtgatgacaggaagagcacctctggcgcaatcttcttccttggccagagcccggtcagctggcagtcccagaagcagcgtgtggtggcgctatcgttatgtgaggcagaatacatcgctggcgccaccgcggcgtgccaaggagtatggctgtcacgcctgctttcagacttgctgaacacaaaggtcgtcgcgccaatcctctacatcgacaacaagtctgcgcttgccctcgccaagaacccagtacttcatgatcgaagcaagcacatcgacatccgcttccatttcattcgagactgtcagcaacggctcgttggagacggatttcgtccgcaccgaagatcagatagctaatatactcacaaagccacttccgcgcgagcgtcttcaggaactgcggatacgaagtggtgtcaccagtattgaaccagcacaacacatttagggggagattgtagaagaataatttgtagcgctggtgtctagattttttagagtctaaagttagttgtgttagtggtcagcacgtcgtggccttctcgcgcggtcgttgcggaagtgcgttgagtagtctctgcttgcatgcagagtcaaatggtggaactagaaaactgggcatagtggccacgattttggctgtgggatggcacaaccgcttag

SEQ ID NO: 144608 - DNA, 668 bp, Zea Mays
tccccaactaaagcggtcttaaacgataagtacaccaaagcgaattactcgggtaaatccttaccgcagaatgaacaacgaagactcatgcccacggagaagacggttctacggcggtccttgaagtccggcaaggatcaacgagccgccagaagtccatgcgtagaattggcacaagaagattacccatgtgctggcgaaccaccgtaacccccaccaggccctcaaaccccgatgcatgggcaagggtgtatcgatggcgaggcacgactctgtagtatggagggaactccagtgaacgattggccatggtcgggactagacccgagcaaccaccaagcacggagggatccccagtccacgatgaagcccctgatagcccaatcgatgctggtcaatcggtggtggcgtggatacacggaggcggcctgatctacatctcgcacatctcgcatcaagtcgttagcgccacaggcgccgcgatgattgccgccgaggagggatggggacacaggggttgcaagggagccgattttatccccaagaacggatgtagtccgagtaggcgtagatcgaggagctgaactccaccatacaagagagtttgttgcacgcgcaaagcttgggaggtaggcaacaagagaatcggaggatcccaacgatcgttc

SEQ ID NO: 144609 - DNA, 1474 bp, Zea Mays
tggatattcttcacctattcgtcgtggcttccgggctgcataataatgtccagaagtctaatgtatatcccattcgttgcgacgagagtgacattgcagttgtgcaaggtttgctgccgtgtggaatttcgtccttcccttgtaaatatcttggacttccattaacggtgcggaagataaccaaggaacaggcgcagccaattatcgacaaatttgcaaatcagcttcctggatggaaggcagacttgatgacaagggttgggcgaatagttcaagtgcggtttgtgcttactgggatgttcatctacttagcaatggcaattgatctcccaacttatatcacaaaagcaatcgataaaaatccgaagaggctttctttggagaggtcgcaaagagataaatggggggcattgccttgtttcttggagcaaagtttgtcgacctcttgatttgggtggtcttggtatttcaagcattaaggagctgagttggacgctgcggatgcgttggttatggctacaaaaaacggagcctaaccgaccttggtcatccttgactatccaagttcctgacaaggttcaggccttcttcagtatggtgatgcaaacggaagtcgaaaacggtgctaatactcttttttgaaaggatcgatggattcaaggacagagggtggctgatattgcgccaagacttcttaaagttgttctgaaaagaaaattcaatacaaggacagtacaagaagctataactggaagagcatggatgtcggatatttgaggggccctatctgtgggggcaattgttgattatcttcacctctaaaacttattgttaactgctgaattaaggtagaatgttgaagataagcacatttttaggctggctaccaatggaaaatattcagcgaaatctgcctacgaggggcttttcattggctcgattccttttgaaccgtatgagaggatatggaaaacctgaccgcctcctaaatgtcggttttttctgcggttagttgctcaaaaaggtgttggacaactgatcgtctagcaaaaagaggattggatcaccctgatagctgccctctttgtgaacaagaaagtgaaacaatagaccatctactggtctcttgtgttttctcaagggagtgttggttccttttgttgagacaatttggactgcatactctgtccccctcaaccagaaaatgatagtttcctggactggtggaggacaataagtgaaatggcagctggacaaatgaagatgaggattaactcccttgttttgcttggtgcttggaccttatggaagcacaataatcagtgtgtcttcaagggcagcaatccgagtattgctgctgttctggagcaggttggagaagagcgaaggttgtgggagatggcaggggctaaagggcttattttcctagcagctaatcttcctcacggctaatttctgtttttttcctaaggca

SEQ ID NO: 144610 - DNA, 356 bp, Zea Mays
cacagcttagcatactagctattagggacatgtacggcctagcacatgtatgtgtcatgttacttctactcaagttatactatttgccacctctttaattagatatttagatgtgaggtgttcacttagatctgtacgtggtatcaaggtttctaagacccccttccaactccttcccatttctagctctttcctgcaccgtcgatccctagacgcgcatcaacctcctctctccatgcatgatatctctatgtcctttgcttcccatttgtgtgctcatcgataacggcacttgttggtgtctcgtaccccgaccccctgacactaacattgtggtaggtacatggataccaaag

SEQ ID NO: 144611 - DNA, 309 bp, Zea Mays
ggggaactggcagaccggggttaggatttgctactaaggatggaagtgtcgcttgctttgggaaggttggtgagtgcagtggtttgacacctttagagaaaccttcacccactcccaagcttatcaaaaccacccctgctaagcctatcacccctgtgagagatggtgtgatttatgaacctgtgagagctcctcctcataaacaagtgtggcttccaaaacctaactatctcaggaacacatttgacacctttcccgacatctctagcgatccccttcctagagcccctcagccatccaaaaagaaag

SEQ ID NO: 144612 - DNA, 420 bp, Zea Mays
agtgcctgctaccttcaaatgactggccttgactctctggcaggtgtcacattcagatacatacttagcaatttccctcttcattctggtccaccagtataaggatctgaggtcatgatacatcttattgctgccggggtgcatggagaattttgaaaggtgagcttcatccaatatcttctttctgagctcagggttcttggggacaactagtcggtctccaaaccatagaattcctttgttgtcctgatggaagcatttgtatttttctgccttctgttcgatcatttcctcgataacctgaacacccttgtcaccaatctgtgccatgactatttgctcttgtaaggtgggctccactgaaatataactcaaggcaccggaggaaacgacttctattttcatcttgcataattcatc

SEQ ID NO: 144613 - DNA, 363 bp, Zea Mays
ccaccgggttccacacgcgcaaaggtaagcgtttcgccatccagtggtctaggtctagctgttccggccttgccctgcaggacaggcgatcgtcgtaccacggtaccagccaaccgccgaaaatggcgtcagtcaaaattctactaagccggttcagtcatggtgtccactagtattggggaaatgttagcaaaacctcctccggtgtttgtagttacaccacgtaatatttttaagcccgttctttattcgcctacaccaggttagctgtctcctgtcctttgacacgtagatcagtataggggtgaaatatcctgtgcaatcaatcagtttggttgattgcatctaaaacctgctagctat

SEQ ID NO: 144614 - DNA, 785 bp, Zea Mays
aacatgaaattgtcctgaatgaatctcccttttataaatgcgctctgattaggcgacaccatcacgttaagcttgctggccaatctgttagcaaggattttggtgaccaacttggcaaaactgtgcaccaaactgataggcctgaaatctttaatattgtcaactccgtcttttttggggatcaatgtgatataggctgtattcaggcgcccaaaattgttaaatttcctgccccaaacagccgagatggctgccataatatcattcttgataattgtccagcaagccttgtagaaccttcctgtgaatccatcagggccaggggccttatctgagggcagacatttgatggcatcccaaacttcctgctctgaaatgggggcttccagatcggtcagatcaaaactgggcattccaagagcctctaactcaattgcccgtatcctgtccatactgtttcccaatagattggtgtagaaacggtccacacaggcagctttctcctcatggctggttaggttttgatccccatcaacaagacatgccacaaaattttttcttttacggtgacgggcgtgaaggtggaataactttgtattagcatctccatctttgagccatgaaatcctcgctctcagccttgcaatagttctcttgcaagatgataaaagtaatgcctgtttcttgagtctgagtttgagccagcattcagcagggctgagcactctaccatcctgcgctatttccagcttatggaggatttctttagcaagggcaagttggga

SEQ ID NO: 144615 - DNA, 401 bp, Zea Mays
ccaagctctccatcagcacccctggttcaggttgtaggggatcctttgagcacctctgtcatgcttgttagttaggtcgccatgttaggctcccattccccacctcctcttctcgagcagtaggcattttttatctaatacactatgatgtatgggcatcccctgtaatcagcatttctggctataagtattatttactcattatcgatgacttctcacattatctatggacttttcctttacgtcagaagtctaacacttatcccaccttgtctcacttcttcgcttgggtctccactcagtttggtcgcaccatccggagcatccagtgtgacaacgggcgtgagttttataataacgtgtcccgagacttcatcctctcttgtggcatccacctccgc

SEQ ID NO: 144616 - DNA, 512 bp, Zea Mays
tcttgatccactgaagtacttccttcctctaggccctgcttaggacggaatcgaccttaggccttctccatgtatttccaccactaagcggcttcatctcttggtttggtctatcacataatgctgccagatccactcttgcctttatgttatactttgacttatcaggaatgtccataattggtgcccaaagtgcctcgacaacattcttttcagtgtgcatcacgacaatgttgtgtggaaggagtaggtcgtcacaataggggagccgagtcaagcccgacttatgtttccacatatgctgctcaccatatcccacaaaaccaccttctgtattggccacaagcccatctatctgttgacgaatttcggaactagtcatcgttgcaggtggtcggtctatcactacgacacctttcgtaaagttcttgatgtctaggcaaaatggatggtcatgagggagaaattgccgatgtttatcgaatgacgaatatttgccaccctttttcaac

SEQ ID NO: 144617 - DNA, 413 bp, Zea Mays
agaagccaagtgcagatgacggcattcatgcgaatccaatcaggtgactcgagaaaacggaatcggagaggacgtggcactccagggaaaatttggtgagggtgagaaggaaagattcacaccagcgggcgtagaaggtggagttggtgtcaaggagaagtggaacaagagtccggatgttggttactgcaacagcctgggcgtgaaggtttagcagcggctgcctcgtggtggagaagagcagcatgaagagttgcaggtgggatgtcggactgtcggcgacggcgccagcgccagacgaatgagtatcctcctccggctggggaggagcagcggtcgcgcgctcccgggcggcgcgaacgcgggcttcagccgcgtcgtgttcctgctgggcaagcgcggcctcgcggtcg

SEQ ID NO: 144618 - DNA, 695 bp, Zea Mays
agccgccatgggaaatcaggttcggtcgtcgtgagggcctccaagctttgccgagaagcttcgccatggcgcagggaacgtttctgtggccccttctggcggattgggctgttcggggctctagaatcgctcaccggagcaaccccaacgctgtagatccgccatgaccgtggatgggtccctgcgcctcgacgttcgtcggtaagttggtcctatcatgttcgcctgggcccctgctatgtgtagcgcttttcggatcattgcttgggtgcgggcgcgagagatgggcgtgcctgccatggccgccgtcgtgtggtgtgcgcgcgccaccgctctggtgaccgagagataggagaacagcccctggccgttgatctggcatgggtggctgtgattaaaaccacgataccccttcgcagcattaaaatctgaccgttgaaacacgatctggcggtccaaattgagtgtaccccttcacaatgtaacatttgcaaaagagaccttgtggtttggagttatcaacccgccgtcctggggcagtagcagtgagttaaatagggtccctgacatttatagttcagccccgaaacttcctggtaatggtgtgcgcagtccatgaaacaaagaaaataggaaaaggaatttagaaattgattttgtgtgtaaaaataattgcagaaactcatagaaaattc

SEQ ID NO: 144619 - DNA, 432 bp, Zea Mays
gaaacaaccatttagtattgtaaacagatcataatcataaacattgatttgtatgaaatatggtaacaacataaacagaagaaaagaacccaacttttgaccatacatggggagtgggttcttttatactttgcctcagaaattattatcaattcaaatcacttgatcaactcatgagagtaatacaataaattgcctcagatttgtatgaataaacacctcatttgaccatacatgggaaaacatagggcagatggagaaatcagattaaaggatagagtatgtttggttgcgtgacccaaaataaaacatagactggaagaaaaccaagagcaaggaaaacaaagcagtaagtcaacctcccatgaatggccattagtcaaacatatttcatcataggcaaaattcacaaaatgagcaaggaaaacaaag

SEQ ID NO: 144620 - DNA, 520 bp, Zea Mays
ctgaagcaggtatggagttgatgagatacataccaagtgctacatttggtgcgtcctgagctgattttgcggtgatatggttaactcttcccttgttctggttttgataacttttaccctgagtgttattacaaataggtgtactctggtctaactgttggttgttgtttttctgaggtgtctgagtgttgcacttgcaattattggcatagtgcctagtttctccgcacttgaagcacccattgggttgaactggggtgatcggactattattcatggccgatgtgttcacggcgtttccttgacgattctgtggatatccgcctgacccttgtccttgctaataatttgttctctactgattgctcctctagcattgctgtcctgaccgttgcatatgttgttgattgtttccaccctaacttgcaaagagaaactgagaaccttgagaattgttgtcatgacgagtgtttctgctggaatgtccctgaaacttccttttatgatcaaataacacctt

SEQ ID NO: 144621 - DNA, 271 bp, Zea Mays
gacttctaggctgcttccatatgcgtgcgagtgccagccgttatggagcaaaaaagctctgccagccttaccgtccctacggcacgacgcctctaacgtcggcgaccgcgacgacgatgaccccgcgtatcccctcctcgtgtgctccgttcgcaatcgctgcctccatctcctacaggtgcggccatcctgtcacccccaaaaatctcagattcgtagctattagggtttctacctgtcgatctggaaataaaccatccatccgaacgcg

SEQ ID NO: 144622 - DNA, 522 bp, Zea Mays
caaatttattagttttctggaattacttttatactaaaaatccttttctatattcaattttataaatacccgagcttgggggttcaaaaattggaaaggtcagggtgttattcacaaataaaaggaccttgttgtgatagtctttaaactaggtgaaaccgcgggttgaatccccagtaatatggcgtctcttatgcaaacattcgggcacgaaggggtatcatggaatatcagccgtcggatgtaacttgtgtggtccagattagatcgaaatctaatcgaaccgatatgccttcctagcctctggatctgagatcaaagactgataacactcatgcaaagatctaatctccattggacgatttgcatcctacgacgaaggtttaatgaagcgaagggttatgtcttggtttaatcacggctgtctgcagggagatcaacggccagtagagcttctcttacgcccgaccaagcccgcggtggtgcctcgtcggcgtatggacatctcttgccccggcgcgc

SEQ ID NO: 144623 - DNA, 690 bp, Zea Mays
ccgcgtaggacggcgggttaatttggaataaaccgaggggctcataagtaagaatgacatgcaaaggggtatgggatgattactgtcgtgtgattggtaatcggtggtccagattatattcttttatccgaaccggtatgcagcccaggccgttagatcttgattcaacgcttagaattttatacggttccagactatccttgcccacccactagcagatctgtggtcacgatctatcccagccgaaccggtatgaggcttctaatcgcagccatccatcatagatccgatggttgcaagcttatcccctaccccaggtggtttgaccacggtggcgcattggagctacggcggtgcgcccgccggagttggtcaaaactgtgacagatggccacaccaccccacctgactagtgcaaaacaacttggaggcgatcgcgagacagaaggtgggcttacctctaagtatcatggcattcggagtcctgcccacgctgtggcgcggaacaccggcccctccccaagtccgacgagaaattgggtcgagaacggtggtctttcccgcccaccaatgtcacgatgagcacgcacgcaccccagcggccatcctcgagcacaccgcggacttcaaacggcggtggaggccaaggacagctgcggcggaggtcgggttcacgctgctctctctctc

SEQ ID NO: 144624 - DNA, 530 bp, Zea Mays
ggttagggttccaaaccttgggttgggatttttgggatgttacaaacctaccccacttaaaggaatctcgccctcgagatttagactggatttgagaaaagataagggtattcccttctcaaggagtcctcactctcccaggtagcttcctcttctccttctctgctccactgaactttacagagcttcacttctaaggtgcgggtctttcggacagccgaatcaagaatctttactggcttctctcggtactgaagatcgttctgaatctgcactgcctcttcttcaatgtgactttctggtgcttgcagccatttgcgaagctgggatacgtgaaacacattgtggatgtcagacatggattctggtagttcaaggcggtatgctgcgggtcctactctgccgatgatgggatagggaccgacgaatcacggtgctagctttccttttacttgaaacctcctgacaccacgcatcggggagaccttgaggtagacgaagtctccttcctcaaatttgagttctctccg

SEQ ID NO: 144625 - DNA, 292 bp, Zea Mays
gagaaattcattataggctatgtggatcacatattggccctagagctctactgggaaaaatctttcgtcaaggcttttacaggccgaaggcagcttcagacaccgtgaagtttgtacagaagtgtgacaattgtcaaagatgtgcaagaggccagaagcaaccttcgtatctaactctactcatacaacctaaatggcctctacaaagatggggaatggacataatatgctcaatgccaacaacacaaggaaacttgaaatatgcagtggtagcagtggagtacttttccaa

SEQ ID NO: 144626 - DNA, 311 bp, Zea Mays
cctaactcgaactcattgttactcgcatattgcctcatagcaagtctggattctttcatgtccttgcacaaactaccaaacttcattattgaattacaccggtcgtaagctaataccctttcaagtggtaaacaatcagtgcaaggcaatacatatgtttcatcatcaaattcatcacttcttcgaacaccaaaagcatcctccctagcactagtttcacgttcatcttcttcctgtaaacccaacttgtcatacatcaacaactccgaaacaacctctcggtagccttcttcttcccatctttgctcaat

SEQ ID NO: 144627 - DNA, 523 bp, Zea Mays
gtgggagacttggtccttcaacgaattctaacgggggagggacgacacaagctgtcaccactatgggaaggaccattcatcgtatcagaggtcacacggctgggatcatatcggcttacttagatggatggcacagaagtggggaactcgtggaacatagaacacctcaaaaaattttatccttagcgaagcctcaaagttcttgaaggaacattatactctgtaatttgaggacttcatcatcaataaagttttcgtctttcaaaagcactcagactcctgacttacaactgacttcaattgggctagacttgaattcagcttgcctacttgacttagggtgaccactataccgtgctaacggatcaatcggcttaagtcggcgacgacttaagtcagtgcgacatgctcacgcttacttgatttagggtgaccactataccctgttaacggagcaatcggcttaagtcgacgacgacttaagtcggtgcgacatgctcacgcttacttgacttagggtgac

SEQ ID NO: 144628 - DNA, 585 bp, Zea Mays
agacattgatggggtacatacttgatttattgtagttcacctttagccccgtcgaagttgcaaaagagttcagaacagctctgagaaaaaatagatgtctagggcaagcttccaatatcaacaatgtgtcatccacatattgaactatcggaaaatcttgaccacagttcgcgaccaggggtaacttgagcaggtcttgctgccgcgctttattgatgatgctctgtaacagatccgccgcgagaacaaaaagaagaggcgagaggggatctccctgcctaaccccgcgcttgcaatgaaaggttttccctggtacaccattaaggaggactgaggacgtgccagaccgaagaatatccctaatccagctcatccatctgggcccaaagcctctatgcaacatcacctgaagaatcaactcatgctcaagagaatcaaaggccttttcaaaatccaatttgagcacaataatctctttttttgaaatatgacaaagatgaatatattcaaatgcccaggccaagcagtcctgaatggttctttctttgatgaagccatattgatttttgtgaacaagggaagtca

SEQ ID NO: 144629 - DNA, 585 bp, Zea Mays
taaggggcaggtgtagtcactgttactataaagatgttccatcgtgtttaagactatacttaatctagcaatcatgctcgttactagggatgaaaaatcactataaccatgactaggtagtacgattgtactttcatgtattaaaagcactaggaactgtaataggctcctatcaagacatactgacaccataaaggcacatgtccttcactttgagcataacatcaagaggtcacctccacacaaaggattaagactggcgcatgcactagcataaactagatgactacgagctacaagatctgaggtggtatagatacaagaccatgataggatggggcagtaggcttgatgacaggtagagcccacaagtagaacatgcatgtgagctctatccccttgatctataaaaagggagggggtgagcaacatttaaggaggtcggtctaggaaccactctagggcattcattctatgtccaacatcccatttccaacataatacatgaaggattatggggaggctacactagcgcaaaacaaaattttcgaccccataaaaccaggaactactgcggttataaat

SEQ ID NO: 144630 - DNA, 452 bp, Zea Mays
ttatttgcccacttggattcttaccgctacaaacatttatctccccaaaaatgccattgaacccgcagttttctattagaggcagactggagttacaaccatttaggtttcagcataacagatttatttggcattgcctctttttcttattttccatgcagggaaaggaattcttggttacagtcactataaggaaaattgacagcaagtgctggtataactcgtgcagaaaatgcgcctgcacagctgtcactcacggagactcttacaaatgcacaaaccgtgattatgctaacaatgctatgcccgtccaaaggttagatgacgtgtcctcgagttgagcagcactcttcccttcgtcaactcaatgtaccagttttgtgtgcatcaaacatgacatgaatctatacaacaagttcatatactatattctctatcacccctcagccccc

SEQ ID NO: 144631 - DNA, 1181 bp, Zea Mays
tttgttttggataataagctgctggatacggaattacgctacttaaaactgtatcctatctacgcctaacttttttacaatttatgtacccatgaatttcaaatatctactttcaaggaagtaaaatgatcatatctgcagaccggtctttaaaaacatcttcctaatcttgtagtgtattgttcacattctaaaatcgtaatagtaacaaaaaatggtctgcagaagattgcaaataaaactgccaagacatatatttgtggctggagtagcattcttctgttgcatagcaagcaagctcttgagcgacaaaaatattttctaaaaaaattaaatggtatacatactttttctagtatactatgaaaaataaaatcatttataattagtaataaaaataattttaaagatataatcgaatattgtttttttctcgtatatggatactatcagatattccacggttgtgttgaatacgaatctggattaggatagagacaaataatagaaatcgaattcagatacatccatttaacattcatgttaaaatcgaatacgaatacaaatatccatattacattttaacgaatacaattacggataatttagatcttcgattgtgcgagtgcgtggcgccaacctctacaccggagacaaggatgccatgtgatgaaattctttatcggcgcactactgactacttaatttagactatctctagtatctatatttctatattcaaacttcactctacgaacagtgcgtagtgtaaacaatattttggttaaccatatggtaatacgcctaacttttttacaattttatgtacccatgaatttcaaatatctactttcaaggaagtaaaatgatcatatctgcagaccggtctttaaaaacatcttcctaatcttgtagtgtattgttcacattctaaaatcgtaatagtaacaaaaaaatggtacgcagaagattgcaaataaaactaagacaattatttgtggctggagtagcattcttctgttgcatagcatgccaagctcttgttcgatcaagttgctatcgggtcaaaactagagagaaataaacaaaaaagagagagaagtcattgcacaaaacttggaggcttggactgattcactgatagatagatattcattagctcacttgcaagcagcaaaaag

SEQ ID NO: 144632 - DNA, 329 bp, Zea Mays
gcatttgtttcaaaaaggtgacaaaacacttttggcgactccattggggacgattgcgttttagacttattaaaattagtccacaatggctgattctaaagatctcgacgatgttaccccaggcaacgacatccttgggtcgagttttgagagtttgttgacatacgaccagcaaggatttgaagactataagaataagctggagaaggagatggagaggtggtacctctcgcactttaggatggattgtcaccagaaggctgtctgggtgagggaagtagagtgtgcttccctgacggcattgcggtagccccctcactgtaagtaaa

SEQ ID NO: 144633 - DNA, 461 bp, Zea Mays
ctaagttttagggcaggtgtgaggttgttcatacatccttcaggcccttcaagaatggcatcgtctttctccacaagcccttgactccttttctagatgtggagcacgcagggagtgaggatgaggaggagtaagatgctccataggataaggctacacagcagatgccgccacctcctctaccaccgcagcagcgacagttctaggtgccatccctaggtattttgatccccatttagcaagcatccagtaatggatctagaacactatcctccctcagttccaagaaatgtggacacacatggatggtcagttcagcaacatgacatccagatttgagggtttgatgagagataagatgaggtttgcagagcatgcaggagcttcaagagcacgtctagatttaggtgcatgactcactcaaggcaagaatgaacaacatggggcagagtttttaggac

SEQ ID NO: 144634 - DNA, 311 bp, Zea Mays
atcatattgcacgacataaaatatttcgatacgcattcaccccataagtaacatcatcacacttgactctgacttaaccgtagaggaagcgatgactacttcggcatgtcaccacctctctacaggccaaatcaatattaaccacatcgatcgagtcttatatcacgtaatacttataatttattatctcaaatacaaccatatcccggcatgtacttgggacacttcggttcaacttacgcaatcactactacaacgcacttcggcacacatgtttgataacccacctttctaaattaacctatctcacc

SEQ ID NO: 144635 - DNA, 456 bp, Zea Mays
ctacgatatgacacggatgaacccgtatacactgccggaacagcagcacaaaccgccacctctagagtaacctgaccgctcttttttaccatctcataacctgagagcagactacctggcacacctgctggttgcgacctagttctgccaactttgtcctctcccaaatgctcctgcaactcctcacccaaacccagcccctagaatatacccgaccctgaacttccatcctccaaaatcgagtccagatccactaccttcttcctcgaatattttccttcactgtcctgccttccgtgcttgctgctttgctttgattttgtggcgtccacatttggataagccaatgcattaccaatgcctttgtttccattgttctgctgatcatcatcaccaacctccagatccaagtcatccatatccattggttctggattatcattgtccatattctcc

SEQ ID NO: 144636 - DNA, 377 bp, Zea Mays
cttttgcacactaagggcatatggcagttttgttaaaagaaaataggggcaagtgcaccaactttataaagtaggggtaaatgtgcagttagttgtgaaaataggggcatgtatacaattgtccctattactaaacgcggttgtgatacttaacaggaacactggcaacatgaaaagacattgttgccctttgcttcgtctctagttgactcgatgcatgccagccaccgtcgccaactctagggtttaagtttccctctagcgactccttcgcacatggcggtcggcgttgacaacgacgctcctaaggattcctgatctcctccatcttcatggcagcatcatcctctggagtcgcagccagctcctatgatgtc

SEQ ID NO: 144637 - DNA, 508 bp, Zea Mays
aagtattacatgcacctcactaggataacaatgtgcacgatattgatcaatgggtttgctacaggcgacatatggcccatcttgcccacacctctttaacattgtccaagtgtagtgtcgtggttttgtaaactaggaggacaatagaatttgtgttcgggaggggattcttgtgtggattcactccgaatggtgaaccaccgggggttcgaatagggggttgagacatagaatcatactgattcaggcttttcacactagtccagtatagtgttgatcgtagtattgcttgaggactgtttggtgtgtgtgtgtgagaagatggagcgagtcctgcccttttatagctcagggggtaggacttcacaaaggagacttgtttcctactagtaggagcatgatatgtttccccagttgaagtagtgcctttgacatcatccgtggggtcgtgcgtagccatacacccgatatggcatcctgcttcgctcgtccgatatttgggtccttg

SEQ ID NO: 144638 - DNA, 642 bp, Zea Mays
gcagtttaacaatacacaactaaattcccgtttgctcagctaacaggtacacaaaacacgctcatgcggacacagaggcaagcgatggctgacgagagcgtcaccttggaggaatgatagggcagtgcagtagtaccttggcgatcggatgcagagaagcacggcaaggatatcaccagaagcaacacaacgaagcgcagctccctcatcttgcgtagatcccactccggccgggcctccattctactccacctaatcagcccagccgcgctagagggccccggtggccgcgccgccccccgggaggggggggggaggtgcagcgcgttgaggagaagagagcgtcgagttcgagcaaggcggacggacgtcgggatcgcggagggggcggccgcggattcgagagtttcagtgggctggggctgggatgagcaagcagaaagaagagcggagcaagaacctcgagcacttgtcctttcctttttccttttgttttcttttgtccttattttctttcaggatggggattattcggattcgtgggccgagcattaacggaagaatggctggatggggaagcctgtgaccgctgctgtccttcagtccttgggcctttcgaccctcgcgcattaccgtttattg

SEQ ID NO: 144639 - DNA, 417 bp, Zea Mays
tcgccgaagctgcctcttcttcttcttctcctcaacaggcacagttggacggctaacctggcgaggacgttttgggcgagtaccctcaggctttcgggtgtccactattttgttaacctcttgtccaatcgtaacagccatcggttcagcatgggccgagtcagaagattctccagccaacatattgagtacaacatctatttctgcatcatccggacttgccagcatcgaaaagtgaacttgcctctcatcattgggaagatcacgaagaggagcaaccagagcttcaacgtcttcaggagagggtcgcactctaagacccaaaccactatcactagcaggagggttgaacacaaaattgaaaaatgacctaggaggtggcagattccaagcagaataagcaacatgagcaccaac

SEQ ID NO: 144640 - DNA, 310 bp, Zea Mays
caaggcggtggtttgctcattcgatgggaacaaccatgaggttgacatcctttcggcaggagacatgctgcggcagaagtttgatcttcgccatggtcagtatcaactcgttaagcattacccagagcagttttttatagtctttcctgatgcaagaacaaaacaatgggcacttgatagaagatcggtttcatatcgtgggcgagagtttcatttcggtgactggtccgaggagagctatgctagaaagacaagctgggagtttagagttaaggttcgggttgaagggatccctgtccactgctggggt

SEQ ID NO: 144641 - DNA, 397 bp, Zea Mays
gttgggcatctttgccctgggattgattaattatcgagatcgatagatgcaggcgtcggtcaccaacttattagcttggcagagcaatcctcgtgcgtgcaggtgtctagtgctacagccacgttcacgatgatgttctcgtcgtccatgtcggtcgtggagtactacctgctgcaccgcttcccagtgccttatggtactagtacctaccaccatatgcatccgctattaatttcttggttccctcgctctctcgatcgatcgccttgcattggttttgatgattctgcagctgcttacttcacgggcgtggcgttcgtggccgccatcacggggcagcactgcgtgaggaagctgatcgcgtggctgggccgcgcgtcgctcatcatcttcatcc

SEQ ID NO: 144642 - DNA, 864 bp, Zea Mays
ggtacttctaaccactcgcaagctccgtcactactttgacgaccacaaagtcatagtagttaccaggtttccaataggggatatccttcacaacaaagaagccatcggaagaatagctaagtgggcctgcgagctgggagctcatgacatagagtttcggcctcgcacagcaataaagactcaagcactagttgacttcgtaacagaattgactgagcatcaggttccagacaaccagaggctactgaagtatggtgaatgtatttcgacggcttgctgaaactgcagggagcaggcacagggatcctcttcattgcccctggagttgaacagctcaagtatgtgcttcagctattattcctagcatcaaataatgcagcaaaatatgaggcactgatccacgggttgaacatcgccgtatcactgggcgttaagaggttgatggtatacggagattcactagtggtcataagccagataaataaagattgggattgctcgactgattctatgggcaagtaatgtacagtcgtccgaaaattagaagacaagtttgaagggttggaattccatcacgtggaaagagaccgcaacgcagcagtagacatgttgtcgaagctgggatccagtcgggcccaggtcccacccggaatctttgtctaggaagtatcatgcccaagtattccctcagatcagatggaagaatgcaacaccttgagccaaccagaatcagaccctaatgactagagagagcctatcatcaggtacataaagaataaaaaagaaccggatgacaaggctgcagcagaacgcattgcgagacagtcggcccactacaccctcataggcggcgcactgtacaga

SEQ ID NO: 144643 - DNA, 442 bp, Zea Mays
tcttgaagggcccaatcatgtccagcccccagcacacaaacgaccaggtcataggaatagtctgcaactgttccgcgggtagatgatgctgctttcgtaagaactggcatgcctcgcacttctggactaactctgctacatcgttcttcgctattggccagtaaaacccagacctgaaagctttccctactagagtctgtgacgctgcatgcacgccacattgcccaacatggatctcgtccaacagctgctttccagtagctgagtgaatacacttcatgaggactcctcctgcacctcttctatacagtagaccccctataatggtatagtgggccgactgtctcgggatgcgttccgtcctgtcatatggttcttcctagtttcttatgtatctgatgattggctccctcctgtcattgcgatctacttctacctgact

SEQ ID NO: 144644 - DNA, 447 bp, Zea Mays
ctatagagagcctccaattgaatgggcttttttgggattttgaaaaattcgtttggccaaactctcctaataatttttgtagcttattaagtgtatgtcaacttttataattggcccaagccatgatttcatatttttcattgcctttttacaaatttccccttttgcacttaaatggcttaattagggttattttagggtttgggcatttttctcactttgaggtgcatgatatggttaaggtatgatccatgagatgaaaaagtcttaattaacattttgctcctcaagtttggtgtcttttgctcaatttgatttacatgtgataatggtcttgagattagtactgagaagaaaccctaagtaacacctgggttcagccgaaccggtatgtgtggactaatcctagccactcactccaagatctacgactcatgactcatcggc

SEQ ID NO: 144645 - DNA, 429 bp, Zea Mays
ggcagaagggaccttgcaagagacaaaaattgtttacaacatcgatgaaccaaaaggacaaatccaagattctaaaacgccagtgaaagaaaaggcatcttccgcggatcagccaaaaccaatacttctctgtgaggatgtcgcagagcaaagggtattcttcggcaactagctaactttagagaaagagtccaatctttgaaggttcctatttcataacagagatgtctttgcctggtcagcaaatgatctatgtggagtggataaaggtatagtagagcctgccttgaatgtggacccatgtgtcatgccacgcaagcaaaaactctagaagatgtccgaagataagactgaaggtgccaaagccaaagttaagagactgcttagtgctggagtcataagagaagttgtatatcctgaatggttggc

SEQ ID NO: 144646 - DNA, 737 bp, Zea Mays
ataataactgcaatggctagatgacatggcacacggtccgatctagtaccagcacagatggtaggtcctagtcaggatcccgaagacggtggcactattgaagatctagtggcgcaccagaccggtccggtgcgcctgtgcagagtagaattttagcaaattttctagcaacattgttggatatttggggctataaatacctcctccatcagccatgtcgagtacccaagcatccctagagcaaagaaacactaccatacacttgcacaacacctttgattcattctagagagatctgagcactcatttttgaagaagtagacatcctatcgagagtgttctcctaagatctgtgttttgtattgtgtgttgtattcttgctctttgtgttgtgttctactcctccatcttgcttccattgaaatagacacctcaaactcttggtgcttgtatgcaccattgtaatccatctgcacttgtgtgtgccattgtagttataatgggaagggttgtgtcgtgcgggaccataccaactgtgtttgtgttgtgattgccaaggtgtaccggagggaatgagacccatgacgttttactcataagcttggtagtggaaaaggcagggatcatctaagatggtctggaatgggagcaccacttaaacatggagaaggctcgtaacggagcaccacttgtgcatggagatggcctacagcgatctacgaaattatctgactggg

SEQ ID NO: 144647 - DNA, 371 bp, Zea Mays
gtcataaagtttccttcgtgtgcgatcttcaatgtgtcccaaatttctttgacattttccaagccatttaccttgttcttacctacatagagaagctagcaaaacagtggtagcttggaagtttaggtgaattaattcttctacttctaacccattataattttcatcatcaacatctggtatatacattccattttctacaatgtcctaaatgcaagggtggagtgaaaaaagatgacaacacattttgtggatccaccaagaatagtcctccctataaaagtgagaaggtttaccaagaggaatagaaagtagttgggcatttgagttgcgagaaatacacaaataattaaacatagtgcgattgaaat

SEQ ID NO: 144648 - DNA, 379 bp, Zea Mays
tttaactacgtgttgccttgtttttgttgtcatgaagcaataaaaaacaagtgaccaacattggcgcccacctccggtgattccacgaccacaacccatatcatgccgccgaagagggccacagcagcaaaatctgccctcagaactttggactcttacctaggagatgaagctctccatcaggaggcaagaaaccagaaaaggaaagctaatagcccagaaccgcacgaggaggagattgatgaagaaatcaacaatctagaattcattcatcagcaagttaagaagcgaagggagaagatgctttgtctagccgagctccaaaagaagattgatgaagcaaccgaggaaatatgtagcatcgaagcacacgacagcc

SEQ ID NO: 144649 - DNA, 981 bp, Zea Mays
ccccctgggccggactcggttgcgtcgcccgcgcactcgatcgggaatctgtttctgggcccggtcggccagcctcccatcgcgtgcacgaccgcactggcggtctgacacttgggccccgcgtgtaagagccatcatcctcgggtcacaacgaactggaccgctatcctcgcatgaccatcgggagaccaccgagcccggtcttcgtttcttccccacttctcgggccgttgcggggtcctcgcggatttaagtatcagccgccaccgttcctcgcacgtcttggaagattttagccgtgtgggattgctgcgggattgccaccattgaatcagccgacgcgagagaaataagagagggagagaagatcccctgcctgctccagcgattcccacgtcgggcgctgccgttgctttccctctgcgtgaaccggtagaccgccaagcgcatggccgaccggaggtacggcgattgctcgccgtcgattagcgccgccgcgggcccgtccttcactgcgaacacgcgcgtcttcgcctctaatcttggtaaagaaccctttccctctgtccgctttcagctcctcttcgcaatgcaccgatcggatttcgctattgggcgcttgggacagaaatcgctgtgccccggccatggcaccaccgtcagctcgggcagcgccgccgttctgctcgggtttatgggaagggatggtcgtggccattgatgataagatgggcgggtctgattgaagggcggtagcatttggttacgggccgtcgatcattgcacgggcggacgagatcagtgcccacatagtgttttaggctaatgcgtcgggtgtcgttcaattttgatcgaacggtcgaagattatttagattcggtgcttcgatctgaaacggacggctccggtcgtgtatgggttcataaagatggagatctaatcctagcggtctgatcatgatcggatggctcagtggtgtcg

SEQ ID NO: 144650 - DNA, 487 bp, Zea Mays
cagcaatccatagcgtgagagttaaggaggtggtagttgacggggagaacgacgtggggatcgtggtcggagcgggatttgtttgttcgcggctcgaagatgaggattcggggcgccatgggaatgcgtggctatcggagaatgagtcgcgcagcgcgggggcgggggcggctgcgcgcatgtcgggatggaagtggactgcgactgcggtagcgggatcgggatcggacggtggtgatgaacgtaattagatggttgggatacaggcgggggcatggttgtgcctggtctacgctaccgtcttaaggattagcagagatatacatgtttcgtaatttatataaaatgcatttaaaaagcagctttccttccgccccctcacaccaccgtcaactaccttttttcgttcgtcgccatgcacgacacagtcatatttgatacatataaaacataaattcagtattaaacggatacgaacaaatattac

SEQ ID NO: 144651 - DNA, 651 bp, Zea Mays
tgtcttggatcctttggttgggaattgggattcgaagccgtcgtcgggattgtctgttcccgttcttgaattctagcgcggaggcggattggattcgagctgcgagttttagcttactaatttttctgtgcggtgggtcgagtaatagaatctggagggcgtccttttgtgcgatattgtcagttcatagctgttactcagctcgatgatgcaggcagtgagctcaacatgttcgatgaaattgcttacccaagttacttatctaaggaaggattgctgcggtcagaattacatcttcaagattgtagactgacaactgtgtttccaaacttaaactgacggcaggacatgcaagaagcaagacacacttagggctggtttggtgactagagaattgggggttcattttctccctcaatccccttcaatatcacttaattccccggtcatcaaaccggtcagaattacagcgtaagggtgggtttggtgaccagtgaattgagaattccccctccaattactctcaattcccttatcaccaaaccaactctaaagcttagacacggcacctactgatttatgtaggactaattcctatggtcctatcaattgcaagggacatgcatctgtgcctatgatcctatttgttac

SEQ ID NO: 144652 - DNA, 822 bp, Zea Mays
gtgcacattagagagcagacaagttgtcccatcgattcagtgatttgtgagtattctctgaactctccaaggtctgaaacaacatcaccagatgctagccattttattgtcccaccgaattggtgatttgtgagtattctcttctcccctgttctcccatttccactgtatgttgattgttaaatgttgcattattactttgtaattgtagattgatatcaaaaccagagaatgaagaggacaaaaacattaagatcattttattgttgatcaagttatcgttgatcccgatcttcgcatgccaattaagtaaatcgatgcaatgtcaatgtgtaggtttaaattcacgtgctgatgtttatgaagctattagaggcgaggaaaccagatcatctttaattaggtaattttaactttttatcaagttttgtggtattttaaggtgctgaattgaggtaaatattactttagtctatgtttgtagtatattatgttttagcggtatatttagccacacgatatcttaaagagctttttaaaagtggctcgaggcgacaatttatagagctccgccactgcggtcggacacgccgccacccctccttcgctggtcgccaccaccactccgccggcgattctgtcaggtaaatccaacctcttccacaccttcttggtcttgctaggatttattttctctgttttcgctccttcttcttggatggcgacgaacgtgggctggacggatggtaggagcgagcgcggcagcttgtatttcggggtttggggacgacggtgacgaacaagtgttgttggggcctcggg

SEQ ID NO: 144653 - DNA, 592 bp, Zea Mays
gaagatgtcaccatttgaggctctatatggcagaaaatgcaggactcctctatattgggatcaaactggataaagacagttctttgggcctgaacttatacaagaggcagaagaacaagttcgaatgataagggagaatttgagaattgcacaatcaaggcagaagagctatgctgatacccggagaagactgcttgagtttaaggagggtgatcacgtgtatctgaaggtgtcaccaatccggggtatgaggaggtttaaagttaaaggaaagttgtcccctcgcttcattggacctttcttgatcttaaagcgagcgggataagttgcatatcaactagaactacccaattatattgcggatgtacatgatgtattccatgtatctcagctgaagaagtgcctcagggtacctgaagagcagctaccgatggaggaccttagtgttcaagatgatctgacttatgcagaatatcctatcaagattcttgatacactgactcgtgtcacaagaaataaggttataaagatgtgcaaagtgcaatggagtcaccacggagaagatgaagctacttgggagagagaagaagag

SEQ ID NO: 144654 - DNA, 499 bp, Zea Mays
cgttttcgcttgctgctctgtctcctcagctcacctaccctccggcctgaaatctgaaccacaaccactgctacagctagccaagctgccacgcccgccgacacaacggagatcgagccgagctgcttcttccatactacacgtccgtccaatcagcacacggaggaatcctttttcagcgcatgtacgtactacgactgcagatcaccatatgcatgcgtccgtacgacgcgcgtagtagttttatgcatatatgccggcgagttcgtccaaaccgctaacactaaggctacccgcagtgatatactgtaaagaagacgccaccaatataaggctaggtatagagtaaaattttactgcagtggagtactctataggtagctgtaaacttatggggggcaaacaaaacgctatttacagcgtcgatgcttttttactctatcagtccacacgtccatgcagcaggtacggtgccgagcgccatcagccggtgtggcag

SEQ ID NO: 144655 - DNA, 349 bp, Zea Mays
agggagaccgtcattggtaataataggttcacagaaacatgagatcaaaatgccagtgcataatctcattaagaacaacaaagaccaaacactaactcatcaaggccaacagaaatactttctggaaccacgatgagcatgatccttgagcagaattaaaatgtctgaatctcagttgactatgatccttgaataaagtagggttgtgtaagatgttgcagtttattacatatggctagggacctagggtacacaagataacaaaaacacagtgcaaatatcaacccaaaaaatctgtttcatcttcaatacacatctatgttcagcaagacagaagttactaggttac

SEQ ID NO: 144656 - DNA, 980 bp, Zea Mays
agccgctgccgggcacacagccgttgtcgccacaccctactccagtccgggccactagccgacgccaccactgttagcgcgtggtggagaagggaacaacagagggaagaatcagaggtagaagaagaaggctaggaggaggcggcggccagaacagccagccaccagaggtagtatattatcttcttctgtttcatcataatcccccgatcattcctagggtccgattatatatatcacttcattacaatacggcccagaaactctcacgttccggcgtttcacccgtggcatccgtgtagtggctccttcctctggctcgccaccagctttgttgcctgctcccccgttgtcttgggtgtcggcgctgacattcccccgttcttgaaacgccgcttgtccccaagccggcgcgtgtggaaacctatcttttagtgccatcaagtcttcccaggttgccaaggactcatccatgccggaccacagtactttgacttgcgccaccgtcgcgctgcccttttggatcatcctgctttgtaacacctgaataggtatctggagggcgtcaggatgaacatggagcgaagcagctaccacttgatttctgctgattgccgctttaagctgcgagacatgaaaaactggatgaatttgagctgaattaggtaattgtagtttgtacgcagcagcacccacacgctgtaaaatggtatatgggccaaaatatcggaaggctagtttttgattggagcgccgggtcaccgaggactgaacataaggttgtaatttgagatatacgcgatcaccaacagagaaaaccctctcagatcagtgttggtcagcatactttttcatgcgactttgagctctgaggaggtgctgctggactagttttgaaactacttccctttccttcatccattgatccagatctgtcacaagaatagccaagttttgatgtagaccgaagtgtttaggag

SEQ ID NO: 144657 - DNA, 405 bp, Zea Mays
ttatgagttgagcagatcttcggcaaatggaatgacagggaagatgcgttgagagtgggggtgggttgagaaaaactggtccatccttttaataggagtcacaacgatacccatggggaagatgttgggtggaaggttgggccgaattaggaatgcgcgcatggatgggggtgcggataggggcatggtgcatgcgcaagttacctactatggaagggggccgcctactatggaagctccacctgtggcacactaacgatgtgtaaggattgaaggtcgcctccatctatggaaggagacgctgaggttggaaggaggcgtgcttcggaggctgggtccatatgatgttgagggagtgagatataagcgagggcatggcaggggttgggtgcatgcacaggtgag

SEQ ID NO: 144658 - DNA, 511 bp, Zea Mays
attttccttggaatgtactagaattatgcatcacagcttgggttgtctccaatagctgtattgttgatcgatctgttttttatctatgttgtgttatacttcattttggtattaatatttagcctttttaaaaaaatttggtagatctttttaagttatcatcatgtccctgattagaggggcgtgcagaacattggtcatttgggtgattgtgggtggtagggtgaacgaatgctaaaccgagcactttttattgggcagtttgggacagcggtgattgtgggtggtagggtgaatggatgccaaaccgaacactttggattgggcacgctggggacagcggtgattgtgggtggtagggtgaacggatgccaaaccgagcactttggattgggcacgctggggacagcggtcaatctcaaggcctaggggctgaggtagatgaggatctctccttgtaaaaatggtgttcggtggttttcttgcaccaatcgtaagtcatagttctgaa

SEQ ID NO: 144659 - DNA, 482 bp, Zea Mays
ggaactatagctgttataggtgcattatgacacaatcttgaatgtctgcaacatcatgaagaaagctttatatgcatctatgatcgtccaacagttactttgaaggtactctatttgcactatccccttcttaattcaaaacttttcatgtaaatggaagtcttgaaatatgaagtggtgtttgatgaccgagctaggctaaaggggatccactgcgagtgctcctaggtcacggtgttgttataattaacactacggtttctcagtttctccatcaactggtttgtgaaacaatttttatagtgcctgtagctgaatagcaataataataatatgagctccttcattttgcttctttttacaatccatcttctctgttatttcgaattgcaaagcagtttttaatatgatcacagatcgataacacaaatactaatataaattttctactatccttgtttcagcacaaatcttgattttgt

SEQ ID NO: 144660 - DNA, 446 bp, Zea Mays
ggcagttgttggcatagtggcctagctcaccgcacttgaaacatccattgggttggacaggtgcgttgtttctggcctacgtgttactggcgccaccatgacggttttgtgaactcccactagacctttggttggtctgggagttgctcctttgctggttctgactctgattatttctctggccttgctgtctagagcgttgcacttgataattgcttccgccttgatttctagagcggaactgcgaaccttgagcgttattagggcgggtgttcctgcttgactgaccttgaaatttccttttgtggtcagatagctcctttcttttactctcaaggccaattgccttgttcaacagtgtctggaagttgggaaatgtatgactctgaagttggtaattcagaggtccaattagtccttccaggaaacgctcttggcgcttctca

SEQ ID NO: 144661 - DNA, 498 bp, Zea Mays
aaaaacaaaacttatgttatacctttgccttcgcttgatccacaaccaatgcttataaatctccaagattttgtgttctatgtggtccaaccctgcattcttatttctccaagaaacgttagtccacaaacaattgtcattaattaccaaaagatcactcaggggcctagatgattcacaatatccccctttttggtaattgatgacaacactacacattatatccaagagaagttttgtttttcaaatctccctcataccttagatataagaaggattttagagatgagtttcataagacttatcttgatttgaagtttcgtccgagagatagataaatcccaataaaactcaaaatgtaggaatagctccccctatgtgtgtgcatgatatttctagttgaagatacaacacacataatcgatcggagttttgatggagatctttctacagtcatggttatcgaggcatacaagaagtaatatgtatagtaagcac

SEQ ID NO: 144662 - DNA, 594 bp, Zea Mays
caccaattcatttattagtgaacagttggtgactaaattggataatactatcttggtgccggtccgtattccagttaaggtggcagatgggactattatccagtgttcttcgctgttgtctcaagccacttggagtgtccagcaatgctctttcactcaggatttgaaggtgctacccttgtcgtcttacgacgtgattctaggcatggattggttggagcagtttagtccaatggaagtggattggaagtttaagtggttggtgataccttatcaaggaacatcagttttgttgcaaggcacatctcagaacgtccctggtgacttattcatccatgttgctgtgttgcaagaatctgtacaggcttcccttcatcctgctgttgctgaactgctggatcagttttcagtgattttctcggtacctacttcattacctcctgttcgaaattgtgaccattctatacctcttgttcctggggcaagacctgtcagtatcaggccatataggtacccacctgctctaaaagatgagatcgagtctcaggtagctgaaatgctcaagtctggcatcattagacccagttactcggc

SEQ ID NO: 144663 - DNA, 724 bp, Zea Mays
agggtattatctcatatcgagagcccaaatttgcataaatctgcatgtctccatgcctttaccttcaagtttcgaccatgtgacctaccccatataattactatagaaaaacttcaacaagaagataacaaagaaataagttttcaaggtggtgttagagtaactctaaggggagttggacctaaactagggcaaaccctagtaagagtattcatagaggcatcaagatgggaatcatactaagaaaagaacagggtgtcaaaccatgcgatgacactgttcatgcttagaaggagtgttgaaccatctattggagtattgaggttggtagaaaggttctaaaaggaaaataggggcgttggactggttggatgaagcgtgtcagactatacattacataagtgtgccccaatggttgctaacggctagctctaagatagtagttgttgttagccattggaccctgacaaaagggtcgaaaggatactcgtcgatgatcagtagtgtatagaaggtcctagccgaggtataatggctatactcccctccaatcgaccaaaacaagtatgttggagtgctataagaatgtagaagtcttgagatacttcaccaaatgttgtaaccaccatatatgcttaagagaagattagatgattagagtagtgctttgcaatgcccttaagctaattagacccgcttaattttacttgttctaggtttagac

SEQ ID NO: 144664 - DNA, 543 bp, Zea Mays
aagagacctgggctttatataactgtggagagtcccgaccatcaacactgcaaatccatttaagcccacgttcgatcactttttatgcaagcgaactgatttagcgtaaacggaaaaccactttagcgtaaacagagtaaaagtcgcgagccctcgttccagaaaaagcggttttaggcccatttatcacgtggtcaaccatatcttccttagtcaacacatgtttacactactccattctcctgtttatacacaatagcgatttagcgtaactacttcatccgacccaagttacagaaatacaggattaggcccactaccccacttcccacgcggtcaaacatttctataccctaacccccgcgcggtcaaccttcctggccgactcgccgcgattcttcaggcgtcgccagggcgattcgtcttcatcctctcccgacagcgcgattcaccgtcctccgccgccgcacgccctcaactttaatcgtcgccgctgttgacagtatcgtcgagccgctgctgctgtcaatcctctgcgcctcg

SEQ ID NO: 144665 - DNA, 354 bp, Zea Mays
gtcaggactaaggaaagggagttgtcacgaagtcaccgctcatattgaggagattaaaccatcagaggctatcaatgtagtatcggatttcctagatgtgtttgccgaggaattactaggtatgccacctgaaagaaggttgaatttgccgtagagcttataccaggcaccacccctatttccaagagagcctatcgagtgtccggaccggaattggtggaactcaagaagcagattgatgagttatcggagaaaggttagatcagaccgagtacctcgctttgggcagccccagtgctatttgtggagaaaaaggatggaacaaagaggatgtgcattgactacagatccttg

SEQ ID NO: 144666 - DNA, 715 bp, Zea Mays
aaaacaccagcgtgcctcgttgtcacccggcggtcacttccaaaacaccggtgtgccacatcatcactcagctattaccctcaacatggccggcgcagcccgttctaactcggttgttatctctaaaaacgctgatgttacctctaagacgctgacgacgtcataagtcactcggcagttgcctctaaaacgccaatgtcatcgagtcactcggcagttacctctaaaacaccgatgtcatcaagtcactcggcagttacctctaaaacgccgatgtcgttgagtcactcgacagttacctctaaaaaacgccgatgtcgttttcagtcgctcggcggtcacctctaagacgccgacgacatcataagtcactcggctctttacctctaaaagtgccggcgcggtcatcagtcattctgacgctgacatggcttcgtcaccactcggacgctatctcaaaagcgcaaatgttgacaataatagctcgaccatcacccctaaaagcgtcgatgtgatgcccgagttatttaattactatcccaaaggagtcaacttcataaataaggcgggcggaggaatgattcaaaaactctaagttatgccacaaacacaacagcaagataatcggcacagaggagacgaaaccattcttcattaagggaagttggcatacttacaaatcaactcattatgagttgatacttccctactgcta

SEQ ID NO: 144667 - DNA, 410 bp, Zea Mays
aagacgccaagtcaccttcgtgggcctccccccataggcctgcacaagcacaatgcacagcacaacgcctgggtgacaccgtgagtccatgacagccgccgcccgccggtctgcccgtccctggctgttggctccctcagtccctccccccgccattttcggttctggcctgtggccttcccctttgcctccggtcgagtggacgtgctcccttctcattcacctccgagtggccgtgctccgcaccgctgcacctgcacagccgcgccgtgctcccttccccttcgggtcgccgaggcaccggggttgccggactatcgggcactggcttcttcaccagctcaactcgacattgccctcccctcagccgcagcaagacaagcaccatacgcgtcccgccgggcgccagc

SEQ ID NO: 144668 - DNA, 277 bp, Zea Mays
gatctgatcggcgatgagcgctggttgcaaaagagtagcggattggaacatcgattgatatcatgtgagagttgagggaataattgattgtattacatatgttgtacagaggtacatataggcactaggatggcatgcaaccaatcacacaagtaagattacaaccacaattaaggggttactactataaatacaatatgtgctaacaatttttgtaaatgaaacggtgggagatctgcatgttatattaaaaagagaggtgcacataaggtacaag

SEQ ID NO: 144669 - DNA, 495 bp, Zea Mays
aggccataccgccgtaggggccaagtccctaaagtccaaaataaatatacactttcctaacataccaacataatatacaaaactgattcccccccacccacccaccccaagcacatgaaacttggactatccaaatttgaatgtctaggtagctttcaccagatggaaactaaacacaggaggacttcatcatgagatcagatgaatatactaaatgccaaaatttgcagctaactgtaactaaatttatggagaaattccaacgttgctatgaaatttgacctcggcacttatttcacaatttatttataaaagaaggtttaagcatgaagagtcaataaaaagcaccaaactgagtcttttgtgctcaattgaaacgagtagagccaggtgttgaatccttccctcccacccaaacagaaaggtgcgtatatttttaccatagaaacagtgtgcatctgtaaactaaataaagctgaacagaagcggtgtcta

SEQ ID NO: 144670 - DNA, 557 bp, Zea Mays
tgaatttcgggaattaactcaaggaggaagatctgttagtgagtacgtgcacaaattcacagaattgactcgctatgcgcctgacgatgttagcacagaagccacgaagatggcccgtttcttgaaggggctaagaccagaactcaagactatcctcgctagccaagacttcatcagcttctcgcatctctcaaacaaggccatacaagtagaaagggctaaagaagaagaaaagggtcacctcaagagaaagttacaggtcctccgagctcagcagcaggacaggcaccagagaattcgatcctttgggtttccacccaagggaccaaacttcaacaagccagctagacccactccatcatgtttcagtcagcagggccaaagctcccttcaggccccctccgttgcaagcaaccaacctccagccaatgcctgttggcactgcggagaccccagtcactacaagaataattgtcctcagttgaaggcatatgtgcctacttactccaacttggtgaatggccccaagagttccctagcacccgcctctaaggcac

SEQ ID NO: 144671 - DNA, 761 bp, Zea Mays
gtacaaggccttcgttaatttcgtggtcttagttcgttatgaaaaacaaactaatatcatgagaggctactgttggggacctctttagccgaaggtcctcaaaacatcaacccgccaagttatttctgagtatgttttaagtgtaacaaggtgaaatgctgaaaattaccttggtctgggtacaatgtatgtatatcatgattgcaaggataaagcaacaagcttcgatttagcggagtacgtacgcgataaagtggtcggcaatagcgaggcggagtcctaaagacttgttcaacaagactacaaaaggaaaagatgtcgatacccttggtcgagtttataactcatatgtataggtttcaggacatgattgtaatttttaccgaagctgtacatcacgactataaatagaggaacaatgacatgcattagggacgcttttttgaactcagggaggactgatttgcttcgcctacaaagttgtgttctctgcataccttcgcattaatgtttgtgaagccgaagacatattttaatcatttgttatattataaagaatgaggaaaagtaataacataccaagatgagtaacttatttaatctgttatgtttcattatcgttttgtattgttatttgtccatggttcttatcttttcactttaattgatcttcgaagatgggttaattaaagggaggagcttaagaataattcattgtgttgccttatttttgatatctttcagaagtcaagagtgaccaa

SEQ ID NO: 144672 - DNA, 375 bp, Zea Mays
ggttaatcagttcaagaggggaactagcagaccggggttaggctttactgctaaggatgggagtgtcacttgttttggtaaggttggtgagtgcagtggcctgaaacccttagagaaacctttagccacgccaagcttgtcaagctcactccacccaaaaatgccactcctgctgtgagagatgttgtgattgaggtgcatgtgagagccccccttagaacaagtgtggattcaaaaaactaaccctctcaggaacacacttgacaccattcctggcgtctctagtgacccccttcttagagctcctcaaccacccaaaaataaagccccctcccacaagcaaaaaacactcaagcgagaggtgaggttccattg

SEQ ID NO: 144673 - DNA, 645 bp, Zea Mays
tgataatccattttttcggggtctctttagtaaaagccagagtcgaaggggtacaggtgactgcgagccgctcaagttagatccaatggcccgaatttaatgtactgaaagggtaagtcacgttctaatccccaccatttatttcatgatctacgcctcacaccactccctctctcgacctctcgactttggatctacggtttggatttaaaaatcttgaaaaggtacaatccgatcacatcccgatcaataatctcccgatcaactgctacggaccattcttctccaccaggtgcccggagacggtggcgctggtcacacccacggtggcgcacgccgacgcgcaggccaaatgacaaacgaacgatctattcccctccccgatgatgctacgcatggaatgggagctagctaacacaatcaacagcttcttagcgtgaaatttgggtgccactcgagctatgtgtgcagagcagcggcacgacgacggtgtttttgctccagcgagaaattgcatggtcactggtgattttctcatcgcaccggggcaatgaccactgttgttgttccctggcgaagcattctagaagcacactgaggccagaccgacggttgaggtgggcatcaactgcggcgccacacttt

SEQ ID NO: 144674 - DNA, 628 bp, Zea Mays
tgttcgcatcagatagatatatgttcatatgatttaaggatatcctgtcagcagcttacacatttgtctatctccatgcttcctttctttagttggagactggattattttttgttgggataaacttagtacattatcagagcatcttaactctggatatgggtgcctttaagggatatccaataaacaaaatttaaacacatttggtttgtcgtataggtacaaagccagcacatgcttgggcaggtttgatcagtttcactaggaactgttcactaattgactgtctcagtaatacaattgaatagcctgcaactcagttagccatgactttcttcgtcatagtttctttagctgaattattttgcacatattacatggatgtgcactacccatgttgttcaatatcccacatcaatatcgaattgagtgtgatgactgatgacaactaccagttattgtttcttgaattggcaacaacttggtctgtgagtcattcccactttgcccctacccttgctgagtagtgtcattcttttaggcataccttatagacgaatgattttttacattactgccttccccagtcaccatcccaccccattttttgtatcttggaaaatgtgac

SEQ ID NO: 144675 - DNA, 2108 bp, Zea Mays
ttggcagctaccatggctgcctccctgtgtcctctcctggctgggcagctagatgtagctgacctcggctgtcttgacgactgctccatggctgggggatgggcagcacgatggaaacggttctgaaccttggaatctgatgaagtcaggtgaaacttgattaaaatggctaatgacattgctgtttcaaaatagctgctgtgggacagttgttttttggagttgttcttttgtccaagttttatggatgctcttggagttgctcttaatttgacccaaaacagacgcaagttggccatatctttcccaacaccaccctctttgctttcagttagttatctcatccttatcgatttgaatagatatttacctgctgagactgagagtttactcttactgagtttgtcgtgtaatcgatcttgatttcttttcttggttgaattttttctctgcctatttattaatgggaggctggtcaaattcaaggagctgtggtttccagattcagtggccatggcgttcttccagtcgctcccagatcaatctagggctctaatagccgcagcccgagtaaacaatgggcttctggttacgcaccctcacacatcaatttgattgctgcagctttatgctgtaggctgtagccattttttctcttcaatcaatgtagccagttcgctgcagcttattccgaaacggcttctgctacagtattttgtctctgaattacagctgcagcagtctgaacagctgtcttaaagccgcagcgaacaggctagttgaggcctggtgatgagatctccctctgctgctattgctgcatggctgtgatgacaaaaaggttatttggttgattatgattacttaatgccatataaggatcaaaacgtgatgaccttatttgtgcgtgtctgagccgatgcaatgcagagtccatgtttactatttttcctgctgacattatcaccttcgatttttattcctgctgattactttttggcagtgatggtttctagtctgatccttgtgttcctgacactttttgtctactaagggttttgcactattgtttatttattctggtcatgggatggtaattaattcagggtacaaatatccttttatctatagctgacactttgacaggataatatccggatggcctgggacagaaacatatgtatgacctggctgggatgacaaaaacatacgttgtcgattggatttctttgtagtgtcttcgtatggcctggctgggatgacagaaacatacgtttctcgatcctgatacttgattttttttcaaggaccaaactttgatgacctttgtgcgtgtctgagccagtacaaatgagtatgttttcctttttttttaacttgaagttttccttatttattgttacaaggttatggccctttgacctttgtggctatgatgataaaatgtttgtttctcgatgctgagacttgaattattcaaggactatattttgatgagctctgtgtgtgtctgagccagcaccttcacctttgcttgaaaactatgaacctcttttgatgcccatggtatatttgaattctcttggcctgaagtgttggtattggctgtttgtctactgttatatttggagactttgcagattggaacaggttgctcgtgtccgaatcatgaaattgactgtgttgcggtgttagaaataataaccactattttctggatgagatataagcattacctattctttgtacgtaaagtatgcctttttttctgttgtccatggcttatttgagttccgtttagcacatttttgctttctttattcatttattgagttatggtgacaataatatccaaaatgatgctactggttacttgtctgttgtgatttttggcgagttctcaagttggatagattgctggcactgcttcagtcttgtgcattctaaaatgtcatcatagcttttctggatgatcatatctgtattaggggtcatgggtcctcttttatcgagtttaatacatgaacatggattctttgtggtcatcagattgtcatacatgacttgtggctacgtggctgctgttcctatccaggccatggttcgaa

SEQ ID NO: 144676 - DNA, 813 bp, Zea Mays
gatcaaccttccggagccaagtgcagtcagtggtgatgttctgagggagtagcatcgacctaagatacagatctcggtctggaggaggctcacttcatcttcagtgctcaaggcgaagaaactggtgtgaaggaaagatcaccaacatcttcctgaggatacaactcttgctgatcggaatcagaagccatcatccatggagggagatggtaggggcttggtttcttaggagttcggtggtattcaatcaaaaagacagtgggtttgcaagagacgacatagagccaagtcagtttctgctttggctaagcggcctgcacgatcggtgtcacctgtagtgggtgataaaccttgtatcatgcgatggactcagcagatgaccagagcagaggatgatctttagaaggcagtggtgattactgttatcagcgatcatgagaaggtcccggttgaagagattgctgagttgattgctcctaggctagagttggaagatagctccttgataattcgacagtcttcagagtcaagctacatcatgtttctacccaactgtggcatggtggatttgtgggtgggcagttgggccttttctcagggcagccactttcactatcacctgtaagaaaaggtctcgttttttgaattccaaaggtgttgtgttacctaccttattggacgtagagcttcagggaatccccatccttgcttgggaagccaagaccgtggaacaattgcttagtccttttgctagtgttcatcatgttcatccagacaccttggagctaaaggatgtggttgtttatcattgtt

SEQ ID NO: 144677 - DNA, 603 bp, Zea Mays
ttccaccggtaacgcctcaggctattaaagaccagctgcaaatcttcgatgaagctttctaagttttctgttttgatcactacatcatcgacgtaggcttccacccgcttgccccagtgatcgattaagcatgtttgaatggctctctggtaagttgctcctacgttcttgaggccgaatggcatggaggtatagcagaaagctccaaacggggtgataaaagcagtcttctctccatcttcttttgccaagctgatctgatggtacccggaataacagtttaggaaggacaacatagaacaaccagcggtcgaatcaaccacctgatctattctagggagcccgaagggatccttcggacaatgcttgttgagatcagtatagtcgacgcacatgcgccaatccactttattctttttgagtacaagaacaggatttgctagccactcaggatgcaacacttctctaatgaaccctacaaccactaagcgagctaactcggcgtgaatagcttctctcttgtcaggcgtgaaacgatgcagcttctatcgaatcggccttgcttgaggatagaccttcaatttgtgctcggccagttctctc

SEQ ID NO: 144678 - DNA, 370 bp, Zea Mays
taggaggaggctgccgatcgaggtcaagtatgctggcatcatgcttagttagcgaagactgctatctcagatagtgagtacgacaacctttccaagttcaatttataggcggcggccttagtcctcatgtattggtgtgtttaacttgtccgctttttattatcagaacatcagtaggttttggtttgttgtccgcttttattatcagaacatgagtgtgtttaacttggcctccgcctccccctctgcgcgccgccttctcgttcgcccgcagctgcacggcaacacacaccagccacaagcgtatcagctagcaatgccagtgtataatcgagaacagagtaaaaagctcagaccgatctcgttcatc

SEQ ID NO: 144679 - DNA, 632 bp, Zea Mays
cggcaggatttcatccgtaaggatgtccggaagctgctggacactgacttcatcgaagaggtccatgacccagtatggctggccaatccagtcattgttcccaaggctaatgggaagcttcggatgtgcatcgactacaccaacctcaataaggcctgtcccaaggactcatatccacttccacgaatagatcaaatcgtggattctacctctgggtgcgacctcttgtccttcctagatgcttactctggttttcatcagatccagatgtctagacaagataggaagtatactgcttttgtaaccgtggatgggctctactgttatgttgtaatgccttacggtctgaaaaactccttaccaacatttgtacgggtgatgagtaagactttcggggacctgattagggacagggtagaggtgtacgttgatgacatcgtggtcaagactaagagagggtcgaccctagtggaatacttaaccctggtcttcgacaagttgcgggcaacacgcacgaagctgaacccggacaagtgcgtctttggtgtctccgcagggaagttgttgggattcctggtttcgcaccggggcattgaagcaaacccagagaagatcaaggcaattgaggcaat

SEQ ID NO: 144680 - DNA, 409 bp, Zea Mays
cagggaagttactcggattcattgtcagccaccgaggaattgaagctaacctagaaaaatcgaggctatcatgagaatggaagcaccatgatcacagaagaaagtacaaaggcttactggatgcatggcagccttgagcaggttcatatcagggctaggcgaaaaaggcataccattctacaaattgctcaagaaggtggacaagttccagtggaccacaaaagcacaagaagctctcaatgcattgaagaagttctcgaccacgccaccagtgctaaagccgccacgccgagccacaccagatcagccgacagaagacctattattatacatctcctgcacgactcacgtggtgagcaccgcgttattagtcgagcgggcagaggaagggcacacatatccagtacag

SEQ ID NO: 144681 - DNA, 338 bp, Zea Mays
tggaaatccaccgttaagaagggacatgttgaagcaatgaagggcaaatatttttatgatatatctattgtgagggctggaggagagaacaatgttcctcttcctgaagctgatgaagtggttgttttcaagagtttcatgaaggttggccttcggtttcctctccataaaatgctggatgaagtgttaaatcgatttgaaatataccttcatcaacttactcccgaagctttaattaaagtcagaatttctatttgggcgataaaaagccaggtattggaaccagacgctgattgtttttgcaacattcacgagttgtcttatcaaacgaaggccac

SEQ ID NO: 144682 - DNA, 656 bp, Zea Mays
caaatggcatcaccacaaactcaaaatgtccagtgtgcgtttgaaaggcagttttaaattcctctcccggttgtaaccgaacttgatgatatccagaaatgagatccaatgtggaaaaccaactagctcccgccaattcatcaatcaactgatcaaatataggtattggatacttacttttaaccgtcaaagcattcaaataacggtaatcaacacaaaacctataagacccatccttcttccttactaaaagcacaggagagctaaaagaggatgaactaggcctgatcagaccttgttgtaacatagagttcacttgcttttcaatctcatctttcaaagatggtgaataccggtaaggtcttacagacactggtctagctccggcaatcagtggaatagaatgatcacaaggtcttgaggggggtaaagcagttggagccgacaccaccccaggaaacttgtctagcaagattgcaacctcaggcaacaatgatggtgttgaaggcttcacctctggataggacactgaagcaatatgaatcagcaactcctcactcttattgtgccctgcaccaaacaaacatacagtggtaccctggtatgtaatagacaaccatttctgacgccaatgaatctccatagggctatgattt

SEQ ID NO: 144683 - DNA, 441 bp, Zea Mays
tggctagattagtgagttcggggggacttgggcatcgttttggagtcgcaggggggccaggattgttgctcgggcaccagattcttatgcgccggcgaagcaccgccgctcggatgcagcgccgccgactctggcagaactggggggagagaacgccgtaggaccgttggatgcgccttaagcggttgcgattagatcgtagtgataccccttcgcgggatgtgatcagaggcgtagatctagcgatagacggctctgatcgtgtccatggtcgcggattgttgtggaccattgatccgcgatctgatgattctcgtggcgtaccgctttgtcgcacctgctaaatgatctgagccacccacgtgggatcggacgatcgcagcgcccacataatcttaacactcgctggtttaatcgtggccgtctactcgcaatctggcg

SEQ ID NO: 144684 - DNA, 454 bp, Zea Mays
agtgaagcgagttcgctttgatttgtgtggactggatggaatggtcaggttgccatttgtattgattttgggggcgatatgactgattggattcattttagtcagttttacttcccatttttgttgttgatgctggtatagatccctcttattatgtctaatatcaatgttttgtgtagatttgttgttgtgggtgtatggtttactacatgcagattggtgtggcaatgttgatgcacctgtaaatattcttacgatgcataatgtagctaaaaattgatgcatcagccctgtttcttaagacttgtcatgttcgttgtagctttatgttgcggtactacatctatggcagatttagtcgctgctgccatacaccagatgcccagatcttcttcaggccttcgtcggtgagtagtatcacaaggtacgccaatcgcttggtcttatcttcctg

SEQ ID NO: 144685 - DNA, 1510 bp, Zea Mays
cccatcttctctcataagcagttcactcatgttgaactacttgcaagatagataacaacaagcatactgtgcgtattagatgatgtaaaggattttactaaaagctaagaggtactactatttgcagggaaggattttactaaaagcaaataggtaagatgtgtagattcagtcataatgaagcttgcttatgattgtgcaatttcataattgtggttgcactataactgttgttttcccctgatctacataattgttggcttctaagtaaaggaaaaaggcattatgggactctttggtggcttgcattagcctgtatctaggcttctgcagtgtacttcgcctgtttggttgtggaaatctttatgcaagcttaaacaatgttcaaagtactagctagtacattgattaggcgatgtagatttacacaagctgatgaacaaaaaaagtggagaaattctcatctctttctaccagtactagaaacataagttctctactaaaacatggatgtgactgcatataacacaatgtaaggaaccaaacacaactgtatcagtgcacaatgattacataaatcaatttacaatatctctgagaacaacgaatgaataattaaactaaatctagtgatggttagggtttaggggttggacctttctgacttctgtgcctccttttgttcaccatcaaggtcgtctgcgatgacccaaatccagcgatggttagggtttaggggttggcgagagcaatgtggatggggcgtgttaggtggaaggggcgagagaaatgcggatggcaatgagatatagcgagatgcggtgagtgaagtcggcgacgacgcagctcatcgacgcgatgagaggtaagggggcgggcgtgaggtacctggtcgagggggcaggtcgtcgacggcggatgtgtcccagcggcggtggtgaggtacctggtcgagggggcaggtcgtcgacagcggttgtgtcccggtggcggcgattaggtttggagaaaatagtgggggagaaagaagaggagtggggagatagaggatgagagcggcgtctgttttagtgacgacggcgaaacatgttttttggcgcccaatgtgtttggcaatgcggaggctaatgcgtttaagtatatattgaaaacatgtgcatagctcaatggtttgacctgctaactatgagatcgagctcccaggttcaagtgcctgcaaggagacattttttgtgttttgcctaccattttatattaattctttgttttttatttctctctatgtttttttgcaattatctcttcatggacacattagtttggtttatgatcatgttataatattttgaaatatttttgacatagtggtactatacatctctcacttgcaatagcatctctcacttagtaattagccttatatgagatatgtatgcctttcttaggatgtgtgtcaccactttgtccgaatgaattgaaactattttgtcaacattgtacaccaaaatga

SEQ ID NO: 144686 - DNA, 412 bp, Zea Mays
tcccgacagttcctctccgagcggtcccaactcgagcgggaccacaaggagtacaagagggacctccagaaggtgtgcgccagggagctggaggcgtcccggagggagaagaaggtgaccaggagggaggaggtcgtgtctcagtgggaagccctcacaacagagtaccaggccaagctgagtgccctggaccagaccctggaggcccagcgtgtctagcagaccaaggctgtggagaggctacaaaagtggcagcaagagctcaagggcaaggccagcgacgccgccctcgtcgaggagaacctcaaggcgaaggagcagtccttggacaggcgggagacggatctcgccaggtgagagacggatctcaccttcagggaagacatgctcacccgacgaggcgagatgctgg

SEQ ID NO: 144687 - DNA, 306 bp, Zea Mays
caagatggttaacttgactacctgagcgataaatctccatttatgacatttaaccaattaactaacatagaacacgacgccactaagcaaaacattaatgtatcattacaattggcacaattaattctagttgaatatgtcggctagccggtaggaacactagacccattcctcatattattaatttgaccacacatcacaaacatggctaccaatatatttcatcaagagatgaaagcctcatagctaagtgctggtaaactaacaagacagagctagtaacctaattgtaccattaatgtgccc

SEQ ID NO: 144688 - DNA, 517 bp, Zea Mays
gattaaggaaattaaaactttgattagtttgggtaaagccccagatttcacagaagatgaacaaggcacaatatggtttaagaagagaatctgtgtaccggaaatcgagcacttacgccaacttattttgagagaagctcatgattcagcttactctattcaccctggaagtacaaagatgtaccaggatcttaaggaaaagtattggtggtacggtttgaaaagagatgttgctactcatgttgcattatgtgacgtgtgtcagcgagttaaagctgaacaccaaagaccagcaggattgctacaacctctcaagataccggaatggaaatgggaagaaatcagtatggatttcatagttggactaccccgtactcgggatggctatgattcaatatgggtcatagtagacaggttaactaaagtagcacactttatacctgtgaagacaacttactcgggagcccagttagcagagttgtacatgtcgaggattgtttgtctgcatggagtaccg

SEQ ID NO: 144689 - DNA, 690 bp, Zea Mays
cggtaggcatgcatgctcttcacctcgagctcaagctcggcagcacgcttgcgggaagcttgggcctaagcacaggtgctctcggcctccgtctttgcctcggtagcgacttcttttttcgtcgttgagccgacgactaagatattaattctctttctcaagcattgtcaccttatcaagaaggttttggctcttattcttggccgctgacttatcctgatagcttaggtatgttgcatctgaaggcgctcaattttgccctcgagccatttcctctcataacgtagctgtgaggttgtaacgtccaccagcgccccggacgcaacatggtcgaaaaagacatccacctaacgttacattaaaaaggtaaaaaaactcacatagcgtagctgtcgcgcgacaaccaccatcacgctttcggccacagacgccacaacgatttcgcctccgccattagctgcggcgcaaaattgcgtccacgggtccggcgaggtcccagctgcatccctcgccgaagcccccgtgtcagcgggtggccttgctggtgccaccaccaactgtccagtctcagtccctacactagaatcacaggttagcacaaacacgcatcaccttacccaatccataacaaacatcccacttaccatcaggcggcagccccgtctgggcgtcaaacatagtgatgcctcc

SEQ ID NO: 144690 - DNA, 326 bp, Zea Mays
caagcttccccttgctccctatggctcctcaacatcatagcatcgccccgcatattcatgggggtgagcatttttctccccccaaaaggccaggaaaagatgaccagccatatgagtcacctagggcaagcattaatgccctacagaacccaaacccataggcaagaaagcaacataatacccaaacacccacaccattgataaactagagggatgacggactcctatgggccaccatcgatatagtaagggaggggttagctgagacattttgagataagctcgaaattagcatgacccttggggtagtcatattggaaacctta

SEQ ID NO: 144691 - DNA, 762 bp, Zea Mays
cgaatgtgggaggtttgagtctcagaaagtcccccattctgtcttgcggtctttcaccatttggccgttgattttccagatttcgagtgaggacctcgatgagtcgggtctgattggctagaacttgggctaggtctaagggtaggggtggaggtgcggggaggtgggtttcactttcctctctaacgacttccccttcagctcttcgggggaaacctgctccaatccctgaggcggtaggcgtggttttatccgaagccatctgccagggaagagaatcactgtcatgcacatgcaaattgttttcaaccaagttattttattcattacaccatcacattacaagcataagactactacagggggagactacacgagagcgttcttcgaggtactagcaagttccttgtctaaggtgtccccaaatgccttgagaaggtcgtcgaggctggctagggatacatcttcttcgtcagaccagtcatctattctggggggaggtagggctagaggggccttcttcttcttcttctctgtctggcatccttggttagtggtcttcttctagatcttctttttgggggcgagcgcctttagcttcttgtcaaagtctatcttcaaggcccgataggcctcacgggtgttggcttcctcgccttccactatgctgagactctcctggagagatgccttctcttgcgtaagctctttgacttgctgctctaggctttccactcgggagtttaggtgggtacaatggga

SEQ ID NO: 144692 - DNA, 300 bp, Zea Mays
cggaccgtacgtaagtgcgaggaaaaggggtagttggcccatcacggctagtttggtgggggtgtgctataaatagatggagtccgggtgttggacagctgtcttggccatttgaaccatctattgagcacatttaagccatccaacttctcacactcacacacatttctagggattgcattttagtgagtttgagagtgatctagtgcattgcatcacattgttaaatcttgaggcactaggaggataatcaataaatcgtcatcggcttgtgcgaacacaaggttgacttgtcccttg

SEQ ID NO: 144693 - DNA, 497 bp, Zea Mays
gcctttccgggggaggcagattgccgcaggagcctagaactcgatggaaagtggatcggcgcggaccgacgcgcgggggatggcgagcttgggggcccgtggagcgagcgagggcgcccgagattggtgggcggggtttctagaagcgagaatggaaggcgccatgaatggcggctgggggctcaccgagattgccgcgggggagaggggagcgcttgcctagggagattgccgcggtaggagagggaaggagtgcgacgaaaccgtggtcgcggcagaacgtgcaccagtggacgcctacactacacacttaagtagtagtagagattgtggagtggttttgcaagtataggagtgcctcggaccttgtagtgctctagagcccaaagtgccctaggacctttatcgattgttaacaggacttgatggtatagatgttttttccttggaattgcccccgtccgaagggtcaagcacttccccagctgaccagtgtg

SEQ ID NO: 144694 - DNA, 437 bp, Zea Mays
gccccatctagtctcgcttcggcctccgaaggctgaaggtggctattgaaggtgacatcaaagcatgctagaaggcctttagcaatgtttgtgccttcattggcacaagagatataatccaagagcacatagcctatagggtgtggccacttgtggatagctgggaaatgtcaaaggaaactactgctgaatccagtgaaggtggcctagttcgattgaaatataccttcagattcagagagaagtttgatgaaccaaacgatgactggttgaaatgcattgaagctaccagcgacgagctgcttgggacatattcgaaggctgaagatgatgccttgtccgcagcttttgggggccggggcaagaaaagattgaacatggtgtttgatgcaattggcttcgtataccctgattatcactacccattgcgaaggcaa

SEQ ID NO: 144695 - DNA, 934 bp, Zea Mays
ggcaaggccacgggagtgcccgaatgttggtgtagctgctattttaccgggaggagcattcgtagtcaatgcctcaaggatgcaagcttgtcgctaaaccttgttaaaaaaaaacatcgtgtctcagtatgattctcgtttgcgtattttcttgtatggtgttatgcttccgtgttcttcggttagcagatccatttggttctagatctaaccatgcactctaacacagttaagttatatgcatattttttccttgttgagatgattatgttttgcaactgtgtttgtttgacattcttttctagtggtcgttactaatcatttcatctgtcaaggtgtatgcatattttgtccttttttagatgattagtttttgcaactgtgttcatattgctgaaatgaagtgtctgttggtggaacttctgcatttatcaataaatccacttataaacgcagctacccgttcatagacggtcaagttattttgacaggatgggaagaagaaatctctaatgtggccagcaatatcatggaggagccaagtccaaagcagtaagctatcccttgctccctgacgtcttatagttcagcaaatgtgtactttaaacgtctgaacagaaatgttttgatttgctgtgcgtacagactgtttcttgtccggggaaagatcagaaaaatgattgaacatgatgtgtcacctcatttcattttctctgtaagctttgtttcattaatgtctctatgatttctatagtccagtagcttgttttctccagacagattgtataactgttgatcttccctttttgttatcctttatctgacattgtagcacctggtcgcggaactgaaaagggacaaggatgaagacttccagcacagcgttgatgaattggcctcggacttgaaccatgtaagcattgctagcatctgc

SEQ ID NO: 144696 - DNA, 323 bp, Zea Mays
aaaaaagacaaataacatctcacgactcacgtgttcctttgcgtgacctcatgtgaactgggcatgttaatttcttacatatgctcattctccagttcaactctggacgctggatgatagatgcttgttaatgaataatgcaatatttatttggtgctgtttaattaaaatcctgatgtattaattatgctgctgtccttctagtcattgcaaaataaagctgcgaaacaaaacgttgatttattgaacaaagttgaaagtcttataattgagtttaaacatgtaagagacgactatgacagtttactgtcttatattgcaac

SEQ ID NO: 144697 - DNA, 304 bp, Zea Mays
cacagggctactaaaacaatacgtgagaagcgcagaatcataccagaattgtccggccacggagcgcggagaatttgtgctcgctggtgactaagaagggggaaaacatcattgcgacgagctcgagtggaattgggaggtcttgttggggctatacagtcgcaaagggctactgattcaccgtgcacactcaatttggggagaggtggagaaggcagtgcgaattttggcttctaccaagttcactggtgaaattgtgagtgcctcgccgtggtccatggcgctatttataggcacagcggtc

SEQ ID NO: 144698 - DNA, 480 bp, Zea Mays
ccttcagcgaggccgtcagagatgctacatgggcagaattcgaaacagcctttcgtgagcaccatgtaccccaagggatagttcaactcaaggaagatgagttccaggagctaactcaaggtggaagaactgtcagtgagtatgtgcacaagttcacagagttggcacgttacgcgcctgacgatgtcagcaccgagtctaggaagatggcccgttttctgaaagggctaagacccgagcttacgaccatcctcgccagccaagacttcctcaacttctctcacctctccaacaaagccatccaagtggaaagggcaaaagaggaagaaaaagggcacctcaagaggaaattctaggttctccgagctcagcagcaagatcgtcaccagagaactcgaccctttgggcttccacccaggggaccaagcttcaatagaccagctggacccactctgtcacgctacagtcagcagagtcaga

SEQ ID NO: 144699 - DNA, 324 bp, Zea Mays
tgcgcatgtagtcggtctttgtgcggacagtttggtgtagtcgttttcgcacttgtttaagcttcatccggctgcacccttaggcaattgttgcacggatagtcttcgcggaagacttcgattcgtcgcacttgttgcgctagcccggctgcacccttaggcgtcttctgcacggatagtcttcgcggaagactacgatttttcgcacttattgtgctagtccggctgcacccttaggcgacttctgcacggatagtcttcgcggaagactacgattgttcgcactcgttgtgctagcccggctgcacccttagatgacttctg

SEQ ID NO: 144700 - DNA, 565 bp, Zea Mays
cgcggattccgggtccgaggttcaccagcgcaggggggaaataaagactcgaccgtgccgtaggtacctgcctatcgtgctcttgccgctgttccacaagcaccatcgtgccgccgtgggttcttcttgttccgccacaagtgaagctcgtcatcgctgggactctgtcctcggggttggcctaggctgggtcgccatcgtctagggtggccgtccgcgacctcaattggagggcggaccttggggagcgtgggtaattcctcaccgtgatcccgccaccgtcgtacttccgcccatcgccgtggccacgctcctgtgcctcatttcgtcggtaaggaaacccatccaatcgactcgcctcgtcctcctctacgtttagctcggtccaatttgggtttggcgctcgggaacggccgattggcagcctcgccggtgtgctccgccgagcgtgcggggcagcgccgccgtgcgggtgtgctccgttgggggaaagatcgtgcgccgttggatgcagttcgggcggtcccgattgatcttcgcgtaccgcttcgcggggtccctcgtg

SEQ ID NO: 144701 - DNA, 548 bp, Zea Mays
ttctagttcagttgtttttggcttcagagctgcaaccttcctcttcttcggagcagctaccttcggctcagggctcgattttctccttttcagaatttcttcatcttcttttaccattctagcagcttgcctgctcagaacactaacaatccttttccttttttgtccttcggcacccttgttcaatcgctcataatcgggatattcgaagtttagggcatccatcacacgattcaaccttcgcttcggccgggtgccgaaggctgcagtcatcagctgatcttctttttagtgtaattttccaaaattttgttgcacatggtttctatcatttctaaccattcttgacatggccctttgaactgtttctcgaatttgaacttataaggtagtcgcacaagttccttcttctcctttatcccctttagcttcggcatgttccattcactcagcgtcgagaacaccctataggccaaatattcttggactaaatctctggtcccgatcagctcagctaccacccggaattctgccatagcttgttggca

SEQ ID NO: 144702 - DNA, 473 bp, Zea Mays
gagggagtgatgctatgtggggccacacctacagttggcaaaagaataaagaatgggagaatcatgatggataaggaagacaccattagtaattaggttgctattgatctctattaggataattgtttggaatttaaacccattctacttttggttgtaagctcttgtatctaaaggagcgatgtcaattggaaaaggcaagcaaataattattcctaatttccttcccatctttgtgagctcttgctcctttatttaagaggaagcaatgcaaggatatggccttcccatcgagaacattcaccggccactctcacgatagacaagcaccccaagaacgaatttctcagcgttttctatataatgaatatgccatcctttgatctgcactgtatatagcaacatgtggacgctgtcaaatggaaaacgtgaagaaaaatatggttcatgagctcattatgctaagttccttg

SEQ ID NO: 144703 - DNA, 592 bp, Zea Mays
catggtgtcaccggtggggaagtggaggcagttccgggtgggtgggtacacggaccaatcccgcctacgccacgtcacgtcacggcgtagctactgggatagatatggaagtgcgtgaaagcctcgatccaactgaccagctcgcgctgtccccccgatccaactgtccagctcgcgcgtgtccgcacggatgagactgaattgacattgacggcatggtggtggacacgacacaagtgggcggggcggagcggaacggaaagcctgcgccaacttgctgtagagctcgtggcggcggcaaggacgcaaggtgatcatcggaggacatagagtttggaacttggaagcgtgagcttcgtgcgtgccaatcaatgatccgcaagccgcgaccgcgaacgagggaaaaggcggtttggtaggtttaggtagggggacttgtccgcgaagttacaggtaacgagaactgtcgttgccacaagtatctcgccacgccacggggacgggcgtggaaaaaacgtagtacctggcaagatgaaatcggcgactgacaagcaacctgtgtggtccggtaactatcgttgctgcaacaagt

SEQ ID NO: 144704 - DNA, 745 bp, Zea Mays
catgagtcagtagaaggacgagggaaagattcgccctagaagtacccgtcctcggatagtctcgaggcacagagcctgggatcgagcgaggtggagtcagaaggagaggtcgggctaatcgagaggaagccactcgagtggatttcgcgcctgacccaggactaacccgctgtaagtgagtgaccaaattaactatgcttggcaccgagccatagtgggcgagtcggtcctccttccactcatgacctacgagtccctaggcctacggcccactcatgacctatcgagcctaggtatgagtgtactcaccgtctacaggacccgcaacacgacgaaccgcaccgagacctaggctatggagaccaggggacggtaatggcacaacgatgataatgatggtgtcggagctgttcaccgcccacacatccaattttaaataacatggccagagaagcctagacgaccgaagcgcatgcctacaagcatgactttgctgaggtagaacgtcctctttatcatggcgcggtagctcctaccttgagaagctaccggtaactgaccccacctcagcctataaaaggaggagggtcgggggggggcacgaggacacggagagacgaacgagatacatacagagacatagagacgaactcatggcgggagacggatagacgactacacgccggaggactacggaggccgagaccaaggagctcgccaccacgacgcctaaggcttagctagg

SEQ ID NO: 144705 - DNA, 422 bp, Zea Mays
gatcacttaatactaattttactaggtccaaggatcaatttgtaaatttctagggcataaactgaattacttttacactcccctggacggcgggttgattctgataaaacagatggctctttagcaaattaccgaggtcgaaggggtatccatcaccaggagtcgttcgatctgtttttaacgccgcagattagatccacaaagttgtgaaccgaaatccagtatcagcggtcagatcccgatcccacgctcgagattaaaggatcccgcgatctgatctcgaccaacagatccgagatcaacgactatgaattttcgatcacgatggggtatttgagattcaatcgtgagcactcatcatcggatcgatgaccagggctgtttctcccctgcacgatcttgttcaagccggaacagggctg

SEQ ID NO: 144706 - DNA, 340 bp, Zea Mays
ggactttgtgtttggcaatgcctaggccatgttccggacctgcccgctgctggtgcgccgcccaccgaaaggcaagcacaatgtgctgacggcccagggctacaacaatgcaagccacgagttcggcttcttgttccacatgtgcaccgtggaagcggcgccgggcgtggaccttgacggcgtggagacctacctcggccgcccctacaggaacttctccaacgtcgccttcattaagtcgtatcttagtcacgtggtcagccccaacggatgggtcgcgtggaacaagaacaaggtcgtcgaggataccacccgaaccatcttatacctggaatacggc

SEQ ID NO: 144707 - DNA, 514 bp, Zea Mays
aggggttgtacccgcctgcttgtggctgtggacaagttcactaagtggatagagtccaagacgatcgccaaactcacgtcgtcggaggccgcaaccttgttccgtgacatcatctactgattcgaggtgcccaactccatcaccaccgacaacgacacctcgtttatctaggagcccaaacagtaattctgcgatgacttcaacatcccgtcgaccggcagccatgacacacccgaaatccaatgggcaggtcgacgcgtgaatgggctaatcctacaaggtttagaaccgcaaatcttcaataaacttaaaaagtatgtcgaatgatgggtggctgggctactagcggtactttggagcttgcgaacgacaccatctagggcaacgagttgcacgcctttcttcttggcgtttggcgcagaggccgtattgcccatggaattagaatatgactccccaaggactaaggctttcgacgacatacaagcgactacagacgcacaactcactattg

SEQ ID NO: 144708 - DNA, 312 bp, Zea Mays
acccagcttcagttccagcgtgtggaccatttccagtgcaagccactagcccgctaggcgcgtttcaattttcactcctgtccttcaagcggtcaagcccaatcagccagcccatgcacatggcacattcgaaaaattgtgctcaagtacgggtaggatatgagatgacctagtatccatccgtatccgccacattttcacccctatgtggtgtccccaaatattcccgtgagcagcagatgccttttgtccgtccagtccaactcgccatcgtccgtcccatagctaaattgtgatcaacgtgatgccgac

SEQ ID NO: 144709 - DNA, 746 bp, Zea Mays
gcgaaattaaagcgtaaatgggagggatggggatggggcatggcgaacctgaaggcgatggtactatgcgaaagaatgtagggaaatggaacgaagaaggagagggggaaatgaaccagggcggagaacggtggagggcaaacgatgaagcacgacgattagggcgagtgggggcggtgggggtggtcgtcgatggcgatcgtaggagcgggtgacggcgacggcgaggagcggaattttgagggtttcggtggggccgcgatgagtgggttgattgtggtcgggtgggtcttggacattgaccatattggctcggtcggctagtggggagcgacgcataactgtggggacccatagtgtgcgcacgatcagttggtcagtgtgtgtacgtcgtgttcatatgaagcataaagtgttgtgcaaaggatcgtaaatagtttatacaagcattaatcccgaaccacaccccggatgtggtataaattgttgtgtgtacatcgtgttcatatggagcataatttgttgtgtaaaggatcataaacactgtgcgtctgattgatatgtagttgttatcatcaatttatacaagcataaaccccgaaccacaaccccacagcgacccgaccacaccgctacaacaatttatgtaaccattgtcgtcaaaatacacatgcataaacgcggcacacccccacgcgcgaccccaccacaaccccggtgcacccgcgcggaacccccgccacggc

SEQ ID NO: 144710 - DNA, 383 bp, Zea Mays
ggttactcatgtcctgcacggttattggaacgttttctggaccaccatgcatttctgaaacaaaatccataatgcaatgttgtggaatcctactttcttgcatcgcactaaggaactccatataatcacgatcatgagttttgttgcattgcaattgccctttttctgtatctttcttcaagaattcatgattatgctcatagtttaccagatcaattcagacggaaataacattctctttagcatcatcatagattttttaaagtttcatcccagccttgcactgtgttcgttttgaacatgtgttacgtatccttggatttccagctaccctttcaacattctttccttccattgaacaattcaaccatttacaattcttc

SEQ ID NO: 144711 - DNA, 1159 bp, Zea Mays
cgcctccaaggcttggctctggctgcgacctccggtgtccgtcgtctgccctccggcgtccgttcgttgtccgtccgtcccgtccgccgttcgccctccagcgtccgtgctgtcgtgcgtcgtccgcgcccggcgcctccgcggtccgccgaatgcccatgaggctgtgacccatccggtcgtccgcacgtccggtccagcgtgcaggtcccgaggtccggccaggcgggccagctagccaaccggccaggggcagcgtcgggcgccgctcgcccctcgacggctcagccacgtccagtgcccattcggccagcaagtcccaatctgacagtggcagtgggccagtggcagtcgacctccctggctccctccaatttccaattctccgttacgtttgatttccatccactgctccaagccttcgaatctccaacagtcctactaactgtaagcatcttctcattttcttagcttcttttttcttttgttactagtgaacaacgagctagatactatattgttaaatgtttctgtgatggtagattgacataatggatgggaggaattgtttgagaaggtaaagaccttttataatcaacataacattattgtaccaaagatgaatgatacaattactgttcgaggtcgctcaaggggacatggaggtcagttagtgacttactatcatcatttcaaaaatgagatctttattgttgtgtatgatcaagttattgtggaattaaaaattcgttttattgaaagatctactcaattattcaaatgcatttcttgtctagatctaagaaaaagctacctccataaggttcaagtgatatatttttgtgctcactcatatatttttgcattaattagttatattgtcatgttgtatctctcattttatataaatatttaacttgcaatgtgtaggttcaaattcacgtgctaatgttgatgaagttattagaggcagggaaggaccaaatcgtctctaattaggtacttttatatttttatcaagtttattgtatttttagatgctaaattgaagtaaatactatcttagtctatgtttgtggtatattttgttttagcggtatttagccgtatattatattaggggctctttaaagtaaccttcaagttttatagtggcccg

SEQ ID NO: 144712 - DNA, 488 bp, Zea Mays
cggcttgctgcgggctttgcgctgctggagatgctgcccgcgtcacagaacatggtggcgcgtcctgggagctcccacctccaggggacagggagcgcgctggcgagccttggtgatcagacatcggctgctcccgatctgcagtctcctggtgctggcgttccagcatgtagtggtccgagatggtgaagggatgctcgcagtccacgtccgaggatgctccccagtcccagcgctcgtcctcggcgaagatggcgtcacgggagacatgtactcgattggcgatggggtcgtagaagcggtacgctttggagtcgtcctggtagccgatgaagacgaccttgattccacgatcatcaagcttgctgagatgtgggcacactttcttgacgtaggccacacacccgaacaccttcaggaagtgcacgggtggcttctttgcatgccaggcttcaaacggcgttatgccatcaagagcactggtgggc

SEQ ID NO: 144713 - DNA, 478 bp, Zea Mays
ggggcactgggaaccataggccgacggcgccagcactctgtgtttggtgttgaggcaaggagctaatgcgtgcgtggagaggaggagccttggacacaacgtccaggcactgctgctgcaggacgccgacgggtcgacgacaaggaacatggatggcgtccatggcgaggatgaagaagggggcgcaacgaggaaaggctagaggaggcgcgctaccgcgttttggaacagagaggaggagaagtggcgtgtgggggaagggaaggagaggggtgggctaccatttattgagctggagctctggacatgtcaggtggcagtgagcagtggcaggtggaaaatgtcgacattgggcggccatttttggtgtttctgcttgttttcggaccttggtcgctgtagaagatttcttccttgatgtacactctacaattgttgtacagaacttgaggtgattcggacactggttagagagtta

SEQ ID NO: 144714 - DNA, 463 bp, Zea Mays
ttttgatgcttgtcgtgatgaatttgtaatgaatttggatctttgtaacgattgtcaccaaggtgtgggcatcccctgccacatggtgtagttagtaataaagtcagttatttagttgggcaacccatttgtttccactttcctctttatctgagaagatgtgtttggctgttttgggagtcagtaaagatggtcaattgttcagtgttttgaagatttccatatatcttttcttatgctgaaagactgcaaagttagatctgatgtgtgtgtgctttctacagatgtctgaaaataggtgtagaggtggaaggcgtgctcagcaagcaccccaagatgaggcaccttagtagcagttgccaccaccaccctcgatgaccattgagtagatgttcctgatgcaaacacaagcagtccaagcaattggccagacattagtagcaatgcagcaggtgcagcagca

SEQ ID NO: 144715 - DNA, 510 bp, Zea Mays
gcctgatgtcaggttggagttatcctgagcggcgtcccgtgcctcatcgaccttggagcgcggtcttaagggtcaggaggctggtctggattgttctactcccatggaagtggatgaaggtccttcagccttagaggtggctgttacagagagctcggccctcaaggatggcgctagcgcttacctagcccccgagggtgtcaccggggatgatccggctcggatgggtagcgcgagctatgacccagcccccgagggtgtccgagttggttctccctctcacacttccatggatgttcacgtagggtcttctcctgtgcattctggttgcatggcagcagctcaagcttcgggtcaggaagtcgccttagaggccagcgctcctgatgacagagttttgacttctgctgatgacactgacttggtccccactgatgcattgcgggttgttctggttggtgatccttcatcgagtcatcaattaacttcccacgacttgggagttccttc

SEQ ID NO: 144716 - DNA, 526 bp, Zea Mays
aagggaactgtctgaccacaaaaggaagttccaaggtcagtctagcaggaacaaccgcccgaacaactcgcaaggttctcagttccgctctggaaattagggtggaaataattatcaagtgcaacgctctggacaacaaggccagagaaacaatcaaagttagaaccagcagaggaacaactctcagaccaaccaaaggtctggtggtagttcgcagaatcatcaaggtggcgccgtgaacacgcaggccagaaacgacaacgcaccagtccaacccaatggttgtttcaagtgcagtgagcatggccattatgctaacaactgccctaggcgcaaccagcagacacctcaaaagagcaacaaacagaggaatgaccagaacacccctgctcgtggatttgcacagaataggactccgcagaacaagagtagaggaagagtcaatcacgtcacagctgaatcacttcctgaggatgccgacgtggtgtatggtatgtttcttatcaactccatacctgcaccagtt

SEQ ID NO: 144717 - DNA, 463 bp, Zea Mays
cgcaactaatgcgggaaagtatgcatcccatccgcactcaacgctagggccctaagttagaggctttcctcgggcatcgtatggtggcttatgccaggggtatttatccacgtgttagcaccggacccctacctcgatgaggggtagacatagggataagtggtgacactgtcttcccaagtcttcctggccgtgggctcgaccctcacctgagggggtctaggctcctgtcgcccctgcctggacgtgtgacgactccggacttcaccgggcctgaggtttggatggtgtcttgcatgcccagacccgttctgaaggcttggcgctgtaaccagagagcaccttctccttcgggtattaatgttctctttgaatcccgttgattagggatccaatgagtcacaaataagttggggtccttattgcaggatcccagacctatagctaaagttgttaattcctc

SEQ ID NO: 144718 - DNA, 780 bp, Zea Mays
tccgagtctcctcactagcggtgccgacaaagcacagagcgatccccaaacggtccagatcagcgatcaacggcaaggccactttcggaacctcggacctgctaagggcatcaaccaccacatttgccttccccgggtgataatggacaaatcataatctttaatcaattcgagccaccgacgctgcctcaaattaagctccttctgagtgaaaatatacttgagacttttatgatcggtgtaaatgtcacaagactcgccataaagataatgcctccacgactttagagcaaaaaccaccgcggccaattcaagatcatgagttgggtaattcccctcatgcttcctcaactgccttgaaccataagcaatcactctgccttcctgcattaacacacagccaagaccaattcgagaagcatccgtataaactgtgaaacgcttaccgctctcaggcaaagctaggatcgaggtacggtgtccaccaatttgttcttcaatgtctgataactgacctcgcaatcgctggaccagatgaagagaacacccttctcgaagagtctagtcaaaggcttagcaatgctggaaaattcggtacgaagcaccgataatatccagcgagccccaagaaactttggatttcggacacactagagggtctcttccactccacctcagccgcaacattcttgggatcaaccgcaatgccctactgattaatcacatgccccaggaaagccactttggacaaccaaaaggcacacttcttcaacttgccat

SEQ ID NO: 144719 - DNA, 331 bp, Zea Mays
cagcaacctggaagctattcatcaacatgtgggaaagaggagggaaaagatgcttcagctggttgagctccaaaagaagattgataaagcagccgaggaaatgcgacatattacataggatactgagcaagggcacaaaacgcaacaaagagaccttcgtcaagaaggccccaaccatgatgacatgtggtatgatgattttcaccatgataacattgcttttgatgatgcttccccctagctacagagttgcaggctgtcccatggccaccatcgcacaagccatctcagctacccatgtacgatggtcactcagacctgaagcagtttc

SEQ ID NO: 144720 - DNA, 608 bp, Zea Mays
catagaatcattattgaacccccaaaacacttgaattcaaacaaataatttttttcatgatttacgtaggtggcactgaattttaccccttcaagtgctgctcttgtagttgtgcctgaagttgatgctctgctaatacgaagggtgtatttaattaccaaagtaataagttgttgtcaacttgttaaccgacctaaataatatatggaaaagggtatatgaaatccaagctttttcaagacatgcttgtagcgattgtgccatagctgtaaaaaaagaggctgaaacagagacttgtgcacctgatcaatgaggagctctattttctttttccatgccaatgcatcttcaatatcatgagcaccgacctgcgttcgaaaacttatgtcaccggatcaatggtataaggcatagtaaatgtaagactaactactgagaagtccaacaaagtagaaagactaactaatacaagtgcaaaatgaaatttccccaaaacagctattcaccagtaattagtatgttagtaaaaagttatcgggcatagatgtctgcttacagatctcaacccaagatgtcattgccctgcaatatcttagactatggctgtg

SEQ ID NO: 144721 - DNA, 613 bp, Zea Mays
tgggataggaactatagctcggcaatttggccgccgccgtttatctctccgccagtcgtcgtggtccgcgctgctcggccctcaaagtttgctgtagagcgtatggtcgagtccgctgtaccctaaatgccgtatatctgtagtttagtggggggaaaagccatggaggaaccgagatggccatcaccggccatcccccgccgcgttcgggggagtagcgccatcgcacgtggactcgggtggggaagatgggctactgtcgtccgatccattttgggcggccatgatcacgccaacctatctgtgtggctaggttgattcgggtccgtccgatcgtaatcgggagaactcggggctgatcgcttgtacattaaacctgggccgtagatctcacatcctgcgctcgtcatcgcgtaccggttcggatagacatgatctaatccctaccacccgcgcgaaatctgacggccaggaaccgaccgtaccccttcgcctggcatttatctaaagagaccctagattattaacaaatcaacacgcagtccaccctgtactattctctgtgtctaggaatttttacctaggcgcccctgtcttttctggttattgaggc

SEQ ID NO: 144722 - DNA, 849 bp, Zea Mays
gccggctggccgctcggagtcaaggtctgggcggtataaatccatctccttcttctttcccccacaaccacctctctccattgtcgcgaggaagcttggtccggcctgagtctgcgccccgctcgcctgccaggaaggtgaagacgaattgctgccagtggggaggagcaccagcgcgagggcctgtgcctcattgcggaaagccggggacggagttatgcagggacggcgcacgtagacttatcagaagcagcgacggctgggcagctcttcggtaagtgactcccctccctcgcacctgctcggcgtaccatcatttgcatagcgtgcataccgttgttgaagccgattgctagctcgtcgtggcggggcgcggcgccaccattaccccggcgttgatctgagagcgatagcaaaggcggtcggtagtggggagtcgatggcgtttccgccgtcgtccgtcggtgaccgcgtatttttcctggagcgcgttggcgagtagacccgttggggaagatgatgtgctggtcgtcgatctgttaacagatgctcgtgattagacggagggtagtgcatgtggcatccgcaggatcttagatgggcggagcagatttaatcgcgcatacccttgggcgatccaatctagaccatccgactgataatgagcgtcttagattagactcaacttacctcttcgtttatttaaatctgagccatccaatctagatccaacgtccgagaaaacaggataccccttcagcgcagtcgttttgcagaggagcccttaaagaattgcagaatgaacctggcgtccaccactactgctcaccgagtattaggaacattacg

SEQ ID NO: 144723 - DNA, 289 bp, Zea Mays
ctattgcttacttaataagtagtagagatatagtgataacatacatgattgtccaagggtgacaaaggaaatcaggatgtggagaagagacaaatgaaggaagtagggaaggtacaggacaaggtcgtggcctgacctcgctgtcagacagtgagggtggacttgttccatacaggggcgctggagttggtgtccggaagctagagtagctcccgctagacaggcagtgctgcaagagcgaagagtcccacccatgtgagatgagcgagcacatcaatcaacggccggg

SEQ ID NO: 144724 - DNA, 763 bp, Zea Mays
aaaagtgccgccgccagtgcattctgttttccgcgccgcgcctcgtcgagtgaagtggtctggggtccttgcggacttgtactggacctgcggaaaccgggaattcggccggcgagggcctggtgaggacctaattgctcgccagtggaaagtatcccggtgccgtcggtgtgcttcgtctccactgtgtgtctccacaccatccttggtgagtacggccccctcgtctctatttggttggaacagcgcgttgcgaccggggattagagtagaggcattagtttgggaggatcgtgatcaccggtaatggagcgccgccgtgcagcacccgtctcgccgccaacggagctcgggataatgatgaccgtgttgtgtcgtagatctgagagcgaatggtcctgattaaacggggcgtaccggttgaggagatcgaatctgcgtcgttgaccaggcatcggacgaccagggggaatccgtagggttttaaggctccaccatttattttagatcatgcagccgtgagtgaaggtgtgcgtatcgtgcacggtgagacgtcgatcttagatcggacggttcctgtctcattccagtgcacggaaatgcagatctaatctatgccgactgaatcaaatccagtggccggtaccccttcgcgggtacactttgctaaagagaccccacacttcacatgaataaatccgcagcccacttgggtgtctccctgagtcttagtttcttttacgctagagcccctgcgttttcc

SEQ ID NO: 144725 - DNA, 863 bp, Zea Mays
aagcagtcctaccggctccgtcctttcctcatcccaccttcctgccctcgcgaaccatcaatttggcggcggagtgcacggcgcctgtgtgacaagatccacgccgccattgaattagcgctctggtggtcgctcgggaccctctggtggaatggggattgccgcctggtgcttgcgacggggattgcaacctgttacaccgcggtgctcaagtggagcttcaccaatttcacgtcggtgttgatcagcggaagccgcatccgccattgccgccgccaaaccatgaccttgccgtgacgggagtaagttatccattgtccgtttcgccttcttgtccgcatcgcgtaggtagtcgcaatttgtggtttgggcactggagatcgggtttggggcattgccggtgagcttcgtcatcgtttggcggggcggcgccgccgggttggccgcctggttagaggagagtgctggggccgttgatctcgggttgtacggttacgattagatccgaagcataccgtttcgagatttcgatttgggccgtggatcagtgatcctgcggtcgtgggctggtgagagatcgtgcgccgtccgatcatgatccagtggtagtcagggtgcgccctttttaaataaccgtgatctaatctcggcctctggatcaggatcctacggctgaaattagagaataccccttcggttgcgcaattgcataagagcccctctagaattatagattagaacccgcagtccaactagtagtgtttcctgtgtcttggacatcttcccccgagacccctggactttctaggaaatgaggcccagtccaaaacctgtttaaaatgaataaatgaattagtaaatgc

SEQ ID NO: 144726 - DNA, 607 bp, Zea Mays
acaggactagtgctccccaaggagatgagctgggacgaatgtaccctttctgttgaagttctgcgatctggagttttagttctgccaattcggtgggagccatgcggtatggtctttttgcgattggtgcggtgccgggaattagatcaatgtagaactccacttctctttctggcggcatcctggcaattcttctagaaacacatccatgaattcttctactacagatatgctttctgctgctagattaaacaccattggatcttgggcgggtggctaagcctgacatgagactgactttccttggtggtcagtgagaagaacggtcttatctgtgcaacttatgacgccattgtgcttggttaaccaatccattcctaagatcacgtcaattccgtcagatggcaagatggctaattctgccaagaacactaccccacttaaaagaatcctaacttgggagcatttgaggtggcatagaaggtctggccctggggttcgggtgactaagggaatttctagatgtgcagtgggaatgccatgcttttccacaaaaccagtgactatgaaagaatgagatgctcctgaatcaaaaagtacagcagcg

SEQ ID NO: 144727 - DNA, 421 bp, Zea Mays
aacatagggaaagactactataaccagcttgttaacatgaagtcgtccattctcggtttgaggggggttgtccaggtcgactttaaagacctgacctgaccgggtttaacatacggcctggctgactacatagacctgaccgatccaaacttgacgaccgacccgatcgactctggcctactatgttgtataattttcgtgctagatattttagtgtgtcaacatataccccatgtttttatgtgaataatgcatgaatttgaaaacataaatgcactaaaaacttattactctttgatctaaatgatagtatggttttctaaactgtacctctaacttaaaacaacatacttttgacttttttttattatatgctggagcaagtcaagtcttgtgtttcttcatatagttgagatccttt

SEQ ID NO: 144728 - DNA, 347 bp, Zea Mays
gatcgatcgaagctaattggcggagagttggtcgttagagttggtcttcggagagttggtcatcatcagagagttggtcatcaccgggagagttggtcatcatccaaaaattggtcatcattggagagtttgtgatcaggtccgtcttgcagagttagtcggtggagttggtcatcagagagttgttcatattccgagagttggtcatcatcggagagttggacatatcaaagccaggatgaggttctaggagtcttttaggcaaaacaatccagattccagtggtgatgtgcaactaattgataaggagctatttaactgtgcatatgattatgtttaatttcgag

SEQ ID NO: 144729 - DNA, 561 bp, Zea Mays
gttgttttaggataattattgaaatactcagttcgtatgatttggtcgatgtgcggatatacgcgtgaatatgtatgtttacaagaatgctgtagtgagtgtatgtctcggatttcgataataataggctagccgacgagtatgttgtatagcagcctaggttgctgcactggttaaccaacttgttagatggctttggttaagctcgtagtcgcgatgaattgcttgttgtggtctaaatgtgtatggttatggtcgcgaatgaaaagtagtagtgcttatgtgatgtctacgctaaaatgcaaactattgggtgaaaagcgcttcgatatttattatcgtagagaatgcgttgttaattaagtatggtacttctagtgctcgaaatgacacggataaaaatttagtaagtctactagttagttctaccttggttattttaactctaacaattgtcgaagtgttagaataattcaagtacctagaacgtggcaattcttgaattgtataggagctgaaatttattaattgctgttttggactgcacacagtgatttctcc

SEQ ID NO: 144730 - DNA, 466 bp, Zea Mays
cacgaagctagcaagctttacgaccaagctgatggtacaaaggcaggcagcacgacgacaataataaaggcgcaggcaggggggcaggcattccagctaatcgcagcgcagaagtgtagattagagtagagtggagtagtctctccttaaaaaggctaccgaagcattcgctgttagtacagtatagaagaaaaaacagaggctctgtactcatttcacttttgagggggggctgtttgatcggtgacctctgcctgccagacagcgattctggtagctctgtctgaaacgacgtcccggaacgaggaacacggccaccttccaagctgaattcttcagtcccaatcactcgtttcagcctacggctacgggtgagaatacacagaagcccagtaacacgaacaagagacggagagctgctttgtttctgaacagcgtgtagtgaagaggggatgccatagctgag

SEQ ID NO: 144731 - DNA, 601 bp, Zea Mays
aatttggatttattatattacgtactttggtgtgggtcttgattaattcttttttgtaaactgtttacgatactttgcacagctatttatgtttattatgaacacgcagtaaccaaaccttcacactgactatgcgctgactagtggacccacagtccctcgccgctccctcgcgggccgaccgagctaatatggtcaacgagccagacacatcagacccctttcaattaattcagctcgggtccacccaaaccctaaaataatcagttcctccccgtcgccgtcattcgctcctgcgatcgccatcgacgaccgcccccacctcttccaccgccgtaatctccgcgcttcatcgattcaccgccgtcgttctccttccctggttcgtttcccctctcattctttcgagttccccccattcttttacatagttcagtcgctaatgtccatcaggttcgccccgccccttctacatcccttcaattgattcgaaattaattgaatcgcctcattatatgtagtatccgataatggcttccaattttttcaattgcatatttgttacattctgttcatttttatataggtactgagtgttgtt

SEQ ID NO: 144732 - DNA, 285 bp, Zea Mays
taaagctcgagctagctagctagcctcttcttcaattcaattcgttctctactaacttctcttcagttcatcctgatgatctccttcattggctacgggttactagaaactagtatttaatcacatcgtcgtcgacgttgtctttcctcgcagctgctcgcgtggtgcaatgtcttccttacgactactcgtccagctctgaggtatgcatgcggcctaactaacctcgtctctccctcttcgttccctctctctctaagctagctatagctcatccatcggctg

SEQ ID NO: 144733 - DNA, 923 bp, Zea Mays
tgccatctcgtgcgagaaccctgtttacgtcacatcacacccccattggatcaccttgcaccgaagagcaagttccaacactgggctttttacccttgtccttttgaccaacagaaacatgacgctttcctttagtagttgcaggggaaacctcttcacattcttcatagtcttcatccttgtcatcattggcctcatagtctccatccttgtcattagtgttctcagtggtttcaccctccagaatttgtggtgtagtaccacttgacggatagcagagcgactgggacttaggtttcctctcaagcaaaataaaccatgtttaaatgctccactgggggtaatggatagtttggccgcagatttggttttcctacacgaaataagcaactattcattgacaccaaaatatataaaaacttagctgctctgaccaaaataaaattgcttgagagccctcgtcctgcggatttggtttagatggggtctcgtatcgctagcgagcagagcggctgcgcggctagcgagcggctgggacgagcagagcagaacgccgggacgagcagagcagggagcagagcagaacgtcgggatctgcagagcagagcagacgagcaggaatcacgtcgtccccgcggccgtgatccgcgcccggaaagccagccgtgatctgcagacgaacaggaatcgcgcccggccgcgctcgccaagcacaagcacacaagcacacgaccatgatctgcagacgagcaggaagccagccagacgaacacacaagcacacggtaagaagaagcacgtacctgggaaccgcaggatagcagacacggttggagctctcgctggaggacggcgaaactgctagagatggtcgaaaccctagccaccgctcccttcagcgacaggcaggggtcacgggcatag

SEQ ID NO: 144734 - DNA, 1834 bp, Zea Mays
gtgatgtcgagaggttcgtcgcggcaatggagcgcctgggccttcccagctttgccgcctctgaccatgacagggtacggtattctcccgtggaccaccaactacttccgttcagcagcagtttttccatatataacaggggccgaaaaatttcggttgggtttagctatgacttgagacttaaagagagagtatgatagtacagtagtaacattttggaaaatcgtctgttaattcagggtggacagggatattacacgtgattgcagcgtgttacagtttcaaatcgaagaagctcggactctgctttcgctgtaggtggttgatgcttgccattgttcagtttgacgattggcaacgttaacctcgatattttctgctttaactgctactggatgctggatgcagctgatgctaacatccaagtctcaatctcaaccagaattttttttccgccaaacatatgagatgtgactccactactcgactaacatataatacaatgcatgccattgctgtccaaatggtttgcatgcactgtacgttccaatgtttgatacattttcctttaataatttcaattgaacccaattcatggtaacaaaattaatgttaactcggtagcttgtggaaattacttcaattatgtcttttttaaatatctgaatatgagcatcagccacgttccagtgtgatgtcacattcaagtattatgatgatgttctggttattaaatttataatatctgaatatggacgtcagccatgttccactgtagtgccaaattcgagtagtatggaggtgttgatgttctgacaataattgtcacttatgcaatactaccgtggaacattcctggtgtctgcagctctttctacaatagaaaaaattatctacctgatcttatttggctggcattgatccagggcccaatgttagctgtcatagtctgtcttcttgcactgaggggtctgtttggttccaatgttggggaaggcttgcattgtagccttgaagcaaaaagtaggatgcacaacatggagtttcccataagggtgaacggctgctgtactcaaaattgtcagtctagagaaaagggtgaagggagcataccaaaggtctccagaagtccagctacgtcaggtgagaagaagtttttacagtacatgtcaagctttcagcagtaacacagagggaaacagagagagcagagcatagctattctatttgttttgcaatatgaaatgtcaaacaaatcatatttatcagtgaaaactgtagttacgaaggttatgatgtgaaggaggttagcttatcagttaaaacatcttttcctattgtagagccatcatctccgatatcaatgcctgaactatcttctatttcaaggcacactcgacataattttcatgaagtcttccatctgagacaaggaatttactctgacatgcctatttctaaagttttggagataatgaaatccaccaacttggatgtaagtggaatatagtgattctttctgaaatgtgcgtgagataatgtcagcccaaattctgatctttttattctttgcatcatgtggaaccaattttacagaatgcccctactcagtcacttttgagttttgtgaatgccatccttgatcggatcattgaaaatgagaatggagaaattccttatgtaggctactcaaaagcaatacagttagttgtttcttttcatacatgagaactttggtacatttttgttttatacttctttcatccccttggataaaaagatagcattctttgcacagaatatcgcttgcttgttgagaaaggtaataatggag

SEQ ID NO: 144735 - DNA, 417 bp, Zea Mays
tgacgaggagccattgcgtcagacatcgaggaattaccgacactagtgcatggcatgacagcagttccagcagcagttttgggagtagtagatgacacaataggggttgcggctgctgcatcactggtagcatgtggtagccagttctagttcaaggtgtccctttgtgaggatcaccggtgggttagcgttagtcactcaacaattaagccatggtccatggaagaccacaatcatataagattatacaagtagatacaaagtaaatatggagtgggaactatgttctcagttctcaccttcctgtgtcgccgtcgtcacctgaactttgaggcggtgaggaggaagtcatggtgcttacggcaatgggctgtggctggagctaggcatggatctgcagtggccacaaccgctaaa

SEQ ID NO: 144736 - DNA, 769 bp, Zea Mays
tcctccgggcaaatgccgacgtgttcgcttgggagccgtcgcagatgcctgggatccccagggaggtgattgagcaccatatgaagatctatccggatgccaagctggtaagccagaagcctcagaggcagtccgtggagcggcaggacttcatccgtgaggaggttcggaagttgttgcacgccggcttcatcgaagaggtccatcaccccgtgtggctggccaacccggtcatcgtgccaaaagcgaacgggaaactccggatgtgcatcgactacaccagcctgaataaggcatgccccaaggacccatatccacttccacgtataaatcagatcgtggactctaccccggggtgcgactttttgtctttcctcaatgcctactccggttttcatcaaatccggatgtctagggaggataggaagcacaccgcttttgtaatggtagatgggctgtactgttatgttgtgatgccttatggtctgaaaaacgccctgctaacatttgttcgggcgatgagtaagaccttcggggatctgatccgggacaaggtggaggtttacgtcgatgacatcgtggtcaagactagaagggggtcgaccgtagtggaggatctaaccctggttttcgacaagctgcgggcaacccgcaccaaactgaacccggagaaatgcatcttcggcgtctccgcaggaaagctgctgtgtttcctggtttcataccggggcattgaagctaacccagaaaagatcaaggctatcgagat

SEQ ID NO: 144737 - DNA, 354 bp, Zea Mays
tctccaggtacaagcgagagaacgtagttgttaacgtcatcgactgtggcattatttgggcaaacaatggcacgcgaggaaaggtacgtgggatctcggtaattcaacagaaaatctgggtatacttttgatacaagcgcatctaccttatcaccctcaacccagagcaacaaatctttagggattgtaatccatgtagcctcacgctcgctcgctcttctttcagcaggcaaggtaccatcaccaaaagatagtacccatttggcaaacatgtcgagctcgtttcgcgcatgtacttgcaaagagggatcaaaaaggcgcatgttggtgcgcagcctaaggaggacaacgtgg

SEQ ID NO: 144738 - DNA, 488 bp, Zea Mays
agctgaccggaaaggggctggccgcggtgaagccggtttcacggtgttcttcgactgatttgggggaaatcttaaattcgagctcactggtggatgattgctaacgattcttcgtggctgggtgggtgatgaccttgcggagctggtgggggctttaatttatagggagagcgagcggtggtgatcaattgggttgagccgtgctggcggccggagatgaggaagaaccttggcgctgtgaattcgtggctaacgtcgtggcaacctcaccggcgacgatgggacggcggtagggagtcacggtgacgcagtagatggacagagacacgcggcggacaacggagatggcatgacgacggtgagaaccttatccccgggcggtgagcaagggggaatggattacggctagccggagtggcttccaggtcactggcggcgaggatccccttaccccgtgctgctatccatccgcgcagacacgaatcccg

SEQ ID NO: 144739 - DNA, 562 bp, Zea Mays
gccatattgccttgccccacgggtaaacgggttgaaccgaggaggccttctctcttccaccatcacccagatgcaaaatctgggatcgtcactgctgtcaaaatagtagtattaaattagtggatgcgccgtgatccactgggcacaagcgcacagcactttattacttctgtccgttcctcagtcctcacgcgccgggcatgtgccgcccctcctcgagacccgtgcattcggcggcaccaccggatctgcgcagtggtcaatatccggtacactattcataactacggcactccgtgcaggtgtgtgtgtgagagagactgtgaggttgtggtgtggcgctgtgcataaaggaactaggaacacattacacgctctctgtccactggtcactgccttcctgcgaatacacagcaccggccgccgtgcaccagaccggtagaaaaacaagccagaatgatacccatatgcatgcagtatgtgtacgtggacttatgatatcaggcaacaacaagagtctttatccgacagctctgctttgccaacatctactaatcattca

SEQ ID NO: 144740 - DNA, 330 bp, Zea Mays
atcatcatgcataaaaaaacccctgtgggaaaaaattcaatgatgaagcatatagcttagttgatattacctcgttaaaaactttggatgagaaaacctcaataaggcaaaactcatacaaagaaaagagtgtaatatgatggttcaaaacaggtcaaatatcatggagaattactccccctgatccttgcaagcacttaagtcttctcgtaccaatcccctcaacacatttctggaacgtggagtatggtagagattttgtgaatagatcaacaagattatcacaagactttgtttgcaagatgttaatatttctattttcctgtttcc

SEQ ID NO: 144741 - DNA, 386 bp, Zea Mays
ctcggccctcgtcgccgtcggcgccgtcgccgcggtcgtccccttcgccaggcgtatgctccgcctccgcaccgcccctgcttcgacttcgagccccacgtcctcgtcctgagcttcgcggtcctcctccgcctctcctccaagaacacatagggactattttgaaggtattgatttgggatttctggagcttattatcagcttgtcgtaggtactcgcatgtcacagatggggatggagtagcagaataaatgaatgaaatgatcattcaagtgctcagttcagccactgtctatttttagtctttgctaaaatcgggagcaaagcatgacatgcgatactggtggagccgttcaataagaatgtgtgcgcagcgcaagaatgag

SEQ ID NO: 144742 - DNA, 373 bp, Zea Mays
caacttgaagctcgggggcttgtcagggatggataacccctggctcctcatggagcatattctcgacctagggtgcacttgacgcacaagataaggaatctaatgaaatctaaaccgactaggagatatatagggaaacctacttgtaagttgtaacacaagccacgccgaattatataaggcgagctagggatccctcccaaggcagatcttgagaggatctaatcttatgcatgccccccgctcactcatcaaacatccaaaccctagccctcattgtaacctccagatatcaaagcaatactacccaccgcaaacagtatgtagggtattacgcatttcgtggcctgaacatgtataaattgtgtgtttt

SEQ ID NO: 144743 - DNA, 590 bp, Zea Mays
ggcgtcgaggtggagccggcgcggcggcggcatgggaatgcgcggcagcgtgtggggagatggagggggagcggtaggcggggggacatggtaaggcagccgcggcacaagtgtgagcgggtgtggcggcgtcaggtggtggatttggtggctaatcctgctccggcctgcgcgctctgctctagcactcgcctcaactactctcagctccgctcactgcgctgccgcggcatccggcatacttgcgttgcgtccatctccatccgccaagggaaggggtcgaggtgactgattagctagctcgttagtgcggtggacaatggtcatggcgatgattaccgtcggtaaaatttaactaattgttgtctcccggcaggggcaggtgcagctgggcaggacaagattgcgctgtcaggcaagcactggcgacgcatgtgccaagaggatcatggttgcttcctgtggatgccaatctgccggcgaaaactaccgactaccagttgatgcagcctcatcggcgtcagattactgtctcgggcagctgtacctggcgttagttccgtgtgcacgccaactttaattcggttttg

SEQ ID NO: 144744 - DNA, 708 bp, Zea Mays
gcgaaataggaagtatgtcggagatagttttagatttgaaacgcatgtctatatcgattagtgacgtggcgatgcggactgttggtacgactaccaagtaccaactggttggctcgggtcagaactagatcagttggtgttgttcgatcgatatcaacctgtacgccgaagaaccggttgatactgatcggtagctaacatatgttgtcacgtgacagtttctaattggttgcgtcattttgattttttttaaataaaagaaatctaaaaataaaaaagaaacatggaatccaacctataattagagtagtgtttgatttcatcctcggaagcttaaattgcatgtatttaaaggggataaaatggttaattggatggagatgattctttatatgagggaacatttgatctccgaccattatgtttgaggctattgtctcttatgacttatggatttgatatgttttttctcgggtaccgaggtcaaacaacgatgataatgtgctcaatcagtcactgttgttcacttacgtgctcaggctatctctagcagatcatctatttatcccctatttcaaacttcagtatacaaacagtgttaaacagtaccatctaccatctacagttctgtttcccatattttatattagccgttggagactgtcagcgtctcggaccccgggggaccctcgaccgggccgaccagtg

SEQ ID NO: 144745 - DNA, 272 bp, Zea Mays
tgaagaagacttccatttaaatgatgacctactatttagatcctgcttgtgtcgctgtattgctaggcctagcagctgcaagctgctgttttctactttacgtttgcattgttggacttgagaacatggtttagatggtgtagtgcagtgctgtactgctactgttgctagcagactgctgcactgttgaatattgcttggttatgtatgctgttcagctgttgtgttttcctaatggctaatgctaatagatgatagtgactttagagttt

SEQ ID NO: 144746 - DNA, 387 bp, Zea Mays
cccaccactacaaaagagatggaggccaaaggctgctgaagcaaatcaagcggccacaaaaacagatgacaagacagaggttgcacaactctctgcgggcatcacggaccgtccggctccagaggctggaccgtctgatacaagcgcggaccgtccgcgcctctccaggaggccgccaacgacacgccagcacctatggaagaagataacatcgaggaggacgacctgctgggagaggatctggtcgactacgaagcttcacccgggcatacaggtatggatgtgaatgttattacattttcagccgattatgatatcatcggcgatgatgaacctgtagttgctcattttgattttggtcctaaagaggccgtcttcaccaaacca

SEQ ID NO: 144747 - DNA, 334 bp, Zea Mays
aaattacgccaaataggtccaaaaccaagatgagaaagaatttcaataataaaagcccaagacactgaatcgaaagccctggagatatccaattttaagaacaaactagcgacctttctcttgtgaagagacttaattgactgttgggccaacataaagttgtcatgaattgatctccctctcacaaaagtgctctgattggctgcagccatctcatgaagatgaggacccaacctgttggcaagaagcttggtgaccaacttagcaaaactatggattaggctaataggcctataatcactcgccgacatagcatccaacctctttgggagaa

SEQ ID NO: 144748 - DNA, 409 bp, Zea Mays
aacaagaggagtatatttggagagaaaaagaaaggctgctaaccaagggcaggcgggaagtagttctcgtcctcgcaatactaccactccaagtacaccagctagtggcagttctggacaacaaactcaacaggcgccaactgctcccccgaaagcaagcaccccaacaggacccgttgctcctagcacaaccaccaacagggcatgcttcaagtgtggacaaccgggacactacgccaactactgtcccaacagagctgcctacactacaccggctccgatgaagcaaggacaagcctcggcaggaaagagtcagcccctatctatcaaccggggacatgcccatcatgcagaagtagaggttgaaccaggtgaactggaaattcaagaagaagagctagttgaagat

SEQ ID NO: 144749 - DNA, 620 bp, Zea Mays
ctcaaacatttagatgatgtggagtatcacaaattattttgcaatcatctttagtatcaattttagaccagaaattcatttggacaccttaagaccaatatctctatcaaaagatggaggtctagttagcagtacagtattcttccacttgctgtatcctctgttctaatgcacctctgtatttatctgtgttcagaagtacaatgtttctatcgtgccttggttatgctatgtctggaattggcagataagatttgcctgtatcctgtttgtatgtgttatttgtttgtcttccgtcggataagtgagttttcttggaacttaggcatgtcaactccaaattgatctattttgatcagatatcctataggtttagcttgcctactgcatgactctcttatgaccaattagtgatttgtgaattatttgataaatctaaccaaataatccctttgtggtattgtttgattatgaagcattatagattaattttgtctaactgcagctccagtaccgtagacaattcaattgatcctctgtgagtgtgctaacgaaatccagatactgttttttaaccaagttccttgttaagtgttaatggtgtagggataataacatga

SEQ ID NO: 144750 - DNA, 366 bp, Zea Mays
cgagcccatctatctgttgacgaatttcggcaccagtcatcgttgcaggtgggcaatctgtcactacgaccccttttgtaaagttcttaatgtctaggaagaatgaatggtcaggagggagaaattgtcgatgtttatcgaaggacgaatatttgccaccctttttcaaccaaatgaacctaagagcttccttgcaaactgggcatgagaacttactgtgaacacaccaggcgcagaataacccatacgccggtaagtcatgcatggagtactagtaccaaacatgcattttgaagtttgtcttcgtagctcgatcatacgtccataccccttcctcccaaacacgtaccaattcatcgatcaaag

SEQ ID NO: 144751 - DNA, 519 bp, Zea Mays
gggcgtctggcggaatgtagaggcgtccctagaaagccaccatactgtcgatgagagaccagggagtcatgcgaagatcgctgacaatttcctccttgagggcgaccagtgcgggttcctcatcatatgctagacgaagtcggtcgatgaactcaaatctgggcccaaaaatagccaaaatagcactatcctcggtgtcacgccgtgatagagcgtcagccactgtattgctgctgccggttttgtattccacggaaaaatcaaaccccagtaactttcccacccagtgatgttgcagtattgtggccagcctttgatctaacaagaacttcaggctgaaatgatcggtccgcaccataaatcgacgtccccatagatatggcctccaatgtcggatggcaagcaccaagccgatgagttccctttcatatgtcgcgagggataaatgtctgggtgctgtcggccgactgaaaaaagccacggggtgactgtcctggatcagaactgcgccaaaaccat

SEQ ID NO: 144752 - DNA, 477 bp, Zea Mays
gcgacccgctctccccctcctcttcgtcactacgattgaccttttacaaatatttcttggggtgccgactgagctaggcattttaactaaaatgtagggacacctaataaatctacgcatttccctctacgcacatgacacaacgacattcatcgaaccgaataagaaaggaggtgaaggtgaatgtgcgccttctaaaattgtttggccaatcatcacaaacttacaaaaatcaactttggtcccaatatgctgcaatagcatagacgtggctaacattttggaggggctacaagtcaaaaggacagtgtttctgatgagatttcttggccctcctttatctaactctaaactcgagaaggtggactttcagttcttgctagataaaatcttgagtaagatcaatagatggaacagaagaaatatgagtgtggtgggatgcctgaccttggtaaagtcagtgatcacctctaagct

SEQ ID NO: 144753 - DNA, 1015 bp, Zea Mays
gccacttgagtataataaattcgcccagtcttcttgacatttttgtctgctgaattattagccatgtttcctttgccttgattggagctcccaaagttctgttgattgttgaacttattctgcttcggatatggacaatcttttataaaatgaccagactttccacagttgaagcagccagtagaagaactacggagggtggggaaacgagcaccaggggcactcgactgatttgtagaagtgggggcagtggcaggacgaatgaaaacagactgtttgaacggataggagggtggacgaggcgaagaacgattctgattaaaaggtcagattaccaacctggtttgcttctcaggtccctgattggacctgtcacctctaaatccatttgattttccctggcatgtgttcttggcttctactgccagcgccgtgctgacagctctgttgtaagtaagatctagacaggtggccattttccattggagccggtcgtggagtcccctcatgaagcaattcttcttctttaggtcagtgtttacttagtcaatagcatattgggataaatgattaaacttgttgagatactgcatcacagtatctcctccttgctttagttgaatgaactcctcttgtttcatgtgaagtactccctctggaacatagtgttcacggaatgctagcttgaattcatcccaagtgacctggtgtccagctggttgaactgctacaaaattcgcccaccaggtcttggcaaggcctctcaattgctgggcagtaaataacggcttttgtgtttctgtgcaacggactaatccgaacttctctccattacccttatccactcatcagcttcaagagggtcttctactttaacaaagagtggaggacgcatctcagagaatttctgatacgaggtttcacgcggtccctgtggaggagctcttccgccatgctactggaattgattacctgccatctcacgtaagaagcgggtatttgtggcggaaccgcc

SEQ ID NO: 144754 - DNA, 557 bp, Zea Mays
ggagcaggagcttcgatctttttaggtgcaatctgccctgccgttgtttccttaggcgcgacaggctccgtcttgatgggcactgaaggcccagcttcggcttcggactgaactttcatagcttcgacaattttcttaggtgcagggctcagggccttcgtagtctctataacagcgtctaatacgctggccatcctcctcctcttgggagttgtggcaggaattttttgcatctttagcaaatctgcctctgtcggtgggctaaggatttctggcgctttttcaccatttccacctgtggttcttcagccttatcatctctagcttcagccggcccgactttaggcaccttcggcaatacaatcggctcttcagcactctgcacaatcgaagcagcttccttggcctcggcagctgaagaggcccccgcaccaaatttaggcaccacggtcggttcaatgtaacgcggccggtgggtcagaaccttcatctttttgcccttcggctcagctgcaatggccgaagcggcagtcttcctctttttctcttgccctcgt

SEQ ID NO: 144755 - DNA, 923 bp, Zea Mays
ctattttcccttggtcgtatcctcttcctagtcgcttgtgagtttttaactccatccttgttgtgctctgtttggtattacctttacctttctcgtcttcgatcttaccttggtggttacattatgactgctatctaaaatattaaatctcccatctcaattcaagagtggtgttttacttatcctgcctttggtcgtaacctcatctttgccacatgtgagtcttgccttagctccattccttattgaactcatacccttggtttttctacaccttcacctcttctcttacacccttgtctgttatcgcctttaacactcgtaatatctatatctttaccttgatgcttactttcaacatatcctttaaagcctccccttttccatctcaggtagagagtggtgcttcacctatctcgtccttgattgttttccttctttgtcgccttgcaagttgtgtcctaattccatcctttgatgtatttttgtttgttatcctcatcatctttgacatctaccaattttatcttgaaacttatctttatgcctactctttaaaaaatactcctctattccaccccaatttgagtggcaatttacctatctgacccttgattgtgtcctctttgccatttgcaagtcttgtcttactgtaactccatcctttgctgaccttttatttgatatcatccttgcctttgcaatctgtacatcttgccttcatgtttaacttaggactacttttgaaatctcctctctcccatcccaatttgaggacggtgatttacttttctcacccttggctctatagtcttctttactgcgtgcaagccttgacttaactccattcttggttttacttgtaccattggcttttctaggccattaccatttcccttacacacttgtctgttatcgccttt

SEQ ID NO: 144756 - DNA, 365 bp, Zea Mays
ttttccaaaagactccgcgcaaaagtcgcctacgggtgtagccggaataacaggtacgaaaaatcgaagtcttttctaaagaactccgtacagaagcctacgggagcggcctgatcaacgaaagcacgcagcttcatcacacaaaattatggttacatacatacagcgagggcatcacacattacattggctcaaccttcgggatgatacacatctccctatagttgaacaacattatcctcaattcctcacccgcaaacagacttcgcagctccccctcacccacactcgccccagctggcgaggacaacaattcccgtttgccagtcccgtccacacgaagatgaccaccctccatctcacca

SEQ ID NO: 144757 - DNA, 427 bp, Zea Mays
tgaacacctgcttgatggtctaaaaatatctcaggggaaaggatctctctccactagagtttctggaggtttattggcaaaagggtggtagaaatagagtttcactggggggtttcacctagtatagctccaccatattgaagaaaaagttgaagacttgaagacttatctagaagtgactcagctgcttcactattggtatgttgtccaacatgagtgaacatgtgttcatgggtttactgtgttttactttgacaaggtgaccatgcagggaataagtggaacatgttggccctcttttatccattgcatatggtcccaaagaagctacaaccaggttgcagcagatatgccttgttatggcatatgaaaacacaaactgagatccaccgagccctagttgattccatactttctccaccatgcc

SEQ ID NO: 144758 - DNA, 406 bp, Zea Mays
cggtgatcgtagtggtccgatctaaatcggacggctctaattagatcccagcttttatgaattggtatactgcccgcgatcatcggatcaggatccgaggccccagaagcgaccacgtccacacaagatcccagacgatcatctacggatctagggtcctgatttgttcacgcgactgctcactctatgagttgatttggaccgcccagggaccatccgacggtccgcggtcgtcttctccccgccgacggccgagcacggcggcgcaaccccgctagtgcattaaacgccggcgaactcccccgagcagccacgccagaggcccataggtgaatccaagggcttctacacagactataggaaacgatgaatactccgggagggatcttaccgtgaatcgcagcac

SEQ ID NO: 144759 - DNA, 515 bp, Zea Mays
aagcagatgatcaaagaacgagtgaagagaatagccaaggcaagtagctatttatagaggccaggggtgaccgtcacttcctaccacgctcgtcgaacagttgcaagaattcaataagcaattcaagctgtctgaaaatgagtcaggcaataggcaccgcttcgcgtaacacgacaccagttggacctaagtcaactgctcaggcaaatgattacacccttcgatcacatcaagttactactccaggacagtgtggtaaacactctgcgtaccaagacaccccttgggctcacccatttggtgtgccgcctagaattttcaaagattttctgaagaagtcatatccacaaaatatatgcaatgaatgtactacgacaaaatgaggagattctttgatatggaaggaagtccaaatggggctactgaagcgcaagtctaatcaacagaagcattgaagcttagagcagggagatggccagctgagaaccatctgcctcaactagccagatgtccaa

SEQ ID NO: 144760 - DNA, 352 bp, Zea Mays
ctttcataggggatacaagccggtcgggatagggagaggttcccaagccctggtgattgaggcaactgccaatatcgctgcggcggatgaaaactggtgtagtgttctcctccctgaatgaagccctgggctcctccttttatagcctcaaggagggatccctagcataccatgatttgtcgtgtatgggaagggagatgagtccgaaaccctatagcatacatgaccatcggcatggccttcatacttgctgttgacttgaaccagaggcggacatccggtccctgtttttgcatctttgaccgagcagagagctgaggccagggtccggggctcaaacgcgtacccgagc

SEQ ID NO: 144761 - DNA, 460 bp, Zea Mays
gtctggcatcacggagagacgattagcgtaggttttaagtgcaagtattgtagagaaacaaagagcagagggggtggttcccgattgaaggagcatctcgcgcatagagggaagaatgtcaataaatgtccctctattcctccagacataaatgcatacttataacttgacataaataagacaaaggacaatgagaggggtagctccagacaacagttgagggcagatgaggtagcacgaacccattttggtgaatcaaaatacgatgagtatgagcatgaacttcaggcaactctgcatcaatcacgtgtggagcacgaatttagtcaaagagctggtgcagggtatgacaggggtacgataaaccctaaaccataaattcataatgctggtacgataaggttgaatacatatgtatgcactcgtaattgcttcaccctttttttactggccactcata

SEQ ID NO: 144762 - DNA, 588 bp, Zea Mays
gggtcctgcctgaagagccgaaggaaggagcagactacgctggtgggagctgaacaccggtgtgctgaagaatatgggtcatgaatgtccagtgctctgccctgtctgctaaaagctaccgctgaagggtgtcctggcggtcctgaatagtctgaaacattgagagcatccactaggacatctgctgctgaatagctacctgttgggcctactctactgctagatgagcctgctactgagagagtgactgaagaatagtggccatagcagggtcaatagctggaggggcagcatgagcagcactagaactaccagcctcatgatcatgtgagcaaggtggcacaggaggcggtggagggatccgcaggtcctcatcatcatcagaagaagaatcggtaatggcactctgagactcgaactgtctgaaagcctcatcctaagccctgatatctgacactggatctggaactggaactaggtccttaggggctaggcgatagaagccaaactggaggcgagaggcctcgagggtgcccaggaactgaggaggtctgatgagctgcacaaagatgtgacagaggtagtgag

SEQ ID NO: 144763 - DNA, 393 bp, Zea Mays
atttgggggaaatcccaaattggggagctatgggggacaattggaggtgagggctggttcactgggtgcacgattacttagcggagcaggctggggcaccaatttatagtgtccaagggcggtggctcctaattttggcatggtgtgctagcggctggagagaaagaaggtcactggtggctcagtcgtggcgttcaccggtgcagcggttctgagatggtaagcctaggcttgccacagttactactgcgcagtaaagagccacggcgtggcataattggggtcgccggagttccacgacgacaccgacggtccggccacgtcgcacggctacaggcgcggttgataagcttcaccccgcgaccaaatccgctccccctccgatcttttcac

SEQ ID NO: 144764 - DNA, 540 bp, Zea Mays
cgaccatgcatgcagcaaacagaaaaatcatctagaagaagtgacacctccgtgataagaagcaaaagcaagctagatcgagagaggcttccatgttacgattaaacaagaaacgtctctggatttgatgccaatcgcgtcaacgccagagatccaaacttagtgacgttgaacgggcccaaacatttgacagcggacttgcatgattggcatacgggagaccggactccggaagaacgaaacgtgcatggtttcgccgctgaaccagctctggccgcatgagtaaatgttccagtcccaccattcagaacgcggtttcttccgtagagacatttcttagcttgaatatttttatgcttgcttttggtttcaaaagctgtttttgtgtgtgcctgtttgcatggatcttgtttaaattagtagagaagggaacaaaaaatcgtggaaaatgtctaagttgtactggcagcgccccctccaaacaggaccctcagtcgtccagccatgcaataaatactccaccacagcgcggggcattgc

SEQ ID NO: 144765 - DNA, 476 bp, Zea Mays
caggaaggacctctgctggcacttcatcatgaaccggagcagaaggacctgcaccctggtccaagcatgacagtcgccgaagccgcctccttttcttcttttcctcaacagttgcagtcaggtggctaactcagcatggacgttttgggcgagcaccttcaggctttcaagtctccaccggtttgccaagttcttgtcgagacgtgatagccatcggctcggcatgggtcgaatcagatgattcccctgccagcatactaagcacaacatctatttctgcatcgtctgtgctagctggcatctcaaaatgagtatgcctctcatcatctagaagaatccggagaggggcaatcagagcctcaatatcctcggaagagggtcgtactctaagacccaggctaccgtcactagcaggagggttagccacaaattcagaaaatgatctatgaggtggcagattccaggcagaataggca

SEQ ID NO: 144766 - DNA, 487 bp, Zea Mays
ggagaatggcccttaacgggaaggaggtcaccaccacaaccctgtgtgcctaaaaatagtggcacaacttcctgtatgcaacaagtatagcatagataagcttgtgtgtctcaaggtacctggcctttacctcatggaggacttcactaacgtagtagactggcttctggatggttcggacccttgaggttggtcccgagtctgcaaactcctggccttccgtcaacgtcgtgggggttggaccaccaccttcctgggggtgttgtgtcgtcctttcagcgaccagcaccatgctcaccgcctctgaagccgctgcaatgtataagtacaacgactcctctggctctagagctaccagtattggtagggacacaaggtgctgcttaacctcttgaaaggctcgttctgcctcttcggtccaagagaatggaccagacttccgcaatagcctgaagaacgacagtgccctcttagccagtcttgagat

SEQ ID NO: 144767 - DNA, 837 bp, Zea Mays
tggttattgaaccgaaaggaaccagggcgtggaaggaggttagttgggacgggacgggtcatcgcacaccagtcctcacagagttggggatttgtttgtgatttgcccggtgatggtgacatagggcggtcgagagatagctgctcattactgggctcattaggacttgaagccgtacgggaacgacgggacacacacaagcaaagtgtgggatttgttttgggtaagtctattgtgatattcaaattgaattcaaattttgcatttgtaagtctttggtgatcttcaaatttgtagggccaatttcgtgtgtgcaacccctataccttggatgatccatatgtgcgtgaggtattcaatggttcagcagatagagctgtaaagggcatgatgtataaagcacgattgagggcggtcacagtgtaccaaaagcgtcaggggaactattgtgacacgaatatggcaatggaaatccacctgatggctagcagtacaaagagagtgaggtggattggttgagccaccattcggatgcttgggcatggatgtgacagtattgggcttctgaggagttcctggccatatctaatagaaatcggaatcggttgagcaagcctgaggtccacttctttggggcagatggacacactggcaaggccgcaagtatggtgtgtcaaattgcctggtcaattgttaattgcatagatttgtctagactttctaatcatgtgttgcaggaagctcaaatggagtggagcctactttgcttcaagtcttcatcgagggacacaagggtcccgatccgaatcatccgaaaatactgaatgacagtaatgc

SEQ ID NO: 144768 - DNA, 454 bp, Zea Mays
ctttggccccacctgtagacttgtatcctcccctaaggtgggctcggggaccactatcggtaccctgaatcagggtaccccttactacagtatgaagacacggtactggtgcaactatctctggtcgtgtggtgaacggcacccgactccactaacatgggcgtcccaaggacaccacgtgaccagaagaagtgatatactccaggatatcatcagtgggtccagacctctatgagagagcactagacccctgtacactcaacctggacctccaagtatggtcccggactcccaagtaagcaagctggaccccttgggtggggaccaaacccctctgagtaaggtctggaccacctacagtaaggtcccgggacagaggataccctggcccatgtcaaggataggcaagggtccggtactaacacgtgtccaggctttgacctgtgcgcttccg

SEQ ID NO: 144769 - DNA, 342 bp, Zea Mays
gtttgctcaaagtctcctgttgcatctggaattttttgtttgtgtaatgaaaaatgatgtctgatgtattgaacaactaggatgtcttttgtcagcgaaagtattgatttgttctgcttgctggcttgctttgtgaggttattgcaaattggaaagtgtattttggcttcaaactttagtgttgttttcattcaaatgtatggccataccaattagatagacctggggcaaagaaaggtcgtttgcttgtagcctattctttgtttttcgtctgttctgtcacagaactatgtatggaaatccatcttctgtgtccctaattcctaacgtcaattggattat

SEQ ID NO: 144770 - DNA, 745 bp, Zea Mays
tcgtgggtctgcaggtgggccctccttaacaacctccagctcgcctctgctgcaaatcgctgggagtccgacctccgtcaaccccacggcttattcggtcacggttgttgcgcctcacccccccgggctacaaaaccaagcacagccgagtcgtgcgcaatccctctttccttcgccctaaccatccctaccgcttgggcatggaggccgaaagaggagagaaatcgaagggagggagagagagccgccgacgtagatccacgggtgcaccatcgtcatggccgaggcttcaccaagtctcgtaggtcatgatcgcgactttgtctggacggattacgttccggttagcccagaattgctcgccggagtcaatcctctaccgcggtaccccgcaccgctatgagcagttgtactacttcgcgaacttccggtaagattggctcccatgcgtttgccgtgttctgtgcgccgtgtgcgtcctcgtatcagggttctcgtgggtcggtttggggagtttgtgtcctcacgtcaatggcgtcgccgttcccggggcgcgccaccgtccgcaggtggccgatgtgggagggatgcatcatggcccttagatttgggatgtgcaatcgcagattgatgactccataccccttcgctatggaagctcgggcatcgttggattctgtttggatggatggaattagaagtagaaatccccttcaggccattaattctataccatcaattagaa

SEQ ID NO: 144771 - DNA, 466 bp, Zea Mays
ccgagacgtaaaatgtgatccccggtctgacacaatcttcttaggcacaccatgtaaacatactatccgtgccatgtacaactctactagtttgggtcctgaatacgtggttttcactggaataaagtgtgctactttagttagcctgtccacaatcacccatatagagtcatacccagaagatgtgcatggtagacccacaatgaagtccatgccaatctcttcccatttccactcaggtatcttaagcgggtgcagtaaactggcaggtctttgatgtttcgctttcaccctctcgcaaacatcacataatgctacatgtgaagcaacatcattctttagcccataccaccaatacttctgcttcaagtcctggtacatcttggtactaccagggtggatggaataaactgagtcatgtgcctcacgaagactatcgatatcaggaacacaaatccggttcttg

SEQ ID NO: 144772 - DNA, 610 bp, Zea Mays
atttttagtatcgtaaacactttaaataatataatattttattttttgagacactattccaataaatggtatttccttacaaaacaagtaagcgatggcagcgtgagaccaggtcacgtccgtgcatggctgaggatcgtgtcgtcgtgtgtggcggttgcgttgtattgcatgcatcttcttagccaagcgaagttgggacaatggcatgctcaacttgaaataacgatacctgtttattttattcaggacataatcacgacagaatcgagaatgagagaacatatatatataccatgcaaaactttattttattgaatccattcaaggaacaatctgcaacgagaagtcaccgaagtgtcctactgagaatactagtactaccactatgatgatatgacactaaggggaggcctgcaatgcaaatttgcagccagaattaaactaatcaatgggggtaatgcgccgtcatgaacatgaacaaccggcgttcgttaacataataacaagacaattaaatgcaccaaaattaaacatgatgccaatctactaggtacggtacggatcagctatagacagacgtggtcgtcatcgatcaggtcaggtcagg

SEQ ID NO: 144773 - DNA, 1716 bp, Zea Mays
cctcctcgccttgggagaagccgcggggcccgctgcccctctccctgttcggcgccgatgccgacgacgacggccaggaggaggaggaagggccggccgggccgccgccgatggacacggcgccccagtgcgctccgtccgtcccgtccaacgggtcgcgccccgcggatctgaaggacctcatcgctggcctctacggatatcagccgccccacaccgccgacgcggtcccgcaggtgaaggcggaggaggatgaccaagggtttggagacgatgattgggaattcacggcggcgacggggcaacctgctgctgatcaggatggaggcggaccagggcatgcggatggatttggtaagatcgaggtgagcctgccgcacaagttgtcgtgagacgtttggacctgggagatctcgttgccaaattgtcgtgagatgtttagacttggagtgtaatggcatcgactctatccaatccagtatgcgatccaagctctcaggactgttggggggagatattttgacatttgacacccaattcacatgtctttcaagatttgacaccccctatcacaatgacatacggggtcactgagtgatttacatgtgggccaggatgtcaaatctcgaaaagcatgcgaattaggtggccagcgcaatgcattggtggtgataaaatgtgacacttaatgcaaacttgaataagggtggtgtaaaatggagggtgggctactgggctgagatgaacaaactggttcctgggtaggagctggacgaaggattgttgattccttacatgcttgcaaactttaggctaggcagacaaatctgtcctgctttagaaaatccctgagcaagacttgttgctattggaacattaggatgtctcccgtatacggaaattagatcacattattggagtagaactactttgtgaagtctttgttttgcctatttgtacaaatggcaaaggtgaatatttgagcgacatattcatatttttcaggatatatcgaagtcattgagcaccgaccaggaagactggtcatcgtttaccagtgccgatggcaaattgaaccatgttcgtctaacaaccgatggtcttgggaatcatgagtccactggagaatttgtgagggcctccacttattcaccagctaatagttcggccatactcaacctgtacaaaggaagcaaacgggttgatgatgttgtcattgcccaaggctctgcagaaagtgtccagagttcatctgatctgttttctaataatgaaatggtgagcattcatcatatctaagttttccactgacacaacctatttcatattcttttgatgtacactaacgatcagtgatcagaactcttcacttgaaacagatgacaaccattccagtagatcaacaagtgattgcattttgattgaattctaccaaagactgagagaagagtccttgacagcaatatcccggcacgtgaaggatcttagggtcagttattacattgcatttgtaaaaggacactttttgtatggtttgttgcttcataattttgttactaaggatatgcattcagggagcacagaagggatctacaatctctgatgaaaacaacaaagcgactgcaatgggaggggatattcaggtgtgttcctgatcatttgtgtctacaaatgagatatttcttgtgaatatattgaaggattgccttgacaata

SEQ ID NO: 144774 - DNA, 355 bp, Zea Mays
gcgtaagtggcattaatgtctgcggcagggcaaggcgcgcgcgggggtggtggtcagcgacgcagccttgtccggcgcacactgtagctagcacggagaagaagatgccaagaggaaggcggaggaagacgacccaggccgtggcgttgcactgcactgcagtactgggagtaggattgatacgcgcggcgcgtaggagtaattgggttccgaacaaacaagcaaacggatcgaacagtgcgtggcgagagcgagacgacctcgatcgagcacatgtgatgctctggagtcacgcctggtgaagttgcaactggcggagtaatggggggatcgtcgggactagtcgcttagtcac

SEQ ID NO: 144775 - DNA, 723 bp, Zea Mays
agaagaaccaatgtaatgatgagtgttgccatcgctgttctttggcgacgatgagcgaaaatgctgccctcgccccccttcgccaaaggacggcgatggggacatctatgaggggtggatatcttgtgtatagtgtacatcatgtagttgtaacataatgtgtttcatttgtgttttgcgctgaattgcacttggtggtgtcttcatgcgctttatattgatctgttggtaatcttttgtgacgacttcgcttgctgcgcctagtgtgaatccagctgcacccttaggcaacttttgcatggatagaaatatgtgtgttgtagatgacttcgcgctcttttggtgctattgcgcacttgttgtgcttatccggctgcacccttaggtggcttttgcttggataaaaatgtacgtcttatagacgacttcgcaccctgtgggtgttgttacgcacttgttgtgcttatctagctgcacccttaggcggcttttgctcggataaaaatgtgtgtcttatagacgacttcacaccctgtgcgtgttgttacgcacttgttgtgcttatccggctgcacccttaggcggcttttgcctagactttgcttgtcgcacgtaatggctgccgaggcttgccgttgcggtgactgtttggcgtcgaataccgaaaactgactctgctgtctttttcgacatccgcggtcgtggtgccgctttcattttttg

SEQ ID NO: 144776 - DNA, 583 bp, Zea Mays
gaggggaagaaaaagaagaagagacgtcttcgtcgagtgtctagcttggatcaggatgccggtccttctgttcctgctgctaaggaagtgccagtgcctgcatttgctgaagctgaccccaatgggtgtgacccgactgctgtggatccccatgggtgtgacctagatgacattgaacccaatgggtgtgatctggccaaagctgaccccaatgggtgtactgtccatgttgttgatgaagatgaggaagaggaggatgaactccctctaattcggaagaacagccggcgctacctagccagcggggaaagcagtggtgttccttctccagcattatctgccctcattggtctgcaagaattatctctggcgaattttgatcagactcttgaagacatggtcccagaagatctgttgttagagccagcagacggtggcatgatggatgtttgcactgatgtgcctgatgctgggctggagttatcccgggcggcgtccacgcctcatcgaccttggagcgtggtcttaagggtcaggaggctggtctggattgttctgctcccatggaagtgggtgaaggtcc

SEQ ID NO: 144777 - DNA, 522 bp, Zea Mays
gtcacgcccgctactcaagcgagcagcatgtcaaagggccccttcgtcttcgtcttcctctgccacctcgaaaatcgagggaacgccacataacagtgtgagcacaagatggccggaggtagactcggcaagccttcgacgtcaccaggaaccacatagaaccaaaaatcccaccagttacacccacttattcctagcataggggactatctccacaacctcaaccgaagtcttcccagtcctcggcatgaaggtgcacgatccaaattgggctatcatattccctatcttcctcttctgccaatgcaggcaataatttttggcgaagacctccacagacggctgctcgccgtacgaagtaactgcctagacaaacttcgcaagcgccaccattgtgttcggcgtcaactggtggacttgcacctcaaaccttctcaacacctccaccacgaatcgatgtgtcgggaggcgaagaccgccagcaaaaaaggcctaaaaactatcaactcgcctttaggctcg

SEQ ID NO: 144778 - DNA, 664 bp, Zea Mays
cagtggtggattcagaaacaaatcaaaagggggctgaattatgaattggagagatgggagatgaccacaatatgattgaatggaatcatcacaaagacaatgcgtgaattgcaaactatcagatcacactaacaaaatcatacgccaaaatgttacgagttgagctgttgatcagctgttgtgtgtcgcctagctatatgtcgacgtgcatgagcttcagttgtcgactagcagccgttttaggattaattgcatatagaaactagtagatgtggtcatcttccaatttcagccattgttgccatgaaaatagcacaacatagagcttcctccctttctccgggaggccaccctcagccaagctctagccaagcatccaccctcaactcgtcactagtcactccagtctcgcgaccaatcctggtcctacttttgatacctgcaccatcatggcgacgtgatctctctaccccagctagtgatggtatgtctatcagtgtccttcctctcctcgagtgggccctccctctcaaccccaacgctccctcatttcgtcattcgttggttcctagggcgacttggggaacataggtgcatttgtgcaagggttctgcccctgcggttgcggttgaaagtatcgtctgacgagtcctccgaaaatggc

SEQ ID NO: 144779 - DNA, 640 bp, Zea Mays
tgtgaacagagcattttaataattatcccaaaacaactaactacattacacaactggtattacaatcctacttgaccactagatgtgactactagaatccgcgagcacaaccatacactacatgtgaagcgtaatttaaggaacgcataacgcgtatagacttgactcataaacatagagaaagcgacgactactttttcatgccaccacctctctacttaagccaaaacaattttcctatccacatcaaccaaacttctaatcgagtgaaaatctacacctctttgtcacgaatacaaccatattgcagcatgcactcgagacacttcggttcaacttaacacaattaccactacaatgcacttcgatatacacgttcgacatcacagtgcttcgacaaacccacacttctaatctacttgtcacatccaaccacaccacgtgcccactgcactcttatgaccaaacttttgtgcaattatttataacaacattcatcgactagacgggtgaaacaccaaactgatctttgcacatctcgccttcaaacaccaataacatgtcgcataatttatatttttaacccactctaacctacaccaacgatgaatacataaaatataattatcttagactaact

SEQ ID NO: 144780 - DNA, 566 bp, Zea Mays
ccggggagcttatatttctgttagatagaacatagttcttcatagaaaatataacttttgagtttctctgtagcttatgtgcttcgagaggcttcataaggtcgaccctggtaaaaaaagaaaagggatccataagaactcaacttaaatccaacacaatgaaggttctcgaagaagtgttgtcatgcaccacaaggtcactagcttccctttcaaagaaaacaaaaataaaaggtcactagctcacgttctgcaattctgtagtcacggagctctgcacaggctttccagggaagggaacactaaacgaacgaacggcaacgcccaagggcatcggatcataatgatagatgtcttctgccagatattactcagatactaaaaaaatatgttgccatccaaaacacatcagaacaaacaagtcctgctaaattgttaaacgaccaatcacaacggcaagatacagcaccgaagaataaaataccggtacacacaacatcaggacatcatggtgtcatgatcacaaacacttcaatagttcaattgctgatttgctgaactggaac

SEQ ID NO: 144781 - DNA, 688 bp, Zea Mays
ctacagcatagccacacggtggagtttgggacatcgatgatttactcgggtcgcgtgcacaagatgcagtgtttgggttatttcagaaatggagtagggcgagtgctgggggctgaagatgtccccgagctggaaggtgagttggttgtgttcgaggccttttctgatgatagacttcgcttgccggcgcatcgattcatagtgtaagtgttgcgaaaatttgaaattcagatccatcagttgaagccgaacgctatggtggcgttagtgaagtatgtttgggcggtgacttcatatggtggggagccgtctgttgaggtcttcgccaagaattattgtttgcattggtagaagaagaagataggtggattgattgaccaatttgggtcttgcacattcacgttgaggattgggaagacgttggccgaagttgggattgttccatgtgccaagaataagtggggtaactggtgggatttttggttttatgtggcattgagggatgttgaaggggtgcttggtttgccctgtccatcttgtgctcgcactgttatgtggcctttccacaatttaaagtgaagaaaggggataaaaatgaggggggccttcgggacgtagcctagttgagcagcggccgagatttggttgaagagtttgttgcctacagtgtgtggccgctggctcacgg

SEQ ID NO: 144782 - DNA, 400 bp, Zea Mays
accccgagttaagtaagcgcgagcatgttgcaccggtttaagtcgttgccgacttaagtcgattgctccgttagcagggcatagtggtcaccccgagttaagtaagcgcgagcatgttgcaccggtttaagtcgttgccgacttaagccgattgctccgttcagcagggcatagtggtcaccccgagttaagtaagcgtgagcatgttgcaccgccttaagtcgttgccgacttaagccgattgctccgttcagcagggcatagtggtcaccccgagctaagtaagaatgcaagttaatcatgaacaaactgagtatctttgaagcccttttttattgatgacatatttccattttacagagtacatcgtcgtcccgatagcttttgaaatacagctagg

SEQ ID NO: 144783 - DNA, 381 bp, Zea Mays
gagaatttgagtatccatattgtataagagggcaaatacgatgataatcagctaacagcataatcgattggctaccattatgaactagagctatgcttacatgggtgcagcactgcagcttgagggcatataactttttttaaggtctttgctgtatccttcaacgcccagaaatgaatgactcctagagggatgtttggaacaacggatcgttcaagtaagtttagttcgaatttgaaccaaaacattgggatctggacccaaatcaccctaatcaaaacaagctcataggagagacaaagctctcatttggagtaaccatataagacaacaaagccctaccctccatcaaaagatttgttgctctgccggttcgcaccc

SEQ ID NO: 144784 - DNA, 812 bp, Zea Mays
cctgtccgtctgcagcgtacggtgtgggaaaaaaggaagggaaacgaaacgaaacccccctccccctccgttcaaaagggagcccgttctgttgacgatcttttttttccagaatcaatgccctgcataagtgcatagatggctgaaggctacatcgcgttatcaggtaggagtatgagggaaaatcatgccctcgcatcatcagcacacgaaccaatctgatcatcagtaacaagcgctggagcatggtcgattatccgtccgtcgaagacgcagagtgaataaaaaaacagaacagaaaaaggatccgagaccatgccggtcagactcgacggaaggcactactagctttacggggttgcgctggtccgcggatccagcgaggaagaaagcgggggtagtagcaagcataggggaagggaaatgcggttggggtttttgcgtggtacggtccgtaccttgaaaaccgctttgctttggttggagctgtggtggaggagtcgagtgccaaagccctgctgttccaggaaggaagagggtggaatgcggcgatcgcgctgcagcggaagccctcgcggcggaaggaagacagcgtggttggatggatgtagtagtgaactgcgctgcctctcttttatgtccaggcctctgcacagcactacgcctgcacggtgagaactgagaagggaatggaagtgtggttgatgaggagggatcgtgaaactgattctgatacgcataggtggttgtggtgggtagaaaaaacaaatgctgtttttactgctcccagcctcccacagtccctcccttac

SEQ ID NO: 144785 - DNA, 654 bp, Zea Mays
caacatgtttgtttgcatcgcagttagagaagccgatcaccgattggactgggcggcccggctgaggatatccatgggggtcgcttactgtctggagcacatgcaccagctgaaccacctgttgtgccaaggaaccttgactccagcactatatacctcactgatggcttcgctgcaaaggtctcggacactgccaccaccaagggatcggattccagctcaaccgctgatgacgagctctcctcggtttcaggcatagatgccatggttcatcagtatggcatgctattgctggagagactaaccggaaaagttgcctactccgaagaagacgacgacgacggggtttcactggagcacttggcgtctcgctacttggatgatggcagcatgccccttgcggagctgattgacccgagcctcggttggttccctcaagaagccgcgcacgcactgtgcgaggtcgcaaggtcttgggttgggtggacccagaccccaacaagagaccactgatggtacaggtggctgctaggatgaaggagatcgcaattcgcaaggtcttgcgtggacccagacctcaacaagagatcgaccacggatggtacaggtggctgctaggatgaaggagatcaccgcgctggggccgggcctgag

SEQ ID NO: 144786 - DNA, 526 bp, Zea Mays
gcgcatgcgcctagccgtgcccgagagcacctataaatccctcccagggtgcgtgacagtccactccacaccccgcctcactccctcacgcaagtccccaactccgacgagctccacaccgctcgccagtgccgcccgaaactcgctgtcgtggccagcccaccccgaccaccccatcgactaaccaagcacaccagaagcttcccagcatgctcccacagcttgtagcctcgctcgattgaactctaccatgccgaagaagccccgccaccaccagccctcatggtttgccgccagaacacggtgaccggtcactccgagcgtccaccacgaaatctgagctcggggacagcttcaccaaggcactaacaagctccctgagcatttccacgaagctctactgcaccaggacctgggattgaagctcgtcgccggcgtacacccgcctacaccctggaccggcttgctcagcttgccgccagcctatcaccttgccaccaagttcgccggacacccccgaatctcc

SEQ ID NO: 144787 - DNA, 703 bp, Zea Mays
ttgcattttccaatctttatcaatgtaatgtgcaaccaaacacatataggacaatgtttgattagatgtccacaaataagtggttaaggaaatgaaatccacacctttaaggacctttgctaatgattcctttttagactcataaatctttaaacattcagctcttatggtcttcctaccaacaaattcatacaacggattcatatacttcatgagaatattaaaccatgtgtgctcaaccattctaaatgggtactcgtgaactatgatcattttggcaattagttttttttacttgctcatgattataatctttaggtgatgagatagtagggagaccagatccagattcacctgtcattgaaggagcaaagttcaatagagactgatcaagcttttgttcgatatgcttttgatacttgtcatagttcttcatatgcctcaacaatgtcgttgttgttgacccatgtgcataactataaagctttttacaatatttgcactttgcctttagtaatggattctccttatcgaccgggtttgtcacattcaccttatcaaaaacctcccaaaccttggatttgcctttgcagcccccctcaaccttaactggtttattcacccctttacgccttttcttgactctattcacatctccacaaccatcagattcatcaactctaacaacatcgacatctttccc

SEQ ID NO: 144788 - DNA, 918 bp, Zea Mays
ggggtatttatgcaatttccagggacctatctgtaactgctttaaactgtgcgaggatggcgggtttattactaagaagttcagggactctttcgagatattgccaagcgaaggggtatcgcggcatgtgagccgttggatcagcggtcaagggcccggattagatcggcggaatactgaaccggcagggtacggcgaccgtaggatcctgattctacggttcagatttaaaataccccgcgatcgcctcagacccgcacgatcgcgatccaacgcctagaatcgcccaggccgaatcgttccgtggatccaatccaggccgcccgatcagggatcaacggttaacatttaacgaaagagcatatctgttgtactccgtccgatcagggctcgatggtcaggatcagatgagcgaagagctaaagcgcgatcggatccggtccactggatcagcgatcaacggctgtcgctctcccctcacctcacccacaccgtactatccccaagcggcggcgcaagcacagcatgcggcggaggccatcgtcggagaaactgatgtcacgccccaccgccccaaacttcgattcgttagccgcaggatgtggagaagatgatggggaattagtacatcgtgtcctcaccagaagccgtcacacgtagatcacaggcccccggcgccatggtcgctgcgccttcattcacccaaggcatcggtggcagcaggagcatcagccagagaccgaccagcgcggctcccaacatccccgcccgatccgcagccgccccatggcagtggcaatcttccccccccccttgctcccttttgtttcttccctgtgctagcgccgacgaggcgtccctgttggtggtggtggccgacacggctgcgggttgcggctgggttatataggggcgggg

SEQ ID NO: 144789 - DNA, 371 bp, Zea Mays
gagctattgacgaaggtactcttgatgccgaagccgaacaggttgttgttgaagaaaatgttgatgaagttgaggaagattacaatattttgatccccaaaaaacccagccatctagattttgagaaatctactgtgtccgaagatgacatgcccatgatgatgaagcttggctactttggggaagcttaaagaaaacttgtccgatttgctagagaagagactacccctgcaccgaagaatgatgaagtagtggtttttaagagcttcttcagagcaggactgcgatttcctctgaacgagatgataggggaggtgctaaagaattttgaaatatatcttcattagctgactcctaacgctatcgttagg

SEQ ID NO: 144790 - DNA, 516 bp, Zea Mays
agtcgattgctccgttggcagggcatagtggtcaccccgagttaagtaagaatgcaagtcaatcgtgaacaaattgagtatctttgaaaccccttttttattgatgacatatttccactttacagagtacatcgtcgtcccgatagctttttgagatacagctagggataaaacttcctgaggtgttctatgttccaggagttcccgacttctgtgccatccatctgagtgaggcgatatgatccgggccgagtgacttctgctactatgaagggtccttcccataagggcgataacttgtgtcgtccctcccccgttagaattcggcggaggacgagatctcctattgagaaggatcgctgtcgcacagccttgtcgtgatagcgccttagagtctgctggtaccgtgctgattggattaccgcattcaaccgttcttcttcaagtacatcaatgtcctccagcctggtggcctcgacttctgctatgtttttgaagatcaaccttggcgccccg

SEQ ID NO: 144791 - DNA, 468 bp, Zea Mays
ggagatttgaagaggaaggctgtatctcaaggacaaggaagcagcagtgttcgtcctcgctatagttcaccccagggtacaccagttcgcactggcggaggccagcgcccagttcagcagtcaccacagaggactccactgcctcgtcaggctacccccactggcaccccgatgaagtttttagggcagagtgcaggcaccacttgtttcaagtgtgggaagactggatattatgcaaatgtctgcccatagaggatggctactaccccagttcagaataggcagcaaactccaggatctagcaagggatactctaatgccaagtttaatcaagtcagcgttgatgctactccggatggtgctgacatcgtacttggtatgttttacgttaatgctattcctgcaactatattatttgattctggtgctacacattcattcacgtctgctcgatatgccaacacaaat

SEQ ID NO: 144792 - DNA, 501 bp, Zea Mays
gtgcccctcgtaatcaaattatccaatcacaatggtcacatgaatgaagtaatgcaaaagcaaatagtttaactttcaactcaatccatactgaaggagctttcatatttggagaggcatcatttgaagtaaaaaactacgcttatggaaaatggtattacggtacaataataaatttgtaacaaaaggctggtataacctcttgattatgccactatgcaataatacaatcttaacactacaagtaccgattgaacaattgaatatgtatactatgaagcattactattatgcatgttgagaaactcatcaatcacagtattaaaattcagatctctgatagaagctacaaaaccatgtacgttcgctaaaaaaaagaagctacagaactaataactatatcaagttttataatacgaatgaagcagaatctaggacagtaatacactaataccagatacttgaattgctaaacagatacctgtttctcgagctctgttg

SEQ ID NO: 144793 - DNA, 516 bp, Zea Mays
gatcacttcaataccttctggaatgatgccgatgcatgaccaatttctttcttgttcctccgatccgcctcaacgatattcagttttaacgaattctcctgcagcttatgatcctacacagttttcacaccatccctgcgagtgagcacctgcaccaggaattatcaagccaccatgagttagcctgcaagaggccttcctgaagtagaaaaatgacgacacctgctaattgctgcccctcgatgagctagcggacgaagtgttgtgtgtttaacttcccaccatcagatctatctgcgtggtggttctcgctgcacttccacccctcctgaactcatgtcacagcaggctctggcttccactcctcactgccatgcttctttattattcttgttagtccagattgctaaaattcggcgtacaaacaagctgcccatctcctccgaacaatatttggcatccaagatgtacttcaaacaagttcttgggtgtatgtgtaaatgctaaattatgtat

SEQ ID NO: 144794 - DNA, 820 bp, Zea Mays
gattctagcatttattcatctgataaggtcttattgcttactaataaaatcccaatttgtgatatcttctatgccaaaaaggctttcatgcattatattatatatattcgggttacttcgggtaaaactttatgcatgaggagagaggagagaattaacttgtccatgttttgttgtatttcaatttaatttcccagattattcaagcactatagagcttgatatagttgttatggccacttggcaatataaataaatatatgatgccacacaacacaagcaaataaaatatagagctaaacaaaattgtttacgaaggttgcacataatgtgattttaggggcttgaacaacccaccacaatccacgcgagtacaagctctagcgtatctggcgtcaacgtgtgtgcgaccatcagggttacgacaacacaacaagccttcgtaataagtacaacaggcaaaattattgctcggtaattggggtacacgataaatccacgcaacgtgcgcaacaggcgtaatcgtggctcgatgatcacggcagacagacagtgcctacagggcatgcgaaaaatacgcgactccgcgatggcggttcgactcaacgggagttgtccgattaaacgagactgctatatagcaatcacatgacgcagccaagttcgtacgacatgaatactgcgtcgtgttgccagggcgcagccaatgccaaagctcagccgattattaatttagtccgatcggcatgtctaggtacccaccatacaatttaatcgctcgatgtgagttcaaaaagctcaacgcaacacagaaatttag

SEQ ID NO: 144795 - DNA, 427 bp, Zea Mays
gtcagatgttccgtcagtggcgtgaggcatatcctccgtcgatctatgaacgaacgggcgcgattagatcaccttactggtgcgagggggacgaagtttggtcgttggatcgtagatgaaggagtgggatcggatctcgcgcgtattaaatctagggccttggatctagatccaacgatccttggcacatacagattcctcgatggcaggatctaatcctggtcgcaggacttagatcgtgtggctcgggttatctcgtaccccttcggcctgggcgctttgcgtaacagaccctgcatttatcagaaattaactcgtcgtccatatttactgtgctatgtgtctgggaattcttatcccgaggctcatgtcttttgttcaaatcttgtgcgcagtccaaaatcataggaaaatgcagaaattcaat

SEQ ID NO: 144796 - DNA, 429 bp, Zea Mays
atagaagttgggaatccagtttgccctatgcggagttctcgtataataacagccatcaggccagcatcaagatgtcaccgtttgaagcattgtacggacaaaaatgccagacccctctcatgtggtccaacgtaggggaaaaggcactagaaggacctgtctttgtcaaagaggctgaggagaaagttaccctgatccgtaggagattacttgaagctcagagtcggcagaagagttatgcggacaacaggcggagagaactcagatttgaggaaggagacttcgtctaccttaaggtctccccgatgcgtggtgtcagaaggttccaagtgaaaggaaagctagcaccgcgattcgtcggtccctatcccatcatcggcagagtaggaaccgcagcatatcgtcttgaactaccagagtccatgtctg

SEQ ID NO: 144797 - DNA, 551 bp, Zea Mays
gcgcttggaatggtttattgttgagaaccacggaaaatctctccccccacggttagggagacagccggatgtttgcactccgagttggaccgagtctcctacagaccaggaggtggctgaggctggggctttgctggctgaagttggactactgaagaagaggggtttgactgcagaggctgtggttgctgattttgttttcaaaaacatccagccgttgaaggatagggcatacccagcctacttgtaccgaggtttagctgactcaacccgggtcaccaatataagaattcccgctgtagacttggtgaattggcttgaaatgatacttaggggtaaggtgtccaatgttggtgcccctatcgcatactcggccaggaacctgcctccttccaaggcttttacccattttgtgtcgaatcctccagttactgacaacggtttgggccttagagtacgaccccctgccaaagaagttagtgctttggttgcttcgattggagaaattcccgatgatgaacggcaagtccactttgaggtgcctttggatc

SEQ ID NO: 144798 - DNA, 379 bp, Zea Mays
cggaaagcaggacctaagatcgtctcaaaccttccaaagatgacgcgccgtctcgaattctcttattcggcttccgcctaatggcatcactgcatacgtactcaaacattcaagcgacgtctgcttttgctacgtgcgtggtcttttctttaaggtatgatacttaattgcaatccatgcttatgatgatgatggtcgttcctgctagttgtcgtcaccacgtattaatgattttccagtgtttggccatcggctcctcgagctaactggccatttttagcttagtttattcgatggttatctcgctttcttcccaaagttacgcgtagggaaagcacagcacgtgtggaaaactcagcccgcgctatgttaatttggc

SEQ ID NO: 144799 - DNA, 553 bp, Zea Mays
ttgggtttagctctggaagggtcacacccattgggatcagcattagcagggtcacacccattgggttcagctccagtaaagatttccaccggtacttcttcagcagcaggagtagaagggccagcaccctggtctagacatgatactcaccgaagccgtctcttcttcttcttcccctcggcaggtacagttggatgactaacctggcggagacgtttcgagcgagtaccctcaggctttcgggtgtccacggttccttcaagctctgggatagttgcaacagccattgttttagcagggaccgagtcagaagaatccccagccaacatgtctagcataacactcatctctgcatcagctggactcgtaggcatctcaaagtgaacttgcctctcatcattgggaagatcactaagtgaagcaaccaggacctcaatatcttcaagagagggtcgcactctaagacccaaaccactatcaccggtaggacgattggacacaaaatcgaaaaaggacttagaaggtggcagattccaagcagaatatgcaacag

SEQ ID NO: 144800 - DNA, 488 bp, Zea Mays
ctctctcagccagcctcgaaatgaagcggctaagggcggctaatgatcccgtaagcttctggacgtccttgactcgggtcgagggcctcattgcctcgatcgctctgatcttctccgggttcgcttcaatgccccggtatgaaaccaggaattctagcaacttcccagtggaaatgccaaaaacgcatttgtccgggttcagctttgtgcgggttgcccgcagcttgtcgaagaccaggcttaagtcctccactagggttgaccttctcttagtcttgactacaatgttatcgacgtagacttctactttgtccctaatcaggtccccgaaagtcttactcatcgcccgcacaaatgtaggcaaggcattttttagaccgtacgacataacaacatagcagtaaagcccatccactattacaaaagtggtatgcttcctatctcccctagacatctggatttgttggaaaccagagtaaacgtctaag

SEQ ID NO: 144801 - DNA, 318 bp, Zea Mays
gcaaatgacatcatcttgaggtaagaatgacatcaagctagcaaggaaatccagcacgccgtgatcctctttgtaaaaaaacacaccaaactgaacgccatagctgtcgtcaagtttgttgggattttggctccaattgacccggactcgttcccctctcacagtataaataggtaccaactataaccctagcccatcgatattgctgtgattcctatgatgccaaagcctcatcaccaagcgtgagcaacccaggggacagaccgagggagaaagaaagcacgaagcgacaatggcgcctgggagtttggcttgctc

SEQ ID NO: 144802 - DNA, 909 bp, Zea Mays
ccgggtcgagaagcatcaagagcacacaagagtactgaaacaagagcgaggagggcataatcggacctgtggagagctggccacggcaatctcacacacggcggggttcttgactgatttgggggaaatcccaaattggggagttgtgagggacgattggaggtgagggctggttcactgggtgcacaattacttagcggagcaggctggggcaccaatttatagtttccaagggctgtggctcctaattttggcatggcgtgctggcgtccggagaggaaaaaggtcactggtggctcagtcgtggcgttcaccggtgcagcggttctgagatggtaagcctaggagtgccatggttactactgcgcagtaaagagccactacgtggcataatggaggtcgctggagtttccacgacgacaacggtggttcggccacgtcgcacggctacaagcgcggttgataagcttcaccccgtgaccaaatccgctccccctccgatcttttcacccgtccggtattatcctgcctgagtcctgcatgaatcgccgcgatcagtgtgaatccttgcgcagaggtcatcggtgccgaggggggctgaacctgagatctttctgtgtactgtaccatcagaaaccttatcaggacgcctgacagagcaatttgcagtgcccagatctccaattttcatatgataacttgctaatccacctttaacaaagttgttgtcctataatccaactttgattttgctatagcaaccatactttaattctcactaaatcatactcaaaatagctcccaaacttggtcctagttcactgtcagtcctgtttcagagttgtacccgactgacagaccaacttcaggtctgtttttcttcaaattttttatgttaccaaggtttag

SEQ ID NO: 144803 - DNA, 835 bp, Zea Mays
tgccggtggactcggtaacgaaccgcgaatatcacgccggggccgcgccatcccggaagtatttaaccctctcgcagctacctctcccctgtttcctatcttccgcgctcgcaccgccctgcaatgtgccgccaccgtggaactcgcctgcgccaccacttcgggactcaccaagcagtcgaggtgtgttgctaggtcacctcgcatcggtccggggctctttctggcgaggattgcatccggactggggggaattcctcgccgcacttgctgccccgtcgtagaacctgctcgcgctgtagcccgactcctctgcgacgtcattgccggtaagatgcccttggccatgttcgccgtcattactgccttgcgtagcattcatcgaatcggtgtttgggcgcgtggttcggagtttgggtgacgccggccatggcgctgccacgggcgctctggcgccgccgcgcgcgtagtgttagggaagagtcgtgcgcgccggagttctgtgggtcgttgatccatagatgggcggtggtgattaggcgtgagaatacccgttggggggagtagatcgtggccattcatccgtcaatcggcgatcagagtcgggtcttggcctcattaaatccgatgcgttggatcgagaatggacggttcgggatccacgccgattctaatatagcaagatgtaatcctggtcgttccgatgagatctgacggctctagtaggtagataccccttcacgtgacaatatctcaaaagaatccctctgtttaccaagaatcaacccgcagtccacgtagctggtctctgtgtcttatttatttttgcgccagg

SEQ ID NO: 144804 - DNA, 539 bp, Zea Mays
cccaaattggggagctgtgggggacgattggaggtgagggctggttcactgggtgcacaactacttagcggagctcactagggcggcaatttataggttccatcagcggtggcggctaatttttgagaagacgcgcagcggccggggagagggactgagtcattggcgcaggtgatcgtggctgttaccgtggcaagaccttaggcgatagatgggctgtgtattgtgatcaattgcgacgtggtaaaatggctgacagcatggcataaccgcgaggaaccgcggcacgatggcgatggtcgcgcggcaatgttgccgggcaaaggggcatggcaacagggcggaacagtggcctaagttcatcctcaacgcgatatttcttaccccgggtagttatctgcactccgccgggcacgaatcgcggtgccagcacgaatcagagcacgaggtcgccggaggcgatgggggctgaacctgagatcttattcagttactgtactatcagatcttcatctgagcgcctgacagaccgatttgct

SEQ ID NO: 144805 - DNA, 310 bp, Zea Mays
cataaatgaagattggagccgtggtctactgtcgtgactagatccaaagcttctacctccatttgtggggagatgcagggaggggatggctattgcagaagcgtggaaatcgatgatttagagcgaggccatagctaaccattgagatcaatgttggagcgacataggcgacacgagaccggaggagggaagagcggtggcatggggagtgctggcggagagcgctaatagggatcgacatctacttcgatttgactcaaatgaggaacatttggatgtttagggtttagagtttagacttttgtttaga

SEQ ID NO: 144806 - DNA, 768 bp, Zea Mays
agtttgtaaaaattatgacctttgtgtaattactttataactaggttggatggcgggttcatttcgcagatttccagggactctttagaaagaagaccagggccgaaggggtatatgttattcctaaccgtccgatccacaatcgatgatccggattagatcaaagctccgtgaaacggtacccagggatagccatcagattagatctcgacgacctaggtttaatgttacctacatcgatcacaagcgccagatctagatcggacgaaccagattggttcagccgaaccggtacgggtgttctaatcctagccacccacaccgagatctacgactcaggactcatcggcgaaggggatacactagactatatctaggccactgatctggaaactgacggcatgattttgtttgacgcatagatatggatgaattgaatcacaaccgttgactcatggatccagggccttggctgtttcttccccgccgcggtgagcacaccaacgcccagcccgccggcgacccaggcacacacatacgtccacgatcggacggccaatacgccatcttcaacctctcgcctcccctattctcgctcctcgccagctagcccagggcgaccgaagccaccatggcgcactgaccagccggaaccaccacgacgccagacgcaccagagcgctggacccacacctaatatgcccaaacggaacaaaagtagagaagcagagggggagacactcaccggcaagtggggcggcgatccat

SEQ ID NO: 144807 - DNA, 569 bp, Zea Mays
tcttggcaatagacaacgtgaagcggccagcgctgactcttggaccttgtcgtgcatacctacctggtgtgctcttctgcttcgccatgattaatgtggcatcgatcttgctggctacctaaacatggatggcacctgcatgcaccactgcattgccggcaacaagcaaggagccatgacacttgtggatcgagtgtggcaatctgatctgttacgcggttgaagagatttatttggtaagattttggatggaagaagaccgcgcccctgcgtgcgcccatggatctagggggaaatgaacactagccagaggagaggagttaagttaccagctgcttggccaccaccaccattctcatggatgatggccaaaggcatggcggctagcttctcaaacttgcaaggtcgatactacttttggtttagtgcaatggcggatgaaggaggtggaggaagaagatgcgatggcgtgcgtgatggacacgttgcatggaaacgcaccattgggagatccatgctaggatctttggcataattcaattgttcaacttggtaagccttccttcaac

SEQ ID NO: 144808 - DNA, 447 bp, Zea Mays
cgcagagatgccctctttgtgatcaagatcgagaaactttgaaccaccttttggttgggtgtgtttttgctagagaattttggtttcgcattcttagccaagtaaatcttcagaatttggcccctcagtttgatggatgtcagttcatggattggtggagagcgattaataaccaattacagggacccgcccgggatggccttaattccttcattattcttggggtttgatcattgtggaagcacagaaatggatgtgtttttgataagtgccgagtgccgacccaacatggatgatatcatctcatgtgtcaggcaggagagggagatgtgggagagggctggagcaaaaagtttgtctctccttactgcccctattccagggttgtaggtttccttttcttttctggtcgtttctttcggttagtcaatggatccttttttgtac

SEQ ID NO: 144809 - DNA, 346 bp, Zea Mays
gcggtgattcaatcagcacgataccagcaaactctgaggcactatcatgataaggccatacaacatcgattctttgcagtgggagatctcgtcctctgccaaattctaacgagggagggacgacataaattgtcacctctatgggaaggaccattcacagtagcagaagtcactcggccgggatcatatcgcctcactcagatggacggaacagaaattgggaactcatggaacatagaacatctcaggaagttttacccctagctacatcttagaagctattgggacgatgatgtattctgtaaattgagaaaaatatcatcaataaaaaggtttcaaaggcact

SEQ ID NO: 144810 - DNA, 390 bp, Zea Mays
gcgaggacctggagcactcctggaacatcgacaacctccgcaaattttttgtttgactcctcagggctgatttcgcccttgtaattcgcaaaaacaatcttgtaccggcccgcactcttttcctcccggggggtgaggtttttaacgaggcggagccatgtaatatatgtgtgaaaatcccccgcaaaaacatgcgtcgaaaaaagaccgcgacggcggtcttcgacattcgaccaatacgaggtcaacacgaggctaagcgctagccaccctcgcgtgcgacaaatccgcgcagaagtcgcctaagggtgcagccggaccagcacaacaagtgtgaaaaaatcgaagtctatcgcgaagactatccgcgcagaagtcgcctaagggtgc

SEQ ID NO: 144811 - DNA, 379 bp, Zea Mays
ggatgatggtgatcgaatggatgggtgactcaccaatggtgatgaccggaaggaagtcatccatgtcgaggtttggagccatggcgatgacttgtctccggctagcaattccaagagctccgctcaccaattgcgtccggagaggacacgataatcctctttgggtctcgatgaagatcctggaaccgacatgggggcctcaacgctggtctacgtgcatgtcgacgttgcgatacagctccgcgacggagggggagcgttggcgagccatttcctgatgctctgccgctccaccgtcctcaactccacaccggaaacacacggcacccacgaatcaatcgtctaggactccaaccgaagctcgattgatgacgagcac

SEQ ID NO: 144812 - DNA, 361 bp, Zea Mays
cccaaatagaatcgtggtgtcgggatgtgttgggtaaacccacaataaaatccatgctgagatcctcccatttccaagatggtatgggaagggctataaggtacctgctaccttcaaatgactggtcttgactctttggcaagtgtcgcattcagatacgtacttagcaatttccctcttcattctggtcgaccaatacaaatgtttgagatcatgatacatcttgttactgccggggtgcatggaaaatttggaaagatgagcttcatccaatattttcttcctgagttcagaattcttaggaacaaccaaccggtcttcaaaccatagaactcccttgctgtcctgacggaagcatttg

SEQ ID NO: 144813 - DNA, 316 bp, Zea Mays
ggccggtggtggttctttaccctgccatttgcgcttgccttctgctttggtttccgcaacctaagagagtagccagagaaaccacacacctcatcccttccgcctccaccacctccgttcggctatggctgacaaggtgaccatcatcccgccgcgtgacccgtggcctttctccaccgtcgctgtggaggatctggaggccctcgttgccgatggtctgctccgtcccctctccgatgggccgcagccggagtggatggcccccgcgagcgaggctgatctgactccgccaccggggtatgtggtcagtttcatc

SEQ ID NO: 144814 - DNA, 737 bp, Zea Mays
cccggagacaccaagtcgcagtggaaatgcttccggctgtgggacaactactgcgtgaagaacaagagatgcgtcgacgagtgcctaggcgtcgaggggaagggctacacccacggacactgcgagctgtggacgtgcatctgctgcaagaagaatggcgaggatgaaatactagctcctagctgctgggcgaccctgagcagcgagcagaatcacccatcagtgtcaaacaaacgaagcgttaggggggagctcaaatggtttccacatttcgctgtattgtagcgtttgagcttggctaaactttttgaggctacagatcgatagagagaataagacgtaataagtacgcagtttttggttcacccagcttctttctaagtgcacttgggaagttgggattgggtccagtcttttgatgagcttgccgtggatgccttttctatgggctatgaggacgacgtccctttcttgtttgtttctgtttgttgagagagagaggattgaaggagggcttcgaaagcaaagaacctttgcactggatagatctttgctgctatcagatgcacgcagcaatatgttgcgctatcctcaaaaaacctccagcctctcctaggatcgaaatatcctctctttcttttgagaactcctaccagctgcccagatcactggcagagacaagacgaggagaaggccggggaagtagctcactgttgtttggagttggaaaggctcgc

SEQ ID NO: 144815 - DNA, 457 bp, Zea Mays
cgacgacataggtcgcgtgggttgtgtttctttggtgcggcccaagtagctgccaggaggccgcacgcttcttatcctgacccagcttggctttagggtcagtctcccttgctttctctgcccagcgagccctcgccctctagctcttcctgctagcgtcgtcttcgtcccgtgctctcctgttcatcgtcgatctcagccatctcaggagcacccgctcactcccagacgcccgcgcaaaggaatcccccacgatctccctccaaactgcccactctctccacgatctccccctctagctcatgatccctctgcccgcctgccacgcccacgggcgcaacaagccaacaacccacactcggccccgctacctcaatctgtcgccataaatccgctacctcctcctcgagtcctgcttgatcgccccatgctcgaccggtcgaccggacggaagggc

SEQ ID NO: 144816 - DNA, 584 bp, Zea Mays
acaggatcatacccaaaatcgagcactaagttcatccaatcttactgttattggagaattcagacttaaatcgacctgacatcccatctttaggtctgattttctccaatttcttcataacaactttgcttacattcttaagcaaagttgttctcctttgtttgatctacaagtttgatgtggtgacctagggcaaaaaccctagaatttgaaagttacaaagctcaaaagttgagcccataacactgttttctagacttagagtggaatcacaattggggtctttttgcaaatttgtccaaaactgagggtttggcttgcaaatcttcataaatgtgaaccttgtgaccttatattgtagtttttacactttagtccaaatgggcactacttttgcacataggcccctagggtttaaatttagggttttccagggtttcaattagggtttttggtatctcaggggtatgaatgtaatgtagatccatctttggtaacattctatgattgttttacttaaaccttagggttttctcaatttgggtcatgttttccctttttggtccctgtttagggttaagtat

SEQ ID NO: 144817 - DNA, 351 bp, Zea Mays
cgggtagctcgagttggtatgccatctccccaactcgcctaaagatcatgaatggtccaatgaagcgaggggacaatttgcccttaactttgaatctcttcattccacgaagtggtgacaccttgaggtatacataatctccttctttaaattctagtggtcttcttctattatcaacatagctcttttgcctggtttgagctaccctcaaattttctcgaattatacgaacttgttcttctgcttcttgaattagttcaggtccaaagaactgcctttctccagtctgatcccaatatagagaagttctgcacttcctcccatataaagcttcaaaaggtgacatcttta

SEQ ID NO: 144818 - DNA, 470 bp, Zea Mays
gacgtgaactggtccccctgcagtgtcgcgcactgccggcgacgtctgcctgtgctgtgcggtacgatgaaccggccgttttttttttctttcattttagttatagctacttttttataataaaaaaacacgttcacgttctatgcatggtgggcctattaccaggtttgttttccagggatcaacgcagtaatctatagtatcgaggtcgcacgatgttgaatataccattagaatataaccgtcaaatttgttatacaagtactaaaatagataataaataaaaaacggatgaattgggcaaggaggcttcatgacacatcaaaggcatgcacgagatccacgcggcttattcccatagctacccgtttcaacgacgacggtggaggagaccaagactaccgtccacacccatattgttccatagggttgtgggtcgtaaagtcacctaagcacggcgtgtcggctcg

SEQ ID NO: 144819 - DNA, 547 bp, Zea Mays
gctcactttattgatgagtcatggcagctgcataagaggatcattggttttttcttggtcaagggtcataaggcagatgacataggaaaagacttggagagatgcttggtggcttggggattagacaaggtgtttaccatcacagttgacaatgcttcagctaatgatggtgcagtctcctacataggaagggtcagtaataaatcaaagactagcatcttgcaagctaggttgcttcatatgaggtgtgctgcacatatcgtgaacctgatagttcaagatggattgaaggagctggatacatctgtcaagcgtgttcgtgcagctgttagatacatcaagagctcccctgctaggattggtaaatttaagaaatgtgctgagctcgagaaagtcaataccaaggcattcttgtgtcttgatgttgtcacacgctggaactcaacatataacatgttgaatgcagcagtagcatatgagaaggtttttgagagatatgcagaagatgatccatactacacaattgatttaaatgctaacaaacaac

SEQ ID NO: 144820 - DNA, 411 bp, Zea Mays
tttgtcctggaggcccgtaatgcaatctggcccagatatgaaaggcatatattctcgttgtcttagtactgatcacataagggccttctgttatcagttagtgagatgctatatatgaaagaaatcgggacattttcaggaaacgtgcaaatctaggcattttaggcaacatgcaatcaacgaaattctaggattagtttcctttccaagtcccaaatttccagttcatttaaaaaaagtttgaaggcataaattgggcttctactcccaagctctagttccgtatgtcacctgattccctgccatgtgggccctcttcaccaccactattcatcaacttttctgagtttagtaacgcagtcatttctaagggtaccccttcgtcttcaatagtgctagggcttggcctac

SEQ ID NO: 144821 - DNA, 314 bp, Zea Mays
gtagtgagggatgaagttgaaattgaactctactagctctgccacccacattgcgatgcacctagttgcatgtaggttgtgaagttttgctcccaatgaaaggatataaccattgagaccaagtgcacatggaaataatggtgtgacttctaggacacggcaaggactatgtagaggagcttttgcatctctaggtaccttgctttggcatcatggagaacttcactagtaaagtagacatgctactagacatgacataacatggtgagaagtgaccaactcgatgagattgggatctagagggacaacatgcc

SEQ ID NO: 144822 - DNA, 519 bp, Zea Mays
tgtagcacaacatatcgtttgtgcatttagattggtgatgacctatcctcatacaacggaagcatttgatctgcctcttttgttcatccttcatccaaaattccttctcattatgcaagagtttcctattatcagaattctgaccccccatgatagaagactgcacccctgatctctttctctcttcctcgctagtccgtctcctttgctactagcctcaaaacgctcttcttcacgtcgacttgcaaaaccacccctaccaagagcaaatgacggacgacctccctgcctcctttccaaagaccaccctgccaagatttccagtacccgtgacattttcctgacggcgtcacccttgttcctaaagatccacttctctactctccccttcgcccttctgaagtttggatatcaaatcctgctcccttttaaagtccagatccaagagatcatcgtcttccattcatttcccttaccatttcttccagtgctcgatccttgttccctccgccacgccat

SEQ ID NO: 144823 - DNA, 488 bp, Zea Mays
tcgcaactttctcgtgacaacacatttctagcatgcctagtggtaccaacacataggctcatcatcaacatgccccaatcaaggaaggaggctcccaaaactagcaacgaccaggaaggatcgccagagggtgaggctgggttgcgctagctcaaggattttagacgagagatgggagagggctatgactgggctctcaaaagcatggcttatgagctcctcacctacttcacatggactttctctagcgacatcaaaatcatcgggcgcccagagacattgctggagtaggtcgaccttgccatgccatccgaggaacacaacgccgcccttcgataggagataaactacataatccatcaaatgatggtgcaacaatcagaagtcctccttaactccatggaggagttatcgaaggagtggccaaatctatttggccaaaaaatacactacacttgggcccatgtttgggttgcattaagttgaga

SEQ ID NO: 144824 - DNA, 400 bp, Zea Mays
ctccagcacttggttagccctctcggtctgcccatcagtttgaggatggtaggctgaactgaaattcaactgtgtgtccaagcactcgtgcaacttcttccaaaaccgagaagtaaactgtgatcctcggtcagacacgatgtttttaggcaccccatgtagacaaactatccgagtcatatacaattcttctagcttggctcccgtgtaattagtccttacaatatgaaatgagccactttcgtcaatctgtccacaatcacccaaatagagtcatatcctgcaggagtgcaaggcaatccagtaatgaaatccatgccaatttcttcccacttccattcgggtatctttagtggatgcagtagtccagctggtctttgatgttcggccttgactcttt

SEQ ID NO: 144825 - DNA, 354 bp, Zea Mays
ttttctcaacgagtggtgaccgccgccggcactaactagcgctggggggccacgcgcgagaagcaggagaagctctagcctatcctgcaggccttgcagaagttacgagatgcgggccttaccgctgcgggggtcgtcgccgctatccatcgttagagggtgctctctttggctgaacggcggttgtggctcacggagatgaggccgggggtcgattaggaggattcgcggatgtcctcgacctccctctccgccgacgacctcctcaagcaggtaacaaatatggtagggaggccggatgccggcgcccttagccagcccgcgatgcgtcctgaccgtgggtatgtgtccctg

SEQ ID NO: 144826 - DNA, 492 bp, Zea Mays
gttagtcacctaccttggccatgttatctccatcaacagcgttgccatggacaacgacaaggtgggcacgttctcgtcttggctagagccactctcactctagggtattcacgacttccttgggcaattagttaatacggatgttcatatgggacatcgacacaatcactgttcccctaacacaattgttgtgtaatgatgcctttgcttggacacttgatattgcggaggtgtttgtcatctattatgatgcttcgaggtgtaggtttctaaacctggtcctttgccattcttaaactgacccttaactacccatcatcacaagatgacgacatatgagcatgaactcattgacctggttcaagttgtgcaacattgggagtcttacctgtaggatcgttactttcttatctatacccaccactacgacttcaagttccttgtcatgcccttcggtctctccaatgcatcagccatattccaggcactcat

SEQ ID NO: 144827 - DNA, 579 bp, Zea Mays
ctggattatagggcaacaactgcgtaaggattcgcgctgatcgtgatgattcgtgctggactcgggcaggatagtgccgggagggtgaaaagatcagaaggggagcggatttggtcgcggggtgaagcttatcaaccgtgcctgtagccgtgtgacgtggtcgaaccgccggtgtcattgtggaaactccagcgacctcaattatgccacaccgtggctctttactgcgcggtagtaaccgtggcacgcctaggctcaccatctctgaaccgctgcaccggtgaatgccacgactgagccaccagtgaccttcttcctctccggctaccagcacgccatgccaaaattaggagccactgcccttggaaactataaattggtgccccagcctgctccgctaagtaattgtgcacccagtgaaccagccctcacctccaatcgtccctcacaaccccccaatttgggatttcccccaaatcagtcaagaaccccactgtatgtgagctcgccgtggctagctctccacaggtctggtcacgccctcctcgctcttatttcagtactcttatgtgttcttga

SEQ ID NO: 144828 - DNA, 294 bp, Zea Mays
cttatatttcttcaattattccataatactcgatctcgtgaagcccgggcataaagactccaaaacatgtggtttttcgattgggcctactttagtcgtagcttgttgtgcggaaacagtatccattgacatcatacctagaaaatttcctcaccttataggtaaagccattggctacttgtctcaacttagaactcatagacgggtctctttggccctgcaagttcaaacacattagttgttatattattcacatgtaagagcaactttaaatgaaaaactatgccaggtacc

SEQ ID NO: 144829 - DNA, 412 bp, Zea Mays
ggcaaagatggcatgcaatgatcacagttgcgaagatggcatgcaatgatcacatttgcgaagatgaaggtacaagcattaggttatcggcgtatgcgcatgatggagctggcagaagaagaacgagatcctgaatcttgtttagcaagactaccgaagaaaaaggcagtagtatccttgatcatctttgtagctcatatgtataggcttggggcatgattgtaatttttacgaagatgtatctcttgactataaatagagtaacaatgccatgcatgaggggtacctttttcgatgagagagaactgacttactccatctatgaagttgttttctcttcttactttcgtttgattgcttgtaaaagacgaaggtatatttgtaattatttggcacataatcgagaatggag

SEQ ID NO: 144830 - DNA, 410 bp, Zea Mays
gccttgcaatacatcccaacacataaagaattcagaaaaagcctgttgggatgtggccccccagacatcattgacccactgattgttgacaagagcatcccgcaccttccttctcttgataatgcatttagggactaaggaaaacaggttggcggccaaataagctagagatttcccctccaatcatctatcatcccaaaagagagtgtcggccccattgccattaccaaccacaacacacggaaacatcaaacatagcagcaacacaactacgcaagggtgaaacttgaatgtcaaggcctacccacagacgatttggtagggttttcttcagccacaaccacctcatatgcaaagaccatcccaacatctccaaattatgaatccccagacccccaagctcacgtggc

SEQ ID NO: 144831 - DNA, 717 bp, Zea Mays
ggagtgtatggcccgcatcaagatggcttgaagagttttctttattgatgagttacgagaggtgaggtctgcctgtcagggaccgtggattgttgctggggactttaatcaaattttcagagtggaggataagaataaccccaatatcaacagatctatgttgagacgttttaggaggttgatgaatgacttagagctgaaagagatccctttattgggtcgacgattcacttggtctaatgagaggacagtgatcagagaggtctgaagcattactaacgcagaagacagggacagtgatcagagaggtctgaagcattacttctgcatcctttgagttgcaacaatgtcaagaatagaatctccatttatgctgatgacatggttcttttcattaaacccgaggaagaggatttgagttgcactaaagtcattttagactgctttggtgaagcttcggggctgaaagtcaatatgcaaaagagtttggctattcctataagatgtaatgatgcagaaatgcaggtcatctctaactcccttcactgcaccattgggtcctttccttgcaaatatctagggctccccatctccaagcggaagcttagaagatcagatctgcttaactgggtggagaagattgctgataggcttgccagctggaaggctaatctccttaatttggctggaagaacaactcttgttaattcagtttta

SEQ ID NO: 144832 - DNA, 675 bp, Zea Mays
aatacaccaacactccccctcaagatgggctaaatatatttaacattcccatcttgttacatgccaactcattatcgttaggacctaaaccttttgtgagactgtccgctacttgattacgagatttgacatacttcaactttaaagccccactatcaatcttctctttgataaagaacttatcaatctccacatgcttcatacgatcaaactgaactggattatttgctatgttgattgctgccacattgtcacaatggagcaacattttctcattcttcaacacttgaagctccttcaagagacccttcaaccatatcatttcacaaactgctagagccattgctctatgttcagcctctgcagtggatcgagataccacatcttgcttcttgcttctccatgaaactagattacctcccataaatacacaatatccagaagtggatctccgatcattcctactgctcgcccagtccgcatcacaatacccatccaaattcatatgttgatttggtctaaaccacaatcccttgtcaggggttcccttcaggtatcccaggatttgataaactatcttcatatgcccagttctaggatcatgcatatacctactcaccacacttactgcataagcaatgtccggtcttgtatggcaaagatatatcaaacgac

SEQ ID NO: 144833 - DNA, 703 bp, Zea Mays
ttcgtccccaagtcatcggtcgattggaaccagaggagcttcgccgggtggctatgtgaggattgcatcgccattctctggctcgttagtgaatagatttcggaggatctcaatctcacttatcaagatgcacgacacacataacgcattaatgcgcttggatacatgattgcatggagttgtgcttaaggaactgtgcgtgcaatgtttacgcttacgcattgccgagagacaacgactatgtcatatggtcaggttgatactgttcagtttactctagggatcaatgatctgtaactcgaatttctcataatgatggccaacagcacacaggtatgatcgatcctaccaatgtaactatgtaatagtttatttagtactttattactataaatatggatcactattgtttttacagcttgacaaactgctctcgtcgcatgtctttgttgtcagagggtttgacagactcaaacaaaactccaccaaattaagtaccttgtagatggtcttagactcagtagaaatgatattgttcagtttactctagggatcaatgatctgtaactcggatttctcataatgatgacccgccgcacacaggtatcactattgtttttattagcagccatatggatcaattctttttacagcttgacaaactactctcatcgatgtctctgttgtcagagggtttttgctt

SEQ ID NO: 144834 - DNA, 314 bp, Zea Mays
cgaggccaccgagagagcgctaatttccgaagttatgaaacaattaggtctagttgtgacggaggtaaaaactgacgaaggtactgctgttgccgaagctgatcagactgttgttgaagaagaagatattgaagaggatgaagaagattatagtattttgatcccatcaaaacccaaccatctagattttgagaaatctactgtgtctgaagctgacatgcccatgatgatgaagctggcctactttggggaagctgaaaggaaacttgtccgattcgccggagaagagaccaccctagcgccgaaggatgatg

SEQ ID NO: 144835 - DNA, 642 bp, Zea Mays
attttggccacgggtgagagtgagagtgaccacaagcccacagcctttgctgcgaccgagacccggctcgattcgggccgtcaagagtttctagattcagagacagcaacaagtgcaggaaactgtactgcccgcgaagtgccaacgaagcacgagcccgtacttaccgtggacgccaagaacacggagacggaccacgagattgacctgaccaaactagtagccacgcgtacggtacgtggtactaacagtccccaactgctgctcaagacgaagaaggcctgacgggcacgcaagcactccggtccgagctcagagactctgctttgttttgaatcgtgcctgaggactggcggtagcgcccgagacacatggctcaactcaactctggccaaaggtgaaacgctgtctccggcggcgattcctggaacccaccaataatttgtgaacacacgatgacccgagtgttacgacaccgcaagaaacagtgagaggattcccggcccgcgtcgctttcacccgtttccacgccgtcaatcatcgtcggtccaacacacacacacacgacgacgaacgcagcgtcacatgctgattttggaccttcccgggcggcttctcctcgcgccgtttccctcccgtccc

SEQ ID NO: 144836 - DNA, 1218 bp, Zea Mays
gttccagcaacatatcgcagaacacgcttaactgcagcaaggtgttcctggtgcggtccctccataaaacggctgaggtagccaacagcgtaagccaggtctggcctagaattgcacaagtacctgaggctgccgatgatgctgcggtactccgttgcatcaacacttggtgtgtctccttctttgagcagcttcagtttgagctccataggcgtggcactgggattgcatccagtcatgcccgccttctcaaggatcttggcggcgtacgcagtctgccgaagcgtaatgccggctggtccttgtgacacttccaggccgaggtagtaggagagtaacccaaggtcactcatgcggaaggtgttcatcatctgccccttgaatttgttcacagcaactgcatctcctccggtgatgatcaggtcatcaacgtagacgcccacgatcaggcgtcctgtcccactgccacgagtatacataccgtgctcgtcgacacagcgcttgaagccgaggccgagcagggaggcgtcaagcttttggttccaggcccgcggtgcttgacggagcccgtacagagccttccagaggcgcagcactttgtgcttgttcttgctgtcgacgaaacctggaggttgctggacgtatacctcctcttgaagctccccatttaggaatgccgatttgacgtccatgtggtgaactccccagccgaagtgcgcagcaatggcaagtagcaaccggactgattccagccgcgcgacgggggcgaacacctcttcaaaatcaatgccggggcgctgcacgtaccccttggccacgagacgcgccttgtatttaacgacgacgccgctctcatttcgcttcaccttgtacacccattttaggccgatggcttgctgaccccgagggagatcagccaacgaccatgtgtcattgtcatggatggactttgagttcctcctccatcgccgcgttccagtttggatcgccatcagcatctttgaaggacttgggctcctccacactgacgttgtgcacctcagcctcctcgacgtcgcggtgagcccgcccaggcacggtgttggtgcacaggacgttctccagagtcctgtaccgatgctccatgtcctcgtcgtcgtccgcgtcgaagttcgggtcagcgcttagtggtgtcgcgaactccacctgcgtcaccctggcggcgttcggggcagcagt

SEQ ID NO: 144837 - DNA, 716 bp, Zea Mays
gctgtaccggacgcagacggcgtggaaggtggcggacgcccagctccgtgaggagctgcgcatcgcggtgtcggagcggctgatcccggcgtaccgggcgttcctcgggcagggcacccggcacccggcgagacacgtcaagtggagcctcgacgacctcgagtgctacatgctggacttcttcgaaggcgtgcagaagtttgtcaggtggtgatcaccggagcagaggatcatcaattcaccaatcagcatccatggcgagtttgggacgtgcgtgcatcgtgaactcgtggcgtatgcgctccaatctcatggcacttacgatgccgtagaatctcgtttctcctctcttctaggaaatccttttttttacactgagatagatgtagatatgcatcaaattcaggagtgtgtatataccatactctgtttttttggcttgttcatgatttagatgtggttgttatttagcttattaaacaatgaatcatcttcatcaggacctaagcatgagccaacgtatgctttgcctagtttgccaatcaggccatgatcaacgaggtggctcacctggtggtctgcaggtttggtctggccagctaggttcggatgctgccatggacaagagtcgggtgctctaatcatgttagagtcacgcatgctgaaggtgaagctgcttacgacgacatcagtaactagttagcttgctattagct

SEQ ID NO: 144838 - DNA, 577 bp, Zea Mays
gtccagacattctagtactttttgggtgactggttattggaaccatcttgctggcagttaacatgtatccccagaattgatttctgagggtttgttgacatagtatataaggtcttgtaacttcagtataaatagcacatgacgcctttgaagtgatattaactgtaccatggaatagatcacataccactgtcagcaaaaaaaagatcgaatctgttttttttctggttgttacttcaccttgttgtctggctgctcttttttacatatccttaaacattatgttgtctgtcgtggacactacatttcaggctgcaagacccaatcatttgtcgtgtgtgcattcttaggcaagtgtgcgccagggttgtgcgttgatttccacaatagtgtgatgaaagtggttaagtgttgatttgtataccgaagtgatctagtgagttattctagaagtgcaaattgttttgatcctgaagaccattttagcattacattggttccatttgtttgcgttttgaaggcaatcggttctggtactaatttttttggataatatgtagtcagataaggtggtaag

SEQ ID NO: 144839 - DNA, 706 bp, Zea Mays
tgacaatgcacacattaagtgatagattgcaaccacaaggttgagatgcttgagtttgtgatgagtgattgtcaacagagtaacttcttggttgagtcgtgtggactaactaggacatgagtgtgtgtgcaacatgtctcttagcttctgatgcataggtgtggagcccagagctagtgtcaatggtgaaggtgaaaggtcatatgggtttgtgtttatggatcaagatcggtgaaagatgagcactaggtctttactgagaggctgaagaagttgggtgactggtagcaatggataacacctaggtacatcagcatgtgcgaggacatgtcgtgcgaatcatgtttccaatgtgtctgaggactagcgggatacatgcccaggacgtgggggacgcgtatggagtgtgctacctacaaaaatttggtggttgagcctcaaaatcgtctagcaaaagttcacgaatttggcctcaaaacctgatattgagattctagagggaatcgaagacgacacgtagagccatcatggagagtgtgtcaaggcaaaccaactttgtgaagggagtgtggccatcagatcatcatattatgagttggctcattttgtcccaggttgattggataagctctatgtatctaggggtagtttaggaatgtgaaaaacccctctataaataaggaggaagtgctgcaccaaccagtca

SEQ ID NO: 144840 - DNA, 454 bp, Zea Mays
gcactacatcttgtataattggcccaagacatgatcaagtagttttcataactttttggccatacttacctatagtactccacttgtccaaagggggtgcattagggttttgggcaatttctcacccttaaatgtacatggtaagccaaggcatgatatctaagataggttgcacttacttaggatcttgagctccaaatttggtgtgcttttccccaacttaagtcacatgtgatgatgggcttacttgtatagccttgagtgaaaaccctaagtaacacatggggtgttacatgaaccaaagtgatttcggtaacgataaatttagactgcgcttaactcatcaacctgataatctcatccactgatcaagcactcgatttctctacggaagacaacacactggaaaaagaggcccaattattacccttgcgctcgccaaaacagcgtgttg

SEQ ID NO: 144841 - DNA, 333 bp, Zea Mays
attggaatcatctcccatctccgacgacgagccaaccgtcccaggggaagaacctccccagcgagaagctcgacgacgaaggaacatacgccggaatattcggcgacatcacgaagctggtgagcgggacccagcgcagcccgtatctcgggatgaagtctcggaagtgggggaaactcccgacgagcgggtatttagagaaaggaagaattctcgccgacgtgaccgccggcaagctcaagaccgagatcgagaacaagctgaacaaggcgcaaggttacgccgagagaaccctctcttcgctcgaaacctgaaccctgactttgctcgcgc

SEQ ID NO: 144842 - DNA, 838 bp, Zea Mays
catgacttcaccctcccagaccccaccagcagatatgcggcccgtcgcggcctctattggccattcatcggaggccctagcccaacacaactagcttcagtttggtacacttggtagctcgacagcacggcaaccattagcaacaacgacataaacgtagaagcgacagttgagtttaagtgcagaaacaacccagccccagcagcaagtctcccgagcagtgcaatggattttttttattgcctctcacttacaagtacagttgtagtatctgttcatcactcacaccaaaacgcacaccaactctcccctatcgtacacaagcagaccatgactccactctcccccaggcccgcgcacgctcgccaacactcgtgtcgcctcccgcaccctccgcacgacacgccccagccagcctctcgcttctcgcgtttactctgattggctctcgcaacgaactacctccgcccgcaaaccatgacctccacgccagtcacaagtcttcacgccagtcgcaagtcttcacgccatctgcaacctccatgccatgtcagttgtcacgttccacccgcccactccacaacatactccagcccgcttctccacccgcaccaaaacacacaccaactcacctctatcgtacacaagtagaccatgactccacaccacaggctcgtgcacgctcgccaacacatgtgtcgcctcccgcaccctccgcacgacacgccccagccagcctcccgcttctcgcgttcgtaccgattggctctcacaacgaacttcctccgccagcaaaccatgacctccacgccagtcgccagtcttcacgccatctgca

SEQ ID NO: 144843 - DNA, 353 bp, Zea Mays
ctgattaatgtggtcactacatatggcttgaactattttttatgatatgaaacattgttaaatatttgtagtcaagcattcaacagcccagaatgtatttcttatgaactatgcatgctgcttctctcctgtgcattcagactttgggatacatacttattgcgaagcctaaatttatgctacaaaaggataagttgaatctcatagagacaacactctcttctgaggttgattatgattcaaggtatgtcattttgtactttcatcttcttttagtagttattttccgtttgaaaaaataagtaaaattaatccacatgtttagatccaatgactttaaaacctctacgaag

SEQ ID NO: 144844 - DNA, 520 bp, Zea Mays
gtgaaacacattatggatatctgacatggattctggcaattcaaggcggtagcttacgggtcctattctgccaatgataggataggggccaatgaatcgcggggctagcttccctttcacttgaaatcttttgactccgcgcattggggagaccttgagatagacaaagtctccttcctcgaacctgagttctctccgcctgttgtctgcgtaactcttctgccgactctgagcttcgagtagtcttttgcggattagggcaactttcccttctgcctccttaacgaaggtaggcccttccagtgccttttcccctatgttggaccacatcagaggggtctggcactttcgtccatacaaggcttcaaacagtgacatctcaatactggcctggtagctattgttatacgagaacttttgcatacggcaaactggactcccaattccctgtcaaaagtcaacacaaaggctctcaacaaatcctcgaggactttgttgaccctttctgtctgaccatctg

SEQ ID NO: 144845 - DNA, 555 bp, Zea Mays
cgcgactgttggcacatggcgttaggtataaccgttaatgcatcctgatgctgatgggttgctgtggatgtttgcttacattcctcttgattgctcgccaataatgtgcgacatggcgttctgattcgagttgttgattggtttttttttgggtgggggcgctgacaagtgtaaaactgtatagatttgccccctgcctctttgtttcgttttaccatttggttgtcgtttggtgataggatgatgctggtggcttctcctgtgcgtggtctctggtttgatgctggtttctagtggcccagaggggtgcaagcgattggatgcagcaatcattgtaggtccgtccagtccattcataactccattcataacgtggctaattgaaggaaaacaaggcagagcattgctgaagagcatcatctcatttcgtttagttttaaagaagaacaaagttctgttaggtcataagacttgaatcctggagcctagagtcatccttctcttttcagataaaaggcccaaatatgaaatgaggttctggcccgccgatgcaac

SEQ ID NO: 144846 - DNA, 276 bp, Zea Mays
gtaggtttgacgagagacaagttagaccacgagttagattaggaacgagtacacagactctttcataatgtttcatattaggggttataatgtgaaaactaggaaaactaatgttttatagtaggaaaagatatagaactcacctagatatgctaccccgatatcatcaaagtctgttgtgtgatagtcgatgtccatgccattctctctgatgcatcataccgacactgaacaagatgatattaaatgagaatattgcaacaatcctgtctccag

SEQ ID NO: 144847 - DNA, 470 bp, Zea Mays
ggcttatacaattcgattcaaaatgaagagacagagtatatagtgtttagaacaagctaattagtttaaaaataaagtaattatcctgtcataaacatcttaactcagaaacgaagggagtattatttaataatacttcagccggtcccggcccttttggagaagagatcgggacaagcttgtgaaagtttaactacggataacaactaagttttaagatacacagatctctgttcgaatcttatgtacttgctagatttttataaatgtagccagataaaataatggttgaagtacgcatccaaaacatcgggcacttttgaccggacggagtactcgacaacttcgatcttcacgtggaactgggctcacttttgtaatataaaacatggccgtggcagtttcattcaaaaacagtaggttcaaatggaaatgaagaacttttaaatatccagcacagttgtggtttt

SEQ ID NO: 144848 - DNA, 578 bp, Zea Mays
gtgatgtgtaaatttaaaaatagtaagtttgtgtgtagggtgtattattgaacatgcatgtcgatgtattataatagtgattgtgttaaagtcgtttgaagtattttgaatgcatgacgaagatggttgcgttcgacatagggaaagagacaggttgtgcgataaaaaggctagattgattttataggtcgtacgaaaaacgttctattaagtgtatacgtcgagtatgttaaatggatcctacgtatgtagagtgtagggttttgggtaggcgaagaatagggtggtagacgaatatgcgatgtacagtcaagcaacgattgaagtgcaactcatgcgtcatgtgattaaaaagtagaacacatatgcgttgtatgaccgtgattgaattgtagtgcgaaggataggttttactattttaaacggttagtcggcagactcgatcagtaaagctaaaattgattatgcgattaagatgaggtgaagacatgccgtagtagtcgtcgccttctctatgttttcgagtcggataaataccataggcaattaattgttgatacccaaggattgttagaaac

SEQ ID NO: 144849 - DNA, 541 bp, Zea Mays
cctcgtcggtgcgtcatcctttctcctgtcggtccatcgtctttgcgtctggtgtccgtctgggcgtccgtgtgtgtgtcccttccgtgtggtggtcgacctccttttataggccaaggagggagtccgccagcggtggcttcctcaagaaggagtcaacaggcgatggtaaaaccaagcgttgtaccccagtgaagccacgcgcatttgtgagctccggggtcgcctagttgtcttatattctttatagcggatgacatgggtagcgtggggctcgagcgccatcattcaagctacgccgacccctggcctccgtagcctggggctctacgcggcttgtcttgttgtgccctataggcggtttgcgcactcagaccttatcccgataggtcatgagtgtgtcataggacggagggagagcgaaccataaatgtgtcgtagctcgaggggttggtaggttatgagtgcgctgcaacccgaggggcttaatggcttataggccatgagtgggaggcgaatcggtgcccttgcagtggctcgg

SEQ ID NO: 144850 - DNA, 830 bp, Zea Mays
tctggagtaaaagcaaaagataggcaaaaaactgagtagggttcagggtatttcaatgagcaggacaacttaataaggtacatgatgttgtgcacaatgcacaaagaccactagagagtaaaaagtgtaacaagattgccatgtagggctctgttacaagtagcaactactgagatcccaactagggagtgatatggcaaatatgtaaacagggagatgaacggaatgacgggagtgtcaaataccttgacccaacttcaaaattgcagcagtaataaatatgctcaaaaccttcttaaatactccagcatcaaaaatatcacttggtgttccaccattccaagcaataattatcatggcctacatgaaaatcagaaaccatcacaaaatgggatgataatgtttaacagaggtattgaagccttgaaggaactgtggcagaaagaaagtgcacagaagagcaactaacctgtaaggacaatattaagaagatccacattctgtcgaaactacggaatatgtgccaaaatgaacgtatctccacaaaattaacttttcccatccaatgggtattacctgcagatctgttctcctggacgacgacaagaaaaatgggtttcaataggactggtagtccagggagtctttattttgcttgttttaagctgaagaaaacactaagcgtcacatcagatcatggatctgtattccaaaatacagactgtaaaagacaaggctaaatgaacagataaaacctatctacagtaatattgtaaatcgaatgaataaattgccagaatttgagcatacaccagaaacaaaaaggaaaa

SEQ ID NO: 144851 - DNA, 744 bp, Zea Mays
aatgcaacaaaaatattgttgttgcaaaatctgtcgtggcattagggtgattttgcaacaactattctagtggtcgcaataacacctttctcttgcaacgaaagtcatggttatcgcaatgcataaaaaagtggcaaaacggtccatatattgcaaccacttttaaaggttatggcaataaataacatctaatgcaacaaaaatattgttgttgcaatatctgtcgtggcattagggtgatttttttagtagtgcatctttcttctctacaaacaacactagagcggcccaatgagaggtgctaggtctgatgtagcccttctccaacaactcgtttatctgcttcttgagttccaccaactccggcccggacactctgtaggctctgttagaaatggggggtgcctgggataagctctatggaaaattcaacttttctcttaggtggcatgcatggtaactccttggggaacacatctgagaattctggtactattctgatgacttcgagtggattgacttcctcactattgacagatatctggtgacagcttcctttccttggttcagacaagatcagctccaccaaaacttcttctcctcacaaggacaccaacttcacagtcatcttatcacagctaaggtctgcttggtacttggtcaaccaattcatccctaggatgacatcaatctctagatcccgagtacccattactattagattggtggggagctctatccccc

SEQ ID NO: 144852 - DNA, 689 bp, Zea Mays
gtgcctctagtttatattgatttcattgcagatcacaagaaacctgggccaatccctatttctaggcacttaaaaatctgatattgcaaatattagatctgatgagtccgtcccgtattcaaattactagaaaacactcaccatttctctttatcctccagcataggtgctggttcactagatatcatgaagataacctgagataggcagggggaagagagaccgttagccagtctatcaatctaaacgaaaatgaaataatagattgatatgtataccaaatagttagcaagatgaagttaaaacaaatgcatcagaaatgaaattaaagagacaagtacactgcaccaaagatagagcagtttattctgttacaggttacagcctattagcctcattaactgcagatactgacaacgcattgagaagcaccgcttactctcattggatgcacagtggatcttggtggcatgccctacagatacaaaataaatattaaaaagcattgtgatgacacaaaaaggaaaaggtgtaaattcacaaaagaaaaaaacaaagaacaatgtctacctctgccatctcgattgcagatacacctaatgcccaaacgtctacctggcgcagaaaacaagtacacatgatttagtaagacaaattaaagaaagaatccaactgcaaaaacaattttc

SEQ ID NO: 144853 - DNA, 1025 bp, Zea Mays
cctcaagttgctctgttaggcatggagttcagcgtgaacagtaactgaagaagatcccatgtttagagaaccttgccaccgatgacttccgcatagtgattcgagctagccgccaagattcgtgctcggtttgagtgggatattaccgtggggatgaaaagatcagagggggattggatagagctagccatgtcgtacccagttgctcggcaatgtggctgagcagtcgtcaccgtggtggccgctgttaatcttgatcgcgccacgccataggccatcttaccatgtcgtagtaagtcgtgtagagtagccgattgctaccctaggacattaccccattgagcgccacggtgaacttgcctcggtagaaatatcccaccgccaccgtgaacaccctcgtctcaagttcatgaagcacgtaatcggctcctttaaattgagcactccccttgctctacctctctgttatgcggccatcccaccctcagctagcccctctcgtgcaccatagcctccaatcaccagaattccctaaaaccatcatcaaagccgtcgtgagacatctcaccgtggccagcccttctcaggttagttcatgtctctctaggccatgttttagcatcctctagtgctagtgaagctcaccgacttgaccaattgaatgctactgtggtagggcatcgagaacatcgcttcgccgccacagagcaccgccgagaatgccctcacatcgaccgaccctcccatgctctctccatccaaattcgcgcgcataccatacctccggtgagcagttgatactcaccctagcttcaatttaaacgctaatgtgttctactactcggaacgggcttgctggagctctggctctgttgtggtcctaagcagatacaaattaggattgggccaatcaaactacgttggggaataagcttggatggtctcgagcatggagttcgtgtgctcgacaccgccgaaacaggtcactggtgacaagtacgcgcggttccagccaagtgttcgac

SEQ ID NO: 144854 - DNA, 504 bp, Zea Mays
tccgcctcgagctcatgatcggccagcagcttattccgcctctcaaacatttcctccctgaaggcgaggtccttctcccgccaggcgagatccatcgcccgcttatccagggaggcatccttctccttgaggttctcttcggccagggcaaggctgctggccctgtcatcaagcccctgccacaccctccgcaagttctccacagccacggcctgctgatcccgctgctcctccagcatcttgttgtaggcattcggcttcgcctggagctctgagatgacctcctccctctggtccaagtgcacctccttcttggccagcctcttctccttccgggtcacctccagctcccgggcaaacaccttctagaggtccttcttgtagtccttgcggtcccgcttaagctcgaatcgctcgaaggtgaactggtgggacgctgccttggtgtgctcctctagctgggtacgccagtcactgaggcgctggtgttcggcctcaagcgcc

SEQ ID NO: 144855 - DNA, 358 bp, Zea Mays
ctttgcgggtgccttggtacgggaggttgaggggtcccttccctcgttgtttgggcgtgcggcttgtgttgccagggcatgcagcttctcgagggttgcgagtgcagtggtcagatcgccttgcataatgaggacaccagcaggggacgacatcttcaggatcatgtacccgtagtgggaaatgtccatgaacaggtacagggtcggcctgccaatgatggcattgaacgggaggttaacctccacactgtcgaactggacattctcgatgcagaagttttccttggtccagaatgtaaccgggagtgcaatgctccttaggggatacatcagttgagggcccactctagagaatggg

SEQ ID NO: 144856 - DNA, 451 bp, Zea Mays
ccgtcctctccctctcggtgagcaggctctcctcttcctcccctgtttcctctccctctctgtgctctgtctgcagctgtgttgcactctattccccccattgaccttctctcattttcctgtcaaatcctgcaaatccctctggtgaaatgagttcaaatatctctattgtgtatccctgcaagtttttagctccttcgggagggcattcccacctcaaatggccgtttcaccaaaaccctagctccccgcatgccacatgctcggtgaaatgcccaaaccagccaaacttgctccaattgaacccaaatttttcaggcaccttcacaacacttccagtaacctacttgccaaatttcacgccaatccgagatcccaggcttaaatttcaccaaaattcccgttttgagcgatcgtttccgagccgagtgcccaaatccctatttcttcg

SEQ ID NO: 144857 - DNA, 319 bp, Zea Mays
ggataagaagattgtggacccttttattgctgggttttatgaatctatggcaaaaacaaatgcagagaagattaccaaggagataatggcggatttatctgaggattctgatgacagtgatgattttgatgtggaaagtggagatgaagattccaaagatcgaccctagcggccaagccatacaatctttggaaagtcgaccattaaacaaagtcaggttgacgccatgaggggaaggtactttcgtgatatgtcgattgtgagagttggaggaaacagcaccgcccctgctcctaaagaaaatgaagttgttgtttac

SEQ ID NO: 144858 - DNA, 1296 bp, Zea Mays
cggtgtttatgtccactgaaataaaacaccacatattaatatgccacattgtttctcaataaaacaaagaccatggaaaatttagccaaattgagtgagagaactgtccaaacataggttaaagttgtaaggcaccttttttccaccatacagttgctaaaaagttggaatataaagaattctaatcaatagatcaccttttaaaccacaaatgatgtttccatgatattgagggcattgtattcacatgagagggtattagagtacaactagtggatgaagacattgttgggctagctactgaccttttgtgataccaggtttcctataatcctctctattcaaggcatacctaggtggtgtttatgtccactcaagtaaaacaccgcacatcattatgccacatcgtttctcaaaataaaataaaataaagaccatgggaaatttagaaaaattgcgtgagagatctgtccaaacataggttatagttgtatgtcaccttttttccaccatacagttgtgaaaaggttgtaatacaaagaatacaaaacaatagatcaccttttaaacctcaaatgacgtttctatgatattgaggacattgtattcagacgagtgggtattcgagaacaactagtggatgaagacgttattgggctagctaatgaccttttgtgatactaggtttcctataatcccctgtattaaaggcatacctagatggtgtttgtgtccactcaagtaaaacatcgcacatcattacgccacatcgtttctaaaaataaaataaagacaataggaaatttagccaaattgggtaagagatttgtccaaacataggttaaggttgtaagacacctttttccaccatacagttgctaataagttggaatataaagaattcaaaacaatagatcatgtttgaaacaaaaaatagtgtttctatgatattaaaggcattgtattcgcacgagagggtattagagtacaactatttgatgaagacgctagtgggctagctaatgatcttttgtgataacaggtttcctataatccccactattcaaggaatacttaaacggtgtttaggtccactcaagtaaaacgccacacatcaatttgccacatcgattctcaaaataaaataaagatgataaaaagttggaatataaagaattcaatacaatagatcaactttcaaacccgcaaatgatgtttccctgatgtcaagggcattatattcggatgagagggtattagagtacaactagtggatgaagacgtctttgggctaga

SEQ ID NO: 144859 - DNA, 1441 bp, Zea Mays
cttgacaaaaaatttgtggtgtctaagcacatcgaatacctgctgcagatggtgcacatgcaagtcaagagcggggctatataccagaatatcgtccaagaaaaccataaaaaatttgcggagaaagggttccaaaatatgattcatcacgcactgaaaggtggctggtgcattcgtgagaccaaagggcattacacggaactgatagtgtccgtggtgtgtcttgaatgctgtcttatgttcatctgctggtaacatacgaatctgatggaacccagcccgaaaatcaatactagaaaagtaacgagtaccagcaagttcatccaaaatttcatcaatgatgggcataggaaatgtgttcttaaccgtcaggctgttcaatttcctgtagtcgacacaaaagcgccaactaccatcttttttttgcactaagagcaccggtgaggcaaacggacttgtactgggtacaattaagccggctgcctacaattccttgacctgtcgctcaatctcgtctttatgtaacggtgaataccgataaggtcttgagttgacaggtcgagaatctggaaacaaggaaatagcaggatcgtactctcgctgaggtggtaactcaagtgattccccaaaaatgtcctgataatcttgaagcaaccgagccactggctgtggaacatccgtaagtggaaagctagacagagtattaagtatggccactgaccaaatatcattgcccttgctccatttcagaaattgttcagcaggcaactcttgaagatgaagctggggtttagaaacacccttaagagtaaccaatacccccatatcctggaaggttagagacttagcattccaatcacaaagcatgggactatgagatttcaaccaatcaaaacccaaaatagcatcataagcactgaggtccaaaactctcatatcatgcgtgaatgtgtgacctgctgtccaccactgcatatgtttcaccacagcatcagaaattagtgtatctccattagcaaccttgactgtcagcggagataaagcagtaataggtaaattaaggcggttcacaaacgaagaaatgacaaaactgtgggagctacccgagtcaatcagaataaggaatacttgattgcccaccaatgcacgaacacgcatggaatcagcggattcagtaccggccagagcgtgtaaagacaactggcaaagatcttggactaagacatcttccatctccaactgattaagagcatcatatttctccccacagaaataacaaagtccattagcccgacgataatccctcaactgtctttccctccacaagccagaggatgaggcagtagacgatttgtcagatttaggagtggaagaaagatatctgggtgtaaaaggtctagctgaatgcactgagggcctctgtaaaaactgctgctggagt

SEQ ID NO: 144860 - DNA, 689 bp, Zea Mays
ggctagcagccatcgcttggccgcatggagacattcagagccgcgcgcgccaagtgctcatgaagcggcttggaattctaccagagtcagactctgatcagatgcagaaccgggcgactgacgaggagctcaagcgctacttcaacctgttcaatgtcctgctcacccacctagccaccaaggctttggtagccctctgcggattggaagaccctaatgaggctggcctacagtcatcttgagttgtggcatgatgtcgtgggaaactgctttgccatgttaggtttgtttattgtcatctgctttgtctgtggaaggtgtgcgcccttctgcttgttccaggggatgtgatctgccacttgtatcactacattagttcttgttagctcgctggggcatgaggtagcagcgagaggcctacagttactgattaccttctcaagctttgtctacatatgcaccttcaagtgtgtttcgtgtgttcggttgggtcgccacaaactccagtcgtccattgatgtctacatgtactctacttgaatatatgcaaaagtttgctccactacttctatgctgtcagcgctcgttgtgcttgtgatgtttaccttcaattccagaacctgcacgccagtccaaatgacggacgttgcagctaggttttctatgttacaggaatgactcaacgccac

SEQ ID NO: 144861 - DNA, 550 bp, Zea Mays
tccaattcccatcacatggaaattcctaggtattttattgtaggccttttccaagtcgataaaaaccatgtgcaagtccttcttctactctttataccgctccatgacctgtcatattaagaaaattgcttccatggttgaccttccaggcatgaatccaaattggttcatggtgatatgcgtcattcctcttaggtgatgctcaataactctatatcatagcatcatagtgcgactcatgagcttaaaccctcgatagttggtacaaatttgaatttctcccatgttcttgaagattagtactaatgtactccatctccactcatcgggcatcttgtttgatcaaaaaataaggttaaacaacttggttagtcaaatgatagcaatatcccaaggcatttccacacctctattgggataccatccgggcccatcgtcttgcccctttcatcctctttaaagcttctttgacctctgactcttggatcctgcgtacaaagcatctatttaaatcatcaaaggagtcatccaattgggtgtccatagtctc

SEQ ID NO: 144862 - DNA, 1603 bp, Zea Mays
gtcggcctgggatggccggggggcagcaccagctagtggggggcgtgagcttggagatgcgccgtggaaggaagactgattacctcgacatcccactcaaggacaacatcaagggatgacgcctggaatggttcatcgtggagaatcatgggaattccctccccccacggtcagggagacagccggatgttcgcactccaagctagactgaatcctccacggatcaggaagtggctgaggcagggattttgttggcagaagttggattgttgaaagaaaggggtctaactgcagaagctgtggttgctgactttgttttcaagaacattcagccactgaaagatagagcatatccggcttatctgtactgaggcttggctgactcaacccgggtaaccaacaaaagaattcatgttgtggacttggtaagccggatcgagatgatactcagaggcaaggtgtcgaatgttggcgctcctgttgcatactcggcctggaatttgcctccctcctaggcttttactagtttcgtgtcaaatcctcctgctggtgatagcggtttgggtcttagagtgcgaccctctcccgaagaagttagtactttggttgcctcgctcggagaaattcctgacgatgagaggcaggttcattttgaggtgcctttgaatccaagtgatgcagagataagtgccatgctggatatgttagttgaggattcttctgatgccgctcctgctgaaacattggtggtggcgcccatccctgaggctgacaaagttttggacgctcagaggtctgtcaatgttcgcccgaaacgttctcgccgagccgatcaagcctcttttcctgctgagggggagaaaaagaagaagagatgtcttcgtcgggtgtccagcttggatcagggtgccggtccttctgctcctgttgctgaggaagtgagagtgccagaatttactaaaactaaccccaatgggtgtgacccttctgatgctgatcccaatgggtgtgctatccgtgttgttgatgaggatgatgaagaagaggacgaaatccctctaattcggaagaacagccggcgttacatagctagtggggagagtagtggtgctccttctcctgccttgtctgccctcattggtctgcaagaattatctctggcgaactttgatcaaactcttgaagacatggttccagaagatctgttgtcagaaccggcagatggtggcgcgatggatgtttgtgctgatgtgctcgacgccgggttggggtcatcccgggcagcttcccgcgcctcatcgatcttggagcgtggtcttgagggtcaggaagctggtctgaattgcactgctcccatggaagtgactgagggaccttcagccttagaggtggctgctgcagagaactcggccctcctagatggcgctggcgcttacccagcccccgagggtgttgtcggggatgattcggctcggatgggtagcgcaagctgcgacccagcccccgagggtgttgctggagatgatccggctcggatgggtagcgcaagctatgacccagcccccgagggtgtccgagcgggttctccctcttgcacttccat

SEQ ID NO: 144863 - DNA, 281 bp, Zea Mays
ggactcccttttcctccgcgttctctctctcccccgcactccaacgctgctttccaaatagttcgtcttcttcaagcacgagcgtcgcctctagttcctgtctgtggctccggccgtgttgttgtccatgtgatggaagcctgaccagagtgtaaacctcatcgggctagagagagattcccgggaagcgcatgatgctcatcgtcgacgattggtcgctcaagtcaccggtaacagatccgggttgtccctctcactcgcttgaaatctcgccgatctga

SEQ ID NO: 144864 - DNA, 464 bp, Zea Mays
tttatatttcctcagtccttcaagaggatcaactctcctcgttcttcttgagagcatgttctttgatccgtttcccatctagccatctctaacaaatccctacgcactactcacacaagcaacaaagatcagatgccatattcacatatacccccgacaagaaaaatgtcaaatagggttgtacaaacaacacaaaagaatggtgcagtatagacaaacataacaatctaaatgaccatgagggtttatgaaaagtatctaaagtgcgaggacactcgcttaattaggagactgtatatatgaatccgagaccaatagcctgtcggatttgagaaaatcttccaaacctaattaagtcacggtttagcagaaaggaggtggaaatccaaccaagaaatgaacttgtacggctatgccaacccgagagcttacctcgccaccgctgcacaaaaaaagaccaaaag

SEQ ID NO: 144865 - DNA, 785 bp, Zea Mays
atcctccggggtaatgaatggcacaccaaactcctgttggtgccactcattaaggtctgcggggaaggtaggggctggaggtggaggggacccaggagggagaggatgacctatctcggctgcataacgaagaaaatcctcatgcagccggttagtcctgcgacggcgcacagactcctcgatctcccgggtgcggcacatggcgaagatgccaagaaggcccttggccagacgaatgaaaagtccccgacctctaccccgtccctggcccggaccacttcctctcccgctgcggtccatcggacgtgaggcagcggcggcgcgagaggaggatgggtgatgtggaggctgaggaggtggctcatcagaggagacagtgcctccagagcctgagggagcccgcttcgtacgagcagctgggttggtggaatcaacccagtatggtacgtagcgggagtgtttgacaggtttttcgaaatgagtctgggtgaacacttcgatcatcttcatgataaagggtgcatgaagacaccctttgagaggaggccaggaagcacaaatgatctcttcccagatcatgtcaaacacattaatgcgggcgagactgttgggagcaaggaggagaaggaagacccgactctccccaaggatgttcatttgattcccgcccttcgggagaacggtcatcctggacaaagagttaaggtacctgtagtacctatgcatgttggcggtggtccagaactcccgatccatagagacatgaataaatttagtcttttccc

SEQ ID NO: 144866 - DNA, 395 bp, Zea Mays
aagattatccctaactaagaacccaagtgcattctagaacttaggaagtgcctcttctggagctaggggctgacctttcgagctcacatctgagattttatatgtttgtcacgaaacttggtcagtcccttatcacctctttttcggtcgctctgtgtccttttccttgacctctcggtggttgtatcggtcggtaccggtacatcttcgtcttggttcagccccggtgcgtcctggtaatgtgccacggcttcatcaagtatcgcacgatattgggacaagacctcctattcatgtgtaatagacattgtgaaatcaactaattaggtatacacatacgaaactaaagatgtgtactttacctcacactcttgtggatgataatccgggtcacg

SEQ ID NO: 144867 - DNA, 491 bp, Zea Mays
cagggatctctctcccaaggtctcccagcacaaaggggagatacactgcctgccatataaagcctcaaatggtgccatcttgatgctagtctggtagttgttgttataagcaaactctgccaatgcaagatgatcttcccagctacccttccaagacagtacacaagcacgcaacatatcttccaaggtttgcatcgttcgctctgactgaccatcagtctgaggatgaaaagcgacactaagggaaagcttggtgcccaatgcactgtgaagactctcctagaatttggatacaaatttggagtctcgatcagaaacaatggacttaggcaccccgtgaagcctgattacttccttcatatacaaggggaccaattctgaagctgaattggtggtcttcatgggaataaagtgcgcagacttagtcaagcgatccactaccacccaaatagcatccctgccccgaggaaaacgaggtaagcccaccacaa

SEQ ID NO: 144868 - DNA, 646 bp, Zea Mays
gtaattggaaaatacgttatcaataaaagatttcattctcgaaggcattcaaactattggttatcaattgacttcgacttgattagacttggaatcaacacacttactcgatttagggtgaccactataccctaccaacggagcaatcagcttaagtcggcaataacttaaggtggtgcaacatgctcgcgcttactcgacttagggtgaccactataccctactaatggagcaatcgacttaagtcggcaatgacttaagacggtgcaacatgctcgcgcttactcgacttagggtgaccactataccctactaacggagcaatcagcttaagtcagcaatgacttaagacggtgcaacatgctcgcgcttactgacttagggtgaccactataccctactaacgaagcaatcggcttaagtcggcaacgacttaagacggtgcgacatgctcacgtctactcatcttagggcaactactatgccttactagccaagcgattggcataagtcaggaaaaaaactccaaaaccagcacaccgcattttctttcgcaatcggtcaagatgattgttacatcctgataagagaaacaagtgttatagttgtcagcgccaggggcacattctaatgctccatccaccga

SEQ ID NO: 144869 - DNA, 284 bp, Zea Mays
gaccggaggaaccattagggatcactgccaccattgatcgttggacagtttcggtcactcaggcgctaaaaggaagattggatcctattcgtatttggtgtctagggttttaggaatagaaagtggaaagtgttggcttccgtgtcggccctagccacagttattatagtgcctttgattgggggcctcaaccaaacgaataggacaacgacctcgattagggcacaaaattgttaggatggagtcaggctagttcacctttgacgaagctaaagaacacgccc

SEQ ID NO: 144870 - DNA, 686 bp, Zea Mays
gcttatttttcataaagaaactacacatgcattgcattagccactacaaaatgagctatcacaatgcccttatcaccacaaattattgcaaactggctatgaaattatttcaccgatggtttaagggatagtgggatgtagagaccgattaaactagcgacgaaaatttatgtcaccgatgggtaaccgttggatccaacggtgatcctcgaggctcgattccctactaggttaattatgtggtgagatggttgtgatagttgttatgattgttggccctaaatggccactagtgaactcacaattataagtatacataattgttcgtgcaggagaacgatgacaacaatgacgatggcctaacaggatgtctctatcagcggtggtatcgacattaactatagttgtaacatcccaaggtcctccaaacaccccgggtgtcaccaaaatcacccttcccacaaactgctatgtataaaaagataaagaaagaaaaattcggcagcacctcccttgaaagttgaataaatgaggaaaccacagtgtataaacataatgcaagagaagagtaaacattcaaaacattattaattcagctaaccaaaagtacaaccaccataatgaccagaacatattgaaccacttgcacacactatttaaaagtgaccaacatccttgacccaaag

SEQ ID NO: 144871 - DNA, 347 bp, Zea Mays
ggcaaatctagcacaaaatatgagtgaagtcacacttacaaaaacaaacactaaaatatcaaaacgaggacatctaagttaagctgtgtgacgcacgcggcacgatgttgtctggtttcatgtgccaagccataggtggtggtggccgaagtagctttgtagctgttgtgtcagtcgacacgtcgatgctcctctagagggttttgtgtgggatgctagggcggaggcaacggtggatgttgcatgctttgcctcgaggtcctggcttggtgatatgctgggggacatcttaggcgaaagcctcaacgacggtgatgcccgcgggtgccgcttccctgttgagggcg

SEQ ID NO: 144872 - DNA, 483 bp, Zea Mays
tccaacagttccgtatatgtaggcacttaaaatcaatttttcaaatccatggtgaaccgtggacccaaggctttctgttacaaactcgttgccctccctccagatgcgtctttcccctattcctttgatgcatcgctgcatatacaagcgtccattgctgctacgccgccaagaaacaaaatcatcttctcttcctgtgtctgctagtcgcctgggagagacttcaaagcgcagcacctgccagtgccatcaccgctagttgcaaggaaccgtcagggccggatcaaaacaaaaatcttggtatgtgaattatcatatgaattggtacgtgcaatcgtaatgttaattgaagttgttgtgtatgtaacatctgcaattttaatttatgtgaatatatattcatagtatatgtgattgcaaaatcaggtgatgggtgaaaatagattgttgtcattacgagatttggatgaatcatcatcagat

SEQ ID NO: 144873 - DNA, 606 bp, Zea Mays
ggtaaagatgataatcgtgaaagcataaccaaggatagagttaaggcaagactcacgaagtggcgaagtggataagacaactaagggtgagttaggtaaggttccaacggaatggttgaagtaaaaaattattacccaaggaagttacaaggaaacaacgagatcaccaaggatgtgcaaaataaaatgaccgctcatggatcattaagaaacaagggaggtcatggacatgtaaactgaaatattttaaattgacattggatataaaggtaagcatataaaaagataagagcatgtaaggtttcaagaagatgagcataccaataccaagagacaagaaattgccgaaagatagcgatttaacaacagaaaaggaaagggcctcaaaagacagaaagatcatggacatataaactgaaatttctaagtaagcagtagaaatttagaggcaagtatttgaaacaagagtattgaagaatctaggagtacgagcatgtcaatactaagggaataaagatagtcaaagggtagcaatttaatgacagaggtgggaagagtcccaatagacaaaaggttattggtcagggggcatctacaaagatgtcg

SEQ ID NO: 144874 - DNA, 447 bp, Zea Mays
gtttagtccgccaccacctgttgagtggcgtgagttcagaaggtcatgtttagacttagcatcttttaaatactgcaataaaaaacagaaaagctgcactgtctttcgcagcaccaatccacttccactctccacgttcatgtcttgccagagctcgacattggcgttcactgtgctcagcgccggtttactctcatccatttggtcctcatggtttgggcgtgtttgtaaagccagagttgttgcgtcgttgggatgtgatgtggctcggcaacaatgacacaatatgcctgttcttgctagtgacaatgtggttgctatgggtgagggatcggcaaccttggtttgagctgaggttcatcgttggaagtcagagctgctcttcacttacatgtggagcttggcaacgacgaccggtggactccgttagtgtgaccctgctaaact

SEQ ID NO: 144875 - DNA, 379 bp, Zea Mays
agcgcaggtgaagtcgcatggcggatagattagttccctttggcaaaccaaacaacttatcgaggttcagacgcaggatcggacaactcctcacggtgtcattccgtgaaccaaacacgtcgttagttgtttaataaatggtgcatgtgtttgtatggagggaggattttcactcgcccacattggcggtactgaaaaacgtcattgcaaaaatatctctagaaccgacactatagagctttttttgtactagtgtcaattagtaaattaaaacgtgtcgtttttttcttttcgctatttcgtgcaccagaagctagatccctggttagcaataccaaatcttttttttcctgttgatgaaactaaagggttgccgcac

SEQ ID NO: 144876 - DNA, 506 bp, Zea Mays
cttaactgaagattactggaaacagagatgatggtggttactgtgctcgtcactaatagtgttctaccttggaccaactaggaatgaggttaattaaggaacttaaagggcaaactctgagagcatgtgcatagatccataaaagtgctagcgtatgaagctaagctagattaaccttgcagcaaaaatagtgtttagtctaccttacctttttaagactggtcgtcgttgagagattaaacgggtactatcttattgatgtatgtcaaaccttggtgcatgtagttccagaaaatttgtggccttgtggacatgcttccattgtcaacaaaatattttgtctctcggttactcagtagtatcattggtaggagtattgataaacctgagcgtagatcaatgattctcatagccacatttgcataggtctcactgaaatttgaggttcacaggaactgtgtgtatggctgacaatcttatgtttagctgcatgcggaccactttac

SEQ ID NO: 144877 - DNA, 335 bp, Zea Mays
cacttcgcaagttccacttgaatactttgaaaggtgacataaaacagaggcctggaaaatcaactatatacaaacattgcaatcaactgtccactgtcagggtccctatgacatcagttacaattgatgtcctcaatatttatgggaagatgaaatagaagctctgtcaaaatgcaattgatatctttgtatctgacaatcaacaagttgtacactgtattttagggggggagtttcatccaaaaatatgctaacagggaagctttctagaactccctatagaaatgcataagcatggaagtaataggaaaatgaaattcctttctgggaaaaca

SEQ ID NO: 144878 - DNA, 607 bp, Zea Mays
tgtctttgcatgctaggtgggatatggcaccttcgtcgtttctacgacctcgcggccgcgtgccgggaaagctgagctggagactaaggttgagcacctgcagaccaagaatactgagttgtatgggaaaaatcggcggccgagtcaaagagtcgatgcctggcgaagaaggcctgcaagcttgaacaagagaatgaggacctcaaccgctagttgggcgagataaaggaaatggtgactcaaatacagttggatgcacagggcgtgtgggatcgtgtcaccactctagtgtaggaattaccggctatggagacttatttcgagaagctggaagctaagacgcgggctggcatggattaggcccattcgttgtttgttgaggcctatcacgtactaggcgctgtaacgatgcccttcgatagctccagggaggagctaggcacttgtttcctcggctggtggcaggaggagctggcaagtctcccggacaggttgatggcctatgcctcctttgttacccgcgaaggctttgtcaatgctctgtcggcagtttgagagctttgaatagagtaatctggacttcgaccaagagggttttcaagtcgag

SEQ ID NO: 144879 - DNA, 787 bp, Zea Mays
cttgattttactgggttacagaggtactcatttgaaagattttgttcaaatgtttattactttctttcatgatagattattaaacatcagtgtattaaatgtttgtaggatgaagaagcacaggacgcataagacgcacaatggattacacagtacatattgaagtgtcgaaaacggagaatgactattggtattgctgctgcagctatgggtatgtactatcttgacaaatattggaacaaagcagattacagaatacctactgagtctggttaccaatgggtgatgagatcattgggcaataggacttactgctatcaaaattatagaatgcataggaatgtgtttgatcttttgcataatgtcctagttgagtcctatggtttgacttcaactagaagaatgtcatcagttgagaccttagcattctttctgtggatgtgtggaactccccaaggcatgaggcaggcagaggacagactatttaggtccaaggaaaccttgagtaggaagtttgagaaagttttgaattgtcttaacaaactagctgttgacaacataaggcctttagatcctgagttcactacaattcaccctaggctgcagtcacgaagattctctccttactttgataattgcataggtgctatagatggcactcatataccagttgtagttccagcaaatcaggttgtgcaacatactggtaggaaggggtacactagtcaaaatgtgttggcaatctgtgacttcaacatgagattcactttcgtcgtcgcgggttggc

SEQ ID NO: 144880 - DNA, 638 bp, Zea Mays
caaaactctagaaaacattataggaaccatggggtttactatttttgcttgatagtttatatttcacaaagtctagcgaaattggtttgactaaattaggatgattattcttcaagttatgtatttatcaagttctctgcagtatttaaaagaaaagtaaattggaaataggaaaagaaaaacaaatttgcgctgaagtccctaggttttcttcccccttttctctcacaaatcagccctcggtctactattcgcatgagtcactgaccttacgcataaccccctgaacttatcctatatctaacccgcgatccttggctggctggaacagtaaccggggcaaagatcatggcggcgaggcttaccggcggcagtagagctccggtggggtcgtcggtgacgtctgggaggtcacggcggtcacgtcggtgtgcgggtcagcgtcggaggtggctggacctgctctggccacgagcgcaggcggcggaggtcggtggcggcacctgctccggccaaaccccggcggtagggttcaatcaaggtgcatgaggagctcctctgggtgatgtagaggctatgcgcgcaaggaatcgagaaatggttcagtgggttacccggtccacgtgctccggtggggt

SEQ ID NO: 144881 - DNA, 450 bp, Zea Mays
gtgatatactgaggcgaaggcaagcttggtgccaatgaagaagcagaagtccctgaagtcctggctgtcaaactgtttgccattgtcgactgttagctcggacgggactccgaatcggcaaacaatgttttgccagaagaatttctgggcagtctttgacgttattgtggatactgctcttgcctcaatccacttggtaaaatactggacgacgacgaaggtgaacttgaggttcccttgggccatgggcagtggcccgacaatgtctagcccccaccgttgaagtggccatgtgtgggcgatcagctttgtgaattacgaagggttgcccgaatggagggaaaacttctggctggcctcacatgacctcgtgactctattcgcggtgcagattatggcgggccagtagaaaccttgacggatcacaggcagcgagggccctaggccctg

SEQ ID NO: 144882 - DNA, 403 bp, Zea Mays
acttggggaacaatcccacgatccgcgctcggcttcacccatgattgggtataaaatgggacccccagcccttgcgccctcctcgtgcccaaagcagccaccaagatcaacatccgagcaaaacaccgaagcacctgggcgtggtggtgaagagagaagggatgccgctgccgtggtgcctactttcctgggttgtctagccttagctagtggatcgggggtgttcaccgacctgggaggagtatgtgcgtgtgtgatttggagcacggaaggcctgggaggcatggcaattcctcgctagagctattgctccgctgcaggaccactgtgcgccataggcagggaacgacacaacataatcacaggtaatatcgctcgcataatgtcgcccttctctccacaa

SEQ ID NO: 144883 - DNA, 787 bp, Zea Mays
accaagctacctagaggttggaaaagaacgaaggaactcccaagtcgtgggaagttaattgatggctcgatgaaggatcaccaaccggaacaacccgcgatgcatcagtggggaccaagtcagtatcatcggcagaggtcaaaactctgccatcaggagcgctggcctctaaggcgacttcctgacccgaagcttgagctgctgccatgcaatcagaatgcggaggagaagaccctacgtgaacgtccatggaagtgtgagagggagaaccgacttggacaccctcgggggctgggtcatagctcgcgctacccatccgagccgggtcatccccggcaacatcctcgggggctgggtaagcgctagcgccatccttgaaggccgagctctccgtaacagccacctctaaggctgaaggaccttcacccacttccatgggagcagaacaatccataccagcctcctgacccttaagaccgcgctctaaggtcgatgaggcacaggacgctgttcgagataactccagcccggcgtcaggcacatcagcacaaatatccatcattccaccatctgccggctccgacaacagatcttctgggaccatgtcttcaagagtttgatcaaagtttgccagagacaattcttgcagaccaatgagggcagacaaagctagagaaggaacaccactactttccccgctgactatgtagcgtcggctgttcttccgaactagagggatttcatcctcctcttcctcatcttcatcaacaatgcggacggtacaccc

SEQ ID NO: 144884 - DNA, 610 bp, Zea Mays
ccttaagaaaagctggccacggtaaggaggtgcagaacagccagcgcggtcaccagacacagggacggcttcgagcaccaaacttggacaaagcaactggggtgactgagggggttaacacaagcgtaaagggatgatgagccttggtgaacaatcaaacggagcgatggggcacgggaacagcgaaattcagccagaacccgagactacgatagcggagagctaacagaaaccgagttctcgtggccttattggagcttaatatggagggagccagagcgagcacatctagcttcactactgcacggacaccacatatgtccaagggcacagagaaacagtaaacggtgaccaatagtgttcggactggaggcaagcagacaggcaaacatcatagtcaacagataggcttcacctcttcaatccaatccttggcagtgaaactatcccaagttatcccaccctcatcctgccagcacaaactcttatccctaacttacccagaagcaactggaacacatagtggatggagatctttctcaaactctgaatctgctgaaactggattcacttggttcacctgcaccccttctgttcacccccagttttc

SEQ ID NO: 144885 - DNA, 489 bp, Zea Mays
gtaagcgtgtcaggtccctaggatggggtccagatccctccgagtaaggtccgggccgcaacaaggtcccgggacaggggaaaccctggcataagcaaggttctggtgctgacgcgtggccgggctttactctgcgcatgcgctcctcgctcaggcggagacccgatgcgcccacgtggctcgttgcccgtgacataagccagcgggcggagcctgacgtaaggcccctagaccgcgcggactcagcatttattacggaaaggacgcgccgcctgtccaccctgctgacaggcgatgtgccccctcagcatttattgcgtcttgtccactccgctggcaggcgatgtcagggccaccctgcagacggcgcacctgtccaatccactatcaaaatagtgcgcccgtgccacacggcgcactgagttcatcatcccttatacgagaagcttcccctgcacgccgatactacgcaagtctcggatgtcaggg

SEQ ID NO: 144886 - DNA, 744 bp, Zea Mays
gcatggaagactgccctctaaggtcgacgatgcgcgagacaccaccagggttacctcttgcctagcagaatcaggcagcaacagtccaccatctgggacctctgaacagatggttggaatgttagcctcatgaggctctgataaaatgtcttcaagaatgacctcttccagtgcctgatcaaaatctgatattgaaagtccctgaaggctgacgagtgccgacagggcttgggagggaatatcgctgcccccgtcgctgcctctatagtgatggttgttcttgcggatcagcggaatctcttcttcttcctcttcatcctcgtcaaacacgtcgccagcaacctatgcatcatcacaacctttggcattaacctcagaaatggcgtccaccaggacatcaccaaggatcggcacagaaggaccagcatcctgatccacgcacggcagtcgccgaagtcgcctctttttcttcttctcctcaataggtgcagccgggcggttcactcggcgtgaacgctttgggtgggcaccttcgggtttccggatctccacatcttcgccaaactcttgtccagtcatgatggccatcggcttggtacaggtagagttagacgattccccggccagcaggctaagcacaacgtccatctcagcatcatcggtgctagctggcatttcaaagtgaatttgcctcttagcctcgggaagactcagaagtggggcaatcaaggcctcaatatcctc

SEQ ID NO: 144887 - DNA, 359 bp, Zea Mays
ctgtatacattggatccagtccacaccatgtggaatggagtgtcactgttgcagggcacaaattcaaagacacccgccaagtcgtcgctcgcaaggcattgaggaccctgtgtcagatctatgaagaagtggtcaacacaccgctcagattctttccgccctttcagagaaaccgtcctgtttggatggccaggatgcgtgcattggaaggacagcaactgcttgaggatgaccccatagtcgtgtacctcactgcatacctgctcaccctatatgcatagtatgatttcttggcccggcaccaccgtcagatgattgcccgagcagaagatgcagagaagagcaactgtcagctccat

SEQ ID NO: 144888 - DNA, 363 bp, Zea Mays
caaatttcattttctttgcctaaattcaaaccaagcacacacttcactcatattcacccatataaacctattcgtgaagtatcggctccattccacgtcattttcgtgcctcaattcgaattccaaacctcctatggcactatttctcgttcaaacgccgtttacgcgtcgtttgacatctcgatcgccatatttctcgttttctgtgccatatttctctgtgtatgtatttattcacatttcatatacttatgactatgtgactaatacgtgctcacctcttctgtcatttcagtgaccttgactgcccgtgtgtcgtctcctgtcctgcctggattttcacctctcgtgtgagctttccag

SEQ ID NO: 144889 - DNA, 414 bp, Zea Mays
agcggatcctgctgtttgctgaagtttgaccccttggaagggaaccgaaaagatcgaaccctctgatgcctatcctgttgttgagctcagagaacttgaaattttctcttgaggtgacctttttcctcttctcgtgctcttttcacttggatggccttgttcgagaggtgcgagaaacttagaaagtcttggctggcaaggatggtcttaagttctggtcttaaccctttcaagaaacggaccatcttcttggcttccgtgctgacatcatcaggtgcatagcgagcaagttctgtgaatttgtggatgtattcactgacagatcgccctcattgagttaactccccaaattcctcctcctttagctggacaatttccgagggtacatgatattctcggaaagcagcctcaaac

SEQ ID NO: 144890 - DNA, 707 bp, Zea Mays
tggatcgcctattcgtctctgttcttgtgctgtgtcgacatcaacaggtaaaatgctgcatgttacgttcagccagttcaacgaactcttcatcagaaataaaaaaaaaggcatgctgctgcctcttccaggctttacttccacggaatggtcgatcgatcggaggcgtttctggttctacaactacggaggagatccgaaatctggttttttgttcgactagaggctttacttccaaggaatggtttttttttgtttctccacatacatgcatggacaagtagccagcagtagtctgaagaagctagagatgcttaatagtagtcattggttgatgcatggttctattggtcccgcatgctctctgtcaagccggagctacgatgaccaaattctgttctttttgcgtaggattaggatgtgctgggagaaccctcaacctctagctagtggaacaacaaaatcaggccatcgtcacgggcaggcccgcgcaaagattattaggtagtagcatacgctgctgccgactgataatgtaatggcgcggcgctcaactggcagccaaacaaacgcaggctctgacggtcgccgatcgagctggccccatgaggccatgaggggaggcgtttgccttttcgccaccacttgtgaatacttgtatgtttgcttgagaatcctgcaactcaaagttttggaagcatagtcgg

SEQ ID NO: 144891 - DNA, 643 bp, Zea Mays
aaggggcttcaagaggaaaacaacatcatgcattggcatgggtgggcgggccagtcgtgaaatagtagatttgtttgccagtgataaaaatggagcttaaaaaggccatgtgtagaactgctatcatttcgcctctacgcctatttttttatctagactgtggccacaactataggaacagtcatggaatgaaatgatcttccacaccagcacttatcatttaaactaaaaattctacgcaaccatactcaatacatttcagccataatctacaaagagaactgtcctattgacatggtagaataattcctacagctgtgacaaaaggaagtaaactctttatattttatcttccctgctgtgttgagattggcagtttgaagttaaaactgtctatgtttttgaacttaaaactctctccagtatagataaaaaggccacgtatagaaatgctaccatttcggctctacacctaatatttttatctagactgtggccacaacaataggaacagtcatggaatgaaatgatctgccacaccagcacctatcctttaaacatgcatttgtataggaactgaaaataggaaaccaattttaaactgtaatgaaatgatccataatgaaatgatcttccacaccag

SEQ ID NO: 144892 - DNA, 279 bp, Zea Mays
ggtatgggctgaaaagagatgtggctgcacacgtggctatgggtgatgtgtgccaaagagtcaaagctgaacaccaaagactagccggattattgcacccgttaaagatacccgaatgaaagtgggaagaaattggtatggatgtcattgtcagttgcctcgcacctcaaagtgttatgattcgatatgggtgattgtggacaggctaaccaaagtagctcacttcattccggtcaagactacttataaaggttctgagttggcagagttatacatggc

SEQ ID NO: 144893 - DNA, 278 bp, Zea Mays
ttcagcatcagcccacacaagaatttcacgccaccgcttctccagtcagtgtgcgtagaggcttcgcagaccctgctggaactgtccgagcagtggtggtcaccattttccaagagctctaatcacgctcagcaacggcgactgtagggaggccgtcagcattgaccatcaccgacctgtcgggtcacgggtccgaaaaatggtcggcttgttggattggaggtggattaaagtggagtagttagatgcacatgcattctatacgttccaaatcttta

SEQ ID NO: 144894 - DNA, 274 bp, Zea Mays
tttgcaatgttccctccctgcatttggtagattacaatgttactaaacttgtttaaggattagaatcatgtttttggccatttgattaacttatccccttattcccttgcttggaagtctagtgcccttaggtgtgtttaggatttaatctctttggcttaacatgaccattgtttcaaatgtgtgggtgaagcctttgccattaacccctcttaactaactcatgcttccaaggttttaggttcctcttctcctccacttaaccacaagttat

SEQ ID NO: 144895 - DNA, 889 bp, Zea Mays
ttggatgcacgttggccgtcgcggacgattggttatccgcgcgtacacacgtccttgtttctctgtacggtgggcacgccttgtcagaagccattgttttcatcgcgtgtgattcgggctcagctaacagagatctcagattcttgtaaccgccagagaaattgctatctaggagtttgttatggccgcacggggtggagatttggccgggccagggggctataaaaccgagcgccctcaatttccttttgccatctaccgattgcatggtcctttagctcctgggcagctgcgccccgccgtcgagagagagaccgagtggtggcgctagagttcgattacgccatcgttgagccactagagggcgccgaggatcgccgccgagacgtgagggtcctacaagaagcatctacgaatgtggagaacttcagcaaccgagggagtggagcactgaacctgcgcctcgcattggacggattacgttccggtcagcccggaattcctcgccggtgcccgatctccgccgctggaccgcactgcgccgcaggcgggggcctgggctgcgcatatctcggtgaggaaccccttttcccgtgttcgccatgtcctttattacatatcgcacaccgtggattaggatttagggctcgtttgcgtagcttcgccgacctccggccatctctccgccatggaggattgctgcgccgccgtgtggtgtattgggtcagagtgatgatttttgggtcgtcggatcggcaacatgcgatcaggatcgactcaaatatagcgactcagccaaaaccatgggagcccgtccgatcagaatctttgggacatgatttgatcccaggccatgtcatctagcacgtcgatctaaccagctgcggct

SEQ ID NO: 144896 - DNA, 358 bp, Zea Mays
gtgggtcacagcgtgagggccgctggcttatgtcgccggcaattcattccaccgtgggcgcggtggagccgtcgtgtttggggggaagtcctcaggtagatgacggtccctgttcgtcggttttctgatgagcggatgagattgagtcgggctataacatttcgaggattcgatcacgatcgtcgattgtcgatcgggtggccttcctggggccctggtgtccaccgtcgatcttaggatcaatgatcttagaagaaaaaccatgtaaggttgggctggtctaatctggactccagatttcagatcgggtggcccaagtctcgtgataccccttcgtcgtgccatttttacttaaaag

SEQ ID NO: 144897 - DNA, 422 bp, Zea Mays
ctgactggcacgccaaatattggaaagatcaggggctaacacagaaaatcccccatgactcagtcgactggcgcatggatggcaggttgaattatgtaaagtgcaggggttcatttgtaatacgcgcaaggcgaagtggtatggccacgtactggccgttggattataatgcaagggttcagattagatcgatgtcggttatgaatggtgatgcggtcacaaccgttggattgacaaccagcgttatggattcaaagtaatcctgaaaaccccatcgcccgctcgatccccaaccaacgaccctgatataatagcgcgaacgggtaagctaccgtctaatctctgtcatccatcaatagatcaacgccccaaaacctttcttcctccaatcgacgctggccgagccgaaccccccatcggcg

SEQ ID NO: 144898 - DNA, 588 bp, Zea Mays
gtttagcttcaaaaatttcttcctcagataatctttttcccgaagcatgtcgaatgacataatcaagatcttcggaaggtgcttcgggagtaagggattcggcttctttggccacacttctctcaaaagctatatcagtatttggaggtacttcttcggccctttgctcggctgtggcaagctttgcctcaacaggcactgtgggttcggcctcggttctagcctcaattgttgcagttttaccttttatctgcctagtattagctttagttcgcgctttggcagtttcggcaaccttctttatggaagaggggcgtttggagcctgttgtttccaaaacatctaatacatttaccatccttttccttctaggggttattgcagaacttttttctaccttcagcactgttgcttctgctgaaggacttagaatctcgggcatctttgttgcttcttcaatttttgatttttcagccttatcttcgtcaaccttcgtctcaataagcttagtcgaaggtgcctccggcattgcagccggctcttcaatcttctgcgtggaaggagcaggttctttcgcttcaatagctg

SEQ ID NO: 144899 - DNA, 320 bp, Zea Mays
tgcaaactagtactaccatggaatgaaagcatcggtgtactcaactactgatccattattgaatgcaattcaatacggagccgatccgggaattttcgataattttcttcccatccaagtacaaaaatggccctttggcaggcccaagtgccttcagatcgacatgactctggcttcggctcgcttctctgctcctataaaccacacattaatcacaagcacatgtttcgacattggtccttcatcgtcatttttacaaataaaacttccactccctctcaaagcaatcgtggaacgcgcgcaaagcacgtagatctgct

SEQ ID NO: 144900 - DNA, 394 bp, Zea Mays
gaaagaggaaaagaaatctgataaacacggttggatgtgttcacatcaggatcagtctggtaggggtccgtccccgtaaactcagtcggatcataaaccgctcataatctagtgaggtcacccatgtaaaatcaatctctgatgccctctatggtccagcccggtaagagtcgatcttataaacctggaccccctcgtgatctctatgttaggtctcgagtatccggaaaatgaggaagggttttgctcttagtccagctccaagtgcataagatccattatcacatcctcggccaaggtacgtttttctctttctacctccctctcgaggttcttagcttcgttgttatcataaaatctggattatgtaaccaactttgttgctcagtttata

SEQ ID NO: 144901 - DNA, 387 bp, Zea Mays
tggtgtagatggtgaggtaagtggtcgcagatcgacgaagaagaaggctgaagtcagtggtgcctcggaggtaccacaggatccacgtcatagcgatgagatgaggctcccacggggcgtgcatatggaggcacatctgctggacagcataggcgatgttaggatgggtgaagacgaggtactgcagggccccagcaagacaacaatagctagttggattagccaccggagggccgtcgttggaggagaccttgccctgagtgtccaccggagtcgagcagggcttacaaccagccatgccagcatgctcaaggacatcgatggtgtactggggcttgcgctcgacggtgatccccaaaaagtggtatagctcacctagatccttcg

SEQ ID NO: 144902 - DNA, 562 bp, Zea Mays
atctctatagcatattttatctgttggcttgaagctgacatgcaaattacaaagaagccaggaagaaaaagcgtcatatgttctaatggcttcggcgctgcagcctaacagaaagaagcagagaggagttgacactttcactactggtcaagcacatggcatactggcatgtgaacaagctttagtcatgtttttgtaattaccgtgaaactttatgagccatagccgccgcgccagagcatgcgaacacatgggtgtgggccttgtcgatggtgcacgccgccgccgtgagcaggcgcacggccactggctgtcgccctgcatgtgtcgaagttgaaggactgtgctgttgaaagttgcagtgtgtgcaccagccacggcacgagcacgcaggcgcagagcggcgtagccgcagcacagccacagagcggcgtagccgcagcacagccacgcaggcacagggcaccgcctcgcagctccggcccaaaggaacccgggctcgggcgcaccaccaccatcggagcacggacacggccgcggttgagagctggcagccgccgcc

SEQ ID NO: 144903 - DNA, 759 bp, Zea Mays
atcggttaaggatttccttacctatatcgatatgaaatccatgaaggtgacatggagcgtggtgttggcaagccatcgttctttgatgggatgaactactcatattagaagatctgcatgtcagcttatctttagagtattgggtactgcgtctaggatattcatctcgacattgtgttggatgctgcaagtgatcaaatcactccaattcaaattgagttccatgattcaaacaacaaagctcgtaacgctttcttcttgtgtctctcgcttgttgagtttaagcgagttggtcatttggctatggctcacgagatctggtccaccctcaagatattcgatgagggcaatagttcaatggggaactaagaaccaaagccactaccatggggtccttggtaatacggcacacgaccagcaccctatcgggcatgaccaccctgtggtctctgtgcttcaggcctagcagcaagaggcaaagaacctctaggcctcacaggatgtctttgaataggaagatcatgaacaccatgagaaaggtggttcatcttctttctactcagcacagaaaccagtcgctcatctctcttcctcctaaagcaaaaggtagtcagatgcccatccctctcacaatactcacactagaacctcacctctctcttaggtagaatttgtttgtgggaggggcattagttttggatggctgaggggctctaggtaggggatcactagatgtgtggaaaagggtttcaagtgtgt

SEQ ID NO: 144904 - DNA, 541 bp, Zea Mays
ctttttgacgaggagaaaactcgaaggtacttggaagaaaatggattacacatagttgttccccccggcacctaagaggttcctcatgtagggcactgttcatctatttatagtgtggtggtacaacttcgtgtatggttacaaacatttccataaaacttgtacatgcagtttacaaattatgtgggggcagtatcatcttctgccttttctgctttggttacagagtcttgaaaacaccttctctcggccttattccacttctgcctttgtttccttgtgttgttatgacgaagctaacatctttgtcttcctccctgtcttgctctgaatgtatttagtaccaaagctcctaggatgtgctaacaacaatggttaaatgtgtttttgaggacctttgaaagacgaaggccccaacaagttggggaggaaggaggggcataggcctgaggaccttagccgctcagagtgggactcacagggacgcacggtctagctagttgtcatgcctgtgcgcacacaacagcaagaacagggacgg

SEQ ID NO: 144905 - DNA, 461 bp, Zea Mays
gaaagattgcctccctggtgaataaaatgttgccccaacgttaacccttttctttcccccatgtccacgccctcgttgatcgaagaaagagagaccaagagagagaaggttgttgtcatcgtcaaactcacggttgggtgtcactcggagttccactgagggccggggcgattcgcctgaatctggatatcggagtcatggcgtagcagggccgaggtagcaggcggggggccaacggattcctcgccggagttggcaagccacggccgagtccgccattacggtcacctggtgagcttcgtcgcattaacctctggtaagaccccacctctgttcctcgccaccctccctgccttgtgtagatcttatcgaaatagagtttagagtcctcggaagcaggtgccgccgtacccctgcatcgggggagggtggaaagcgcgctggccgtcggtttgagtttg

SEQ ID NO: 144906 - DNA, 396 bp, Zea Mays
ccaccaatacaggggttttagatcatggtacatcttggtgcttcctaggtatatggagaatttggagaggtgagcctcatccaaaactttctttttgaggtccctatttttaggaaccactagtctatcttcgaaccatagtatccccttgtgttttggcgaaagcacttatacttctccactttctggttaagattctccttgatgatttgcactctcttgtcacctagttgggccataataatctggtctaataaggttggttcgacggagatgtatgacaaggtatcggaaggaattacttcgatcttcatcttactcaactcatcacacagggtattgatgcgagaatccatcaccatacaattgcattgcgacttccgacttagggcatct

SEQ ID NO: 144907 - DNA, 782 bp, Zea Mays
cggccacaacgcccacctacgcgcccagctcccttcttagagccccgctagtgccccgcacacatcccttgcctcatttcgctcagcttcaccctctctcgcgctctgcccacgccgccagccgccgccggagacccacgcccgtgttcccggccatccagctcaccggagaccgctccaagcctccccgagctccgcctcgaggtgagacactcgtccccgtgttttcccttatcgcgccctgtgttcggccaatttcaccttcgtcgctgctcggccgcggcggtccaccgtgctcgcgcggtggccgaccgatttagctcgatccagttcaccggagtaggtccctgtgtcacccctgcctctactgaagttagccaaggccttagcgcaccttaagtcccctcctcgtggtcggataggctcaccggagttactccggctagcccgagcctttctcaccgctgttctcccctctctgctcgtggactcatggccccttccccgctattgagttcgccgtggcgccctctccctctctgcccaactccggcgaccccggagccaccctagctcgcgccagcctcaactccggcgacctcactgccgcggagaggagtggcgccgcatgcagccatctatttccccctggtctgatcccctccatcctatttagatcgaacgactcagatcacggataacgcttcacgcacgcacgccctgacgccctggcccgcctgtcagcgcccaaaccctctggtgctgggcccgctcggtcagcg

SEQ ID NO: 144908 - DNA, 320 bp, Zea Mays
tctaactgggttccaattgaaaaactgctttttttcccttctcaccatcagtgatgtatgcttcaattgattattgttaaggaggcttatctctgcttacctactaaagatttgtcgtcactgcaagtgcaaactagtaccttctagttcgaggtagaatatgtgcatacacaagcttactctgccttcccatatccatatagcttgtgatctgcagtagctgccaccggacagagctgcagctataaatatttcacaaatcatagcggatgctgcataggccctcagtattttgcttgttggctgattggaaagttaac

SEQ ID NO: 144909 - DNA, 482 bp, Zea Mays
ttggctccatatcttctgttccgatatatacggtaacttccagcttcgtaggcacgctaatcacggtggtgtgtggacccacctgaacggaccaatgaaaggtttgttgccgctctcatgttgtgcaagtctgaaccattaaatattctagcataaacatgggtaggaaccaactacccgaccagcgaacacgacgctggaccaccttcgtccatcccaccacatgcgcaccttatgtttacgcaaaacataacacatatttacacatgcatagacgtgccccacaatcgcacggacgcacgcggcccactgacccgacctgaccacccgcgtgaccactaacctagttggagcttcccctgcctatcgaaaactctgggcttccattaataaataaagacctgtgtggttgcgctgcctacacagctagcgatgggaaagccaagccaagcccctcccttgtatagtgctcctgccgaaca

SEQ ID NO: 144910 - DNA, 389 bp, Zea Mays
tactaggttagcaggaaaatctatccccttatttaaatccttagatccggacacatcttatcggactgaaccttcccccaactgaattaactcttaaaggtggaatcattggttctatgtggatgttatgtgcttctacccatgatgtagaaacaaaataatgtgtggcaccagtatcaaatagtacttttgctggatatgattcaactggaaacatacctactgccacatcttgtgcatcctggattgcttcgtcctccaagtgcttcaccttcccatggatgtaggtctggactccctagtgcttgttgtggtgctccttgtcttgccgaagtgttgaaagctagcggctactgagttgccttctttgggcaatgatccgcctagtg

SEQ ID NO: 144911 - DNA, 378 bp, Zea Mays
taaaccaatcagggcaaaaataatcagggccgttagggtttgtttactttgcaaaataatcagggcaacctaggaggcgtctccttcagagccgttagagggtgtgttcgttagttcgagaaggtagcagccttggcagagattctgcgcttctccaccaagaaagctgaacatgatgctgctcaactcatcttgtgatgcatgcttatcttattgaatttgtgttaaataagcttgtgagtggatgatttctttggttagcattagtatgtttttggtcttgctcactccccgttgaatgtagcttttgattgtttgggaacgctatctgaaactgtgaacccatttctgaatttagcaagacattacctttctcag

SEQ ID NO: 144912 - DNA, 1062 bp, Zea Mays
ggggcatataagaccaggaaggttacacagaagcacaagcaggactgcataaggacagggtaggacgcagatagacaaaggttaccgaaccagaagggccagcaggaaacaggaaccagacaccttggcctaggaggccaccaaacctgttctgttgccaaacaatagaaatcagacaatcatcatgagctcaaagggcagacaccaggccgagccatgcccacaaaagcatgagacaggccaacaggtccagctcaaagcttcgactatgccatcaacaaatgcagcagtgcagcacatgaattcctaagccatcatatgatcttgcaagctaaatgcctgcctgttttaccgatcacaattgtattatctcgacctacaaatattctatagtggcatttgataatcgtgcaagccaaatgtatgttcttccaatcacaccgctgctatttccatctagaaaattatatagccgcacacaagcctcatagcaactaaactggaaaacacgaaacaacaaagcaaataatacagaacaacaggttaatggataggcaccggaacacgggcacacaagcatccaagaacagcacaagaaaagaaaagggcagggactcacctcagggaagaggacccttgctagtccgccgaaatcacgaagcatcctcgccaggatggaattctgagaccgacaatctctgggagacagaaatcaggcacaaaagcacatgtatcaggaggggcaccgacagaagaggagagatctaaagcacatcggatggccaggccgagccatcaatcccatcattccacatgggagcagggatggtagggtcctaggcacgtggaaccgcaagcggtggcggatggggcctagcatggatggtttccccgtcgtggagccgcacaagcgcaacatgaaaccacgcatgccgataatgtggagacggtcctccatatgcgattatgtgaggaggtaaagaagccggtgcagtcgccaggtgcttgcctctcttgcggggccgcaacgacgattggcgcgcacccagtcgacgcttccgg

SEQ ID NO: 144913 - DNA, 1033 bp, Zea Mays
tccctctctgtgtgtgagacaaaatggataacgaaacgtacccgtctgaacaggaatgtatataatacagggtcacttatccctaacaaatatgtacaaaaaaacagaataaatagcgacatgctaactcatcattcccggcaccaagcatcaccatgattaaaataaggtgataacagcaacttgatcatcggtattgggagttcccacccatcaattgtaaggcctgcagaaaatgaccactgctgatgattgctttgatctcaccttcattgtcgacatgctgattgacaaacagagacgaggaaaaaaatacagtgctggagtggatgagaaaataacaataacaacaatttaagtacggtaactttgtgatcaccaaaaaggggtacatctcttcctagaaaaaggagcgggaaacactagctggatgataagaatctgcagggacattgacaaaaaagggataaagtacaactactataagaattaaatcttcagtaacaactcagagtgaaaaacaaactttagtctagaaagcaaacaagattcacaacttaaaatgagatgttccaacaataaagtgttgcatagtacatgacgccatacagaagaagacgattaattagtagacattagaaaaacaaagtgaacacttccacagaaaccaaccaatcagttactttgcataaatcaatgtgccaaattgaactattatgctatctccaaatgagttcccaaatttctcaggcctcagttcaaacacaccttgtttctggcggtgagatgagctccaacgttcattaacccttaaaaatcactgcaacatgatgggctgccacatgatttactggatggtattacctaatttgtatacctttccaatcaagatcatactgatgctttctattctcctggtgactggttatgcatctcgtgcacttcctatgatctatacttctacagaaatggaaacctcatattctcatgctcttggatttcggaataaacaaacctttaagataaacttgca

SEQ ID NO: 144914 - DNA, 438 bp, Zea Mays
agggaactcgagggtgaagggccaggtgtgcaccggtggggttgatggccggctagacattttatcgcacgcagcgggcgtggatggcgtgctgcgctgggtgcacgagcagaggagggaggagctgcacgttgggaagaagattcaagagcagtgtgcgtccgatgtagaaggagacctaggcggctacatcatagtggaggtcgaccgatgaaggaacaggggcacgttggcgatgaggtcccagacctgctctccccatgccagggggaggaggtcatgcgccaaggggccaggtggaggtgagctcggtgatggttggaggaaattctcatcgtccttggatgggaggagcaggggcatgggcattgaagaccagtgaaggcatggccacgaaccctgggcacgaaagcacgtacgggagggcttgagaggtat

SEQ ID NO: 144915 - DNA, 344 bp, Zea Mays
cgaagtggtgacatcttgaggtacacatgatctccttcctcaaattccagtggtctccttctattatctgcgtagctcttttgcctggtgtgagctacccttaaattctcccgaattatacgaacttgttcttctgcctctagaataagttcaggtccaaagaactgtcttcctctagtctgatccaatgtagagaaatcctgcatttcctgccatataaagtctcgaacagtgacatcttcagactggcctggtaactattattatataagaactcagcataaggtagactcttgtcccaactactaccatgctaaagggcataaactctcaacatgtcctcc

SEQ ID NO: 144916 - DNA, 404 bp, Zea Mays
atccttttaccccttcattgatccacgtctcagcggcaccaatcgtggcgcaagctcgaattacggcggagggaccaatcgtggcgcgcacatggaactcaatcttgttcagttcactttatcatggcgatgttcattcagcgcacctgacagggcgatttgaggagttcctttctcaaatttttatgtgacaacttgtttatccgactacatcaaagttgttgtccgtcatgccagcttcaattttgttataaggttcttgctcatacctccactcgatcaagcacaattcggttccaaagttgatgtaatgccactgtcagtctaactttgagaccaacacacgactaacagcccaacttccaagccattttgccccaatttctgtacagctctagggccca

SEQ ID NO: 144917 - DNA, 702 bp, Zea Mays
gctttggcgactgtgagcttcacctaatcttggtgcactgggaacctgcagttgtttcccctttcctcaactcctctgcccggtccgcgctcaacctctcccctgcgtaggtcggagctcgccgccgccgtgattctttgacgtttggccaaccggagccccctctcgccgtgccaagatgccccaagcgccgtctctgggtaagtgacctttcctcgtccctcttttgcgccaattccgctttaccgtggggattttggctcgttggagtctccctcatcgggtcgccccgtcttcacggcgttcgaccactgcaacccctccccgagcccgaacttaggcctagggcaccccaccctatccctagagcttatgtcggtcgtagagcgccggattaacccccaccgcgatgggtattgcttgccggagtaaccttgggtttgcccgagggtccccctccaccgtctgcccgtctcagtcttgtctcgccacctagacctcaccatagtgcttgtcgagtcctcccccaacctctccggctacccagaccaaccccccagcaccctagaagcctcagtctgcctcgcctccggcgactgcaccgccgtgtccacaaagaatgctgcacctggcagaccggaggagactaaacccctcgcgcccaatcctaaccacccagtcttgatctgatggcccggattc

SEQ ID NO: 144918 - DNA, 556 bp, Zea Mays
ttgatgaccaaactgcagtagcagtggatgtgggcggcagatgtcgtcacgtcagtgtcaaagaactagcgctggcagagaggcagggacctagcagcgggggagtggaggagccgaacctagctgtgcagccgtcgaggattaagagccgtagtggctgggacctagcagcgggggaggggaggagccgaacctagctgtgcagccgtcgaggattaagagccgtagtggctgggggatctacgtccctggcggcggctaggcgatctgtgtcctgggcgccggtggctgggggatctgtgtgcctatgtctgtggcggcgcatttggcggcgagacgaggaagaaaccaatttgcgtctgttttttatcgtctggaatacgcggtgaaggaaaaatttggcgccagattaattttcgggagctctcaggagttggaatactctagctaaatatattgataaaatggggtaggatagaaacttgataaatttattaagttcatttcaggagctgttggagagcagatttaatactatttctctaaattatcaatt

SEQ ID NO: 144919 - DNA, 647 bp, Zea Mays
ggtagatggaaacgacacaccactgaagtgtaggattatagggaggctacgctagcacaaaacaaaagttcaaccccataaaaccaagaactactgtggttataggtcatagaattaccactagacgtgcagggcatcagaagacatcttgatgtagacgaacgggtcgagcagtgttgtgcagtcgctggcgtccttcacgtcctcacacggtttgtactagtgttctagatgcaacacctccgaggtatccacacatacagggaggaagcgtcgcgtatcgaactgctaggttcgtgatggtggcttagcgagggcgagaggcgggcgactgctcatttactagtggcgaattagggttctcttaaccacgcccatgtccctcattatataggtgttctggtgggcttctgactctgaggcccatcagtaaccctaaagcccagtctaattttggatctaatccgagttagggttccttccccttaagtgtgtgaccctataggttcatgtacatatagacatggcccgagtactcttacttgacccaataatttgtagcagcctctagcaagacatgtcaactcctctgcacacgtaaagatcataccagatgaaccattgtaaacattacgtacccattgttc

SEQ ID NO: 144920 - DNA, 516 bp, Zea Mays
cagaatttgaagctgctttccgagaacatcatgtgccccaagggatcgttcagctcaaggaagatgaattttgggaactaactcaaggttgaagatctgtcaatgagtatgtgcacaaattcacagaattggctcgttatgcacctgacgatgtcagcacagaagccaagaagatggtccatttcttgaaagggctaagaccagaactcaagactatccttgccagccaagatttcctcagcttctcgcacatctcaaacaaggccatacaagtggaaaggaaaagggaaatggaaaagggtcacctcaagaggaaattccaagtcctccaagctcagcagcaggacaggcaccaaacaattcgatcctttgggtttccacccaagggaccaagtgtaacatcccaaaatctcaacccaaggtttggaaccctaatctcctaacccccccccttatttctatttttctccctaaactccacccttaggtcatctcatcatatgcatacacttggat

SEQ ID NO: 144921 - DNA, 323 bp, Zea Mays
ctgggggtggaaggctggagcactaggtttggtgcttgcgcgttgtggaaggagtgttggtgggcgtagacgttgacgacgaagctgggtgtcgtggcatgagaagatgggcacctgctctagaggcctcgcatgatcgatgttcaatctgaccacgacaaggggcagtgtcctggccgcgccgacgtgccgcgatcaggtgctgatgcatcgggacaaacatagagctacatgggcgacccttgaggcagcgactgctctcctcgaagatgactgggggtggaaggctggagcgctagggtttggttgtgggaggagtgttg

SEQ ID NO: 144922 - DNA, 462 bp, Zea Mays
caccgctgcagttttggtgggtgatggggagagaggtcgctcgcgacgggtttggaattgtgcgtaggtgcgacgttgtttatgagcgttggttatgtggatttgtgcactaagttgtttgtaaaaaacaggtggtgtacttccggatcgtacttagggccttgtccaaattccccggtgaaggcaagtaaaatagtgatggtttataccgtgggttgaattatgtgtcttatgcttgattatatccatgtcaaatatgttcatcctcgtaatccattttgagaattgttgcttgaagatattcatgttctattatttacatatgttgaggatgttgttcgaacaagttacatgtattgattattatttggaaggagtggaagtatatgtttaacacatgttatttggggtggtcttatgttggtgtcatgcacagtgcatccatcatcctttgcatgaaag

SEQ ID NO: 144923 - DNA, 375 bp, Zea Mays
ggctgcttagagactgaaattggttgtggttttggaaacaaacttctagagacagtaatggtatggtacgatagatactatgttttcatgacacaaggtaccatgcatgcatgtactaacattgcttaccaagttaaatgtatccagttatccaaaatgcaataaatttatgattctcaaaaactgaatgactaaactgtgcacacatagcactgtttgcctattacaagagtgcacccaactttttgtaaaaagaagatccaaaagtgcaaaagaaaatactactctgtaagccttcttttctatcttcatgtggttattttattccatactgcagttgatgagaagcaaagaaaataaaccaccatacgggac

SEQ ID NO: 144924 - DNA, 497 bp, Zea Mays
acctgacgaagagctggaggcgatgttatcgcagtgcgcggtaactccactgcggaaagctcaccttggtgctcactggcgtgtccgcgatggctccggcccggacgtccttcacacgagctcccttcgccccgtctgtcaaccccgagcacccccgcgggtaagcacgatgacagagaattggcgtgtggtgatggcagcccctaaaatctccgtatgtccgcggcggcgatcaaaacggtgcgcaacgctctacttggtggcggcgaaccctaaggcactcgagcagtagggcacacgaccaacttttatccgctacgggtctgcgattggtggggggatcaccgccgattttctcggcgtccgcgcagaacttccgaagtgcggttgatacgacaacgcctgggtccacatgccagtgtgtgaaccagcaacgcagagtcgtaccggcgtgccccactgacaggggccccacctgtcacctcaagaggtccagg

SEQ ID NO: 144925 - DNA, 1016 bp, Zea Mays
gttcaggcagatcgccaggtcggtcttcaccgtgcagatgttcgccccatcagccgtcgagaggctgcacctctgtgagaggaacaagaggcagagccggaagaggaagcccaggccgcagagacagagaacaagctctcccagtatccagactgtcaaggcgaccaagaacagagtgaagaacagtaataagaagagacagcgtactgatgatcaccaaaacggtgtacgcccgagaggccataagagcaagacggcagctcaggtctgcgtcgacgactctgacgtccccgatcctgcgtctgaaccgaagtgtccagacacgtcggaaagattgccggaggctgaagtcacagaaccgcaagaaatttctgagccccctgcgggacgacatgagcgtgaagctcagaaggtgttagacggagaggcagaggtagcagacgacagcgcaatgcttgaagagactgaaaccatctacaacgctagacttacggagcaccaggttcctgctgccaatgaaacagagcatggcgagtgcttggcaaatttcgatgctagcatacctcttgctatgatggatctgaatgaagtgagcatagacgatatatttctgtcggctgatacgtacgaatttggaagtgacatgtgtaacccagaaccgttttctgttggtctgaacatggaaggcaccactactggccaaaactcgggattcagttgccttgaggagctggataccccacagaaccacctttcttccatgggagatggccattgttctctggttccagaagcaggaccatgtaccgaaaacaacaaagagaaggctgatgcactagaaacgggagcatcgtatttctgtgactcctcgtttcatgatatagacatcaacgcgttgcccgctaaggagccgccgtcgtttggagaggatagcccttctcctcgagctggcgctgaaatgcatcctaatgaatgtggattaagcagctgtagtcaggatagaggcaatagttccc

SEQ ID NO: 144926 - DNA, 340 bp, Zea Mays
cttgcatgttagaggtatttcatgcaaatatatccctattctagcagaggaagtcaatgagtgaccttcccaaaatatttatgtgcattatgcccatgtgtgttgtattggaatcctcaaggtcgagctcaatcatcttggtttcctccaagggcatggctatggtcgaggtcacaacattcttagatgattagggattatgtaggttacaaccataaacacatgactatgtccaacgtgcaagccagatgccttgaattggagggttgttatgcatgctgtgtggatatcactagtggtatgagaaacagtaggcacaaaatctagaagaccatatgtg

SEQ ID NO: 144927 - DNA, 582 bp, Zea Mays
cagtcgtgctcagcgaggatgtgctagccaaagtcgtgctcgctagggccgcctcgccggcactccctgggacagccatggctgccgcgttgagcaccgttctggcgtagccgcataggtcgcgttggccagtaccgcctcgcctgctctccctgtgaggatcgagtttattggatcttcggtatcccgaaccaagggcttcgtaaaattattatcctcaaccttgcaattggatttgcggtattataactgccgtttgtttgcaaatttgatatcgtgcagaggtttactcgctgccgagtgtcatcaaccgaaaactaaagtacagggtggccgttttgtttcgttgaagaactactcttcgttactcataacagatccaactcgggactccccattcttcttcgttcggcttcttcccacgctcggctgcagctgagctcgtcggcaatggagccgccgccagtcccggcgctggtcctcgcaatcgacgagttcgcggccaacatcgaaggtgcgtgccagccagaggagtccgtggagagggagtctccccagcgtcgtccggtgtttgctactgtc

SEQ ID NO: 144928 - DNA, 678 bp, Zea Mays
atccatgttctgttgtgtttcaatttaacttcccagattttcaagcactatagagcttgatatagttgttaaggccacttggcaatatatataaatatttgataccacacaacacaatcaaataaaaaatagagccaaataaaattgtttccgaagcttgcgctatgaggtaacctcatgggcttagaaaacccaccacattctacgcgagtacaagctccagcgtatctggtgtcaattcgtgtgtggccatcagggctacgacaacacagcaaaccttcgtaataagcgcaacaaacacaattatggctcggtagtcggggtacaggataagtccacgtaacgtgcgcaacaggcgcaattgtggctcgctgatcacgacagacaaatagtgcctgcagagcatgcgaaaaatacacgactcggcgatgacggtccaactcaacgggagcggtccgactaaacgagagtgcgacatagcactcacatgacgcagccaagttcgtacgacacaaataatgtgtcgagttgccggggcgcagccaatgctcagccggttaataatgtagtctgatcaacgtgtctgggtacccacgatatcatttaatcactcacgtgaggctaaaagctcaacgcaacacaaatatttagagcgatatgaaaatacgcaacatagcc

SEQ ID NO: 144929 - DNA, 426 bp, Zea Mays
gttgtgcataggagcggtgttgattattagcaaatgttatgtgaatgtttgtactaagtttaatgcccacaacaagtggtggggctccggatcgtacgtagtgccattctgaattctcgacgaaggcaagtaaaatgcagtggtggtttgctatcgcttgattcatatcttattccctgtcattgagtattcataagtattgcatgtgttaaacatggaattctacgatgaggttttatttgatcgaaagtattgatggtatatgttaataatgttgacgaacatgatttgagaatggtatgtggttgactcacgtctttgagtaagttgaagtttctattatgaagcgtgttatatctagtgaagtgttgttggtatgtcatgcacattgcatcatccatcttgatttttgaagttatgttgtga

SEQ ID NO: 144930 - DNA, 1346 bp, Zea Mays
cggtttgatgtcgtcttcaagctgtgctatgcctatcaggctacagggaaaaccaatacggcgccatacacctcagacacacactattattacagggagaatgaaagagacgggattttgattgatacaccgaaagatcgtttttcttcttcttttgcgggggtgggatttaaataaaggcaggaaatcatgtgattctattgaattcagtgttgaacgtcttggcgccacgggtactgtactagatcacatccgatgtcggtaacagattcattaggccccacttcggcaggacttttgtttgtgtcttcttcaccagcttaataaagatcctaccaaacgagcgtttaataaagagaacggcttttgaagccaaaaccaagaacagaataatgaagtgaaacctttttttttctgtgtgcaagaaacccaaaccactaaacacatggattcttttggtttcaccgttttttgagaagctaaagatctatcaaacagacactttttttatttcgagataatgctattttaaattgtttgttcagttaaccttgttggattgcctcatttcattggaaaacgtaggtctgctgctatgttatacgagaaaattgagtctgttctacaaccattgacgagcctatttttcaatccttaacaacagaaccattcagctttcaacacttagatataagccacattttagtatttactgaaatttagagagtggatttgggtgacgtggcgttgccgcaactctcagtggcttctctgttttttatttatttaccattggctttcaaattttaggaagcagctaggtggctgacacatgtaacgcacatgtagctacgttttcattttaacatttaaagttttttcctatttgaaaatagtttttgcaaatatttttttattgtttgatcatagttctctctctctatgtatcccactacgggtctgtattgttctattgtatggttcagctgtagatccagctaacggttgtgggaaaactacaacatgtttagttaaagcaactggtaaccgtagattctttaaaagcatgatagcttgttatatgaatgacagaaatctggaaaacctaggataggagatgattatgaattgaactagaaagtatatagatttttaacaatgtattctactcccgtatccgctttgttgagattccaataactttggtatcgaatgcggttcataaaactgaaccaaacataccctacatcactccgtttgaattccatatcactagcttcgactaattctttggcttaaacctactgttctatctcctgtctaccttttaatttgacccactgtcc

SEQ ID NO: 144931 - DNA, 1078 bp, Zea Mays
cgaaatggttgttgcccttactgcagcacaacaggtataaaatttgatatttgtatcttttaccaccattgctattggaaacttcttcaacataaattgtttgatcaattgtttaatgcaggccaaccgagaaagcatcactctagtcgatcctcctttagtgatcccaactgaaactcctgaactcatcccagctgatcctcttgcaccaacaccaagaagtgaaaacaatgtttgtactccagacacaaacaacaagaaagacaatgtgccagcgaactatattagctcttacgctctaaggaatgctgtgacaagacgtgtgcaggcaaggggcaacaaaagaagtgaatgtgtatggaatgcaaatgttcatgtattttggtcatatatactatagtatgaaattcttttgatagttttgttttttaatcttgaatatggttataggtacaatctataagtgcaagcgagaaataaggtagatcatcttaagaagttctatcaaagcatgtttaaggtatgtccacaatccaatggagcacttcctatttttatttcttttgtagtcgtgcatgcaatggattttagtgttgttgtgctgcttgttgtgtgttgatgcttgctgctgcttgctaggagttgtgctatataaaaggtttagttcttgcatagcatttagaatctacttagagagcaactacatgattaaccaagttactgtaactgtagccactgcagttgtagtcttccacttatgattaaccaagttattgtagctttactaattaattgttttgaacacttccaacaggttcgttgtcatcgcgatatcgttgtcatgtaaccatcacttgcatcaatggaggagatggaggggtacacggtggaccaaaaaagcttccactcatttgctagtgttgagtagtttattacctatgttatcacaatccaagctagcatgaggatgttgtgattgtgagctgttttgtcaaattaatttgtatttggtcactgtttatttggtgcaacctatttgttacaaaatggtatggatatagttaatatatgaggcaag

SEQ ID NO: 144932 - DNA, 544 bp, Zea Mays
cgcggtttcactcagtgacctggaatcgactttgatgaaacattcagtcctgttgtcaaacacactacaattcggatggtactgactttggctcttgctcgtgattggccaattcatcagcttgacgtcaacaatgcatttcttcatggaactctgtctgaaacagtatactgtgttcaaccttctggtttcgttgatcctcatttcccagaccatgtctgccgcctcaagaaatccctctacggcctcaaacaagctccccgcgcctggtttggtcggttcgctgctcacctactctcattgggttttactgaagcaaagacagatgcatcacttttcatttttcatcgtgggactgacatagtatacttgctactctatgttgatgacattgttctcactgcgtcctctgatggtctactccggcgcaccattgatgccctccagcaggaattctcgatgaaagaccttggaccacttcaccattttttgggattgtcagtgaccagacaacatggatccatgcacctctctcagcgtcact

SEQ ID NO: 144933 - DNA, 534 bp, Zea Mays
cgggtaacgggtacgggttcagatatcggatataagtcgcggatatggatgtcgatagacactatctgcggatagtttattcgttgccatccctagtggtggggtcaatttggtcggtgggggcttgggttggctggtctacggtgaggtggcgggctcccgcggcggcaaggttgccagcgaggcttacggggcgggataggtaagggacgagggcgcgctgtgttcgtggagaggtggtgaagttcgtgaactacattaatttgactctaagccactagagaggggagggagaagctcaccggagggaagggaggcgacggcaccgagctcgattcggtctaggggaggggagagggagtggccaaggctggtgcggggagaggtggagctcaggcggtccttttataggcacccggggaaggaagcagtcaaaagccaactggcgccggtgaggggcatagcggcggcgatgatggcgcatagtgccggggatgagacaactcggggtaggctgccgtgtgagagtgcttg

SEQ ID NO: 144934 - DNA, 792 bp, Zea Mays
atgaccctgaaaacgggagcagatcagtggagaaaaggccttgaggccccatgacatggtcgcatggagtcaaagggcagcacaagcaaaaggaaaatagaaaccattcttatatcctccctcaggaaacgacattaggacgtaatacactagggggacatcgagcgctacgaacgatatcgtctttagacaacctatctacaacatgattggtcgccttctcgtagtcctccagtacatcctctagctcctcttccgatagagatgaaggaaggccaacgatgtcacgaagaccacatccggaccaaagctcctcgatgaacaccaaagtcaatgatatctcggacacgacacgagatgttgtccaagcgcttactaaggaggagccatgagccccgacgtacttctcaactttccccaaacagtggcacattttctccaattcgtcttctagaactaaaaggaaaagggagggaggtaagaaaggagttaaaacagccaataaggaacgatgaacgagcgacctaccagctacacggatgttagactcggcaagctaggcccggagcagtccagcctcagcctcggccgcctttagcgccgcgcgaaaagcctcatggctctcccgggactcctaggggagagggataggctccaatgggcccgaccacaacgaccggacagaaggtgatgcctcccacccgaatgtttcaggggtcgtcctgcgacaagaaaggcaggcgtcagaatcacccacagaaggggaaaggaagtgctcggaggaggaggaat

SEQ ID NO: 144935 - DNA, 671 bp, Zea Mays
caatgacccaattggagacctggaagccaaggtggaacaacttcggtcagagctacgtcaccggaatagggcatgggcacaggatagccagtgtatagctgaattatcagctgacctcagccgcttgcaatatgagatctcagaacgggattcggccattgattgggccgtcaactcgcgttcaatcgcttgggaccacgaagcaaaagctcgagctcgtgtggcagagcttagtgcggccctcgacagcctgcaagtgtactgtaatactttacatgaagaagtacatgtactgtgtgctcgactgcaccaggacgtgccttcggacgctgctgcaatgggagccggaccatcgggaacaacaagtgaaggacctgatggggagttggacctttttaggcacgctccttccatgaaccttgctaaccaacggtctcctgcagtaggaaatgaagcaacaaaggatgacgaagactagaatagtatagtttagatgttatacttatgtaaaataattactgaagtcaagttgtacgctggagtctctataattattacatttaggtaatgtaatgtgatggtgtgtgctggcatgttatattttttccaaatgtttctttgcctcagatgccatcacggactcgcgcacatgatggtgtggggacttcccg

SEQ ID NO: 144936 - DNA, 1516 bp, Zea Mays
caaatagtttggcttgaggcgcgggggcggctgaggttagcgtgggtatagacatgagttctcggtagttttcttgcgaaaaccggcgagaaaaagtaggtctcgcggcgagaaacagcgaaaaccgtctctgttttaaaaaaacaattttgaaatcccaaaccgttcgggaacgtcggatttcgacagttttggtctggtttctcgttttccgcggtggcggggcgaggaatttgtttcgaacgggattggtaaacctgggtcccatgcgtcctagatctgggagaactgctgggacatgcttgtcgcggagctgcaatgcagccgcagtaccgatcgtgatggcagtcgaattattagcttccttactcactcactcacgcaccaaccaaacatatagcaatggcacatgacatgatgagtcctagactcctgctccggacaaagcatccagctatggtggcctgttacagtacggcgcgcagcagttattgcagttgcaagcatgattgctcagatatctttgtctttgtttccttgtgccctccacctacctacctatcgcaaccgtataggtagtgcctctccatcgatctatgatttgtctcaacagctagctgtcttgattagattgtgtgcgcgacgccattattactagtgtatgctgttgcactcactccgttgaggaattgagttcggcgaacaaacgccgaaaagttcggtacggtgcacatggctgtcgtatgggcaaagctagtagctcaatggttgaataatgtggtttatttgttaagtatttgttaagatttgtcctttttttcatataagttatgttttggttatccgactttgtctgaaccccctggagaaagtaatttggggaaaaaaattccccttcaaaagttatagaacaactgccacgagattaaaccagttcaactgcaaaaatctactcactctttttagaaacatacataaaaaatccactcattttgagttagatgctccacggctagctagctgatttttgagtcctggttttttttgccatggcatccgagaacgggaatccttcgtccactgttagatgttgactcgactgacaagaaggatctagagctttcctctactcttcgcaggcaggccgcggaagctgctgactttcaccaccgacccgccgccaacgccggcacttgccagaccgccacgcgaatgaaacggagcgatgatgtcgtggtagtagtacaattttttttcccgcacgccgcatctttttacgtgcgtttggttcacatgattgaagcagagaaacggtcaaggtagacttgtcagagggctcaatggcagtagccgtcacccctgcgcagaggaaggataggattcatggcaaaagggagctcagcctcttcctccttcaacatcttagattagtatcaatgttctagtttattatttaagtttctttttttctctctcactatagacagagagcagttctgtttatgttagagaggta

SEQ ID NO: 144937 - DNA, 470 bp, Zea Mays
aacactctattcttgtactgttttcaatttagattgattagttgtcggtgtctcggccttccgcttttgattgattagttggtgaattgaaacaaaaaaggtagtctatattgaaaatagaagtgggtatgtatgtatgcataattaattaattcagctgtttgtcgtcattctacatatactactgcttctggagatttctctatccaatcacctacgacgcattaccagacaaccgtttgcttttcgtacatccatagaaagcaatagatttcatgtgtaggtatagctgaccatgagctaattaaggtcttcgttcagtaccctagctacaaagatacgtatgttataaggtttcggtatggatgaatttgtatttttggttgtacgtggttgctataataatctggtttacgtcttcacagttacaattagaatgtttagttctactatttagtcaatgtaatcta

SEQ ID NO: 144938 - DNA, 298 bp, Zea Mays
gactaattcccctgtttggatcagcttttggctagcttttggcagctagaagctgcccaacattcccaaatgcccagcttcttggggagcttccataggccgcgcttccggacaaagccgccccacaacgggtcgggagaagccgccgaagccccgtgtcttgaagaagccactggcatcccgtgaacactcatgctgccctttagggtttcaaccccaacctctgtcgctgacatccgttgaggtcacgtcgtcatcttcgcatgtatgctctgctccatttcttcggcatcccaac

SEQ ID NO: 144939 - DNA, 406 bp, Zea Mays
acgtgatggaactccaacccttcgaatttgtcctcgagctttcggacggctacacaatacttgcccatagaatcagccgagcaatcccagtctttatttatctagcttatgaccactagtgaatctccgtaaaccatcaacttcttaatgctcagtgacaccgcgatgtttaacccgtgggccgtggatcagtgcctcatattctgctgcattatttgatgctggaaataatagctggagtgcatacttgagttgttctcctccaggagcaatgaagaggattccagcacctgctccctacaacttcagtgagccgtcaaagtacattttccatactttagtagcctccgggttgtctgggacctgatgttcagtccactctgatacgaagtcaactagtgcttga

SEQ ID NO: 144940 - DNA, 435 bp, Zea Mays
ggaggtgcctattgccctgatgcagccattggaccaagaagtctgatgcacatggacctaaggttcggtgccccaggccacaaaatcttcaactctaacctctctagtaaagtggtccgatgcacatggacccaaggtccggtgcactaggacaccgagtcctatttctggcatttctggtaaagtggtcctatgcacacacacccaatgtccgacgctccaggccaccaagtcctgtttctagtgcttctcgtaaagtggtctggtgcatacggacctaaggtttggtgcgctaggatgctaaatatttatttctgatctcactggtaaagtggtctaatgcgctaggccactaagtcctctttctggtgtttctagtaaagtggttcggtgcatacgaacccaaggtccagtgtgccaggccaaaaagtcctt

SEQ ID NO: 144941 - DNA, 517 bp, Zea Mays
aggccgttggatcttacttcgagggtcacgattagatggcgccttaagtgaaccggtatgttattagacccattcgatccccaatccacggctcccacgcaaccacgtcatccacaaatccgattcgcccatggagacatcaatggctcgggttctatcgttgaagggggtgtcctcagatcccatatgcgccacccgtgattaatccaatggtcctatatgagcatgaccgaatcgacacgcaccatcaatcctaaccttctatcttccgatcaacggtctagagcacgctctcaatcactgcccttccccacggattggacggtcatcgagccgtcatctaccttcagcgaaccacggcgacactgactgcacaacgacggcgacctcaccatcgagcaccccagccgagcgcaatcccccaattcggacgcgtaatacgatgactagagcagcacgagcactagtgagtgttgcataccgaggcttgacgcagggggttttctggccacggcga

SEQ ID NO: 144942 - DNA, 510 bp, Zea Mays
aagatttagatctgagaattggggtcgtgttgccagtgcgcgcatacgacgtcatttcctccgcgctggccatggcgccgccggctggcatcgtcggagtcaagggagatgtgttgcagccgtcggatcgtggacaagtggtggggattaggtggggaataacgtttcggtcagggagcgcgtggtccatccgatctgaaactaagggccatagctggatctcgccttaattaaacctgggcggctgatcttggatcagatgaatgtgatcgcataccgattcgcacccatgtgcatctaatctagaccgtcgctatccaatctcgtggcccggaggttaagatacccattcggtcgagcaattttgcataagagcccctcaaggtagtgcatatcaacccgccatcccttagttatgggaaggaattgcgtccaggtccctggaatttgcaaaataacccctgggaacattattttaatacaaagtgaaccctaaaacttgtttattcc

SEQ ID NO: 144943 - DNA, 327 bp, Zea Mays
attgaataactagtgtttcttgaatttagactacgtggcacgattctattggtggaaggctaaccatacgatggaccacatgaaaaacggtcatagaagatgtgggatccattgtgagggctggtttctaggatctcgtggatgcatgtgggtggggccaggcaatttgcaagcacatacggaggtgtcgtttgcatcacatgcaaggggctcatgcatgcggttgttgcacgatgtgtgtacggtggtgggatttgcgtgcatgcggccatgtagagtggaccccacgtcatttctactttcttccttggctgaaaacgcacacgg

SEQ ID NO: 144944 - DNA, 493 bp, Zea Mays
ctgaacgacaaggattgcggccggtgctgcatctatacgaggtagcaggaaaatggccattgcggttgggagatgtgtgtgcccaaagatttttgcaaccttcagtgatttcatttgaggttccaagaggggttcttcgctgtcgtttgacggttttatctgggttgtttctgtttgctgtgccatccatccaagtcatatttctacgagacaagaggttgatgacttggtggtgattggtacatgcaactgtgcaaatctcttgtgtttttaagtgcaggctactggggttctagggtaggatttgactttttgattgtttttttttgtcccacacttgctgtttgtttttttttcttgggagccccacgtttctaagaaaaggagataatgtgtggattatccgcactgttttacctttcatttcggtgaggtaacggacaagtcaagccagattcttgtacagcaaaagtgaggcatttccttttactat

SEQ ID NO: 144945 - DNA, 379 bp, Zea Mays
gatgacttagtgtatagaatctagtgtcacaaactttattatataggtataatgtctgttggagagaaaaatcctctagctgggtggcggagtgcacccgccctgatcctaagatgaagaggagcctagggattgcctgattagctgaagaatacgagaacacaagggttagagtggttcgggctatggagtgtaataccctacatccattagctaggagttgtattgtttgggagtctctatgtgttgtccattgtaacgttgtgttgtccatttatgtatatacaaggagctcgagccctgacaggtgggcccaggaatatagtaataaaaacatactacatggcacaagtaatgtcgtcggcggacagagatcttc

SEQ ID NO: 144946 - DNA, 287 bp, Zea Mays
gtgctgtagcacaagctgtgaagacgagtcgatgattcgttgaatccaaacagctggtgaatctggctggcatgaagtgtaacatcctctcgctcaaagcggaacctcatccactggtgattagggtcgatccatacaaaagcatagaaaaatcggacccattcctcaacatatctgccactggtagtcaaaagagtgagaagtccaggcagatatgagaggtgtacctcagagtcagcatcgacggctagcagaaacgtaggaagatccaaaagccggtgcactcg

SEQ ID NO: 144947 - DNA, 283 bp, Zea Mays
cccaaccgaggccactcttcttcggaaatcggcgggcgcagagaagttacgcaccagccaccatgaaaaccagaacgagaggaaaccgggagcgaccaaagacgcgagagaaaggcggcgcagtgagggaaggagtgcgaacccacaaagtcaggaggaaaccctaacctcgactcgggagacgcaaaaccatgagacgcgaccggaggaagaaaccccaccgaatggtctagggttgaggcgagcggtgcgacccccgggctccaacccgaccaagaaacca

SEQ ID NO: 144948 - DNA, 296 bp, Zea Mays
cttacgtccctgttgcggtgtcctaaaggatggggttgcacccaaccctctcaagtgatccaaagatcaagcttgaggccatagttttcagtttttcacttatatccgtctcctcacaaggatctccacagaatggagactcttgctatccttgcacaagttgataagagctagaactccaatagaagcaagagagaggaagaaacacacaagagcgcaatcacaccaccaacagatcgaagaacgcaagcgcaaaaactgaaatagagctctcttgcgaatactggtgcttagac

SEQ ID NO: 144949 - DNA, 456 bp, Zea Mays
cagacgaaccccatgacacaagcctggtgtccggcatggtggaacctgataggaggaccgggtgtgccgaaggaaaaccactcgagtggatctcacgcctggtccgagaccgacctgtcataaatgatcgaccgcattaactgtgcctgacgccgagccacagcagggacaccggcctgcctcccactcatgacatacgaccccctcgggacgcagagcactcatggcatacgaccccctcgggccgcagagcactcatggcatatgaccccctcagactgcgacacatttatggcccgcgcatcccatggtcagcgaagcacttataacctatcgagactaggcctgagtgcgcaggccgatggcagggcgcaacacgacgagtcgcaccggacacaagctacgaagggtaggggtcgacatagcaagaatgatggcgctcgagccccacgctgc

SEQ ID NO: 144950 - DNA, 280 bp, Zea Mays
tgtgaatcctgtgcatggttgtgtccctagtgctccattgaatatccctgcaggtttctagctccctttaggagggtttccctacctcaaatagccttttcaccgaaaacctaaacctctgcataccatgtgttcggtgaaatgtccaaaccagccaaaaatgctccgattgaacccaaatttttcaggcaccttcacaatacctccagtaacatattcgccaaatttcacaccaatccgatataccaggcttcaatttcactcaattccccgtttcgat

SEQ ID NO: 144951 - DNA, 529 bp, Zea Mays
cgaatccccaacgaggtacctcctgagccttctgtaatcgccttctcgttattttggaaccatcgtatgcgtgctgctgtgcctcactggtattccggctgtggaccgaccatggcgccgccgctagggaccggttcgccgtcgtgggcggggtcggaggggggaagatggacctcgtccgttggatcctagccaacggttgcgattagatagtaggtataccgctttgggcgggggaaatcatggtcgttgatctctgcatcaacgaattagattagatcttcaaataactcttcgaccccttttaaatccgcttcttagatcggtgatcctgcagtcctggtgccataccggttcatcacctgcgaaattaaatctgtgccatccgtgtgtaatcaaacagccaagattagtcaataccccttcgccgtgtacatttcttaaagaacccctgaagttttggggtatcaacccgcagtccaccttggtggtcgtctgtgtcttagaaatatttgcgcagagacccttg

SEQ ID NO: 144952 - DNA, 680 bp, Zea Mays
ttgtgctcctatatgtcctcttgccaaaaagtattttattctagtatggtctatactcttctcaatctattagatctaatctcacttttgtgcttgcgatatctttgtagatgccccgtgaccataaccttcttgtctttttgggattctttcctcttttgtcattaaattgctaccatctggcgaactctagtcctttggcattgacatgcttgtacccctttaatactcttgtttcgaatacttgcctctaaatttctactgcctacttagacatttcagtttatatgtccatgatcttcctgtcttttgagacccttttcctcttctattgttaagatgctgtctttcagcaatttcttggctcttggtatttgtatgctcatcttcttgaaatcttgcatactcatatttttatgcttatcttcatacctcaatgactgttcaaaacatttcagcttacatgaccttgaccacccctgtcccttaacggttcatgagcggtcatttttattttgcacatccttggtgatcttgttaatttcttgtcactttcctcagtaaaggatttttacttcaacccttccgttggaaccatacatatcttacccttgattattttctccacttcgccactttgcgagtcttgccttaactctatccttggttatgcttttcac

SEQ ID NO: 144953 - DNA, 418 bp, Zea Mays
gtctttttctaaagaactccgcacagaagcctacaggaacagcttgatcaacgaaagcgcgcagcttcatcacacataattatggtaacacacatacaacgagggcatcacacattacatcggctcaaccttcgggatggtacccatctccctatagttgaacaacattatcctcaattcctcacccgcaaacagacttcacagctccctctcacccacactcgccccagccggcaaggacaacaattcccgtttgacagtcccatccacacgaagacgaccaccctccatctcaccacgatgacgcctttcacctcgtgacaactcaaccactctccgtttcgccaccgctcttcgccgcctacgcccagcactcgcacccagatgatcctcagcacccatcacacgcggaggagtc

SEQ ID NO: 144954 - DNA, 1184 bp, Zea Mays
tccggtagtgaattcttctcaggacagttacgaaggtaatgatcttcacgtccacatagataacaagattttcttgaggttatttcttgactttttccatgttttcatttttgtttcttggacctgatgtaacgacggggctgaaactatgtgcaggtgatagtccatccatcaatgtaacactcatgtgcttctttttggagctaggcatccttgtgatgtttcctttttggaatacttggcaattcatcgactgacagtgcattaggtattcgagaatctgctattagttgttcttggggagaccattgactttttatgccagaaaataaaatccggttcttctgttttgtagtttcactttcgtttgtactgatctggcgacaaggaattccatagtactcacaacaataacatgttccagggtcacttgtctgttggtttggttgtgcatccttttgtgtcttcaatgtctgttcatcaactattttatttagagtgttgttttgacttaccaacacaccacattctttgcatttagtgacatcacttgtatttgacattccaaggtctaacatctgtatgagtatggaagaatggaaggacgaaagggttgagcaaagatagattatagagagcagagaaaacccatctatctaaggttttacctagctaactgatgtcattgtggacaaaagtcacacaatacaccaacaattatttcaaagaagcaaatcaaacatgaccacaaaggacaatgaactcaagcataccagcacaacataatccaattctactcattcaacaaaaggtgagacaaggtttgaaataagaaagattttataatatcaaggagtcgggtaagaattatcaaggagttagacaagacatatttatcggtggccaatagtgaaataagataaccatgaactattaaagtgaggataaatgatacaaccaaggatatgaagtgagttagggagaaagcattatcaaggagtagagagccaaaggtttcatacatcaaggtagatattgcgcaagggtggcaatacaatggcaagaaaacaaaagtataagtcaagggttttatagcaatattatggattagaaaaccactataatataatgtcgtctttaccgatctagtcgaaaatcttaatactaaagaacaatcctatcaa

SEQ ID NO: 144955 - DNA, 782 bp, Zea Mays
ctgtgacaagcatgaagataaaaatacctttcagcctagacatcaaactcaagcgtagttcctaaacatatgagctatggccattcaataaattgaattgttcaatcttacacagaacaggaacaaatcgagcttgccaaaattcagcattttctcaaacaaaatcatctgcttaaacaagcagtcatttgctcagcactaaaattaggcatcataggcagtggcgtttgcatagtagaaagaaaaaataacaatgacatcataggcaatagcattgcatagtgaaaataaaaaattacatcacaagccggtaggattcataaaccttgctagggttttgttggcgtggactcggccaaggacaaaggtgaggagcaggcacatgagcgacagcggtgggtctcctgtcttcttcgtgcgaagcagagatcggcattgagtcattgacgacgaataggagtgcctgcacggagctcggcaaggagtgtcatacatgaggatcatcagatagaagaagaggagaattgtgggaataccatatagaggcgagaattcgaatattgggccatgggccgctggtagtagagaatatgagccgaaggccatttgtaaaacatataaatgttgctgacgctggctgaaaggggcatcaaaaataaacaaaccaacttacttgcttgcttcatgctcttcttctcttagaccatatcgagcagttcaccaatatatttactgttagggagaagatcgcgaagaccatgttgagcggagtccaaactcgc

SEQ ID NO: 144956 - DNA, 770 bp, Zea Mays
gttaactacttgatcagcaacaaagtttagtctaatggttgctgccttggtgaaaattttaaaactcacatccaaaaggcatatggggtaatactattgaatcagattagcctcacgtactttgggaataagcgtgattacgccaaagttgagatctgacttgatggtttcctaaaaatgttggtaaaattccgctgggaaatcattcggtcctggtgctttgttgtgttccatcccaaaaactgcttctcaatgaaaggggcagttagaggcacattttcttctaggctaatctgaggttagtcatctgtccatgattcaaccaagctaaagtcattcacgagtaggggggcgaacaaatctttgtaaaacaaggttatgtattttgtgtggttctcttgaccctcaattttgctttgatcatgatccagtgagaagattcttttttcatgttcttaccgtttgcaatagtatatggttttactagtactgcgcccaagagaatgccctttgtcttagctcgttggtaaagtctaatttcttcctcccttagaagcttagctaattgatctcgtgactgtcccaaaagattttgctcggctcccgacaggtccctaattgcagctgctacatccaagtcaataattgttccttgaatgtcagttttttgtgtttatcttgtccactatagtttgttacccaacctctaagatagtgcctaagggcacccatattgttattccaccgctgaaccaaatttctaccctttg

SEQ ID NO: 144957 - DNA, 273 bp, Zea Mays
gtaactttcaagttttctagagtaactcgggacgttaattttatagggctccgcccctgactgttactatccctattcgttatgtatgtttcgcgctacgtacatatgtgctgccatgctggtgcgtagaccgatagggataatggaaatcatcatttcgagttttttgcatttgcatgcatacaaccttacaacgcaattattacatcatcctgcaataatttgtagttcaaataaacttcaactaaatcatgctatggagtaaaataaaac

SEQ ID NO: 144958 - DNA, 478 bp, Zea Mays
agatacgttcaggaaaaaatggtgacgatggagctgatggaggaggacatatcaaggttgagtgagcttatagcgctcgctgaggcaggattacatggggaagaggacgacgacatagaggatgagtgagctcatcgcactagctgaggtaggattatatgctcaagaggaggaggacgagtttatgtcttaggccgcgaagaagaggctgcttattataagcagaagtgtgatgaggctgaggtcgaggaccagctattctccaaagctgcagatgaagcataagccaattattacaagagaaaggtggaaaagtgtgatgcaggacaatgcagcaagtggaacgaggttgtcgttgaggattgcgcgacagatgactctgatgatgagttacttatagattctgattttgattgaataagctagtagtgtgttatgtagtacttttagtagtgattctcaggaccagctattctcc

SEQ ID NO: 144959 - DNA, 503 bp, Zea Mays
tggagatgttgtgcgatagcatatcgatatagccaatattatcggcaaaagttaacaagagttaaatcttgctgatgatgttttttccagtacaacctcaatatgaagattttgcgaacttttagcatagtaatggtcaaggctgaatagtgggaaagattatgaccatttaaagactgacacgttgttttgtttttgtcctaggatcaaacatgagccattttgcatacatttgcattattgtggatttgcttaattcgtatataacattgagaattttgccatgccaccctttatgtggaacgatcccaacagtatctcatgcacttgcttacctagaacctatcatgtgctgctaatgtttggcaagagtgcacattttgttttaaatacttaggagatgtgctttgccatgtgagatagccacacactgttactgattgttcattccatgaggaatactacatgatacactcaaagttaacacaaatatgctctccggt

SEQ ID NO: 144960 - DNA, 362 bp, Zea Mays
ccactccctcgcgctccctatccgcacatgaatcgtcctccctcccgtctcccgaaacctcgtccgccggttcccgtcgccatggtggtggtagtgtccacctccctatgctccttcctgcccgcgcacccgttcagcctcgcgcgccctcgccgtccccacccaacgaacccgaccgccaaacccctctcccgtaccctctccatccgctgcatcgccacaaccgcggcgggacccccgccgctcccaccgccgaagctggtccgctgcccagctctcgaccgccaggcggcgcgcgcaagccgactccgctttgcgcgcaagctcctcaccctcctcctctccaagccgcgccatttcct

SEQ ID NO: 144961 - DNA, 991 bp, Zea Mays
ttcgccttcttcgtcctcttccctgctcggccatcctcaagccctcgctgtgaacgcccgctccgtcgtggcggattcgagatccatctggggcgcccgccattgaatggcgctcggctcggggcaccaggagagaaggaatcgcgcagcaccacgtgaagaccggtccatggggtcgcggcggagcttgccaatcggcgtgggatgcagtgaggcggggttcactggtgtactcggggaggcatttcccgtgcgcgcgaaggatttggccgggacatcatcgcgcgccgccactgaaccgcgcacttcactggcgtcgtcgtcggcgtttccactccatcggcggtgagactctcttccgcactccgtttccttttctatgattacacgccgggcgatgctccatgcgctgtcggggagggaggctggctgctggggctggtggtagacttgggcagaaggtagacgaaggctgggtgccggccggggaaatcgatgactgggggccgtccgatttcgatgtgcgctccagattaaaagaggaagaagatgactcagtgccgttagatccaatatgaacagctaggattgaatctaaggtgaagccgccgtgtaccgtccgattttgaatgggcgctggagatgggatcgagtagtattgatcccatgaccgttagatcgtgatcggagggttggctgtgcgtaccgttctgtcttttaatctagaccgttgattgtaatctgtgcggtcatactcatgcgataccctttcgacctgcgatatttgctaaagaaaccctaggggaaacaggaattaacccgctgtccaccccgagcgcggctgagtcttgagagcatttcggcctagcccctgcactctctatatattatacgcccagtcctgagctcatgaaaatcaaataaataaattcagaaatggatttttaatataaaaacaattcttagaacctatttaatccatagaaaaccc

SEQ ID NO: 144962 - DNA, 329 bp, Zea Mays
atgccttttgtgtacttaacaaaaaaggggtttcgacactaactgcagaactatgaatattgtccctaaaaactcccgcaaactcaatatccagtccaattcaccagaaccgattgctccatttggttgtgtttaacacacccaactgccccagttcgtcataaaaaattgctcaggggaggctcagcacacacagccatatgcttccatggaatctacaccctggagcattgacaaagcccaacaaagaagtgacagggtaactactactaactgaaaggcctcgattttctaataagcctccgcaaagcttgaatccagagcttcac

SEQ ID NO: 144963 - DNA, 890 bp, Zea Mays
cctgatcccacggtgaagggataccgtttatccctagatgcccgatctaaaacggaggggcacgattagatcacacatccagtgaatcgatacgttatgtgggctctcggatcaaacaccgacgtccaggatttaaaatacagcggtaggttcttgatcgtttgatctcaatctaacggttacgaccaaatttgttttcacccctccgatgaagatcagagggcgcatggctttcgtcctcctcacccacgctcgccagagtggcgcatttgggtcactggtgcacgattgcaaagtctgctaagcactactcaaggctaagtcaatggcggagcaggggagaagtttcccaccgatggtgaagatgatgccgagactccccccctgcgtgaaacgaatccgcggcgggaatccgctccagtgagtgattccgttagcactagtaagctacccccgtttggatcgatgctacccgagagagtatgaaaccgaaacgatgaataaggcgttaccacgtattttgctgcatcggcctttgtccacggtgatgtacggtcccgcgatggagtaggtactccagcgagcagttttgcgctctcccgtcgccgaagccaccaacagagacctcggccatcccctaggcgccatagggagcatttatggttggccgtagaggtcatgccgtcgggatacgcgtaggccaactgcggcggatttccctaccatggcgacggcgacccttctcgctatagctctctggtggcggtgatttttgttctggggaaaagggtctgcgcgagagcggagggaactaacaggtcacgggggcatctttataccctaccccaagtcccgaagccgcccgaggatcccggcgagcccacaccggc

SEQ ID NO: 144964 - DNA, 769 bp, Zea Mays
tagagcagcaaatcaaggaattgaaggaggaaaaggcgactcttcaagacagtctcaagatggcagaaggcgaggaacccaacactcgtcaggcataccagaccctgaagatggactatgctaggaggctaaagaagctcgccccgtcaagaagatccggaagtgtttcaagaaccaaggatgccagactggcccaaaggaagaagccccgccaacactaccttccctagggatagagaacttttccgacatcgaggaagtgtccctggctagccttgatgatcttctcagagagtttggggacactttagtagaaaacgctcgtgcatagtgtaatctgtgttggttgttatgcttgtaatgaactggagtgctggataaaataacatgtttgaaagaaaaaaatgatggcatatgcatagtagtaatcctttctcccctctggcagatggcctcggataaaaccacgcctaccgcctcgggaattggagcaaggactccactaggtatcgaaggggaggacagtggagaagggagtgagacccacctccccgtgcctccggagatgccactagacctagctcaagttctggctaatcaaacccgactcattgaggtcctcactagaagcctcgagaaccagcgcccgattagaggaagacctcaggacaggatgtgagagttcctaagactcaagcctcccacattcgctggatccagcaacccgctcgatgctgatgattggctgctcacagtaaagaggaagtta

SEQ ID NO: 144965 - DNA, 745 bp, Zea Mays
gggtaatgtaggtgatcaagatagtaaatctgaaaaaaggaatgcacaaatatataaaattagtacataacaaatatttgcatatcatatatatgcacagtaaacaaaaaaaaatacttactagaacaatgagtgagcatccatatattgttgctgtgatgtttgttttgttccttttatgccaacgtgcggcagcatcacacaaatccgtgtaaactagttgacaccagtcaatatcagacattcgggccatgtttgaagtcatgagtacctcattgtttgtaatgccccaagaagcagaaggaaaaagaagccggttgaatagaatcagaaaaaagcatctaattgatagctcatcatcgttgccaagcactatcttgtcttgaagcttgacaacatcaaattcttctttaccaacattgagatcacgtctcagttttgcagcagcatccacttcaccataccaatcagtaaactccctgcctcctccagcacatggcaaacccaaaatcagatgaaccgtatcttttgttatcttcagttccttgccagcccctgggcgtatggtcatgtcatgtggatccaatttatccatcaaccacctgatgagtgatctgctctctaaggcatcagttcgcaaatcaaatatgctagaaaatcccaacctagcgacagcatcgcgttgccgatcgctcattatccaagatgatacaataacatcatagggaatgcagcggatattcaa

SEQ ID NO: 144966 - DNA, 558 bp, Zea Mays
ggaagatccaagagccggtgaagaaggactcctgagtcctggtgctgaagagcggtgcagccgctgggtccctctgggctggcaaccaagactcctcgctacatgtctgaaccgacgtacccgggtagcagtggcacgctgaaggtcaagcagacgtggatcagcgactagcggtctcacctaagtctcatcacgctccctgaagcgaggtggaggaaagggcggagcggaagcgggagcaagagcgggagcagtggaagctggagtggtggaggtggtgggcatagcgaaagtggaggaggactctggagtgaccggagctggcgacgtgggaggtggagtggaaactatggcggaaagagtgggggagtagtggagcaaggccgagacacgaggcgacgaactcgatatgtaatctgatcagatgaaatctacatcttgcctcccctctcagcctggtctgctgctgctgccgctgcaagtgttgcacgagtggctctgtccatacgtatattctttcttcgctcctgctgctcaagatagactgtcttccatttg

SEQ ID NO: 144967 - DNA, 465 bp, Zea Mays
cccaagcagacccagcacacgcgcgcgtccgagcgcccgcccgcgctgacacgcgtctctctctctgttccgcggaccccacctgtcagtccgtccccaacctcaagcccacgtcccttgccatggatgtgcccacgagcacgtgttctccgaccacgttctcgagtccgcgccactttagaagccgcatgctgctcgcccacttcccctcgcttacttgcgccctcagccaaactctctcatcccctctctttccctacgcacgtgaccagacaagctccgtcgcggctcaccggagaacgtcgtccgttctgcgaccgtcgtcgagcccgcccccccgtccgttgcctcggtgagttcagcctcgtcgtcagctacttgggacacccctcggtttgcccttttcatctttgttttgcccagtccgcgctcaccggagcacttcttgcgcagccggagcccgcc

SEQ ID NO: 144968 - DNA, 568 bp, Zea Mays
gctcactggagcatttcttgcgtagccggaggaccgccgctgtcgacccacgtcctcgccgtgccccagccttcgtttgtgagcccctgagtctccacttgaggtaacattcctacccctgcccttattttcccctaacgtgtgctttctcgtccgcgattgctcgccggagtgccccggtccaccgaggatctccctctccaccgtccagttgcctcaccctcgttcctgctaccccgatctcaccatagtgttcgtcatgtcttccctaacctccctggccacccagaccgcccttagcgcccctagaagccccagtccacttcgtcttcgccggctgtgccgtcgcgggtgcgaatggcatcgcccctagtcggtcggagaagacaagtccttagcgccgatcctaaccgtctagtcttcatcggatgatccagatgcgcggttaacgtttcgcgtggatcgtggagccagagccgttgatccacgatctagcggctagagtgccccacgctctcagcaccccgctgacccatgggccccgtgcaccagtgcctcagcccttccc

SEQ ID NO: 144969 - DNA, 721 bp, Zea Mays
tggttttagaggactggaaaccctggcacatttgttccctccccctgccgctgcctccactgtgcaaggccatctcgagaccgactccctctgctcatttcttgttctgttcttctctctaagtccggctctgggcaacgacggtctgctacaggacccacttattactttactcgacctactccacagcctgtgctcgacatgcgtggccatctctctgtgtaccagtgttggccggccataacttggccctgtggccccacgatggcgtgtgcatccccttgggtgggcgtgtcgccatcgtttagggtcctctcggtggttgactttgccagcgagctaaacaatggcgtctgtggtcgttcctgtgaaccgtgtgcgtccggatcctgcgtggattcgggccccatacaatttctgtgatgtttttggtcctgagacccagtcgagattttggggaaaagtcagttagagttctgaccctaatgcgatctgcgcgttcttttactctcttttcctattttcttaatctttggcttggatatgaagatctctagccttgtttgcggtctctgttacctgatctagatctgggttagaaaccctaaccctagaccgcagactttctgtctctcggttcatgagtacggtcgagacattgtgtcgatctcttactgtggccgaaaactttgaacttagggtttagaaaaccataacccga

SEQ ID NO: 144970 - DNA, 400 bp, Zea Mays
ctaatattcaccacctaagccaatttgtccgctgccccgtttctgccactgctcgacctcgctcctttctgacgccgatccacccgacaatccaaatctcgctcatcgcagatgtaacccatcctcgacactcagcgagtttggcgaaccagcaaactctgactctcatgcatgtggtctttctggcctcccataaattcacgtcctgtgtccgccactcccgacgtttgtgtctagtacgaagaagaaactagtgaaagtatcgcgttcgccatgtcatcggcctcgcctttattccagctacgtagctgcggtttgcgatatcgtcacttgcattgggatccagcgtccatctcatactgaccaccatgaatcttgtagcggcgacgccgcccggcag

SEQ ID NO: 144971 - DNA, 484 bp, Zea Mays
gcagcacgacgcacaactactccatataactgacctgtgagaccccatgcagtaccacaagaatgtcaatggaagaccaaccggacgggaaagtacgccatgatgggagtacgactatgcacaaccctacggacagcataagaggaacaacgctacccaagggccaccgcccgagctcccccagcagaatagaagtccccactgtagaatccagcccttgaactataaaagggaagaaccacctcttttctgaacgcataaacacacctgctataacacgctctataggaatactatgatcaacactacaatagactagggcgcaagtctgaaccagtataacccaccttctcaaatcctttgtctgagtcacgtatcggttcaccattcaaagtgagtctgcgctaagtttcactatgaacacaaatcttaggacacctagtttcgaacaccacgacaaaacaaaataggtcaaataaatgca

SEQ ID NO: 144972 - DNA, 457 bp, Zea Mays
gactgaaaaggagttaaaatgcattttctaggaattaattaagttctgcaattaattttacattgaaaatcatttcctagataattttctctggttttattcaaggtatggactgcgcgtcaaaaacagagaaactcagggtctattgcgcaagaacacctaagactcaggcatacggtcgatggactgcgggttttaatatgaaagaatccagggtctctttaacaaaatgtagcctgcgaagaggtatcgattaatatgggtcgttggattgactacctacggatcagattagatcttcataactgtgaaccggtacgcaatcaagatcctcagatcagaatccaacggtgtagatttcaaataccaaagatcagatcacggccattcgccaacgatccatcggcccccatttgctatagctgaaacattgctacacacttaatctccatcgttg

SEQ ID NO: 144973 - DNA, 427 bp, Zea Mays
cgaagaggtcattgagtcgggaggaccattttgcaatagtatactaaaagaccaggttgcaataggtctgtctctgtcacgatacgagggtagattgtatggaagcggtaggatgggacagaaatccttcatcccaccaaattataatacagtacttgaggcacatcacagcatcctacatcagctagagataatggagccatttatccaacacatcaatgagcttcgcgagcaaaatcctgggcaaacatatgattgggtaatgaagcgacataagctgcggttcaacacatggctaattgtgaaggacattccacacagagatacaatagaagaacaaaccattaatgggttggcatctggaccatcacgccaggtcacgacatggcaaacatatgacattagtggatttacattttgtaccaag

SEQ ID NO: 144974 - DNA, 533 bp, Zea Mays
tgagatgccggttgtccccaaacggctgaagaagggaagcgttgtcgaagagccacttcgtcctcccaggtgtccagagcatcatcatagccggaccaccggaccttgacttgatcaacagccatgcaacctcgagatatagaacggcgaccaagcacttgagaaggcacctgaagatcggcatgcaaatcaggtaaggatgaactgacaggagtagctgttttaacactgggtttcaactgggagacgtggaacactgggtggatggatgctgtagggggcaactccagtttgtaggctacactgccaatgcgctgcacaatgcgatagggtccgaaaaatttgtaagataatttgtgattagcacgaacagacacagaactttgcacatatggctgcaacttcaagtagaccatgtctcccactgagaaccgtcggtcacagcggcgcttatctgcttggtgtttcatcctttgctgggcacggagaaggtgactgcgaacagcttgtgtcataagctcccgctgcgaaag

SEQ ID NO: 144975 - DNA, 577 bp, Zea Mays
gtaaaacttcagccatatgtgcaaactacagttgttagtcgaccttatcctaaattggctttgaaatattttggtcctttcaaggttcttcagaagattgattggtggcttacaaactggaacttccaccttcctcccaaattcacacagccatgtttcacaactcaaggtttttactccttatactcctgtgtattcagacttgtctcagattgtggacttgtctggagtggatgtgaaacctatgaagatactagaaaggaggttggtgcgtcggggcaatcatctagttgtccaagtgaaggtgatgtggtctcattttgctgatgcagtgactacatgggaggactatgatgtgctcaagacctggttctctactgcttttgattgggacaatcaaactccaggcgaggtgaagatgtgaagcctaggtaatgcatgtgcgttggggatctatgtgtggggattaatgagctgtcagtgagctgttagtaagctattagttaactgtcagaaggattagctgtcaatgagctgggataagggcatgttaatcggccttgtaagagagaatcac

SEQ ID NO: 144976 - DNA, 429 bp, Zea Mays
ccaccagccgaagcagggccttccgcttctttcgctgggtctcttagtgatccttatccatcactactgacacaacagcactaatatttcttccgtaaggaaagattctcaactcacgagccatacgagacataaaatagtcatcatcggtggcccggggaatagggtccttcctatgccaccgaccccaggtcaccttcaacattcgcgaagatgtttcccggagttcgagcgaagtcataacctccccaggcccagcacatgtccccgtcaattcctcaacaaaaaacatagaggcccagcacaagtcgccgaaggccctgccgcttccctctccgtacctttcacatctattttcctcttccaagttgatgtgatcacagcctttcccttcgaggtgccctcttcaaaccgggtcttcaccagttt

SEQ ID NO: 144977 - DNA, 431 bp, Zea Mays
acgccatactcaagtttacctgggcggcgcggacgcctagcaaaaactgtcgcctggacgcctaggcgacgccttttaaacaatggtgtctcccttcacgacagccaacttctacagggcacattcgtagcctttgatcgggtcatgaacactgttctacatgactgcgtcgagctccaaccaccctctggcctccatccaccctcaggaggaccaacacgctactaagttgtttgtgttccgttgtgccgagattgtctccatgacgatcaagacattgtcgtctcgaccacccatgcatgtcgtaagtttggtcgccactgtcgacccagcacctcctggtggctccataggggtacctctctcctcgtttcccgtgtcatcgcaacccactcccaccgactatgttgctaactctaacacctcgtacc

SEQ ID NO: 144978 - DNA, 484 bp, Zea Mays
cagatgatggaccctgctggcattgcaaactggtcagtcacctacgttgactggtctgaaggaaagtggcatcccagatcttttcgtgctaaggatgtcacttatgaacgcctgaagaatatgactgtatgtttacctttattttgtcattttaacatgataaatatgatccttttatgcctctaacttccgttttgctgcagtcgattgatgtgagctaccacatcaccagtgatgacaaggtctgcgtgtagtagttgtgtgtctgctttgatgtcaactttaactgttgggagaaacactggacgtgctatgcttatgttcttgttgttgtctgcagaaagatctattgcagaggccttgcatgtggaatggactgaagagaccatgctacttgtttgcaaggaaattttaccctgaagcattagacaatcttgtgaacttattctcaaactacacaattttctgagttctacagctggaa

SEQ ID NO: 144979 - DNA, 536 bp, Zea Mays
gaaataggtgcagttctcgtgcccctgcgaccgtgagcaatagcgggttgcagattgccgtcactggcgttccacctactcgatggcccaggtgctagagaagtgttaagctggtgcagtagggagtgtagatcgtgtacaaggtgatttcagggcgcatgagtgggtgcttcatcgacaattcctcgccggaggcgggggagccccatggtgccgcccttcgacgagaacgagggtccttgagtgtgacaccccttggccgacggcgagtcgccccgacgtgagacaacacaggatgaacgcgcgcaactctcaggtgagtttgtgcggtggtttttctctctattattttctttctgctcaagtcttagagattacagtatttaagccacgcttggccgacccacaccaatctccatagctatgagaatacggcccaacaacggcccacacaaccacacacgcccaatgctacgcaaccagcaacctcttgcctttctcttctctgatgacgccttgtcagttaggcacaagcc

SEQ ID NO: 144980 - DNA, 362 bp, Zea Mays
tagtgcagactggaatcagagaagatcccgagtcaaccatggcaagatttttaggcagactcaatgaagagatttctggatttgtcgagatgttcccataccgtaccttgcaagatctagttgatcaagcaatgcgtacagagagaaaaattcaacaagagtcacgtggaaaatcttatgcaagtcattataatgttgtcccatggtgcaaatagcaatccagtgcttcttttggtggaggacgatcccaaggaaatgcagctaggtcttctccatccaatggtacatcaaagatggcggcttctataggttcattccctgcaaataagcagcaaactaccgctagtacatcagacctatcg

SEQ ID NO: 144981 - DNA, 474 bp, Zea Mays
ctgaattagtagccatgttccctttaccttgattggagctcccaaagttctgctgattgttgaatttcttctactttgggtatggacaatcctttataaagtgtccggactttccacagtgaaaacatccagtggaagaactaggaagagcggggaaacgagtaccaggggcactcggctgatttgtagaagtgggggcagtggtaggacgaatgaaaacaggctgtttgaacggataggagggtggacgaggcgaaaaacgattttgattaaaaggtcagattaccaaccttgttcgcttctcaggtccctaattagacctgtcacctccaaatccctttgattttccatggtctgtgttcttggcttctactgccagcgccgtgctgacagctctgctataagtaagatccaggcaggtagccattttccgttggagcctatcgttgagtcccctcatgaagcaattctttt

SEQ ID NO: 144982 - DNA, 467 bp, Zea Mays
gggaattactatgttgcctagaactagaactaagcttatatctaaattacgtcgagccttaatctcaattaggacgtcttccaggagtcagatcatctgaacatcacataggctatagatcatcgcaataaacaaattcacgggactaaaaactgcaacagagtccacctagaggatactcatactcctgaagaacatgagaacaaattcgatgtgcaaaccttgtgacttcttctctaccaagtggaaggggcatcggcttgctctcgctgttgaactggttcacacaccaatgcacggattaattgttttcatggtggcagacgtaatttgaagcccctccccctccacgacgtgttcagatcaagagcgagcgactgggtgtggagcaggccgatatcctcgaaccattccagctacttgaacctaagaggttagtccttctgcaacagaaaacaactgagata

SEQ ID NO: 144983 - DNA, 579 bp, Zea Mays
ccccttcctcctgctccagtcggccacctacgccgccatcgtctggttcgcgctcaagctccacggccagttcctctacttcctcgtcatgctctacgcgtcgctgctgtccaccaactccttcgtcgtcttcatcagctccgtcgtgccaaacttcatccttgggtaagttgtccacctggttcgattccccactttcttattgggtcacaaacttaaaaaaaaaaccagaactgtttcttgttctgatagtcttaggcccgtagcccaatccatataaaaaggaggaatgcctactcatcacaggactgaatgggccggtctgaatctaatagagcccccatgcctttcctaaacaccggcccaaacatgtgtttctgaattctgatctgtgaatgcgacgaccgacgatgcagctacgctgcggtgatcgcgttcacggcgctcttcttcctcttctgcggctacttcctggacagccacagcatcccggtggcgtggaagtggatgaacaccgtctcgacgatgaagtacccgtacgagggcctgctgatgaacgagttcgacggggaccgggtg

SEQ ID NO: 144984 - DNA, 971 bp, Zea Mays
tttctttttcagctattcttgtccaaatcgaggtggttgcagatcacgctgccactggagcgtggttcaagagcggcaccggtgcatcatcacgtcggctgcagtctgcagcacgattccaccttccggatgaccatcaccgcgccggcgagtgacgccacgagtttgctgacctcgcctggaggttggaaccggttcccagcacacgtacgggtgcgtgtcgcctgtcaacggccgcgcgccgctcaacgcggccggtgacacggactgaatgaactacttccaagcaaccactattggccgcgtggttcttcgtcctcgtgagcgcctgcggggccttgcgggcgtggacatgtacaagtacaacggactccggagtctgcaggggcaagcgcgcgaatcaaccactgggctctatttagctacaagaaactctagccaaatctgaacgcacgtgaactgatagctgaccgaacttttcacattccatatataatgacgtgcagccgtcattagctcctctttcttctcccggtcatagtttccataatcgcctacaccaccagaaaaccccaaccctctccgcgtgattccgggaaccttcgccgactccgctccatccgccgctcgctgtcgatccagtcgcaatcggcagttgagcgacgccttcttgttgattccaatccgccctccactatcctcgctgctgcaacaggagacgggtgtccagaccggagaaaaacccagtttctccaccgacgctactgtttcccaattctccgccgtcgatccacatttctccgccgtcaacgggtgccgctccagcttcagtccgacggtagccctcccccaaccatcttcggtggtttcatcatcgacgtccccgaacaacctccccgaggttctcccgaaccctagcgagccgcagtacccacgatcgtcgtcgaccgtgaacaaaggtagcaaaccct

SEQ ID NO: 144985 - DNA, 655 bp, Zea Mays
agcacatccttagggacacctcaataaagatgtaggttctttagaaccgaacttcggtaaatcgaatcacatgtctctctttgtgtgttttgcatttgcttgtgatttgttcttccctctcaccctccctaagttctcttgcttgaatcttaattcatatccttgagtgttgctaccaaattaattctgcaatcctttgagcacacttggcaagaactctctccctacaactccgattcgattatctctatctctaacatctagcttggcatctagtttgtttttaagtcttgaatttttagatgttgcttattaaaccccctctaggaaactatcaattggtatcaaagcctagctcttaatttgggtctaacaacctaaagagatgtcagacaagggatcccacaagagcgaggatgttcttttgggatacaggctcaaggagaagggcgaagaattcgcctactcgggttccaagtcctccaagtactacaagaggagagatggcaagaagaagaagatcaagaaggtggtatactatgagatcgtcgcctcgacatcaccatcgtcttcaagtagcagtgaatccacctccaagcatcaccatcctcaaaagatggttaaactaagctactgtcgaatgtctttcaattac

SEQ ID NO: 144986 - DNA, 575 bp, Zea Mays
tccaaaagcaatttatcaatttagtaccatttatcaatgtcatataaaattgcaatgcaatatttcactgaaatggctatatataacctcaccatcccagaaaaagagggactccactcaacagaatattagattcagacatttgcactccagacatcaacctcatggccatagtattttagcagaacctcatatgcaaaatattatgggcttccaacgacatctgtaaacatctcgcctgcacagattgttgttctgtaaatgtcgcctgcacatctgtaaatggggattgctgtttgtgcagttctgttctgttcttctccatcagatgcaagatgtattgttcgatgtgttatcaacggccgtgatcgagcgcccacgtggcaaatcggatccactccggtctccggtagccgttaaactgcaattggaaacccactccacgcagcagcgcagcaacttgtgggctgcggtgcgggcatgcggcgcctgtagctcgcggccgcagatcggcgccggcgccggcgggtggaagcgacccagggccatgaagcacccgctgcaccgcgacgggg

SEQ ID NO: 144987 - DNA, 310 bp, Zea Mays
ataattctgatttctccaggttggaagttggcctcttctgatgaacactcggtattgtggcagtcattggattctcgtctatagaagggcaccatgcaagcatgtgccgcttatttctttaatttggttccctggctcttgtggagtaattctagcactcagaagatgtttctcttgatgatatatatatacactgtcaccagcaaaacagctgaacttctcatcctagatcatgtccaaaggcagtctaggttcagtgcagatttgtattcatgcaagcatacaatgatatgataatactaacatagta

SEQ ID NO: 144988 - DNA, 316 bp, Zea Mays
ggagtgcatagctgggggaggagctgtaaacgcaccccaagttgcaaatcgaactaaacaatttatgatcggacaaagacatccaaagttgtcattaacatttctcttgacttgctatatacaaccgtgagtagtgacagaagcaatgttgacatgcacacctcggatttcacaagtaggaggcttgcacatgtctggagaactccggtggtggcgatgcgcatgtccaggacgtgcccttttccggcctcctcgcgacgtatgtacacagtctgatcgccgtcgtggtagccggatccaatgaccacgacgcggc

SEQ ID NO: 144989 - DNA, 358 bp, Zea Mays
gtgtgagcagagtggcggcgtgggcgtggtcgacggggtgctgcgcgggcgagctccggtgcggtggcgtcgacttcggcgaggtttcggcgagcgcgatcgaaggagagagtgtggggagtgcgagcgagcttcggggatgaagagaggaggagggtgctcgacttttatagagagagggcgctgggggagggaagagaaacggtggacggccatgaactctattaatggcgtcgtcggtttcaacagagaagaacgtggggggaaacagaaacgactacattgaaggttcataacacaaaaagacgaatggacacgggcacagctcggtcgcgggcgttggtcggctcctggcggc

SEQ ID NO: 144990 - DNA, 441 bp, Zea Mays
tttaccttaacaatatactactctgagccacattcaaataaatagatgattactcgtgccttacaacatgctttgtgatgcctcggtagcatgtacttcagaaggagcgtgagctgaagcgaggtcagtgggtgcaacaccacatggccttagtaggtggtgtcccccattggaggtagcaaatgataagcttgaacaggattgcaacactgtctgtgtcgctgctcacgattgaagttgctaaaaaagatcttcagagagacaactgcgtcaagaggatgtgctagtgacaccatggtggcatagcatagtgaaacacaccgatcaaaaaccttctacatggtgcgccaaatatcatggcataacgatacgaggctaccgtagatatctatccccttctctaaatcatttctttgtttcgccttttctctacgactccgc

SEQ ID NO: 144991 - DNA, 475 bp, Zea Mays
ttggagctgatcccaatgggtgcgactcagctgacgctgaccccaatgggtgcaatccggctgaccttgatgatgctgatcccaatgggtgtggtgttcgtattgtcgatgaggatgaagaagaggaagaggaaatccccttgatttggaagaacaatcggcgctatgtagtcagtggggagagtagtgaaattccttctccagctttgtctgcccttgttggtctgcaggaattgtctctggcgaattttgaccaggctcttgaagatgtgatccctgaagatctgttgtccaagctgacagatggtggtgtgatggacgcttgcgctcatttgcatgatgtcgggttagagttgtcccaagcagcatctcgcgcctcatcgaccttagagcgcggtcttcagagtcaagaagctgatccagatttctccgttcccatggaaatgactgagaaccccccagccttagaggtggc

SEQ ID NO: 144992 - DNA, 354 bp, Zea Mays
cgccgccgtgagcatcctgcgttaccactccgtccggtcacgtgcgaggagaaggtctcctggccgtctgatcatgacgaatggacaagatttgctccgcgtaccagggttcgtttaggtcatcgatcgtctgattgagggtcagattggatttagcccttaccggtgtggagcgtggatctaagccgttgatcgtgaatccaatggattgggtcaagtaaccctttggccattatatcgggaccatcggatctggatccaatagccccggatgcgcccgcgttataccagccaaacgaatttgcaaaagaagccctgaggttttgtgcaataaactcgccgtccactctaata

SEQ ID NO: 144993 - DNA, 421 bp, Zea Mays
atttgtggtaactgtatgcttgtaacgaacttgtgtgatgaataaaataacgtgtttgaaaaaggaattggcatgtgcatagtagtaatcctctcccctggcagatggcttcggataaaaccacgcctaccgcctcagggattggagcaaggtctcctttaggtgctgaaggagaagtcgttggagaagggagtgaaacccacctccccgcacctccagagttgccattagatttagcccaagttctggccaaccaaacccaactcattgaggtcctcacccgaagccttgagaaccagcgtctgaatggtggaaggcctcaggacataatgggagattttctaaggctcaagtctcccacatttgctagatccagcaatccgctcgatgctgatgactggctacgcacgataaaaaggaa

SEQ ID NO: 144994 - DNA, 1187 bp, Zea Mays
gcccagccgtcccagttctgaactatgaaccctaatggtcatacaaaagatttctggtgacgtgttaaagactctgtagtgctgtaggccagattgtgctggactctagttctgatatgattctgtagcattttattttattagccttgaacgcggtagtcgatacagtataggcctgtttcaaaggttcatcggaaacagttctgttcctgccaaaattggggaatttccagcaaaaacattagatatccatcctgtgagcagcccatccccgtcatgatgtctctgtctgctctcctgtcatctcatctagttatttttggtgcttcagtttattggttttttgcatcctgaagtgatgtgtttctatgttatgttcgtagttttaggttgtgttgctggtgtgcagtgtggatttgagttatacttgttgggtggttagagtaattattttcgtcttacaccataactttggattgtgattggaacatagctttgaactgtggatccttgcaccatatattaggctgtgtttggttcagcttctggaaagtgtttctaatgagaagctgaagctcaaccaaatgtttagaacctgaaactgcttttccagaagcagttcctttcgtgtaacttaattttcaccgcttcttggacccttattttggctttcgactttcccaaataggtggaaatagtgagacttttaatattttatagctgtttcgagggaaatgaagagacggtgtaagttttatagttgtttcaaccaaaaaacaaaaaacttacaatcttttgccaacacatagctcacaacaactttttttatagctcacaaacagacctttagaatctgtaatgttttagttaagcttccttttcccttaaaattccctatagcggattgataaaactgaattccatgttataggggagggcttctatagcaattgagaaaatccatcccctttacgttcatgagacccacatgtcattgcaactctcttcttttatcttcctgttctctctttcctctccctcccatctctttcagtgcttgcccaaggtgacaatgtggcgacccaagtgctcgtctgcctagcgcggtctgggcccgcgtgcccagtgtggcagtggtgtggcggtgtggccaacccacacacttgactgcccgaagtggtgtcggc

SEQ ID NO: 144995 - DNA, 1035 bp, Zea Mays
aaagcagcaggggcattagttaagccaaaagacatgactatgaactcgtaatgcccatacctggtgcaaaaggctgtcttctcaatatcctcctcacgaatcctcaattgatgataaccagagttcaaatcaattttggagaacacctgggcacccctcaactgttcaaagagaacctcaatacggggtagcggatatttattcttgattgtcacttgattcaaagcacgataatccacacataacctcttgcttttatccttcttctcaacaaacaatactggggaagcccatggcgacctgctaggcctaatgaaacccttagccagcagatcatccaattgccgcttcaattcaacctgctcctttggagccatccgatacggggccttatgaataggctgtgtacccggaattagtttgatttcaaaagctgcatcgcgctccggaggaatgcctggaagctctgctggaaacacgtcggcaaagtcacacaccacacggatgtcctgcacccgcaaggcagcctcaccctccaccaccatggagaaaaagattcccgacttccttgaccgatgatccggaagcaattgcgacaacaaggataacgtgaactttggagaacttcccaagaataccacctccctacccgacggcgcctgcaataacactgtcttccaaaaacaggatataactacgcgatactgagataaccaatccatacccaagaaaacatcaaatgcccccagggaaatcacaacaagattagctgaaaagacctcatcagcaagaatgacggaacaaccctgacaaactgaacaactactaatggagccattagcagaactaaccataattgggtgacccaacctctgcaccgaaagaccagcccgcgacacaaaattctccgaaacaaacgaatagctagcgccggagtcaaaaagagcatgggccacaaacgaatcaactgaaatcgtacctgtcaccacgtctccctgctctctgccatccgcagagggtagcacatatgctccg

SEQ ID NO: 144996 - DNA, 285 bp, Zea Mays
cgagaagaagagggaaaactgatgactatggttatgagtcctatgcgattgagcttcgaaatgacaaggccataatgcaatatgcagctcggctccccatgccaagtggccgaagtttattttagagtggtagttgctgagattagcactagagacctagtacaagaatacctggcaaatagaaccttcccaacctctagcggctgggggatgccgatgaagaaggaagggggaaagaaatatgagcttgttcgactctcctaccgcttcaaatttgagaaacta

SEQ ID NO: 144997 - DNA, 547 bp, Zea Mays
gtgcggtaagcttcacgggtattggtttcttcgccttcagctattgagaggctttcttgaagggacgccttttcccctgaaagttctatgactttttgctccaggctttccacccgggaggttagggaggtgcagtggagggtgaggtcatcatattggttatcgagggtgtgaaggtatccagccatgtagacgatggtgggatcatcctcaataggatctcctcctgacagggcatgaagtcttttcctccaggtgggggtattcttgttgctgggtggaaagtagcgaaggggggtttcaaagatcactttgttgtagttctggcacagttgtcggagggctgttcgggcaacattctggcaagtatctgggaaacggtatccggtaaaagtgacttggaaggaagggtggtttggatagtttcggctttctcctaggtagactgccatagagcatttctccattccgcccttgatatactccgtccagacgtatttcggcttcttgcggattcccatgcgaagcgcacaacttcgcaagagat

SEQ ID NO: 144998 - DNA, 511 bp, Zea Mays
tcgccaccccgcctcccctactcatgtggatgtttatagatagggatgaaaacgatcggaaacagttggaaaaactctctcccacttccattaccatattttttttactgaaaaacgagggcgggagcggtatagccggaaacagaaacggttgtggatatacgattaaatgaaaacggattaaaacgaatggatatgcaacaaaaacggacggtaactttgtccagcatatgcaatattatacaatcactcaacaaactacaatattaagagtttaggacactataaaacacaacttttacaaatttaaaagttggcacgaaaacatatattttttaaaagatcaacagcttgcgcaaggcaacacttttttgtaaacattcttcaatcataaacccaaacttgtgaatacataagataagaatgattaccctatacagttgtaagatgctaacatgacaacatcaaagattatgcaagcatgccatagaaagtagggctaatactgtgg

SEQ ID NO: 144999 - DNA, 335 bp, Zea Mays
gctatttataggctccacggtccggctagcgatccgcggccacgaattggattgtcagtgcatggttaccacgtaaggaagagacacagtgagggaggagcaaggcacgagtgacacggcggcggaatgacaaagccacggtgaacgccggtgaaatatcccggcccggctcttgctaggtttgcggaatcgtgacacaactcaaggttatctccccgcggtcgatcccttccccaaatcactctaacacatccaatactacaatgccctggatctttgtcaccattcttcagatattttcagtgctctgatcttcagtgttcttctgaaccaac

SEQ ID NO: 145000 - DNA, 637 bp, Zea Mays
ggaaatcgcaggggctctttaataaaagcgttggctgaaggggtatggagagctttgggtcatccgatctgcatcccgtggtgcagattagatcacgcaagggttttcaccatcgaccattagaacatgatccaagggcccagtactgaacgtgaagtacgagccgttagatgggcgatctagggacatgatgtaatggagacatgcacaatccagaccgcccgaaccggatcccatggactagccttattctaacccaaccggtatcactcctttcatcccagccattcgtactagatcggacggtgccgaccccatctcccccatcgcctcactctcctcccaacaacacggcatgccgccgaggaacaaacgccgacgacgaggtcaatcaagccccctactatggtattcctcaattaccaggttctacgcactcgcaaggagaaaacgagtcggatggacgttacctcactagcgattagccgtcgcttgcagcagcccacgcaccgggtgattttgcgcccgaacgaggacaacggcgagcaatcaccgacggtccgatgacccccggaccctccggttgacaccacagcgagcgcaatcccacgacgaagctcttgagcccaaagccgac

SEQ ID NO: 145001 - DNA, 383 bp, Zea Mays
caggcctcatactacactgttgcataaaactaagaaataacctctgtgttccaaagataatatagagccatgggacccttgaatccatgcgtttctaaatatgagatttggtgttgtaatgatatatgataggtacgaggacagtctatgttagtatcattgagcttaacgtgtgccgctagttaatccatattagaacattgaagcgcccttacgggcgccctaccaggataaaatatagaatttggaaggaacatgataggaacggggtgcccgatcttacgttaggtgaaggtaactatcgatttggtggagatgtcacacaaacgatccggcttccaatcaacacgactagaaccccgcaatcgcagcaccacttctcc

SEQ ID NO: 145002 - DNA, 1097 bp, Zea Mays
ggagggagagagagagaggagagagagggaaagggaagagagaggaaagagagggagagggagggagggaagagagggagagggagagaaagagaggagagagcagcggaaagcatgtttttttggcttccactctctagtataaaatgtagactagattcacttcacttctgccacggagcaattcagtttttatccgtttagctttatagagttatgtgagctctaccagatgtccctggcaaatagttgtctgattgtctcaaacaacgtattccattgtagtactattagctagtgaaattagaagacgacgtacgacacacttgcgttgcttcgattaagagcaactcatcagaaccccacttgaccagagcgagttctcatcacctatccttggtttctctcacacaaagagtatgcatcaagcttcattagcaaagcaaaaaaaatcaaagcttcattaacaacgccatttcctacgactctccatctctctctctacgtcctatacgactcctcgtatacgttctatacgactctccatttctctctctctacgtcctatacgactcctcctctctccctctctatacgttctatacgactctccatctctctctctctctctttacgtcctctacgactcctcctctctccctctctccctctctatacgttctatacgactctccatctctctctctacgtcctatatgactcctccctctctccctctctccctctctatacgttctatacgactctccatctctctctctctacgtcctatacgactcctcctctctccctctctccctctctatacgttctatacgactctccatctctctctacgtcctatacgactcctctctccctctctataagttctatacgactctccatctctctatacgttctatacgactctccatctctctctacgtcctatacgactcctctctccctctctataagttctatacgactctccatctctctctacgttctatacgactctccctctctccctctctatacgttctatacgactctccatctctctctctctctctctacgtcctatacgactc

SEQ ID NO: 145003 - DNA, 489 bp, Zea Mays
cgaggcgaatgtggagtatgattaatcttgttggggtcactggtgtggttgatgtcttgtgcgtagtatggggacacgtatgtgcgtgtgccgtggtgtattgtagtggtggtggcgtaagatatttgattgaggtgtgcgggtatatgccgtaatatggttatactcgcgacgaagaaagatgcatgtattgtgtaacccaacgtttaggttgctgtcgtataatcatgcgaaggatgctcatgatggtcgtgtgattgaggaggtttgtagtggcaagcgagaagtaagttgagtttttcaaacggttagtggatagtatctatcggtgttgtcatgatttttgttgtatggtaatgtgatgcttcactttatccatcattacattccatgcccagtggataaataaatgtcttgttgattggttaaaggttttatatgagcgttatcgcagcccaataattattggaggcgagtagtgttcataag

SEQ ID NO: 145004 - DNA, 427 bp, Zea Mays
tagagcctgaagcggaggcggtggagcagactgaactgggggaactgagacaccagaatgctgtagcataagagccatgaatgcccttctcttagcccgatcctggagtagctgctgctgaagcgcatcctgcctgtcctgcatgttctgaaacatcagagcatcctctcggataaccgggcctgctcggctgccaggtgagcctgctgctgagtgatagacttgagaatcgaagcaaaagcagggtccatagccggaggggcagcaggggcagcactagaactcccagcctcatgatcatgagagcgcggaggcataggaggcggaggcggaggaggaaccccaaaatcatcatcatcatcatcatcatcaacagctgctgtatcctgagtgtcgaactgacgaagagcagcgtccttggcctgag

SEQ ID NO: 145005 - DNA, 285 bp, Zea Mays
agctaagcagttttgatattgaactaaacaaatgcgtttagactactatattgtgccctgtaaacttactctgggcgatcgctggcgcagggcaataatggacatgagctatggcaagcttggatccgtccttgaccagattgcgcagcgcccacagaagggtgctcctcccgtcgctgacctcttcgggcaccgcgacgaacacctcgtgtgcggccagctcgtcctgcagcagggagcttggggtggcggcggggctgcatcgtgcgctccgcagcggctccc

SEQ ID NO: 145006 - DNA, 541 bp, Zea Mays
aaaacaaaaagaaaataatggatagcctcgacctgggccttttcccttttctcccgcaacccatttccaaaactccaccaccgccaacccatttcgcgcaccacaaccacccgactggtggggcccgatcgtcagccagtctccctcgcgcgccgacggcgtggccacactggccagctcttcttgccgcattcgctcaacgactttgtgactgcatgcggacctacgcgtcggcctcaccacgctcacgctctcccgcctgagtcactagcaactaggctcaggatgtcagcaccatctccctcctacctaccgccgagatcttctccgctcctgtgtcaccgaccccgcgaaaaccatgggccattctggactactcctttttttcttgttcttccccgaaccaaccggctgtagaccccccacgccggagtataaagcgggaccgaacccccctcgtctgcagccaccgcgagccgagagccaccattgccgcagatcccaccgtcgccgacccgattattctgcgggtgaatctcac

SEQ ID NO: 145007 - DNA, 407 bp, Zea Mays
tacatgaaattgtgaatggctatgatcaggacgttgcctctcaggagttgttaaccaaattgagtctacataatggtcaatatggtcatttttcactgtctcaaggccttattcgtcataagggccggttgttgctggcaggcaattctactttgcagcacaacgtcatcgcagcaatgcatgacactgctctgggaggccattcaagggttcctgtgacatatcaaaaactgaagaagttcttttattggccgggcatgaaagctgcagtgcatcagtatgtgaattcttgttccatttgccagcaagctaaaccagaccgttccaagtatccaggtttacttcaacctttggagattcctcaacaagtgtgacacactatttcactggattttattgaaggtctt

SEQ ID NO: 145008 - DNA, 360 bp, Zea Mays
cgagaacgtcgttgagatataacgacccagggagaatcgaggcacctactgaggtgaccggttgagtggaaccgtttccaacaacgatcaaggagggataggaggaatgggggatgggagcgagaaagcgtgcctgcagtgggttggtgtggtaggaagcactggagttgatgacccagtcagatgagggtggggccatcgtcatggtactgaacacgatggtgatggaggcgtggtcctcggggcaggagctagggcggagctggcggtgtcggtggcacgccgtagggacgcgttggaggcacgccataggaagacgtcggaagcacccagtagagaggcactgtcatgagagctggc

SEQ ID NO: 145009 - DNA, 1874 bp, Zea Mays
acacgaccagcaaaccaaccaaaaacaacgacttagaaggctgtcaccagaaggaagctagcagaattaatcgtagacataaagccttcatgaaaaggaaaatacacaaaaccatgcatgaccatttctagctaagtctgagtttattacaggggggaatcacaaaccccggcgggttgcagctaaccacgccacacctagagtcgcaaactttttaggggagagttttacatcatctgccatccaggtaggataatatgcatcagaaaaaacatcaacagttaaaagttccgaaggtggaagtctaccagaagaacaacaaaacgcaaacaccatctgagacattaacatttttaactacagatgcgtctgtctaccggtctccatccaaaatttctattgaaaatttctttaaccagtcttcggatttgcaagcttccttcctgtagggtccttccttccgtctttgtgtggatcatggcattaacattttttaaccacagatatgtttgcccaccggtctccatacaaaatttctattgaatttttttaaccagtctttggatttgcaagctttcttcctacagggtcctttcttccgtctttgtctggattagagtccaaacattcattcaaaagcaccatatagggaaaataacattagtgtatactatgttttttttcatcgaaacaaacatcattcctaatcctccagaggatccataggaccacactatagcccatcctattttttttaatttataaatctattctccaaacatattttcatcatctttgtaagtacgtgcacgttcagtgccatactaatcaccctccaagtgaaatacacaatctggcaatcgaaaatatgtgttgtgtggtttccagacaaccacactagtaacagttaaagtcttttttccagtttctgttttttaagttttcttttgataaaactttatttttgggtatttgagccttccaaataaactagaaaggaaccttatccacagagctcctacatttgagataaaggaatttaacagaaaatcatttttttattaatagaccagatagctttatctcttgaatcatcaagattaatgtcattacatatgtttttcaactcctccaacaactgagcattttcttcatgtaatcttcttctaaattttagaaattcacaatttttggacagagcaatattaacatttatttctttatttaaagaaagctcaaataatattttgaatctaactgaaaagggggaatcaccattccacacttcagtccagaagctggtggaatttccatttccattttttttgctgttcttgtagaatagctcttgaacttcaagaatccctttccaaaattgcgactgcccttgcttcttttgcagactcatcggtttgtctctcatatatttttttctaaccacagtttgccagagaccctcttgaaaaccacacaacacattttttttgattgtcggattgcgtctttcacttggagggtgattagtatggcgctgaacgtgcacataatgcccaaagatactgaaaatatgtttggagaatggatttataaatttaaaaagaaaagtagggtgagttgcagtgcggttttatggaccatcaggaggattagaaatgatgcttgtttcaatgaaaaaacataatatacactaatgctattttccttatgtgttgcttttggatgaatgcttgtaccctgatccagacaaagatggaaggaaggatcctagaggaagaaagcttgcaaatccgaaaactggttaaaaaaattttcaatagaaattttgaagggagaccggtgaacaaacgcatctgtggttaaaaaatattaatgtc

SEQ ID NO: 145010 - DNA, 901 bp, Zea Mays
gcccccccaaaacacatgaaacacgaagcaacaaccaaaagacccaaaagaaactaatgaacatccagaggagctgttaggaaagatatcccttttgctcctactgcctcccatagatgtctgtcctcaccagcttggatcagtgcagtcacgatactaggtgagataccatcaaacacacatttgtttatatgattacagatggtccatgccccaaaataatcaggctgtttaatctccctgtcaattgttcacccaccgaatcattgactctgtgccaccattccaagaaactaaacatggctgtttggggggctagagaatgaagaccaaattgcttgagccaacggaaccaaaattgccttgagaagacacaggacactagaagaggatcaagagtctcgtcctcttggtcgcacaacaagcaactttctaggtgctccatccccctgcgggataagcgatgagcgatctgctgtccagcatttgttgtgtgccactaaccacataaagaaccgacatttagaaggtgacaattctttaaaggaacccaatccgaagtacacccggtggacgacacttgagaaacaagtcctcgatttcctcatgacctccatgactcaagaagtcatgactcaagtttcaacctccgatatcctccaagaggtgtggtctgagctccaaaagaccaacgtgtcgtagtctagggcaaagactatgaacacaaggatcgccctagcaacaaacagaaaaagtaacatggctatgctagaatatgttaccaaaataaagtctcttgcagatgaaatgtcatctcaaggaagaacatagatgaagagtacaaccaggtaatctctactctagtggcccgtgttgagcaggtcaccatggctgaagccac

SEQ ID NO: 145011 - DNA, 335 bp, Zea Mays
agagtatgctctttgctgatgatgtggtggtagttgatgggaagaggttaatagaaagttggagttgtggtgaagtcgaaaggtttcagacttagtaggactaagaccgagtacatgatgtgtgatttcagtgcgactagacataaggatggagatgttacctttgatgggcaactggtggctaaggagtattttcggtacttaggatcgatgctacaaaatgatggttacattgaagaatatgttaagctagaatttcagtcggttgattgaaatggtgtcatgcttctagcgtcctatgtgacaagagggtgccaccaaagtttaaaggtaag

SEQ ID NO: 145012 - DNA, 289 bp, Zea Mays
caacataccaaatgaaacaatagcaacttcaataattttggactgcgcttactatggtagatattttcagaatcagataaactcatctatatttgtcccgaatatttgatttatctgtcttggtgaatttgctagagaaataatcccaattaatttctctacgcacgatcttttcctagttctgaaattaggatttgaaatatatacaaaggagccaggctaaaacgagatcgacttcaataatttactctgcgtgatttaattaaagtcagccaaaatcttatctgct

SEQ ID NO: 145013 - DNA, 281 bp, Zea Mays
acgaaggtggccatggggtagcctgcaactttgctgccaagggagaagcatcatcaatagcaaagttaccatggtaaaagtcatcataccatccatcatcgttggttggactttcttgacgaagctctctgtgttgaggccttcgtccttgatcatcctgcgtgatatggcgcatttcttctgcagctttgtcgatcttcctctgaagtttggctaaacaaagcatcttctctcttttcctctgtacttgctgatgtatagcttctaggtctctaatttcc

SEQ ID NO: 145014 - DNA, 620 bp, Zea Mays
ggaacggatgggttagttctaatagctggttacacacctccttgtactaggtagagcatccacacgtggctagaggcatcattcgacggtggtggggcacggcgaggtcaggagctccatggtctagggtgtcgaagtcagtagagtttcctccctagtaagttgtagatgccccaaacaccggcgaagctcatggcatctgtggtgaggacaaaggtactctggtggggggaggatcatacttggaagtctcgacgatggcggtattggcactggtgtgagggctcggggtctaagaaggttgtagagctcttggtgaagtaagcatggggtgccatgggtcaacttttagagggccatgccattgatgatggggaggggtgatgacaagggtagcacggctagggccattgttttatgctagtgaaatcgcttgagtttatggcacgggcatccgacgaggaaaatgggggagcaacgaccaaggtgaagacatgaggtctctactgctagatgacgggcgcgagagtggtgtcctagtcaggggcaaaatcagcgttgatgtgtgcgccgttgaatagagagcaagcaggaggtcgtggatgactgccgcgcccgcg

SEQ ID NO: 145015 - DNA, 397 bp, Zea Mays
caggcgatgaaagtcattgatgaacgggccaacgaacatgggtgggacgaagccgtagtccacctcagaggtagggcgccagcgagggaggttccacctaattcgttgtggccgctgaggacaacgtcgccaacatgtgaggaggagctgtcaagaatgggaagttaaggttaatatacgacaccaacaacgagaaggggaagcacttgtgaggattacgtggttggttacacacgcaaaagataattggttgttagaagaaacgtgggggagaaaaatagatctacgcacgacgtcttctatgatgatgcgatggtgtgaaagaatctgaacaagtgaggcgaagacgaagaaagatataggaggatgatggagtgctcatggtggttgtatggtt

SEQ ID NO: 145016 - DNA, 335 bp, Zea Mays
ggccggcaaggataactaccgccgtttcattaataatggttgaggtgaatatatcactttatatagatcgatgtggtgttgtgaagtgagccccaaaacaatcatggaatatatcgatgcacatgcacacgtacaatacattatactagtggaaactgtattctacatgtcgccatgtcggcatctatgtagcttatgatgattgttggtgaacgacaatgttccccgtgtggtcgttgtcacgcttttgggccatgaaaggccggtccgtattatagcaaacatactaatactctatcatatactactgtacaagaaacagtcctgctgctggc

SEQ ID NO: 145017 - DNA, 628 bp, Zea Mays
atcaaaatcatctatatacttttagcaggatcgaaatcagagggtgggcccatcctgtccaccctctagatccgcaaatgcagccaaagcgttttttagcagtttggtaacatcaccagcagaagacgagttaaaagaaagaatgacagcaccggatattgtgaatttgaacaatttgcctttcagggttcctgcgccctcgccgatgggacgatgtctccacggtgcttgatgggccgacaacgcagtctctcaccggtggactaaaatgaacatgaatgcgtacacagtagttttgtgtacgttaacataaaaaatacagaatattctgttgtacatagtagtcaatcaatttaactgttgtagatcattccattgtgttcatccaaaaattgttggataatagtttgccatcagtcctatatacaagcatattagtgcaagatataggtctctagcagttgcatgtcaagaagtcgagataactcactgtagattgtttatcttctttattagtaccaccaattttggatgttaaggagttagacattgcatagacttacacttccaaaaggttttgcacgtacactgaaaaggataagtacatctggcaagaaaatattaggct

SEQ ID NO: 145018 - DNA, 831 bp, Zea Mays
cgaataccagccttggtgccccgaacctaaggttggcgggtagcactgcctccgaaccatagaccatgaagaacagggtatttccatgcagagctcgactaggttgagttctcaagctccaaaccacatacggtagctctctgatccactttcctgtaaacttttcatttttgtcaaacactttcttcctgagtgcttccagtatcattccattggccctttccacctgaccattggctcttgggtgtgctactgatgcgtacttgatctggatactccgttgttcgcagaaatcaaagaattcagagctagtgaagttggatcccaggtcggttatgatgctattcggtatcccaaatctgaatattatgtcttgtatgaactccacttccttggctgaggttaaaaaagcaatatgcttgtactctatccatttggtgaacttatcaatggcaaccaacatgtgggtatggcctccctgagcttttttgaaggctccaatcatgtccagcccccagcacgcaaatgttcatgttacaggtataatctgcagctgctgtgccggtaaatgttgttgctttgacaagaactggcaagcttcacatctctggactaactcggtgacatcattctttgttgttggccaatagaaaccagacctaaaaactttcccaaccagagttctggatgctgcatgtattccacattgtccggcgtggatttcatccaatagttacttccccgtagttgaggaaatgcacttcatgaggactcctgtcgcaccccttctgtacagtgcaccccctatgagggtgtagtgggccgactgtc

SEQ ID NO: 145019 - DNA, 703 bp, Zea Mays
aaaaatttgtgatgaaggagaccaatacaataaggtcatgacatagccctacagatttgactgaacatcattcacaataattaatgaagtaaaggaccatctgaaatgttattgacactttgagctactcaaataaacaatgaccattactttggcgcgggtaaggttagactttttgggttaccctaggatgaatcatgctgaaactttagtaaatggtcaattgtagtggaaagtgggcaccaaaaaatgtggcacaacacttgacagtttaaggcagattcgaagtgtagccgtagtgtagggtttcaaaaatatgggaatctgcagagcaatagggcgtaatcgtttggagtaccattcgtttcctaaatatctaagtgtagccgtagtgtagccaagctgcatgttacacaatggcctcgtcatgccgaagcttagtttcaagggactcattaccatgctcataagtttttcccttcccttctcatcagcttttacataaaaccattcatttgtccaaccggtaggccacttggtccgatagccaatcactggagcttttgtgtctttccagtatgcaaaattgtagcatccggagttcttatgcaaaccatctgcccttgctttggcttgatagtgaagctcatggactctgcaaaacccttcgacattagtagtttttccttgacttcgtaaagcc

SEQ ID NO: 145020 - DNA, 465 bp, Zea Mays
ctgatacttcttcagagacaggaacagaaggtccagcgtcctggtccaagcatgacaatcaccaaagtcatctcttcttcttctcctcctcagaaggtgcagttggacgactgacctggcgaagacgctttgggtgagtaccctaaggcttttaggtttccactgttcgatcaagctctggtataactgcaacaaccattgtttcagcaggggccgagtcagaagactctccagccaacatatcaagcatatcatttatttctgcatcacccggactcgctggcatctcaaaatgaacttgccgctcatcattggggagatcacaaagagaagcaaccaagacctcaatatcttcgagagaaggtcgcactctaagacctagaccactatcaccagcaggaggattggacacgaagttgaaaaaggacttagcaggtggcagattccaatcagagaatgcaacag

SEQ ID NO: 145021 - DNA, 524 bp, Zea Mays
ttgttcttgaagtgactgggatctccgcagtgccaacacgcattcgctggtggttggttgcttgcaactgagggggcatgaaaggagctctgactctgctgactgaactgtgatgaggtgggtccagctggtctactgaagcttggttccttgggtggaaatccaaaggatcgagttttctggtgccggtcttgctgctgagctcggaggacttggaatttcctcttgagatggcctttttcttcttcctttgccctttccacttgcatggctttgttggagaggtgcgagaaactgaggaagtcttggctggctaggatggtcttgagttctgatctgagcccctttaggaagcggaccatcttcttgacttcgatgctgacgtcatccggcgcgtagcggccaactccatgaatttgtgcacgtactcactgacagatctttcgtcttgagtcagttcccggaattcatcttccttgagctggacgatcccttggggcacatggtgttctcggaaagcagtt

SEQ ID NO: 145022 - DNA, 396 bp, Zea Mays
gtcaatataaatttctgcatacttttctgtccggtgtgtggtatgtactagcaagaaatgcgctgtcttggtcaacctatccacaatgacccaaatagaatcatggtgccgggaggtattgggcaatcccataataaaatccatgcaaatgtcctcccatttccaagatggtatgggaaggggctgtaaggtgtctgccatcttcaaatgactggccttgactctttggcaagtgtcgcattcagatatatacttagcaatctccctcttcattctggtccaccagtacaaggatctaagatcatgatacatcttgttactgtcggggtgcatggaaaatttggaaaggtgagcttcatccaatattttctttctaagctcgggatttttaggaac

SEQ ID NO: 145023 - DNA, 348 bp, Zea Mays
atggtttcgagttagagattagtggtttacggttcgtatgatttggtcgatgtgtgaatatacatgtgaatatgtatgtttataaaaatgtcgtggtgtatgtcgtgccttagatagtgataataataggcaagcctatgtgtatgttattcagcgggctatgtcgttgctctagttagccgactgttagatggctttggttaagctcgtaatcacggtgatttgcttgttttggtctagacacgcatggttatggtcgcgggtaaaattagtggtgttcatgtgatgtctaagtaaaaatgcaaattagtgtgtgaagggcgcaatcgatatacacatttataccgg

SEQ ID NO: 145024 - DNA, 389 bp, Zea Mays
gtggtgggttacttgcatgcttgataattgtgtaaaccgtaaattatatcatcttatcaccatcaatggctttgtaggctgtttttgctgcagtaactctaaaacgactgatgtcgtagatctgatttgtttcgatgagcgctcccttttttcggcaagatttgctggtatttcagcatacatactattaccctaacactttgtttgcttgttagtaataatattataattgatttgcttgtgttttgatgcacttaaaggtgatgagttaagaaagtggataagaattttatttctgtactttgtgtcataccttgcaatctgataggaccatgtcgatgtgttgcaagggaccattttcagcggcgccatggaaagaccattttctt

SEQ ID NO: 145025 - DNA, 466 bp, Zea Mays
gtccagccggagacctcaccggcggccaccgtgacccagtgactttgccgcggtgtcacccatgccgcgatctccctcactctgtcttctaccaacgtggtaaacatgcgctagcaaagctatccggggccggagatcgtctgccgggtcgccgtggctataaatagcacggtggtccacggcggggtatgaacttcgcacacatagtgagttgattgatgcctaaattcgcactgcctctgccccctcctcccaaattggttcagcacgataaaactagagtcccttgccgccgtatagccccaagctccgccctcaatttcatccaagcacgtcgtgacgccattttcccccaaatcagtccgccgcgccaccatgaacagctctatcgtggccagcccactcgggtaagactctgtccaattcatgtgttgtttttattgctctatgtgctagggaagcttac

SEQ ID NO: 145026 - DNA, 817 bp, Zea Mays
ggcgtgagagtcgggtggtgtacccacccatgcacatcactgatagacatgcacatgttgggcatagcgatgaactggcataggcgagggcactagagagagccccatgggtgggagcgatgtcaaaggagatgccactagggctgaaggcggagccacgaaggtccctagggacccaacatgggttgacaggggtggcacacgggttaataagggccaacagggtggctcggagggaggctgggggagcaggagccatgagggccatcgggtcaccgactgaagctgtgtttggggacctgtagttggaaaaacaaatagtggctgacaattggttgccacgaaatcaaggtcatggagaaaatccaactcaggaagggaggcggtgggtggttcggaagtaggcgagaaagggaaatccatcttgtcgaagatgacatgacgggagatcaagagacgatgagtggtgaggttaggacaccagtaccctttgtgatcaggggagtacccgagggagacacaacgagcagagcgaggagcaagcttatggggagtagtatcagaaaggttgggtagcatgtgatggaatacgtcttggaggcgttgtggaggactgcagattagtattgcagtttttggatagcagccttgttgcgttgtggaggactgcagtttgtggagctttttactgtgttttagcatctagaggacaacatctttgtgctgcagcttttaactgcactttagcatctagaggacaacacctgtgtgctgtagttgcatctagtggacaacacctttgtgctgcagcttttga

SEQ ID NO: 145027 - DNA, 428 bp, Zea Mays
tctcgtgactcgattcgcggcgcagatcatggcgggccagtagaagccttgacagatcaccttggcagcaagggccctaggcaccgcgtgagagccgcaagtcccgctgtggacttcgcgtagaatttggacaccttcggtctcggtgacgcatttaagcatgggttggctgacccccttcttgtaaagctggccctcaatgagtgcaaagtctcggctttggtgcttgaggcgcttggcctcattgatgtcgcttggatggtaatatccctgcaggaacagggtgattggcgctcgccagtcttcggtcatgatgaggttgactatgcggtggccttcggtgtcgttggttatttgtaggccctttgggctgcggacggctggcgtgccgatgacatggtagaacacgtcggagggcaaggcctcgc

SEQ ID NO: 145028 - DNA, 373 bp, Zea Mays
tggtgggtttatttctgtttttcacaaggtctactttgcaaaaccaccgcccgaaggggtatcggccgatatcagcagtctgatcacataccgactcaccagattagaaacaacatatcctgaatcggcattaaacaggggccctaggatcagatgtgtacggtctggatgttatgttacccgaaccaatgtgggtcgcccgatcagccatcaacgcactagattcatttccaccgaatcggtaacatctttctaatctgggccatcgatgcccgatccaacagcgcatgacccggccctaacctcggacgagcacggcggcagcgccgctcggcgcgcacggcgagggcacaccgaagaagttgcggtttcc

SEQ ID NO: 145029 - DNA, 589 bp, Zea Mays
atgagttgcccccatacaaagatatggtggcttcatagctcatcaggtattgtttgggtccgacaagacatcatacaccgaaagttgtggtggtctatacaatggttctcatggtctggcctgtaaatctactactaaaggagaagtgttatcatacaaaaagtgtcattgttgtgagcttcgggttgggtatttctcacgttatggtagtatggctcttatggttgctcatcctgttgtctcatgtggcacaattcttctgatgcttcatcaatttatcattgcaattaggagaccaaaatcgtcttatctttccgcttctctactagcttcgagattatggatttcttggtcgaggtcgtcatgtggtggaggatctatgacatttcacttgccttttgtatgaccattgcctgtaagaggatatgtgtcttcaagttgattttgatcttttgggaaaagtacagagcaggcggttgtgtttctctttagaggcatgatgaagagttattccttgtcgtgagttcatcggaggtggatgacaatattggtcacctgttcagattcctgaagagaaccaaaacagggc

SEQ ID NO: 145030 - DNA, 304 bp, Zea Mays
gtcagtgtttgtgatctgaccgcgtaccacggggttacccatgtgatgcttttgggtaggacgacgtcattgatcgcgactcgatggttcatgctgtaacacaacggagtgacgtgcagacttattcaggttcgggctgtgtggagttgcgtaataccctacttcttgtggtggttctggtattgatgtgaggattacaagctgagagttgggggtgttgtaggataagatgagatgaaatggtaggggattcctcccggccttatatatgcgaccagggagagttatcccgtacaagtgataa

SEQ ID NO: 145031 - DNA, 499 bp, Zea Mays
gaactgaccggaatggggctgggcgcggtgaggtgggtttcggcgcggcggaagcttgatttggggaaaaaccaaaattctagctcactggtgatcggctgggggcgatactaggtggtttggttcttgactaccctatggagctcgcggcggggtcaatttatacacatcgcgagcggtggtcgcgaatttggacgagacacacggcggccggaggtgaagaagaacgcgggtgtggtgaatacgtgtccagtgtcgtggcagtaactccggtggtcgacgggaagttagagggagtcacggcgatgcggtggcgagattggtacacgcggcgcaaggccggagaacgacggtcaccggcgaagctatccgcgccagccgcaaagcagaaaaggaagacgacggtgagtcaccggagtgacgtccagtgcacggcggtgaagatctttctacccagagcgttatccccgagccctgtgcacgaatccaaacgccagcg

SEQ ID NO: 145032 - DNA, 311 bp, Zea Mays
caagcttggggatgaaccattaaagaccacgccatttctatgcttccacagcatccaagcacccagagcgaccaaagagtcaaaacccttcttactcagcccatctagccgagcactattggaacaccaccagagatcaaaatcctcaatatcatgtcctggaatgaagccctgcagtccaaaagtcctgaacaattcgaaccagaaaagacgtgcaaaggagcagcccaccagcaagtgattgatcgactcatcatgttggtcacaaagtgggcaaagaagcgactgagtcaagcctcttttagccaacc

SEQ ID NO: 145033 - DNA, 629 bp, Zea Mays
cacggttcgtcgattgggatcggctagcgaggcgacgggcgtctgatctccttcctcctgacgaagcgacagcggctagccatccgcattcagtgattcaagcgcacgtcaagatgcttgatgtgccactgatggcatgtctaaaaagtgaagcttctttgtcgattcgggagtcagccttgagcttcttcctcggcatgcttctttgctgttggtggagtttcgagctgcagctgttacgttacgatcagtgatggcgaagaccactgggagcacctccatattacttccatgtaattttctagggatgaaagcggatcggatcagagcggatagtgctcttcccatatcctaatccgtatttttttgtcggattcggagcggagcggagcggatattgcatggatacggatatggatgcggattttttcggatgctggagatggtgcggagtcggatcggaaatggactatatgcggatttaaatagtagaattttgagcttgttaatacttcacaaactaaagttagggaacatgactaaaacataattcgcatgctatagaaagtaaaactatgtcctcgttagaaaatagaaaacacccatagttaaacatgtaatgttagcaa

SEQ ID NO: 145034 - DNA, 385 bp, Zea Mays
ttcaacagcaatggcttcacaactttccaaggcagctacacgggcttgagctgtggtgagatccacatggagctgacggttgctcttctctgcatcttcttctcgagcaatcatctgatggtggtgccgagcaaagaaatcatactgtgcatcaagggtgagcaggtatgcagtgaggtacacgactgtggggtcgtcctcaagcggttgcttcccttccaatgcacacatcctggccatccaaactggacggtctctctgaaagggcggaaagaatctgagcagtgtgtcggccacttcttcttcatagatctgacacagggccctcaatgccttgcgggcgacgacttggcaggtgtctttgaatctgtgcccagcagcagtg

SEQ ID NO: 145035 - DNA, 717 bp, Zea Mays
aaaaaacctaattcaagacggtttattggacgaaatgacttaaacaaatacctttttcagatggtttatcgaacaaaatgacttaaacaaatacctttttcagacggttataaattaaaaattgtcttatataatatcttttaagacggtttataaccatcttaaatgtgggacatcttttgcgactccatcaaaattggacacttcataagcgtcttaataactgaaaattaaccgtctcatatagcatgatctgtagtagtaagggttcttctgcaaaaaggtcgggtcgaaggggtatgagtggagatcagccgtccgattagaaaccgagcgccaggattcgatcccacatatactgaacaggtatgcaataccaaaccttagatccgaactcaacggaccagatttaatcatggcccaacctatcctaaccgcccttttttcgatctacggtcgtgatcaaacttgcgaaagggtatctcgacgtctaatctccaccgtccaaaactggatggacgaccgaggagtcaccttcttccctcccccccggcagcaaagcacggccgcccctacctagccgcggcggggccattgccacaacccccaatctcgtgacttcgcacattaaacttcaatcaggcgacaccacacatataagagagtaaggcgaacatgatggaggcatcctcacagtgattagcgcgacgtagcacc

SEQ ID NO: 145036 - DNA, 677 bp, Zea Mays
gacattacactagtggcgagcatcattctacagcccccaggcaacacgtcaggtccgggaatttgtgaagggttgtaccacttgctagaagaacaaaatgaaacatttacatctcgcgggactgcttcagcctttaccagtactatcagaggtttggagtgacattgcaatggactttgtggaaggtttccccaaagttggcgacaaatcagtagttctcactgtggtggacatattctctaagtttgcacattttattccgcttggtcacccatacacggctgcgtcggtagccaaggcattcttcgaggggattgtgcaacttcatggtattccatgctccatagtaagcgaccgggataaagtctttactagccttttttggatagaactgttctgcttggctggcgtcaagcttctcctgagctcagcattccatccacagacggatggtcagtcagaggtggtaaataggatcattgtcatgtatcttcgctgcttggcaggcgacagacccaagacttggttacaatggctcctttgggccgagttttgttacaattcttcttaccagacggctgttaagtgtactcctttcataattgtttatgggtgtgaccctccaacccagttgtcctatcagccgggaacagcttgtgtcgtggcagtagatcaac

SEQ ID NO: 145037 - DNA, 372 bp, Zea Mays
caccactcttcaacatccccagtagcaagagtggttcttcgacacaggtgcctccagtcacatgacttccgacgctggtatactttcccacctctcctcttatcatcatctaccctctaacattgttgttggcaatggcaaccttcttcctgtcacttccactggcaccactcaactttctcacaattttcgtcttaacaatgtccttgtttcaccgtctctcattaaagatttaatttctgttcgccaattcaccactgacaataattgttctgtggaatttgaccctcttggctgctctgtgaaggatcttcccactcggcgcatgatccttcggtgtgatagctccagcccactctacccactcaggag

SEQ ID NO: 145038 - DNA, 333 bp, Zea Mays
tagaaatcaagaaggctgcggaagaaaggagaaatcggcagacctaattctcggatcaagaagggaacgaagactaccgactgatgggtatcctctatggcgacggtaatcccctgctagatccgccaagagcatagttcctttggcgacaggaccccaatttcaacgaggtggagaagatcggactcaaaaacaacagaagcatagttgccgcaaaatagaagttagatgttagtgtcgattgggggaatgacaggggcggcggttccctacttcttcttcctgggcgccatcagaccatgcgggcaagcagggttgagcgcattcacaaag

SEQ ID NO: 145039 - DNA, 373 bp, Zea Mays
ctagctagccttgatgaccttctcaaggaatttggggacactttagaaaaagagttcggtagtacctcagagaacgctcgcgtgtagtacgactggtagtagcagtacgcttgtaatgtattggtgtaatgaataaaataacttggttgaaaacaattggcatgtgcataatagtgactctctccccttggtagatggcttcggataaaaccacgcctaccgcctccgggattggagcagggtttcccctgagagctgaaagagaaatcggtagagaggaaagtgagacccacctccccgcacctccagaactacccttagatttagcccaagttctagccaaccaaacccgactcatcgaggtcctcacccg

SEQ ID NO: 145040 - DNA, 318 bp, Zea Mays
ctggcccgactcaagagggtttggctgctgctgagcttggaaaattgagccaaaagcaaccgtcgcagcaacagcttcaataagtgaacgatcctccacccgcccgacaggggcattaatgtccccgtagccttcaagcacagagctgacggaaatcctgggatttaggttgatctcttcttcctttgtcacacgaacagttgaatccagcaccacattttccaagggctgctcaacctcaacacgctgtgtgccagccccgaggaaaggagaaactgaacgcattacaggcacaaggtctgaaacaatgcagctata

SEQ ID NO: 145041 - DNA, 506 bp, Zea Mays
ggagaggatcatctagtagtattctagctctacctgctttccccactcgtgctctcgccattcgctcgaaccccgaagaactggcagtggcaggtaggttcgcgctcgtctccgccttccagtgattcccctgccgctgcatttcccccggattctctccggtttcaactgccgtaaggtcgtgcctgtggtttacctaagtacttgcactttggacgaggagagagcttcataggccattcattgctggaggtttgatggaacattgattcgtgtttggtggttttgactttgaattatagcggtctcaatactggatcctcctcctatctagctgctactagtagtttttcacctcttccactggtcatagaatcttctcttgtatgtcaatattaagtacaaggggacggaacttaatttcgcccctctaccctaaatgcagccaatctgccaatgttgctttacttgtttcatgaaatttgtcttcctccatgatttgtcgc

SEQ ID NO: 145042 - DNA, 453 bp, Zea Mays
attgggtaatgtgatctatgaccatgatacagaaataggggttatacctagggtggaggtgagtcgggctagcgaggtcatggcatgtcggtgcagtgacgaggcgactaggtacaagattagggttgccaaggtactctggctcagcttgaagggctcttctctgttgataaaggaacataagactgtcaatacaatatttcgatagcacccctagcacggtaaggtttccaaaacttgcaagaaaactaacatcacgatggctggcatgcacatatatatcaacgacacgatgaccaacaactacatatgtattttcaatccatacaaaagaatatatccaaccacatatataataatgtcaagatggatgacaagtactactatgactcatataacttctactactactaccactactactactattgctactatttctactaccatcac

SEQ ID NO: 145043 - DNA, 1298 bp, Zea Mays
atcatttgcagcggttcaaacggatttttatactaaaaaatggcgttaataaaagaaatgcaagttctgtatgtaaatcaaaatgagcactcattccagcattttttatgattgtatagttttaggaacagctttggcatacaacatattgctcaacatcccttttttggttggtgttctgatatgtggagcaagcacgttcctgcttctagctttacagatctatggggtaagattctcatgtcatcataaaatatacatgttattaatatagtttgtcaccacctaagtttgataaatgtcatatgcaatttcatttatctaaaaaaactacataagatacttttaggagaaaatatgtgtgtgtgtgtctatatacaattcattccatttcacttgtagaaaggagaagtaatactttctgttatggaggccaaataatgagggtacaaatctcaaaagaattatgtagcacagaaaaattgatgcctagacaataagatatatagtgcttcaactttggttagcatataactgacatgtgaaccattctttgtttttcttgaaggttaggaaaatagagctcataggagttatttttatgctccttatcgccatttccttctttgttgaactgagtactgtcaatcctcctatgggtgaggtaattcaaggtctatttatcccgagattgcgaggggtttatgctgtgtcagatgcaattgcactatttagcgtcctcgttgtgccgtaagtatatgtaattttcaattaggatcttgatgtgaaataatccatcttttccaaaaatatgtcacaataagatttaaaatttgtcccacaatcttgtcattgtaggttatggatgactaatttggctatcaatattcattccaacccttttgcatgtgtctaatctgacgatcactgtctctcataccgagtagctcatatgcatacacgaaatggggaagattaaacctttcttatttcttagtgctagaaacaatatactatcactacaatagctaaggcacctagataaattacctttagtgctaacctatcttaatattgttgtactgatgtattttgggatgaggggatatcaaatatgcatctctcactactttttatcattaggcataatctcttcctgcattcatcactggtggtatcaagaaaaatatcaccttctccaaaaggatttaaggtaagtgatcattatcataaaaaatcactttcaatgattagcacattgcaactcaagttaaatttggaatctaagaaggtcacgc

SEQ ID NO: 145044 - DNA, 670 bp, Zea Mays
caacgatcgacgcgagatctccggcgactcgttcctctcgcgcgcgtataaggttcatccgtgtcgcgttccggtgacccgttcctctccttgacccccttctcgcgtgggcccaatttccccagcgccaatcggcgccgccattgttgcgcccgtggagaaagaaagtgccgccgcgactgtccctctcttcgccgtgtgatctcgacccgatagtgcgtgagggtaatcaagggagctgcgcggagtgatttcgtggcttctccgcgcgtgtgagccaccagacgccctggaatcgctcgccgtacttcgctgttgcggccaaactcgccctgcgccgtgggcggtgaccttgctgccgtgaaacaaggtaatttaccacccgcatgcatccgccatgtccttcacgtcgtttagcattggtcaattttgggatcggggaaaggggctggccggattttatcctcgccggtgagccagtcgccgtgggagccatgcttcgccgcctgggcgcgctcgggttggggaggcagacgcggatcgtcgatctcacgaccgacggctcggatcagtctacgcttacccgtttggtaggttacatcctgcgcgtcgatcagagatcgtatggctgtcacgccatcaatgttatgtagagtacggaccgtaggat

SEQ ID NO: 145045 - DNA, 749 bp, Zea Mays
gcttcgccgacccgggccatctgctagagctggaagaggatcagcccctcgccgagctggttcggtcatggaatcgacttccaagacaacatcgtcaaaaagtttaggcgctctgtgcatcatctgtcctcctccccggtcgggggcttccatctgcttgctgttttccgcagatatacctttaggctcacggaggcctcggttagcttggccttgcactcctgcttgggaggcactccgtctgggtttcatgttcagttcttggtggatcgacacttccgtttcactgttgccaataaggctgttggcctagaggtggctgatcttcaccgtgtcatctctccacactttgatgtctacttacatctcttgcgggacggcggcgatctgtgatgacccgtggccgagggtagcagatctactctgacgtgagctctccttgctacggacgaggccaccacgatgacaaccgaggaagaactctccaggtaagtaagactcaggaatgattcgaatcactggatttctgttattcaattcgtatatgtcttctcaaccaccagatctagtatttatagaagtctatcttcctattacaagcctattaacaggccattaagcagattaacaggccgcacacaggcccatctcacaaatataagaataccaatactactactaggcgataatgcaacttcacatacctaggcatcaaacatcttcccctcgcctagagtttgattgtccca

SEQ ID NO: 145046 - DNA, 671 bp, Zea Mays
gccgcgtgcaggaggaggggagaatcgggagatcttgggtacacgggagaaaccccccagccaccattgacagccgctgctccgtcgttgcgttctctggggttgcgcgggcgctgtcccgatcgtgccgcacttgtagggcacctcgggggagagcgaattcctgtggggtggctcctaattgctcaccgacgtaccgcgaccaccgtaatccgcatcttctggtggctgagctcctactccatcttcttacggtggtaagcacctctgttaagttcccctcagtcccctctatgcaaagcttcatttggacttgagaatcagtcaccacatcttgttttcgcgcaaccccggtgatggcgccgccgtggtagctgcttgcaccggccgctgttgtgtcgggagggatgaagtgggcgcgaccgtgggatgctcgttcaatgatcgggattgggtcctggagttgtgaggattgatgcatccgggaccgtccgatcgaggttaagcggataagattaaatctccatctagtgttccaacgttgtgatctgggtcgttcgtcgggtatccaacggtggatatgtgatcaaatgtatttgaaatctgcaccattgatcctcaatccggtggaccagaaaacctaccggttcagtgcttagccaatttaatcc

SEQ ID NO: 145047 - DNA, 332 bp, Zea Mays
tttatgttactatgaatggcccttcccatagtggcgacaatttgtgccgtcctcccccgttagaattcggtggaggacgagatctcccactgcgaagaattgatgtcatatggccttatcatgatagcgcctcagagtatgttgataccgggctgactgaatcaccgtattcaatcattcttcttctagtatatcaacatcctccagtctagtagcctcagcttctgctatgttttcaaagattaacctcggtgccccaaacttgagatcagcgggtagcactgcctccgaaccataaaccataaagaaaggagtgtttccatgtagagctc

SEQ ID NO: 145048 - DNA, 414 bp, Zea Mays
ggtggcgtccaatttcacgaagttgcgctggcggccggagaggaagaaggttactagcgcggtgattcgtggcctattagcatggcaagctccccgacgatcaccgggcatgcacgatgtgattcactgcgacgtggtcaagcgttttagcatgtggcgcacggcggtaatcggccaacggcggcgaggtctatccgaccgatagacgagcaagtgggtacggtgagcttagctgtgaccgagcccgagtcgatccaggcgccaagatctttactcgcccacggttatccgcaagtcacggcgcatgaatcatacggccggcgtgaatcacggcgtgacggtcaccggcggcgaagggggatgaatccgtgatctgtttcagttactgtaccctgggattgttcttcagtcagc

SEQ ID NO: 145049 - DNA, 796 bp, Zea Mays
ctacgtcgtcaccgagaagagcccgtgctcgccttcgtcaccgagaagaggtcgatctgtcgcagctctggtgggcccttgcatccacgtaggaccatgttcagctattgtgagagaggatatatgcaaggcagggcgtggtcacgtgctctgcatcgccgacctctcccgcacgtctcggcactgtcgaggatgggagtcggcgctgtgatcggccagagatttgtaccttcatgcctttaacgtctgcttccccgtcctccccatccactattcgcatttgggggctttgcaatttctccatctctgtgttcctcagtccgtcccccttggtttggggctaccggctaccgctgtccaccgaactcatggggttgcctgatttgctgccggtgccgttcgtgacatagatcttgtgctggcctcgtgggcgcaggtttgttttcctctgcctccatgtctttatcgtctggatgtttgagtgttcctctctagttattattcaaccaatcgtacttgaggggcaccgtagtgccttgagcaagctggaatttccagacgattgtgcgcacatgggttcttgctggatcacggaatgcagatttgtggccagcaggcagtgtagaacattgaagggtggatgctgcgcgatctatgtaaataaataaataaaagtgtcctagcgacatctgtttggttttacttagatgtgtatctactcaaaatgcattgcaatgcttaacctctcggtgaatagaaataacctccaaatagtaaccggtgaccacaaaatgag

SEQ ID NO: 145050 - DNA, 519 bp, Zea Mays
ctaccatctagcgcgatttagcttaattgaatgggtcgaggagcatcaggagaatctaaggacactgaaacaggagagcagagagcatgaacggacctagaacgagctagccacggtgaggtcactatgcgcgatgtttcagaccgatttgggggaaatcccaaattggggctctctggtgagtaattggaggcacgagcgggtggattggatgattgaataccttacggagctgagggtgtgctcaatttatagggctcttgagcgatggctcatgaatttgagctcgcgcggtggcggtcggagagaaagaggtgcactggcgcaagcgattggtggcatttatcgtggcaagctcaccggcgatcaccgtatgggctaagatgactcacggcggcgtggttaaagcaccgaggcatgtgcgcaaggttgtgaggtggctaattccggcgagcctatccaaagcggccgtgactcaagcgggtacggcgaccggagtagaatagtggccggagtcca

SEQ ID NO: 145051 - DNA, 665 bp, Zea Mays
ttcgctttggcggagaggaaattactccgaagccagaaaaggatgaggtggtagtctttaaaagcttctttaaagcaggattaagatttcctttgaatgagatgattgcgtatgttttggagaagtttgggatttatcttcatcagctaactcctaacaccatcgttaggcttaacgtctacatctgggctctccgaagccagggggcagaaccgcttgccgaaggcttctgccgggcacatgagcttcattatcagacaaaagctagagaagatgggttgcacgagaacttcgtctactacaattttgcttatcgcaaagatgcaaagtctccagttatcagctatagtaccaaatggctagctggctggaagactgaatggttttatgtcaaagttgatgagaaaaaggagaagctggttcaaagcccattagaattaatcttcagagagactaggccccggtgcgacatgaaaccgaagagtccatgccaagtttcactgggcgaatttcgagttattgcggagcacattggtactagggatctggtgcaagaattcttagcatttagagtattcccaactttgaaagaatgggacatgtcgaagctcaaaggggaaaagaaagagaaggaacttgttcggttgccctattactataaattc

SEQ ID NO: 145052 - DNA, 293 bp, Zea Mays
gattcaccctcgccggacttcggtcacccgccgccgcgcgtgaaccgagctaaccagtaagtcatcttccaattcctcgcacccacgtcttccccagcacccagtgaagctctctgaaccgttcaattgacctatcatgccctggttaggctggactcctcgccaccgacgagcatctccgcctgcgcacgtggactggccgactctgaccatccccgacggcgacccgcacatcgccgtgatcctcaagacctcccctacatcctcgaccacctcaccggagcagcctcgcc

SEQ ID NO: 145053 - DNA, 968 bp, Zea Mays
ctggtttcgcaggtgtggctgccgcccttcgtcctcgtgccgtgccacactgactcttcgcctcttcgtcccgtcgccacgatatgccgctccagtctatgcgcaacggttcttctcctcccccacatcaaagttcattctgcagtgatttctcataatcatggcaagtgttaccaccattaatggccttcaatctccttcaaaccggctatatttctcccttccctctccagctataaaagttgaggtgcgctcacctccttctcctcgcccctgctcttttctccccgtcgcaatctttctctccctctcgctcctccatgcacgcgtgtgctccaccgttccctgctgctcaaccccgtcccaccgtgccatcctctgtgttcggcatgccgctactcgtctgatttctccttacttgcccgtccgcactccatggtttcgcagctgagcctcgacgccgtttctccgatctccttgcttgttgtgccacgtgcgtgcctgctctgctctactcagctcagtgctgccgtcaacgccgttctgcgctgctgctcaccgttgtctaatgttccccctgcgcagcctctaatcacgccatcgctcgtgtcactgctccattgctatcatacagtgcgccagcccctcctgtaactgcttcgccatcgttcttcgtctcatcagaacacgccatgcctcatcatcaaagcctcgctttgagtgcctcaccgacgtcaccttcagacccccttcgaagttcgccagcatgatgtcgcgggagctctctagacgccaccattcattggagttcgcctcggcatccttctccagtgacgtcgttacctcgctactcgtggccgcaccatcgcaccagtagctacgccatcatcgcgccacgtcaagcaccgtcataaaagcgtcgtcgtgcccccgtagatcccgtgttctgctctcttcgtgtgccatcc

SEQ ID NO: 145054 - DNA, 383 bp, Zea Mays
ccgctctcaggcaaagctaggataggggcgtccaccaacttgctcttcaatgtctgataactgacctcgcaatcaccggaccagacgaagagaacacccttctccaagagtctagtcaaaggcttagcaatgctggaaaaatttggtacgaagcaccgataatatccagcgagccccaagaaacttcggattttagagacactaagggtctcttccacttcaccacagccgcaacattcttgggatcaaccgtaatgccctgctgattaatcacatgcctcaggaaagccacttcggacagccaaaaggaacacttcttcaacttaccataaaactgattcttccttagggcacccagaacgagacggagatgatgctcatgc

SEQ ID NO: 145055 - DNA, 287 bp, Zea Mays
ctgatcttgttgtcgctgttataaatgaatacgacacaagtgccattcttaccaagagactccatttcttcatgcatagcacccatccacttttcactatcagtagacaatatagcttctgaataattcaatggttcctgaacattatcaacttcttcagcaacagccaaagcaaaagcaacattgcactcttgaatcagtctttgggtccgaactatctgcctcctagctcgaccttcagcaagagactggggatgagactccacaacaggtgatgaattttcagc

SEQ ID NO: 145056 - DNA, 636 bp, Zea Mays
atccgtactagtaaatattgcatgtactaacactacggtctcggaaagtggagttgagggagagggtcccatggtggcgacatgagtgaggggctaggcacggtgcgagtaaggagaggggacgatggggtcgtgtggaaggaggtaagggattactgtacgttggagtagggatgacagcgggtcagataaaatgcgggtaagccatttatccgcccgccaacatatccacgcctctagtgcttatccatgcccgcgagagcttgcgggtaaaattttcgacccgtacccgtactcgcaggatatccgcggatatcgggcaacccgttacccgccagaaaataccatacgagtatgtggtcatgttcatttcaccaagaacatcaacaacttaacagacataatataatggcaaagaacatagttcaaacttcaaagtccacaaacatgatcgatcatccacaaacataagtctcaaacataagtccacaaacatgatcgactgtgttgtggcctgtgggcctgtggcatggggatattttgataggctagtaaattaagtaggtaacgagtaataccaacgggcaaaattttatatccgtcacccgtgggtgagaagtgttgcccgtatcctta

SEQ ID NO: 145057 - DNA, 489 bp, Zea Mays
gcaaaagtcgcctaagggtgcagccggaatagctcaacaagagcgttattcgaagtcttttctttacaagacattccgagcaaaagtcacctaagggtgcagccagaacaacacaacagaagcatcaaacgaagtcttttattcaaaagacatcgcaacaattacctaagggcgcagccggaataacgttaatcgaagtctatcattacaaaggcactccgcacaaagccacccatgtacgcagccggaacaatacaagcgtacgaatacgaccaacaggccacaccaccattacaattacatacacacggcgagggcatcacctattacacatacacgacgagggcatcgcctatcacatcggctcaaccttcggaatgatacccatctccctgtaattaaacaacattatcctcaattcctcaccctcaaaaagctcccgaagatccccttcgcctatgcccgcccaatttggcaaagacaacaatt

SEQ ID NO: 145058 - DNA, 519 bp, Zea Mays
ggcaaaattggtttgactaattttggatgattatttttcaagttatgcatatattaagttctctgcaatatttaaaagaaaagtaaattcgaaaaggaaaagaaatacagatttgcgctgaagtccctgggttttctcccccttcttctctcacaaaacagccctcggtctactatttgcatgagtcactgaccttgcacaaaacccctggacttattctaaatctaacccgcgctccctggctaacggaaacagtacccgtggtaaaatcacggcggcgaggcttaccggcggcagtagagctccggcggggtggttagtggcgtcggggaggtcacggcggtcacgtcggtgtgtgggtcggtgtcagaggtggtcggagctgtcctggccacgagcgcaggcaacgaaggtcgtcgacggctcctgctccggccaaaccacggcggtagggttcaattaaagtgcacgaggagctccacagggtgatgtagaggccatgggcgcaaggaattgaga

SEQ ID NO: 145059 - DNA, 384 bp, Zea Mays
ggtgatcatagcccatcctaggagacgagcccagctagcccatgaccacatatggtgggcctcagccctgagtcgggctggcgatccagcaatcttatggctttgggtggccacaatggtctcgtcttgacctagcagaagtgggtaccccatatttagggttccgacagtaaccttgtctaacccatcattcttatacatggtaagcaatggaccagcgacatagacaacacaaactggtaaggactcatttttctcccttcttctttctcctacttctcctttgctctccaattgtttctccaacgtagtttcatggataaggggagatgaagccccctttaagatccgtccctgatggtaagggggagtgcttgtttggga

SEQ ID NO: 145060 - DNA, 360 bp, Zea Mays
cactggactgggccttattgtttggtaagcacaagggtccctgtgcaagataacctagactcagggaacaactgaggtggatggcgggtcattttaaggatttcagaggggctcttaagcaaaatgcaccgcgaagggatattctctattatcatctgtaggatcttgatcgtgtggttcggattagattacccactcagcgaaccggtacacgatctatgccgttcaatccaattctgacgccccagatttaattaccctaactcgactctcgcctgcacgatcgaaatgggacggctcatgccatacccgaccgaatcagtattccgattcaaatcccggtttcgcttttgaatccag

SEQ ID NO: 145061 - DNA, 532 bp, Zea Mays
caatacttcccagactcagaaagatgaagatctttggcttcatctctagtaggctgccggaaatcatgtatcttgatcttgtcgccagagatatcattgtcagaaaaaccaagaatgtgagcaaatcgacgatagctcaccttataccaactaccttcaatgtagaagttcacataagggtagttgtatggactctccacgtcagctggcttgatccataaagttgagtagaattgggcaatcacttcattccaatcatattggaatgtcatgatactcttcatctttttcctttcacaggccctcaatgcatgtgtcatctctggatccccaatggcctcacaaccttcccagttgatataacgttgatgcaggataggttgatgcttcttggggagaatgacggaattataaaagtccacatgatgaagcgtccaaaagcagtttccatcaatcctggcatcgcgaatgcgcaatgcaggattttggaaacgaagatcctgaaggagagcagagcctccactggcagtga

SEQ ID NO: 145062 - DNA, 697 bp, Zea Mays
agaagggggtatgagaataaacagaaatgagagatttaggcaagatcaacatccgatacttgagaacaggttataggagataaccagataacggggcagaatcaatgaaggatcagagattcggatgataaggcaaacatgattcacaagaaaaaggattatcagatccaggcgaaaggagaggtaggcaaacaggatcagctaggaggatcgacagaaatgctatgaagttttaggggcaaggattcatggaaagaaacatggccttgataggggttgcacaactagacaccaaacaacatttttttatataacatgtgcagaaggagacgtgggttggtctagcggtcaagctgtggggttctataagatgtgcaggtgtaaattcaagggtaaaacacacaaggtttagaaaacaccaacacaagaatgattttttaagaggtttcacttgctaaactcaaggttgtttgggtgggggtcttttatgggaaaaacaggcaacaatttttattggttagagggaaaatgtactaaatagttaccatacctcctagacagcatggcaagggaaacacataacacgacctagtcaagacttaccaatctggcacaaggtaaaacatttcttatagttcctaacataacagtacatcacattattcacaagttcttattattggaataaaggtgagag

SEQ ID NO: 145063 - DNA, 426 bp, Zea Mays
ttgtatgtctaacacttgctctcttcgcatggtcgtttagcccccgaacattccaagaaaaaatagcacaattttgattcataaggaaaagactgccactccacttaacacagcatgctgccaccatacatggatcagcaggagagcctgctgaaaaatcctaacaggaggggaaacctccaaacaaggactcgccgagcaaaaacacagcctggccacaaccgacaaccagaaagaacaacagaggtacacaggcaagctgggggaccttgaccagcgcccagaagtaataacgccagcggagatacaaccgctccgaaagagcctgaccatctgagaacacattggtcaccaaaagcaccaccaaccggcccagacaaagcagctcagttgacccccgcctcgacatcttcgatggccggcatc

SEQ ID NO: 145064 - DNA, 1057 bp, Zea Mays
ccctgcttgtgtggacggcgggttgattttacaaaagccgaggggctctttatgaggtttggctcggctgtattagccccgtgcacatcacaaccgatagatatgagatcaatgtcacatattcaaccaacgaaggggtaagcgcctagtctaattgcagccgtacgattttgatccaacgactttgatcactctgaccgaaccgtcaagctgatctaatcccaaccgtttctccgtgaatcaacggcccatgattgtcatccttctactgacatgagctccgcggcggagccggggtatctacgacggcccatcgctggagttgggcgcccctcccaactctgaacaccccatcgaccaacccccggtgtaaaacaaatatctcgcatcgaagaaaaatgtgaggggcttcttacgtgtgattacgtgatgccggtggatacccacgccacggggaggtgcgttctgtggcagaacccgaaactccagcgacaaattctcgtgccccgattgccctgcaatgcttgaaaacgatgctcctgtgttcattgcatccaggcaacactcctggcccacatgccaaactctggtcgcctgcacagacgaataacgacggcggcgacatctttggcctcaacctcactctctcacggtggtcggtggtgttggtacgaccccgtttggggatggctaggggcattgagtcatcagatttatagcccatggagggcaaagtctgagcggaagaggtggcgcgttgccaggcttactggggatctcgaccattctgttacactagaacgagcgagaggggaggaatcacgccgacctgatggccctacatgcgcgtgactgtgagcgcagaagtgagagttgatctgacgaaggggggtcccacgcagtggagggtgttggccgaggaggacttacgcgaacttgggcttggagctgggttcagacgcgacaaagaagatgggtctgaccaaggtggcccgcgaccgcgagctagtgacataaacacatgtgcgcgtggggaagacattgcccaacacccggg

SEQ ID NO: 145065 - DNA, 689 bp, Zea Mays
ctcagaggcatccaggcaaaggaaggctgcggcggcgagcgctgactgttctaaacctcaatgatcatggtgtccgcttcgaagcgcttccgttgaggtgggattgagatttgatttcttcctcattcttactattcagttcaagttagggtttcaaactttttaagctgcatttgcgatacgattggaatcttttcctgacgacatatcggcgtacagtaccagcactttcttctccacaacacgttcttgtttctctattctgcgacttccaaatcttcgcctcacccccaacgccgccatggtggtccggctacgatatcgtacgatgtggcgacatttgcttcttcgttgctgtgggcagtgctatagtactaacacagtaggagggaggtagggagtagccatgcttttgccaccagccgctaccgccctgccattgttgggcttctcgcctcttccagcacgagaatggaagtggagtggggccaatggatgtgcggttgctagcctttcatttcctttctttgttcaaattcgtgagatttgaaaattgaatgcgaggtttgagggaaggaagttgcaatgatttgggtaaatgcagagaatttgccatatgctcatggacagaaaaaagcaactatcagaaggttttgacatctccactacaccttaagggtacaatgagg

SEQ ID NO: 145066 - DNA, 483 bp, Zea Mays
aactctacacctatgcaccacaatccaagagacatattacacatacactcaaccatgttagtgcacacaattcaatctaagacgttactctattaacaatcactcatcacaaaaccaaatccattagggcacatctcaactttgtgatcgcgtatagaacttcctttctattttaattaaaggaagatttcttgccacttacgacgatataatgagacatgcagagtcagcataaacaagacaaatatatacttgtggctaatgacaaaattgcataaggataatctatatttgtaaagaaaaaatgttggatatgtaagaccagatctagcagacttcctaaccctatccctagttagcgtgtccagcagactacaatagtaccgcacatccatctccgtttcaagtagtagcgtgcatccgcatcggggcaactgttggctttgagcgtgcattcttctcttacagcagcctccctatccc

SEQ ID NO: 145067 - DNA, 518 bp, Zea Mays
ctgacctcgaacgccattgttaggctcagcttgtatatctgggctcctcgaagccaaggaaaaagtgccaacgccgaagggttctactgggtatacgagcttcattatcagacaaaggcaagagctgatggcctgcacaagaacttcggatgctacaacttcacatatcggaaggacacaaaggccctcgtgataggctaccgcaccaaatggccgaccggatggacgaatgagtggttttacgtgaaagctgatgagaagaaaagggagaaaatcatgagcatggtgatgagtccgttgagattgaacttcgacatgactcgacccttgtgcaatatgcagttggggtctccttgccagttggccgaagtggagttcagggtcgtggctgagcatatcagcactagagacttagtgcaagaatacttggcgaacaggacatttcagagctctggcagttggggaatgccgaagaagaaataagaaggtaaaaagtatgaacttgtccgactgcctta

SEQ ID NO: 145068 - DNA, 621 bp, Zea Mays
cgattttatgccgagcaaattagtttgaactcgacgactaaaatgtttggggtaaaataatccaaatcgtgcatcgtccgagtgaaatcgtgcgcgaggttatgatccaatttatccttcagcacactattttggcgacgaagtcaagtgtatattagcagatgagatttatctggtttcaattaaatcaaacacagagtatggatgtaagtaagaattatcggtgaggataatggtctctatgtcctaattaccttcgtctatcattaatttggatcaacacaaatttgatttaatctggatttaaatttaagtttgaatcgataattcaaaaattttggtgacgcatactcaagttgaatcaagctctcatttagtgtcttagataagaatcattagaggtaataaacgttacattatgggcaatatatatacgtgtatatatagttggtaaaaaacgaaaatgtggataaatcctcctttttcttatcctttaacccaccgttcatgaagcaggattattcttcacgtcacattactcctcaacgtgtcttttctctggcctaatccatccacgctcgatctccagcacaaaaaaatctcttcacgtcggcatccagc

SEQ ID NO: 145069 - DNA, 477 bp, Zea Mays
cactaacccgcgacgaaacttaatctgacaggacggcggcggcgcacgcaaacacggtagcggctatggcggtggacggtcaacttggcacctaggccgtaatccttcaatctaagacgctctacgtggtaagtggatgaaggcgaattccatgggttcagtactttaccgaggcaaggtcatgcgcggttggttcgcggtgaagcacggcgtagcagaaaatcccaactccggcgtgagatccccatgggtccagcgagcttcacctcagttactccctcctacggcttccaagcgatcaatccgagtctagcatgactacaatggggacccaacccacccccgggtggttgcccgcagcggcggcgggttatcaccgtgcggaacacggaggcacgacggtgattgtggcgtatcggcagcggcaaagggcacgagagggcggtctctgaggtgcggccaggtctttatcccctg

SEQ ID NO: 145070 - DNA, 945 bp, Zea Mays
ttctcacatgctccaaccttttgcagttcatggacgtaagttcattgcaagaggccttgcctagcccagatctgccaaccttccttgatggtttacctgaaagatggttctccagcagctcttgtgcttatgttccatcagcgtcagcgtcacatggtatgctctcctggatctaccaatgattatatttctaccgttcacagcttcacatcaaaaccaccggatatgactggaacaacctgtgcgtattcaggtggactgccgtgccttgtcgagcggggccccaactgttccttgctgtgagttgctcccctctgatgcatgctttattgtaaaccagctgagctgctatctgctgatatctgctttcccgccggtccaggaatataccagttggcactttatcagctggaaatccttttgtatagagggcatcacagtgaaaataatctgcgtcttggacttggcatgttcctttggtttggtgatcttagagctaggaatcttttctgtgcgaaccgggacaccttgcaaggttaccagaggaggtggggaatatgatagcgtccccaggacccactggaggaatgtttagtaattgtgagtttctgatggaggaatgtgtgtattctttctcggttcatgtactctaggacatgattattcagcactaccgggcatcctcccggtacatttctttctgatagttacaacgatacatggcttcatccagttattcaagttgttcaggtacatgtacatctcttgcggatattgcttcaggacatcaacatacatgggtatgtcggctgggtgggaactatacaacatatatattgtagaagtcgtagtcacagccggattaaagccgtagcgaacaaaacgacagcttacagtctataaccaatatttttacagctacagcccaatcaaactgtccttagc

SEQ ID NO: 145071 - DNA, 563 bp, Zea Mays
gctttgaccaaaaccaaaccattcggtccagatgatgggtataaaatcaattttttgttcgctcgaaaattctaattagttctctccctctccccaactctctcgacttctccctccctaagcacctccttcctttgtcttcttccacaacttcggtaaaaagataaagactgcttagtactagcgtgacttacatggcccctcgtcggtgagcatgtcgccgttgagcggtctcgtggccgtgtcctaaggctcacacacatctttgcacccaagaccaatagtcgtgttgcctattctcatgacttgtcggtgtcttctacgaccaaggtaaatcttaagaatcacttctctttcctttatctacttgagtggtccgaatttaggggattagggttagggttttgggatttgaggataccgggatataattacaaagtgggttctatttttctttttctcgtcctctacttgttgttctaatggggtaggaacatgaatctgagtcttaggaggggttttgcttggattcatcctaaaattgaaggtaacgaagcatctag

SEQ ID NO: 145072 - DNA, 624 bp, Zea Mays
cgggggagggacggcacaaattgtcgccactatgggaagggccattcatagtagcagaagtcactcggcctggatcatatcgtcttactcaaatggacgacacggaaattgggaactcatggaatatagaacatctcaggaagttttacccctagctagatttcaaaagctattgggacggccttgtattctgtaaattgggaaattcatcatcaataaaaagactccattctcaaaggcactcaaactgtttactgtcaacctgcacgcttactcgactcagggtgaccactataccctactaacggagcaatcgacttaagtcgacgacgacttaaggcggtgtgacatgctcacgcttacttaactcagggtgaccactataccctactaatggagcaatcgacttaagtcggcgacgacttaaggcggtgtgacatgctcacacttacttaacttagggtgaccactataccctactaacggagcaatcgacttaagtcggtgacgacttaaggcggtgtgacatgctcatgcttacttaacttagggtgaccactataccctactaacagagcaatcgacttaagttggcgatgacttaaggcggtgtgacatgctcac

SEQ ID NO: 145073 - DNA, 914 bp, Zea Mays
gatggatgagtcatatggccatcgcaatttattatggggacctgacatataacagcccagtactaccacccaaccaataatttcttcactaactttctcattcgttggtgaaggtactaactgctaccaatcaaaggactatcaaggttaacgccttaacggttaacctacacattggactattgaagcagaactgacagcacagtaaacctcaattcacgagcacaccctcaaatgaatcctgcatggttttcattcagtaaccaggctggagaatgctctgaacatgctgtggtttcgagatgaacgtctactacagtgatcacgaaccgacgaacagtttccagaaactgagactgaacccgcgatgctgaactgaattcatgctgttctcttcagccttgtaggacaccgaaagcgatggagacgactacgatgaggacgattatgatacgactactacccggacagcgatcagcgacttgtatcacttcaaacccccttgctcaccagcaccgaacctttagtgagcggatcctccattcctccagcatttgctctgtctacatatgttcaagttcgattgtttaatgctggagtttcttctttacgacatactatctcatgtcaatgtgtttggcagcggcactaaacttgttgctatagaagtaaaatactctcggttcgttatcacagtataactttggtgattttgttacgatgtctagtgttagtctaccactttcttttcgagcttctccacgatattgcttctcttgtgagagcaaatatataataggaaacgtatctggtgcaaaccaatctctccccaaccaactgtttctagaaactgatcgaggctgaacccgcggtgctgaactgaatgcatgctgttcccttcagccttgtaggac

SEQ ID NO: 145074 - DNA, 482 bp, Zea Mays
cgagaatagttttatggcgcgcaggagaagatgcaaggggagattgggggcgcatcacgaccgcaaagatatgcgtagctcgtcacgaaggattagcgtcgctaaaatttggggcagatttacgatatctgttggacctcagtttttatgtttcccttcctaaaaaacatattagcggtcagattaatagccttttggagatgctaacctaatcacctcaatcacatgcatgcatatcgtgagtaactacccgccctaatcagacggacgcggatagctatggcacacgccatacttgttctagcccatggccttggctcacgctggccaaagcattcctcttctccgcttcgctgcaggtcatagtttgtgtgtgaggctaaacagccttatcaacagcttctatgtgagttccccgttgtctcgcttctccgtaggctgtcgctcgcccgctctaccctctgctggactgccactcacgt

SEQ ID NO: 145075 - DNA, 442 bp, Zea Mays
agggggcctcttttgtaaaatgtacgggccgaaggggtatcgggctatttgggccgttggatcgtcttcgcacggtgcagattagatcgcatcattatccaagcggtacgcactagggaccaccggatccgtgatcgacggcccatattcaatcaagtcggatacaatccccaccacacaatctcccatccacggtctaagttcaatacatgaagggatatgtttcttttaatctgattcgctcactgcaagatcgacggtcgaggcaacactaagcgaaagggtatgtgtgttatgatctcagccgtccacataggatctgatgtcccaggcgctttcttccccaacccgcgcccagacggcggcgccgccctgcgcccaaggcagagactcgccggcgcaatgtccagtactgggttctggccgttgatgcggaatacga

SEQ ID NO: 145076 - DNA, 271 bp, Zea Mays
gtcgggcggtcttgccttatagcttggacggttcggcgtggcggtgcgtatggtccgcgcgggaacaaattcagttagggatcctaatttcttgtggaatttgttagcaaactctacgagatttgtttgagaaccaactatgaatgggtctagacttccccttatataaatgaaggggtacgaccgtaacacaaccacaatcaaatgtatgaaaccaatttatcttatttgccttattcttttcatgcattaagagtaggagtaatttagc

SEQ ID NO: 145077 - DNA, 450 bp, Zea Mays
gaataatcctttgccgagtagtaggaatatagttcaaatatctatctcgctcgttgttttcccaagaaactttatctagttactgccctaggttcccaatttatttcttccgcatatacctagttttgctactcttggattgcacttacccccatctaaatactagtgtgtatatttttcaagtttacacttcatttcaagtttgagttagtaagttcaactctagcctaccacttccatgtggagattatgatacatagaatacatctagtgaaaggttatatcggtctttgtgcgcttgcaaagtaaactcaaattggcataagaaccaccaatacttgcacaccacaagccaagagacatgttgaacaaacacacctacacctcggttagtccacatgactcaacccaagatgctacacttgatgtcaatcactcatcacagcccaa

SEQ ID NO: 145078 - DNA, 747 bp, Zea Mays
gcggcgaagtcgcctaagccgaggcaggcatggccctagagactctgaggtcgccggagttggccaggatcggtgagggggcccggtgaacacgatggcggggttctgtccttgagaacgggactatggacgagggaatggcgggaggggcgctccaagcgggttgggactactctgacgagcaatctcggcaacagggagggggaatcgggtgcgccgaggccagtgctagctccggtgagggaggggggaacacccagagccaaaacgcgagcactgggcgaggctgaattgaccggacgccgtgagggtgcggcagactggtgaggcagaactccggtgagcacggactgactacggcaaggcaaaatctggacagctagagcacgggaaaaggttcctcacatcaggacgacgctcgagaaaggatgttgtgtctggagctccgagtggccaaaacggtgggcgcgcttctccggcgagctctgatggtggtggctgagcgcgagagagaccgagattgggcaaaatgaggcaggggagggagagcgggtgcgggcagggctcaaaagggagctacgggatgtgggcaggcgacgcgtctaactatctcggagtgcgtgcgcgggcgggtcagtggcggttgcggggaggacagagctgacaagcagggcccacggcgtagaggaacgggcgcctgcggggggaaacagttcagcgctgacgagccaggcccactgtgcaaac

SEQ ID NO: 145079 - DNA, 683 bp, Zea Mays
cgggctaggaccatactgaattactgatccaccgggttgtcagttcgccagttcgaactgctatcagaacggcgccatctaggcatctatagccatcgcctgttcatcaatacagtaatgacctatttggatcatgggagatacttaaatgaaacatgctgcactttgttgctggaattgtcacgtgatgtgcttttgatgcagggaatgagccaaataatacattataagttgcagatcttgaacttttgctgcatggtaatgagccaaataatatgttatttgtagaaatatatggtctctttaatataactctatcactaagaaatgaatctaaatcttgaattcatgtggatctatcaaggaataacttcaccgtggaccatcaaagttgttgtggttccgaaaactgggggaaaacaaaatttgtgttcggtgatgatgctagtgcggactcactccgaatggtaaatcaaagagattcggagagagggtgtgaggcaaagggtttatactggtccaggcttgctccctactctagtgtagtgctgatcgtagtattactctagagcatgttacaactggtgtgcttgtctaggaagggggcaatgcccttttatatctcaagggtaggaagttacagtgggacttgtattctattagagagagatcgactccccggg

SEQ ID NO: 145080 - DNA, 439 bp, Zea Mays
gcattcacccaatcaacatcaagtagagcttcatctacacgggtaggttcaatacaagatataaaagagaaatgttcacaaaatgaagttatgcgagagcgagtttgaacacccttactaatatcacctacaatttgatcaaccgggtgatccttcacaatagaatgatgaattacttgataccgtttgataattgctagttgaagcattaggaggaaccgaatgtcttgaagtaccttgatcatgagtatccatagtttcatcattttgttggctttggtgatcttcttcatttagagttgaagatgaaggaatgaccaccacactattttcatcatcatcttcctttggctttatttcaccaatggccattattttcattgcatttatcaattgagttccaccaacatcatcaagattatcactctcatcttgagac

SEQ ID NO: 145081 - DNA, 444 bp, Zea Mays
ttgttataccaaaatgaaagaccattagtcctggcaaaactttgatgcagactcgttggcatgtagtcacataaaaattgaagtaatcgccgtttgaaatcggtctggcagacgtactgttcaccagaattcagaaagatctcgccggggataagatcgccactgcgactggggatcggactgcggccacggtaaaaatctttcgcgacgtggcgcgaaaaccctgaggtggcgctgcccggttaatcggcgatcaccggatgctcgccgtagctctgcccgcgcgggtgagctcgcagcgcgttcacagctcagtgaccctcatccatctccagccatctacctataaattgagcccgagcactgcttcttcaccacatcacacacatgagtgcttgtgcaatcgactcaattccactggagaactcagacagaccacaaatc

SEQ ID NO: 145082 - DNA, 380 bp, Zea Mays
cagagatcgacggctacggttttatgagatctaaatctaatctgagccgtccagggagttatcaacgaccaaggttttacgatgtacagatccgatctctaccatcggatctctaatcgatggtctcaagcggacgtgcccgaaccaattcctggcttctaatctttaccgtccatcaccgaatgaatggccacgggaccatcatccccatccgatggcgcaacaggcggcggtgccctgctccacggtggcgcaatgccggcgagtaggcggaccggcgcacacgtgggtgaggtcctacacgggcgtgtcctaaacgtatagagggatgagtcgatctggacgagggagttctcaccgagtgttttgcagccccgagc

SEQ ID NO: 145083 - DNA, 755 bp, Zea Mays
atggattagaacagaagtgagataaatactgagctgaacagtttgttagcacatttagaagagcaaggtcgataacatgaggagaggaggatggaaatctagccacggacgcgtcattggtttcatggagcgagggcgtgtcctatcatatttctttcttttattttttattttttttcattttctaactatgtaaaaaaggattctgtaggatttgtcacctttgtcgttcacttgctgcagcaatagcgtcgacaacggtgatagagaacgacgtcgtttcgtaggagcggaatatgcgattgggaacctccacagttatcgaacaaatgaactgcaatatagaaaaattaccgaataaaggaaatacagtattgaaaatcagtcgcgacggcgctggagaaggctaagaagtatggaggaggaaaaaaaggaaaatatggaagatatcgaacatcaagaacttagggttgttacctgcaagagaagtagcgttcacgacggcgcctaagaacgacgatgcggatagagagatttgttgtcacaggacctaagaagagcaagatcgagagactgaggagaggaggatggaaacctagccgtcaggagcagtagacgcgttctcggctgccaggagcgagggcgtgcctctcacgttgctttccttcccttttctttcttttgcccgttttcttattggccggagtgtccaatgcccagccttctctggaacttacgggaggatttcttattgg

SEQ ID NO: 145084 - DNA, 453 bp, Zea Mays
tttatagcctctaacggcggtggcgtccaatttcaccagggtgtgctggcggccggagaagagaaacggtactggcgcaacgaattcgtgtcctacgccgtggcagtcactccggtgatcaacagggagcgagagcaggtcacggcgatgcagtggaagtgcctggacacgcggcgcaagaccggaaggcggcggtcaccggcgtgcttatcggattccgccgcggtgagcttggtacggcggccggaatattttactggccggacttatccacggcggtgatctttacacgacttcaagtgttatccagtcgatctggtcatgaatcacggcggcgagggcacgaatctacgcgcggcgatcgtcggcggtgaactgaactgagctggcagcttaatccatttcagtttactgtaccatcgcgaattgcattcagtcggtctgacagagtag

SEQ ID NO: 145085 - DNA, 324 bp, Zea Mays
ccaccgtcaagaacatggctaatcacagccctaggtccacaacatagccaacgagcaacaacaggtagatgtcccccctcgacgttaacctcagcaacaagggcacgacggtagcacgccaagaggtagaggtccccaacaatacatgaagttttattgtgtcttccatggcgaggactcagatcatccaactagggattgccctggagaccaaagaaactaaagagcacatggctagggccacccccgcaaacaatcaatgagccatcactcatacctactaccccaccaatgtcaaccccagcagcaaaattacaatcagag

SEQ ID NO: 145086 - DNA, 745 bp, Zea Mays
aataatgagtaggctcaatctagccatacaaaatgctcattgtggctaatgaggcagagttcgccagtctcctgggcaaggaaatcgagggagtcgtaggtgatctagatcctaggagaaaaagtctcgctcccagtggatgatgagtagctggccatcagagcgaaagaagacgctttggcacgtttgcagtcccctacctagcgcgccaattgtcgtggttttggaaaccgaggggcaatagatttgtgtttggtggcgatgcaagtgtggactcacggagattcaaacaaggaactgaggcacaaggtttatactggttcaggcattcaccctagtccaatgtactgctgattgtagtattgctctatggtgtgttacaactggtgtgcttctatgaagaaagaaagttgcccaacccttttatagctcaagggtggactttacagtgggaactcgtattctactgggagggagcttggcttgctgcctttggatggcgtagtcctcctgacatcgtctgtagggtcgtgcgttgtcgtacccctagtatggcgttccatcttgtccatttggtatacaaatccctatagcttgctcgacgtcagcgttacggtacctagtgggtcccacaaagtgggcttatggtaaggttcaaggtcgtgtccggtactgcttcatcttccgtcataccccttgcgtcattataaaacatgcataggtatccacccgatatggggtattg

SEQ ID NO: 145087 - DNA, 402 bp, Zea Mays
agaagttgaggagacatgtggaactagtggaggagatggtatacaggtatgtaatgttttaatatgtattttgtaacaaattattcatcataatatattgatgaggtatgaaacaataaaatttcaggacgatgatgaagacaatagagacatcgaaagagatggtgaattggatgaaaggaataacaaggttttgatcatattgttgtgaatgtttatttgtaaatgacatatactgagctttcaaccaaatttttaggaaattcaagacgtatctaatatacttgaacggggtgtggacaatgttcaaatacctatgccgatacgtccattagaagaggtaatatctttaacaactatattgatttgcggttatacatataaatgatttataggtttgtg

SEQ ID NO: 145088 - DNA, 1154 bp, Zea Mays
tccagattcagtgtcataggcatagagcaaagtattaggcgtatatcagagtactacgcatagagcaaggtattaggcatcatagacataagactggtctgctcaaatctttgccaggtgttgccttagccaaagcacatggtgtttaggctccatcttcacaaagccatcaccttgccttttgttgtccaataggtaggtaaggcaagtcatcaattcctcatcagtgaaacctggaatactcatgcaaatttgatacagatcagggtggacatctgtggtctggactacaacaggtgcttggacagcttcagccaatttgttcacagctccagttagtcctgtcataatccccagctcttcatcactgagtctccttttctttccatatgattcataggaactaccagcaccagcaccactatgagaagggctgacaccagcacaaccagaagcagtagtaccaacaagacatggttcttcagatgcaccagcaccttcagcgatatccgagatggtgccaaggggctcatttgaggccatggcataccagccagtagcctgcccagctccaaatataatttgcatctgcacatagttttcaattggcacattgaggaattcagcatcctttgggttgtcttttgtatggcctagtaggtgttcatcatcaaggatgattgtgaatgtattctcatcccaatgagcaccgcttaggtccttgagcctacaaaccctgatccattttgacgccacttcctcaaatgattgtagacctgggtgcctatgacctcttggccactgaattcagtcaatgccttagcaacagagttgacatggatctccttgaaccctttatctgtttttactccttgcccaaccaagtctgcaaacttcctcaggataaaggctgacatcacaggggtccagcacatggcagtccttgaggtactactgctcaacttccatagtctatatacatttgataagacatttataaaactgaagtcataagaagaggtaataaaatggcatcatagcataggaccagttttctcagcatataaaaaataattaagcttcaaagcagaaagtacaatttctcagattgtaaagctgataacaaaaaacatcactgcagatcacaatttctc

SEQ ID NO: 145089 - DNA, 272 bp, Zea Mays
gtcagtcacccatatagtccgatactggtctgactgtgagttctgctaaactttggactcgattcaaactcgaaggagtaagtaaatgagccaggtctctatagtcgatttgtaactggtttatagagctacaactttgatacagatgaatggtcaagttgctacacaaaatttggagcaaatcgcccccaaataagctctgtcatgtgttctgaatggtgttctgatggtacagtgaactgaatgagatcataggtgcagtgcaccttgcc

SEQ ID NO: 145090 - DNA, 416 bp, Zea Mays
aagggttctactggcccgctataatctgcgccgcgaatcgagtcacgaggtcgtgcgaagcctgccagaagttttctccttgatcgggcaacccttcgcaattcacaaagctgattgcccacacatggccacttcaacgctgggggctggacattgtcgggccactacccacggcccaagggaacctcaagttcaccttcgttgtcgtcgagtattttaccaagtggatcgaagcaagggaagtatccacagtaacgtcgaagactgcccagaaattcttctggcaaaacattgtttgccaattcggagtcccgtccgagctcacagtcgacaatggcaaacagtttgacagccaggacttcagggacttctgcttctccattggcaccaagctcgccttcgcctcagtatatcac

SEQ ID NO: 145091 - DNA, 332 bp, Zea Mays
tttgatcagttgagaggagctggagtgttctcaaagatagatctgaggtcaggttatcatcagctcaggatccgaccttcggatataccgaagatgacattcatcaccgagtatgggctatatgaatatatagtcatcttcttcgatctgacgaatgcactagctttctttatgtacttgatgaacaatgtgttcatggattaccttgacaaatttgtagtggtgttcatcgatgatatcctcatatattctcaaaatgagaaagagcacgaggagcatttgaagatggtattgcaacagttacgtgagcattagttgtatgccaaggtgag

SEQ ID NO: 145092 - DNA, 324 bp, Zea Mays
ttccctccattcgacggagacaaccccaaattatggcaagctaggtgtgtcgactacttttacatgtatgccgtccaccctagtatatggattacggtttctaccatgaccttttctggccccgcagcgcggtggttacaggctgttaaacctacactgttctccatgtcttgggaggagttctgccaactacttctagaccgctttggcaaacaagaacacgaaatccttatccgtcgtttattccacatcaagcaaaccactactgtcattgcctacattgatcagtttgcccaactgctagaccaactccgtgcctatcag

SEQ ID NO: 145093 - DNA, 475 bp, Zea Mays
aggccaggattagatcgacattaagtcgaacccgcacgtgatacagaccatcggatcgagatctgatggccccgaggcctccacgaccaaatactatctcgatcgcacatcatgcgatcgacgactcagatgcaatcgacaaagggacattctaattctaatatgagccattcattaccgatccgaaggccggagttcgtttctacgtgagttaatctcggcccttagctacgagatccacggtggagacgccttcttctacccctcgacccccagagcggcgacgcaacaaagttctgcggcggagctccaccggtacattgcatggccgcgattccaagccccatggttaacttcctcgatactacacccaggcatcgtacgaagatcgagatgaatggttccttaccatcaacatgacaacggacaacgcggtcatgggcgtttggcggatgcgccatggagtgcgatggcg

SEQ ID NO: 145094 - DNA, 658 bp, Zea Mays
cgcgacgtgcctctagcttgttccgtcgtcgtcgtcgaagaagagcgctctccccctctgcctcgacgaccaccagctcccttccggccgccgctgtcgatcggcaggtggtggacgacgatcgagaggatgagaggagataggagtaaggccacacggccgctggcgccgccaccaccggcgatcggcgagagggacatggtggaggaccctagactgctgaagcaggtgagggagcttcggaggctggtgccagcgtgccgtgagccatgcgggctcggcgagctgttccaggacacggcgacctacatcgaggacttgcaggcgcaggtccaggtcatgcggatgctgctcgacaagctctccgatgaatgacgagttcgcgcgcgcgcgcctgcgcttatacgcgatcgagatgaagtctgctcttcgatcatgtgtccatgcatgatttaggatttgtccgtcgacaggaacatatactagtaccagtatatataaattataaaacaatttattcatacgaattgtttgatcaatttcttgcttcaaaaattatgttcattcaagatttatgggatatgttgtttcatttatccgtacttgtgttccaacatgaaattcttgcttcatactacattattacatatattccgtg

SEQ ID NO: 145095 - DNA, 308 bp, Zea Mays
agctctgttcagcctcttgattggcctggaacacaaatcaccgcatgaattttagcaaagagatcaaaggagcagaaaaaacagaacaaactttatttcttggtaggttgataatgcaagtaccaataaaattttagacaaagacatgtcaacgtagaccatttaaaactaagttattgagaggctaacccatagtccaacttctgaaaccagtttcccaatcatactgcaattctgttgattcttcatcataactttaactgtctcagcatcacatatcctgatcccacttgcactgcctatccaaa

SEQ ID NO: 145096 - DNA, 425 bp, Zea Mays
gtacgagtatgctacgcaatgacaattaataagagccaaggacaaaccctgtccagggttgggctttacctcaagaaaccggtcttcactcatggacaactctggaaacgtctgcttccaggtcaatgctactataaaggaactaggcaatcaaaatgttgacatttcaacatcaaccgcagggtcacaccagtcttcgcttatgttctcacaaggtgcaagcagcaacatggaagacactcctcacaagacagacaccttgtcttcacctctgacacctttgacgcctcagggtagcgtcgccactacaaagtatttggtacgttttccaactgcctacataaatagtatgctgcagcatgtggtggtttattctataccttgatgcaggaaaccgttgacgctggagacactgggtgtgtgac

SEQ ID NO: 145097 - DNA, 379 bp, Zea Mays
gaaccggcctcaggagcatctagcagctcatcatcccttccttctgtatttgcctgatgagaaagactaagatcgctaaactcatgcactcttggatcccggccgtctagaaaaaacatgttgcaacatctcaatgtcactctctgtgagttcaccaaccggacgatcatcatctgaatcagcagccatagcaaagacgtatggctcctcttcattcctaaactcaggactgttcaaggcaataaatccatcaccgaagcagccatgtgccacggtttgaggatcaaccacaagagcagcggtctctcctgcaacatttaccgatgtacaagatcattagtcccacgacaatggaatgagcaaagtgctcgtggtccaa

SEQ ID NO: 145098 - DNA, 518 bp, Zea Mays
gaggtaatgaaagctctaggcttccgttagtgggcgaagccccagccaggaggccgatcgggtcgcgttcggcccactggacgccagcttgcgtcagccatgcataggatagccacgtatcccggctgagacgcgacatgcgatatacgcacgcataaatatatatacaaatgtgcataactcatgcataaatggaatcttttatgccacgaatcatgagaacgaatatttgcatgtgcttgccggttacgactgcataacgatgtgatacatgatagcgtaaaccatgcaaacatttaaaatctcccaccggttttaagataaggaaagacgtgctcttcgtgcgcgtaaataaaggcgcagttacaggaggaaaaaaatacgcacgcataaatcatgcatagaagggatcttttgtaccttgactcacggaaacgaatattaccatgtgcacaccgtttacgactgcataacgatgtgtaacatgatagcataaaccatgcattatataaattttg

SEQ ID NO: 145099 - DNA, 817 bp, Zea Mays
agaggatcatagtttacctccagattttggaaaagttttcatgagaatatggatacgaagttgaattttagttcggcctaccatcgtcagactgatggatagactaaaaagactaatcaagtgttggaggacatgttgagagcttgtgccctttagcgtggtagtagttgggacaagagtctaccttatactgagttctcataatagttgccaggccagtttgaagatgttaccgttcgagactctgtatggcaggaaatgcaggactcctctatattggatcagactaggggaagatagttctttgggtttgaacttattcaataggcagaaaaaaaccaagtccgtataattcgggagaatttgagggtagctcaaaccaggaaaaagagctatgctgataataaaaggaggccactagaatttgaggaaggagattatgtgtacctcaaagtgtcatcacttcgtggaatgaggatattcaaagtcaagggaaaattgtcccctcgctatattggacgaatcagaatttttaggcatgttggaaagatggcctatcaactcgagctacctaataatatatctggtgagcataatgtttatgtctcaacttaagaagtgtctccgtgtccctgaagaacagttaccaatggaagagctcggtgttcagggagatttaacttacacggagtatcctatcaagattcttgatacattgactcgagttgcaaggaatagggtgataaagatgtgcaaagtgcaatggagtcaccatggcaaagatgaagcaacacggggaaagagaagaagagcttcg

SEQ ID NO: 145100 - DNA, 352 bp, Zea Mays
cgaagctgaacaaactgtggttgagggtgaaaatgttgatgaaagtgaagaagactatagcattctgttcccaacaaagcctagtcatcttgaatttgaaaaatctactgtgacggaagatgacatgcctatgatgatgaaattgggttattttggagaggctgagagcaaacttattcgatttgctggagaagaggtaatcctagagccgaagaaggatgaagttgtcgttttcaagagcttcttcagagcagggctgtgattcccccttaatgaaatgataggggtagttttaaaggatcttgagatatatcttcatcagctgactcccaacgctattgttagactcagc

SEQ ID NO: 145101 - DNA, 2059 bp, Zea Mays
acagctgaaagggtcaaacacttccggcccaatttgccagcccattgattgcgcaatggccgcacggccgttccagttcctcctcccgttccacctgaccagctccggctcctcttctatttatacctcgcaaccccgaaaccctaaagcccgcactcgccgccgccatctgcatctacctcctcgtcatgtttggtttcagagatccgccactttcctctgcgttttttttcgggatccttttgtctttccatggtagggtgcgatgacgaggtacacacaaccctgatcaatcgcctccgatggcgatctgatgttcaccttttacctttggttcgtattcgctgagcatccgatcttcttcatctatcgaggccagcattttttgtttctttttttttcttgctcggtttgctttggatcgagggacctggggatccgccgcccttcttcgtgcggcgtcatccagtttttacccctcgaatacggcttgcaggcgcgtcctagccatctcgctctctgcataatcctctgcgagacccgggctcgtatgccacattcgtcgttgtcaaactaaacaaaaaaaataggcttttgtcgcgaagatcccagcagagaggtgcgctgatgcctccctaacaatcataatcttcgcagagaaacgctcatgatccgtggtttcgtggatgtgtgatttggatttttgttccattacatctgtttccacggcgacattttcatgattactgcagcgaactgaacgagggacctatggatggactgctctttgtccgtgttgtgccgtccaagtttgccttcggatagtaaaaccagcaatctggtcacgagatctcgcaagccttttcatgtttgtgggaatggtgtgccaatttgccaaattttgggtttctatcgttatcttcataggtcgtaattttgccaggatatagcgccggaaccccatactgaggtcgtcgttattgcagtcataagcgacgatgaaactttgaacagaccagaatgttcttgcagtcacaagtggttgtctaaatttggatattgaacagaattacttccagttgaacctaccgcttcaacaattggcatacttgcctgagtggctaacgatccatgcaatactgcactattattaattggagcccgagacaccacctcaaatttcataacgtcgctataaaaacaaatattagttttcacaataatgaagactataaaatacttttaatgcctagttttattattctaaaaaatagtttaaaacaatctctaagtacatatataagtcacctaaatataacattatgaaagacaatttgaaatacttttagtgattttataaattgtgctatgttctagaaaatcatgatgcattattgtctaaagggtagtatgtttgtttattgtatagattatataatgtagcttataaataatttaagagaaataaacaacaaagattataactggtagctctttggctctgacttttttaaacgactaattataaaaagaatataaagtagtcctttttgtactacaaagaatccataaatggctctagatctatgataagatattgtcggagaggaaaatctccggctgggcggcagaacgcacccgtcctaaattttaagatgaggagggtctaagcgttttgactgtctattgggagatagatgatagcgagtgtacacgaagatttagagtggtttacgccgtgggagcgtaataccatactccactgtctgtgtgttgtattgagtctgagagcttgagcgcttgtgagcccgtctgagggtttgagtaaacttgagagtttgccttgtaatgttgtgtgacttctgatttatagctcaagggaggcacatacaagaatcctgagccctgacatgtaggcttaggaacataacggaaggaacacattataggagtaactaatgcaagtaacgcttgggctcaggaacataacggaaggaacacattataggagtaactaatgcaagtaacgcctgagcaatctcctggtgccatgatgttc

SEQ ID NO: 145102 - DNA, 719 bp, Zea Mays
cttgagacacaaagcagaatttggcttgccctcacttttttccttgcgtcgtctctatttgaccatacgaaattcatcccaaatgtgtactcatgtttttcgtacatccaccgttgagccgttccaatgtttcaattgtatgtttctttcccatggggcttttctttaacatcatataaaaaaggttatccaaacctacaagaatgtatgctctccatttcttctcttagggagtgtttggtctcctcagctaaagtaatgcaaagcatccgtgcatgaacattgcttcctcaaaatccagctcggtactacaggacatcttcatcttgaactgtctagagacatgcctcggtcgtccgtctctggccttcagagaggggactcatcagttggcagcattccggatctgccagaagctaactgaacttttcgagtccttggctcacgtctgttggtctgagcagttattttgtttttgttgatatagaaatttcacgatgatgatgggttattggatagacggtagacgcagttttgagcattaagggtgggtaattggtgtgaagtcaattgtaagtgtgttgtatagaatgcgttgtgactacttaattatgtagaagctgattgttaccatctcctttgacgttgccttcctcaagagcctccatatcccatttcctatctcactcactcagtattttaaatttcactatgcaaac

SEQ ID NO: 145103 - DNA, 429 bp, Zea Mays
gtgggtgcgactaatgtaggttgcgagcgagtgcacggggggttagggtacggtagtaggaaccaagagggggatgaggttttgaacttggtgttagcttatgacctgttgattgcaaatacctactttaggaagagggaatcacatctagtgacctttcacaatggtcaacactcgagccagatcgactttatccttgcaaggagggaggataaacgtgcttgcttaggttgtaagatgatacttggggagtgtgttatccctttacacaagcttgtagtggcggactttcgttttcgggtacatgtccatcgggacaaacatgtcaagattgcgagaacgaagtggtagtagcttaaaggggaagtggcacaaacgtttaagggcaggatgctagacaaagggcctttggaaggagaagatgcaaac

SEQ ID NO: 145104 - DNA, 556 bp, Zea Mays
cccgccgatagtgataggcccagagggagcctgtggttcgtcgctgtcgaccaccttgagacgacctatcgcctcttcgattgtcatcgtggagaggtctagaagagactcgatcgagcgagcaatctgtttgtacatctcggggatgcaacggaagagcttctcaacaactctctcctcatcgtaggtgtcgtcgccgaactgcaccatcttctgcaacagtgttgaggcggagagcaaagtcatcaacatcctcacctggcttgaaggccatgttctcccactccttgcgaagtgcctgcagtgtggtcttgcgggcacggtcactgccgatgcgggtcgcagcgatggcgtctcaggcctccttggcagtccgattctaggaaagccaaaactgcatatcgggcgggactgcagcaatgagggtatctagcgcccgtcggtcctcgtggtagtcgacgtcgtcgtaccgaactgcttcccacatgtggcgaaccaggagttcatcaccacggaccactcgacgtagttggtcttggtgagggtaggccaccca

SEQ ID NO: 145105 - DNA, 497 bp, Zea Mays
ggaggaaacattccatggtaaaaacttccgccacagatatcaaccaccactcttaccatacattttctttgctccgatgatattttatgattattacggtctagcgaaatcacgtgatgccttgcaagtgggaaacacgagaaaccgtactcggccattggagagcaggtgaaccagttgtcttaacaaaaagggacacgtactcggctcgggcacgcccgcacggccgcaccgcaccaccaagcgaacccattggctgtctctctcacggctcacttcactgttcactcggcggcaccgcactgcgccagtgccccgtcgccgatcaaagcaaccgcctccaacgcggcaacggcaacggcaacggcaagcgccgtcagtcactcccgtagtagccgccccgcagtgagtgtgtgagcgagtgagatgatcagcggaggggccgcggccgccgggaacccgaggagtaggaggacgcgatgaaggcgcagccgctg

SEQ ID NO: 145106 - DNA, 469 bp, Zea Mays
tctgaaacggaacgccagcctgcgtagtatagtactaacttaagcgcgccgagcgaagcactgtgaggcgcgcggcagcggcgccgcaccgagggtgtggtcgtacaggataggctcagggacccacttgcttgcgttgatgaatgtgtccaccgtgtacgcggccgcctcggcgtcagcgttgaggacgcgaaagcccggccacttgacgcggccggctgtgtcggcaccggcgccgtcgttgccgtattccaggtataagatggtccgggtggtatcctcgacgaccttgttcttgttccacacgacccagccattggggctgaccacgcgactgagatacaacttgatgaaggtgacgtgggagaagttcctgtaggggcggctgaggtaggtctccacgccttcgaggtccacgcccggtgtcgcttccacggtgcacatgtggaacgagaagctggactcgtgg

SEQ ID NO: 145107 - DNA, 672 bp, Zea Mays
aggcgcctcccgagccggcgcagccacgcgagcctgaggatagtgcatctccgccgccggtgcaaccagaggagaatgccgggtccacgaccaccgcggttgccggcgacggtgaggggaaggagtcgctggacaaccctttggtggccatggagtgcttcatcttcctgtagcactaaccttctcctgacccgttctccgctgtcagcaaattactccacatagttttagcaggagtaaaggtggtggtgttggtagcagcagcaggcagtaggccagtagcagcgtaatttggtgagtaataatctcgtcgtgtaaaacgtttcccccctgggctggctttttaacccccgcgggagaaaaattactggctattcccgtagagccttcagcccgtcagaattcagatcgcagggctgggctctgacgcgctgtgctgatgtattgtctgcactctgtagagtacctctccgattgtgcatgtctacttgtaatcttctgttcctttttgcaatggcgagtcattcagagctggaaaggcattccatctgttatagtagtattgttttgccgttctctgttacactgcccgcccgattcaatttgctctggcggaactgaaaagcttctccgtctcacacacgtgttcttttacttttaccgttattagca

SEQ ID NO: 145108 - DNA, 348 bp, Zea Mays
gagaagcacagatcttacgagcataaaagtataaagcacagcggatttaaaattccacatcaaatggcgtgcttcaagtgctaagaaataacggcggtgctaaatttataattcttgagtcataggaatcgtcgtataattaagagggatccgcgacggttaagtaagttatgaaacgagccaagttcaaaatcttttgaaaaactctttgtagatcattttcctagatcatgaatgcccttgagaaaaacaaattttacttccacaaagactccccttttgttctcttcaaaatactcaaaatttggtttcagcccccaaaactggttcaaccgatcctgaaaccgg

SEQ ID NO: 145109 - DNA, 399 bp, Zea Mays
cccgttcttgcaggacaacctgtgcctgcctccgtcgaggacgctatatggcggacaccaaccaactgcaaattaaaagagagaatacttctctaatctctctgtgttagagagcacctcctgttgttggaggatcgggatgcaggacgacgcaaggtatacgatctgttttccctgcgtttttaatgacagatctctgtatcaagcgcgccggtataatatatttttccccccgtatcattatatggagggcggaaatcggcgatgtcgctttgcttggtactttggagacaagcattccgtcacatggttcagtcagtacgtggctggatacattgtatgctgactaataagatatgctattgtggagtattattcagcttgtcaacctttgggaaa

SEQ ID NO: 145110 - DNA, 700 bp, Zea Mays
acaaaatccatggtgatatgctcccacttccactccagaatttccaatggcttcaataaacctgtaggcctcttatgctcggccttcacgcgctgacatacttcacaggcagccacatacttagaaacatcagccttcatcctcttccaccataagttttgcttcaaatctctgtacattttggttttgccagggtgaacggtgtaaggcgttttatgagcttctctcaagatatccaccttcacctcttatttctgaggcacacatagacggcccctgaaatgaaccaaatcattctcatcaatggtgaactcacagggtttaccatcgccgaccctctttcgagcttcctgcaacaaacgatcctgttgctgagccaagcgcactctctccagaagggaggattgaatgagcatccgagtcttctctctagcggtgccgacatagcacaaagcgacccccatatggtccagatctgcaatcaaaggcatggccacttttggaaccccggacctgctaagggcatcagccaccacatttgccttccccgggtgataatgaatggatagatcataatcctttatcaactcaagccactgacgctacctcaaatttagctctttctgagtgaaaatatacttgagactcttatgatcggtgtaaatgtcgcaagattcaccataaagataatgtctccgcg

SEQ ID NO: 145111 - DNA, 870 bp, Zea Mays
ggaggagttgagggaacctgcgggtgggaggagagagcaaaatcaaggtgatcgaaggaaccatgatcatggggaaccctaggggtttgagagagatgccatgcatatgcatataccgaagatgatgttcccaaggtttgatggggtggaaccaggaatttggttgaccaaatgtgaagattattttaggatgtatagggtgcccgaagctatgaagggggtggctgcaagtgtataggttgaagggaggagtaggatactagagaaccttgtccagagcagtgttagagaagtttggggccaaggaatatcctagagccatgaggagattgttgggtataaggcagagaaggggagtagaggagtacatcaaggagtttgaataagctagatatgttgctgtggtgcacaaccaccaactggatgacacctttttgagatctcagtttgttgaaggtttgaagggtgaaatacaaggaatagtgatggcttagcttccaaagtggcctaaaccaatataaactgttgtgcatcatcgatgtgctcctgcacgtaccatcaagtcacaagcaaagacgtcatcctacccaaaagcatcacgtggataatccagtggtgcgcagtcaggtcacaaacaccgacaccatctgaggtaaagccctctgaataaaaaacagaccaaaaggacatcgcgagtgtggaagtaagtttttctagcaagagtttttttaaataacagaacgttgggagtgtggaagtatgtttttctagcaagagtttttttaaataacaacatacctaacgtttcttttatttatgttcaaaaaagatgcaggtagagcttgatatcgattaaaccccactggtccc

SEQ ID NO: 145112 - DNA, 427 bp, Zea Mays
gctggtctggctttctccacaaatacgtagaggaagatgcatgtacttcatgttgtgcagctgctgccgataggtgtggctaagggaccacagagttctcctagcagcatcgctgaccaaagcaacgtaggtggatagcggcgtcagagactcatgagctgacagagtcctaaaccctctatcgagtgatgtagtagcaagcccgaggaggctcctacaatcaacttgtctcatacaagggtcagatgtaggttcccaatgcatgcagaacatcctacagcaggttagggaagtgccctgtctcgaatatcgaggtgtaatgttcagtgacaagccataaccccacatagtggtcctgctgttcttcattggctttctcgttgatgttttcctcatcatcttcttcttcttcgtcgtcttcatcatt

SEQ ID NO: 145113 - DNA, 909 bp, Zea Mays
gcaaaagtttctcggcaaggtaaattatttacgaaagtttatttctaacttagccgggaaggttgatgctttcactcctataccttagcttaaaaaagtaatgtcgattttacttggggtcaaaacagcaggaaggatttgatcttattaaaagttatttgtctttggctccagtattgaaagcaccaaaagcaggagtgccattcaggttatacattacagccgaagacaaagttatcgaaactgttctgactcaggagccccaaggaaatgagcatgttgtgacctacttaagccggaggctagtggatgctgaaacaaggtacaccttcattgataaattatgcttatgcttgttttatgcatgcatcaagcttaagtgggaccaggcagcccaggacgattttacacgggcccaccgtccaaataacgcgcgtgtggtgacacgtagccttcgtgctcctgtgctaggtcttcggcagtcgtagaggcctttgtcgtttctagcttcgataggggccggcaaggccttcgccagctctttacgctccctccgtcttggggccttcgctattttagtctttgtctgccttcgctttccctctatcatgttttatccctgttgtgacaaggtcgagcgaggggggcgttacgccttcgccccaacacttgcccttcgaggggctagttcgactaagtgagctggtaccgaagtatgtcgagagatggccaaaatgctgccctcgctcggttgaagtggccccgcagtttttttttgaaatgtgactgttgaaatgtgacgttttactatgggactgttgagttcctgaggtgttttcccttgcctataaaaagctatgcgcgtgctgcgggggttttacccatcttcgtgtggaaaaaactctagcc

SEQ ID NO: 145114 - DNA, 856 bp, Zea Mays
gtctgaatttggattgccagtgggtttgagcagactttgagctcaattctaagcatgatctagtaagaatttgttttggaatactataacaaagatgaagatggtatgttagactaccactttgctatagagccttggattggttgccaagcgaatttaggagaaaatccagcttcaggtcgctctgtcaggtcgactgaagatgaatgccattttacagtgatctgaataagatcagatcgacagctcaattcttcgccaccgatgaccgccgcgcacagattcgcttttttggccgtcgtgattcgtgctgaccgattggataatgctcaaggtcacgtaaatatcgtcgtcgtggataactccggccagtaaacaattccggccaccgtaccgcactcaccacagcggatttggataagctcgccggcgacagctgcctcatggcttggcaccacgtgccctggcacctccaccgcgtcaccgtgaccgcgtcgccggggagatggccacggtaaccggacactaatcgcgcgccagtaactccttgtcccttcggccgccgcgcgtcgtcgctcaaattcctggccaccgctcatgcttactataaattgaagccaccatgagctccgtaggatcatcacgcacccagccaccgagtattgctctcaatcgatcatcagtgagctccaattttgaacttcccccaattcggttttcgccaccgcagacaccctcatcgcggccagtctactccaggttagttcaagcttctcagttgtttgttctagcatccttaggttctcctcaagctcctcgacccctcgtattgaactagaccgtcatggatcgccgg

SEQ ID NO: 145115 - DNA, 706 bp, Zea Mays
ggagtttccacatcggtgtttttctgttgggtttggaggagagagaagctgccgctcagacatttcactggtgtcgcggtctcgagcttggcatgagggcggataggtcacttggacctcctgcaacgggtcaggccatcccgtgtggagtcatcggccagggcatgacggaatcgctcgtcgggcgtacccaccaccgtgtggccgccggtaccaatcaccatgcatggatgccgcgcctcgacgaaattggacatcccggtggaaaaatccatggtaaggacgcccctgtccagttcaccttcgctccctccttgcatcacaactgtcggtagaataggagactctctaggggcgttggggcatactccagcaacatcgctgccgcgcggagtgctctgctcaccgtagctcaccatcgagtaggagacagacttttggccgtttgattaggtttgaacgggtgagatcaaagggggacgtgtggggctgccccgacctttggatcgagaattgagggtcgtgataagatcgggatcgaacaggatatggatcgttgatctggaatggacgacagggatcatacgtgcgtaccccccttcgttactttaaatctagacccttggtattggatcgggtggtcaatcgcatacaccggttcagattataatgtgggtcgttggatggagatctgacgaaccacatc

SEQ ID NO: 145116 - DNA, 700 bp, Zea Mays
ttcactttgaaccttttgcccttcgaatcctagccttagtggtgcttgtggagttcatagatctttgtggcggtggttccttttgtgttgactggcgtgattttcggtaggtgtagagatctttacttgcttcccgcagggcgcggaggcctagccgcctgggtgacttattcgtgatactttgattgaaagcggtcttggccattggtactttaggtcgaaaaaatcgtcttctgtttggcagggtcttatgaggtcaaagtgattgatgggaacctcttgatcttcattgattttttctcaatagatatagggtttgcgacatccaattgattggaaccgcctttccttacaaagcctatctgctaagaattcccacacgggccttccctcgcctttctctcacgtagctatgcttcgatcccacgaattttgtgatgaccatggcgttagatgatgcgtccgccttgtgcggcatggtccttggagacatgctcctagagattgaccatcatggaggcgagttcgcaattcgctcgctcgtaagtgtacgcacgttttgatggactcggaggtcgtgatgatcccgcgtggtctggacatatttaactttagatatgtgtagtttggcatggccatgaacttggcgcggcaaggcctctcgagtatggcattgtaggatcctaggaaatccaccacc

SEQ ID NO: 145117 - DNA, 349 bp, Zea Mays
atggtaattctagcgcacgaaataacttgtataaaattagtaagtctacttgttggtcataatttgattgttttaactccaacacatggtaaagtgttagaatggttcaagtctctagaacgcggcaatttttgaagtaattaggagctgaattttattagttgttgttttgggctgcacgcactgttttcgtcgtgctgtttatttagtgaactaaatcatgttttctgtagaaaagtcatatacaaaagttgtagataaccttattatcctacttgtgttaaatttttacagccataagtctaatcgtttaggagttatgcttttcacaaattcagtaactggatct

SEQ ID NO: 145118 - DNA, 365 bp, Zea Mays
gtttctttcccaacatatctcaagcacatgttttctgaagcattcgattgctactgggcttcaggtggccctatcatatacatagcatacttgtgtattttgagtgtcaaatactttgtgaatcatcaatgcttgggtgcattttgttcttagtttctagacaaatacgagattcattattgtgcttatttgcaacctattcggttgtctgtacaaggccaggccagtttcataggatgcagttttaggctgtttggttgcttggacaaagacttgggcctgtgccacaggatgcaaaagagctccctcaccctggctcctttgaaacgagtttcacttctgtttcccgcgggcctggttcacta

SEQ ID NO: 145119 - DNA, 481 bp, Zea Mays
caaggtttgaaactaaattcaaattcaaatttaaacctagaagagaagaagaaagaaaacagaaaaataaaaagaaaaaggataaaagggctacatgggccgactgcttcatttccggcccagggtgcactttccctccacgcggcccattaccaactgcagcgcgcgcggacctcactgcaccatagaccccacatgtcagcggcatcggcattgcgcgctgtttgaaccatttctccactgccatacgggcccagtgagcagtcagtttctctcgctctcggttcctttccttctctggcgtgtggacctggcgagtcagtcgtctcccaccttcccccacggattttaccgaactcatgcgcaacgaccgcggcgacgtcgtcgaaggtttgaccagctcgcgtgcacttcccgacccccacccggtcagctggtcgctttagcgcctcagctactgcgggtctccgccatgtgggtc

SEQ ID NO: 145120 - DNA, 661 bp, Zea Mays
cagccaactcatctaggacctcatctaccaagggcatgggggatctattcttgatagtcatagagttcaaccttctgtagtcaatgcaaaacctccagctgccatctttcttctggactagtagtactggggatgcaaaaggactggcactaggtactatcagacctgctttcaacaagtctgtcacctgtctttcgatctctgttttgtggaatggtgagtacctgtagggtctagaattcataggtatggaacctggcaacagaggtatatggtgatcatacactctagcaggactgcaggaggtagccctgtgggtgtagcaaaaacatcctcaaactccttgagtatgagctgtaatggttcctgatgcctttcaaccacttcttcctgcattgactctaacagcaccagaacccatacttgattacctttcatccacctttgcagttgtgcagcagacacctgcagcacctccttgctttccatgccatctcccttcaattgcacctccacacctctatccttgaacagcagaatcttgttatcccaatcacattgcatgggactacgacccttcaaccaatcatatcccaaaatggcgtcataagcttctaaatccaaaactctcatgtcactgatataagtatgtccatcagcc

SEQ ID NO: 145121 - DNA, 668 bp, Zea Mays
cgtcgcagtaggtcgctatagatggcatgtctatcggctgagtcgttgcgccagtgaatgccacgataactcgcgctagtgacctccctctctctccggtcgcccgcgtgtcttccccaaattggacgccaccgttgttgatgtctatagatttatgccccagtgagctctgttaggttattatgcgcccaatgcaccagctctcgcctctgattatccaacctagcgtcccaattttgttttcccccaattccgttttccgcaccgccgtgaacatctcgatgtggccagtcatctgcaggttagttcaagcttctttgtttgatgttctagcctcccttaagtctcatgttgctcgtagacccgtttgattgaactagaccgccctgaatcaccaagaacacctcaatttcccctcgagtttcgccgttgtcatgggcagaaggactccgggccggatttgtgcaattgagggtcggattagagtcaccaggggtagaattaggtgtcgaccgagttagggcatcagtcgttgtgtatcccggccagtacaggtttgccggagggcgtgctcactgccgttcaccgtcgtggacttggcgcggtaaagaaacggaaatacagggacctaagtgggaatgtcagacagacagtgaatagtggctagg

SEQ ID NO: 145122 - DNA, 689 bp, Zea Mays
ggtctgaaacatcgagagcatcctctcggataactgctgatgggctgctgcctggcgggtctgctcggctgccaagtgagcctgctattgagtgagagtctgtagaatcgaagcaagcgcagggtcaatagcagcaggggcaacagggtagcacgagaactcccagcctcatgatcatgtgagcatggaggcataggaggcggaggcgaaggtggaatcccaaaatcatcatcatcatcaactgctgcatcctgagcttcgaactgatgaagagcagcatcctcggcctgagtgtcaaacactggagcagaagctggcacaggatcctcaggcgctggacggtagggtccaaaaacaaggcgtgaggcctcaagtgtgccctggaactgtggaggccaaatcagctgagcaaaaatgtggcacaagtagtgagcatatggcagctgacgacgagcacgcataccatccaatacggtgtcctcgatctcacaaataaggaaatcaacaacgtcaaactcagagtgagagaccagggcaccaaggagccagagctggatatgtgtggtagcctccctgtatcccatccgcggcagaagtgtccgtctcataagctgaaataggaactttgctgctgtagtgtaatctgccggtgagcgtcgcgacccaactgagaagggcgagcggaacag

SEQ ID NO: 145123 - DNA, 491 bp, Zea Mays
aaaatcatacctttgtttgttttttgtgcttgcaaagtgtgccatatgttcttctaaccgctacaaacttacttccgctgaagatctcccatttcggattatttattgatttctatggtctaaatgcctttccaatccgaaaaaatcaaataaataccaaaggtggtcaaaaaatagtgaaacttggcatggagtcttaacttggttctagttgcttgcgataaaaaattcagaggattatacaaaagttagtctgtagattgttcacaggcggtcacatctctcactaagattcatagcattggagtagtacttcacggtttgagccatgtttcatacctttgtttgttttttgtgcttgcaaagtgtaccatatgttcttctaaccgctacaaacttacttccgctgaagatctcccatttcggattatttattgatttctatggtctaaatgcctttccaatccgaaaaaatcaaataaataccaaag

SEQ ID NO: 145124 - DNA, 413 bp, Zea Mays
gttcaaacttcaccagtgccgaattcttcgacttttgtgaataaaagtgcatccagctcaagtatgcttcggtagcgcatcctagggccaatgggcagatagaaagagcaaatggaaggatactagaagcacgaaaaaagagggtctttgataaaaacaagaagtttgcagggaaatggatcagggaactaccctatgtggtttggagcttacgaactcaacctagccaagcttggcatggaaatacccccttcttcatggtgtatgggtcgaaagtagttttgctagcagaccttacttttggggcacccaggctaaccttcaaaagtagaagcagaagcagaagcaacccggctcaaagaaattgatgtactagaagaggaatggctaaacgtcgttattcagtcagccag

SEQ ID NO: 145125 - DNA, 312 bp, Zea Mays
ttctatttgtgtctttcacgctgactctgtaggagggactttttgggactcttcgcgaggttctttctgagcaaggtactcttgctcaatttcttgtcctagtgctaatgcttgtagtggttttgccgagcgtaagcatcgtcatcttcttgagactgctcgtgctcttatgctcgcctattttgttcctcatttctgggctgaggctgtctctacgagcacctatctcactaacattcaaccttcttcggctcttcagggtggtgttccttttgagcacctttgtgggaagatgcttggctactccagcct

SEQ ID NO: 145126 - DNA, 275 bp, Zea Mays
gttggctatgctgtgctggtgtgattatagtcggtcttagcgcggatggtttgatgctgtcgcttctgcttttgttgtactagcttgaccgcgccctgaggcggcttctgcgcggagtctttgtgagagacatcggaatttctcgcacttgttgtgctaagtccggctgcacccttaggcgacttctgcgcggatggtcttcgcgatagacatcggaatttttcgcacttgttgtgctaagtccggctgcacccttaggcgacttctgcgcggat

SEQ ID NO: 145127 - DNA, 544 bp, Zea Mays
aagaggaagaagtcactggctcccatttaagtttcccattgggattcctcctacacaccacatccttgtgatcctggctgtagatagagcacctgccactccactgacactcggcacgacgatgcgcttcaccacaacggaaacacaccaaccccaacccaggctttgtaacagcctgatacctctgagtactccctcctgaagtacctgattcagagggtttgccacgataggggtggtggcgctagtgttgtgactttcccctctgtgggctagacccctagtgttgcccctccttgcgttctggccacgagactgatcaacacccgaagacttctgagattccatggtgtactgcatctccacgcccaatgcctgctccaccgtagtacaaaaatccaccagcagaaaggcgcccagagcatgcctgataaagggttttaggccctgacggaactagctcgccttttccaattcattgtaagccacatgaggaacaaagcggaccatcttgtcaaagcccacttcatattctgtgactgac

SEQ ID NO: 145128 - DNA, 502 bp, Zea Mays
ctcctaatgccgaagcaagaccatataggacgttgaataatccctttaatatcctccctttcacttaggtcattcttcacgtagaaccattcctgcatccaggcccccgaccatcttttctgaaatgtgggaactgggtagctcgcctcagagcgaggcacgaagctgtaacaactgaagttgttgtgatattgctccttttcgatagccttcgtctcataagacagctcatggatgttgtagaaacattttgcatttggttccagtccctggctcctcatggcccatataaagatccccaccttgatgatagcttcgggagtaagttgatgaaggtaaatttcaaaggttttcaggacttcgaccagcaatttatccagagggaactaaagccctgccttcataaagcttctgtaaactaccacttcgtcagcttcaggcagagggacattactttcccctccagccctcacaattgagatatcacgaaagtacctccccc

SEQ ID NO: 145129 - DNA, 518 bp, Zea Mays
cagagatcaccagttgggaggaggatgatgaggagcaaagaggtggtgcgccaggtgagaggcaaagtgttcttccccagactgattcgggggaggagcactgccagaaggatcctggggcgaagggtgagaagatgattggcccagatccccgtgatacggaggcgggacaaactgctcatgatcatcaaaataagcttcttcttcttcgtcgacgtcgtctgctgtcataaaaggcaccccgtatgcctgctggtaccactcgttgatctccggaggaggaggatggagaggcacgtcaggcgagcggggggcgaagggagtacccaaagaggaagcttgacgacgtaggttgtcgtcagtctcccgctgacgtcttgccacctcatggacatccgcagcaatgttccggcacatggagaaaaatgccgcaaacccgtgggccaagcgggcacccatccctcggccacaacctcgaccacgaccacgaccacgtggcgtgggagatccgcggccag

SEQ ID NO: 145130 - DNA, 414 bp, Zea Mays
caattggctgctcatcaactttccgggatggccctagcttggtgggataccttcaacgctgccgtcagagatgctacctggacagagtttgaaactgcttttcgagagcaccatgtgccccaagggatcgttcagctctaggaagatgaattttgggaactaacttagggaggaagatctgtcagcgagtacgtgcacaaattcactgaattagcccgctacgcacctgatgacgtcagcacagacgccaagaagatggcccgcttcttgagagggctcaaaccagaactcaagaccatcctagccagccaagatttcctcagcttctcgcacctctcaaacaaatccatacaagtggaaagggcaagggaagaagaaaaaggtcacctcaagaggaaattccaagtccttcga

SEQ ID NO: 145131 - DNA, 276 bp, Zea Mays
tactaggggaggagaaggagttgtactaacgctgaccctcaggattcctccaacagtgcatccccatcaaccaaggccaggagctgctatgcgaaattcactcgggggcttacggacaccatgttgtgtcccgaaccctcgtcagaaacgccttcagacaatgtttctactggccaactatggtagccgatgccactaagattgtacgctcctgcaagggctgccaattttacaccaaacaaacacacctgccgctcaagacctacaaaccattcc

SEQ ID NO: 145132 - DNA, 350 bp, Zea Mays
caaagctgagaccgttgtagaggctctggagaaggttaccgcaacaatgaaggtaacagaaaaaggtgatgtgtgcatggcaattacaacaatagcaatagctaaagagtttcctgcaactgcgccaatgacaacaaaaaaggagacagaagttgtagcagcacatgtgccacctaaagtggtcgaattgaaagatgatgcttcaaactatgtgcccatagatgataagggggaaaatgccatggaagtcgaggaaccgaacatggttgcaaaggagaatgtccttgcgagaggaggcccttcgagacataaaataatgaaggacggcggtacttggtacgtcactcggc

SEQ ID NO: 145133 - DNA, 473 bp, Zea Mays
cgaaagatggagtcgcagctcagctcgcttcccgccttcataaggctagtgaacatcctttcctccgaatgctagaggaagaagcgggaagaagcatcgcccccgcggacatcttgcataggtaggcgatgatggccacctgaaggatgaagcagggcgtaaagtgttaaggctggaggccaagcccctccagcagcagcacaaagaaagacgggatcagcagcaccaactcgcaagagaggttggagacgaagggcacgaagtccccggcgacgaggtcgccgtgaggagaggcgccgactcggatccttccggcaaatgccagcacaccccatccaagcagattgcgcaccaagttgagtgccacctcgggctggaagcgctcgggagggtctagcaaggccatggcggctacgacggcagaagagcgcggagaactcgagggcaatagggcgctgcgagtgatgagaatg

SEQ ID NO: 145134 - DNA, 326 bp, Zea Mays
ctttggcaaagatgcaaattcttcgaggagctaatatctgacagtgtgtacattcatacaattcgtttctactccaagctaaccaaccagacatggctcctcactaatatccatgccccatgcatgctcaatggcaagaaagaattcttagattggttttccaatatatccatcgtggtagacctctcctagatgttttgggcgatttcaaccttatccacaaccaagataaccacaacagagcaaggggtaacactcaggtgatgcttgacttcaatgtctccattaataaacttggcttgtaggaaatcctaattcatggtcag

SEQ ID NO: 145135 - DNA, 437 bp, Zea Mays
tggaaatcttgtgtactaggtgagagctgggtcctccaggcctacgacggaagacttcaccattgcttgtcgtcatctctagatgatgctactaccacttgatagctcatgatatattgcgaagggtcagggttgccattgtacttgggccaattgcctgaccggtaattgtgtggccatgggatatattgaagtctagcggagagcggtcacctttcatttatgaagttgaagttgtggaatgtgccaaagtgttgggcttgccaagcgcttctttcaaagtcatgatgtatgtgttctattagcggaggctattgagtatgctcatactatgtttttgcacttagtgaaggtggttaggtgtattcatgttgctacaagtctgctatttcttgttgtagagtccacaatatgtcttttttcctcttcaatcaacc

SEQ ID NO: 145136 - DNA, 677 bp, Zea Mays
ctgaaggacaacaccagcttgttggcggtgctagcctagaactttgctgaggcaggaaagtcgaatatcttgatatccctctgaaggatagtattaagggatggcatcttgagtggtttaccatggagaaccataacaagtccctccctcctcgatcggggatgtagcctaatgtccgaacgcccagctggacagagtcccccacagattcagagctagctgagtctggagtgctgcttgccgaaatatgtgcgctaaaagacaggggcctgactgccgaagctgttgttgctgattttgtcttcaaaaacatccaacctctgaaagatagagtttacccggcttatctataaactagggtcaatgaccctacccgaattaccaatagacggattcatgacgtggacctgctgagccgaattgacttgatgctaaggggcaagatttcgaatggtggtgctcccttatcttattctgcttggaatctacctccacagagtcccttttttgaattcacttccaaccctcctgttcaagatggcagtctgggtcatagagtgcgaccctccttagaggacatcgaggctttcattgctccattccataatcttcctgaagcagagagacagacccatttctagatgccgactagcgctgatgaggctgaggtgaacgct

SEQ ID NO: 145137 - DNA, 397 bp, Zea Mays
caatatttgagaaaaggtcgggcgacaagatgatgaaacttatttacatgattttgttgtaacaaacaatggttgaaaatataaggaagccctttggataaggttcgaatttagatctgcattccttgttacagcctccttccttcagttgtacaagcaggcaagagagaaaagtgtccccaactctctagtgcgagtgtgtgggttgggattctgtgttgcatgctagagtcctctaggtcgaagtacttcgaggctccagaggacccctaccccctctttggttaaagcagacccttcttttataggtcaagaaaggagcctcttaaaagggtctcctccgtgggggagtacatataaaggtaaaaaaggatcttctatcgttgaaaaaccgccg

SEQ ID NO: 145138 - DNA, 724 bp, Zea Mays
ctgagccctcgggctccgttccaccacgcttgggcattttcaccagcctccgcccacaagcgggccacaccagctggtagcactgttccccggcggacccagcggcatggcgcctccccagacaaggccgtggcatccggcagcggagggccgctcacgctccacactggtggtggggtcgcacatatcctggcagcggagggttcttgcctcgtgctcctcagcacaatggagatggatggtcaatatacacctattagctagaggatccaaacagccctagctaaactttagctggtcatattagttggctaaagttttttttctcgaaatgcgcaggagaactgcacctcattatattaagaagaaaaggtaaccagggtctaaagaaggcccgatacaaaaaaaaaaccttacgagggccagaagcacgcatacagaaaggaatccatctaggaaaacataacccacacactacacactagggaagtccctaggactcagctaagggggctgccagataagaaatgtcttttgccccgctatttcccaccgatgcatctcctcttttgcccagataaaggttagagttatatttaaattccaaccataaaaaacccatctattctggtgatttcaaatcgctcaagcacccaaaatgatgagggagtttagaccctttttgataagcccacttactactcctgctgccttttcccaccag

SEQ ID NO: 145139 - DNA, 526 bp, Zea Mays
gactttctctaccagatacgaactttatgagtacttggtgatgtcattcgggctgactaatgccgcggcatatttcatgtatttgatgaattcagtatttatgccataattggacaagttcatggtggttttcattgatgatatcttggtctactcaaagaatgaagacgaccatatcaagcacttacacacagtacttcagcgactgcgcgatcatcgcttatatgcgaaattgtccaaatgtgttttctggctaagggagattaaattcttgggtcacaccatttatgaggatggaatatcagttgatcctgagaaggtgcaggaggtgatggattggaagcctcctaccaccgtgcgacagcttcggagttttcttggattggcaggatactatcggcgattcattccggatttctctaggattgctaagccaatgacagaattgttgaagaagggagtaaagtacgaatggagtcagaaatgtgaggatgcctttcatgcactaaggcagcatctgacaaca

SEQ ID NO: 145140 - DNA, 533 bp, Zea Mays
cgcggatcttttcttcagatatttcccaacatcgtcgatctttcgtgcttgactgaaccggctccctttaatcccctttttctcttgattcttgttaagaacaggctaatatccattaacaagaattgttcactagacaatggtcttcaaacttactataggattcttggacctaaactgaatagattctaagatatggtgctcacaaatcggccacatttcactgggaccattactgttctgaatccagtttttcagtgtcaccccaaaccgcgcaactcacttctgacagagcaacttcgtgccactgattctttgttttttgtacaacaacccattaagacgactgtaccaaagctactcccctgcaaaccagctttaactttgttacaaaggttgcggtcaaacacccattgaattgagcacaacatggttccaaagttgacccaatacaactgaaattctgaatttcaacaggtttcttgtctgatagctaaagtttgaggggggtttttcattaaattcctcaaggt

SEQ ID NO: 145141 - DNA, 626 bp, Zea Mays
gctcgccgacatgcaggggaggtgaggtcgatcgccggtcgtacgtcaaaactctacacacactgcacactgtacgtggcatggcaatctgactgagctcgtctcgtgcacgtcgacacatcgatagatgcatgtgtactgcacccggtgaaaatttgaaacgatgaatattcactagaacacaaactgaacagagtggtgagtcctacgtacgtacgtgtaacaactagcaccggtcgatcgatacaatattcttcaacctgacacgtggggtctgcactaccggcgacggacgagggtgagctcgtcatattctcaaatttccaatatttaatatacgtgtgtgcgataatgtatttatttgtaatttcgcgattgtgtaatacttgggggatttgctatgtttcggtcgcctctaaaatacactatatttttagacaacgatctttatcgttaattagttcatgagcatgtaaagctaagattcattttaacgcagggaaaaaaaacaagaacgaatggatacattgtctcttaaatgaaaatagaaatcagacatgctattggaaaaggcgttttgtttagaaggtagtatattttgagtcaacgatcttcgcagctaattt

SEQ ID NO: 145142 - DNA, 357 bp, Zea Mays
gagatctctcaccgagcaacctgaaatttgataccacttgataaaaccgacgggttggagggagccggatctttaaatgagaggtgatggaggttagaaaattgttgcagaacgacgttggctgcctaactaacgacaggtacactgtcttctgataactacgatttgaagtggaggtcgacgttgtgttttccgactacagctctcaagcaccttagaataataaagtcatcacaaggttttagtagtaccacatttcaagaagaattaattgaaaaactaggaataagttcacctgataattaagttcacgtgcacgcgtgtgggtccttgcttagtcataacttgtgaagggtt

SEQ ID NO: 145143 - DNA, 364 bp, Zea Mays
gggttctcgtgtcagagcttggtgtcttgttcagctagttcctggtagcattcctaggtgtggcaacgatcacggcggcgggagttgcggcattctcggagcactcttttcgtcgggggtttcccctactttagaggcctcatcccaggagatgggttgtgttggatcccgttccccggcttcattgtgacgctgcatgttgcggcgcctgttctggcgtcagcgtgcgtcgcactggggtggctcctcccccagtatgctgggttcgccgtaggaaatgggcgcgccctccactcttccctggatgaagaggatgtccgagaagaaggagctaggtgtggtgctgcgcactccatccatctct

SEQ ID NO: 145144 - DNA, 955 bp, Zea Mays
gcattctatgtcgttctctgcagtagatttacaagttcttaaattgacacattttggaggaccgtcagtatctgttttctgtcctttttttcctgagatgttcaggtgttacagtgccctttagttctcagcattgccacaagaatgttttcaaaatttgtgtatgtactgaggaggtaggtaataaacattttgcatccatctgctatgtggctagtcaggacaaactaggtttgacaaatatgggcataaggctttgttgtttgctttggctcatttctgcatccactcctataaggccatccccgcaattgtagtttagctcctgggcttttggctcgtacagacctctgtacgtgatgtttctgtaaccgaagattcctctgaggcatacgtgtctcacaaacaaattgtcaattcccagatgacttcggagctcatttgccattgcgatacagtacaagtagaacttgagatgcaattcacaaattttttcccccagcgacaagctccgtcattcttcattgcttatttacttcatctattctgaacagtatgtgttgcccaagttcattatgcactggaatttacgggtgatactgcttcgagctgaaatgggccctcacagtcgggtgttatgtcagtcgccattcagtagcatgtgcagatgaactgtcgtcaaagcatggcaagcctataaccagattaccagaagtccagcactagattaccatggctttcatctttacattaaactaagatctaagcattgtcctgaccgtcttgtaatcaaattatttactgttagactctaaatagctttatgggcagtttgtgtgtctgagtgcactttttttttaaaaaaaacaagacttctagagcaacgtacctttttcagatttttaaagatatactccaataaaaccgctgttttttttgggaaggaaaacagtac

SEQ ID NO: 145145 - DNA, 452 bp, Zea Mays
cggttaatggtgacatcggcgttttagagataacaactgagtgataacaggccacgtcggtcgctttggaaacagcggccgagtgaagactggtaacgtcagcatttttagaaataacagctgagctataatgggccacgttggccgttttggaaataacggccgagtgatgttgtggcacgctagcgttggcgaaataatagctaagtgatgactgggcactttttagaaatggcatctggcccgggaaaaccccatatgtactgcgtcgtcgcatgcctctgtattctgagccctagtcctgcttttctgcatccagaccttctctgctttcttgtgatattgcttccgctccgctcgccagcaagattgagatggcgcccaagcggaaaacttagagttcatctgtcgcaaccattcctcccatcgatcccaacagtcagttgcctttc

SEQ ID NO: 145146 - DNA, 498 bp, Zea Mays
gtgctcggattgtttggatagcgttcaaggtcaagtaaatatcaccgtcgtggataagctccggccagtaaactattctgaccatcgtatcaagcttgccacggtggaatcggatgagctcactagtgaccgctgtctcatggccttgcgccatgtatctggacacatccatcgcgtcgccgtgactcgctataatcgtctgatcatcgcaggtgagagctgccacggttaatgccacgaattctttgcgccagtgaactcccacttctccgaccgccagcacatcttgctcaaattgatcaccaccgctcaagcacgctataaattgacagcatggtctgttgcgtaggatcatcaccaagcttgagcacccgctattgctgccgattagccaccacaactctccaatttctcatttcccccaattctgtttctgccaccgcaagaacaccctcaccgtggacagcttatcctaggttcgttcatgtgctctggtcg

SEQ ID NO: 145147 - DNA, 801 bp, Zea Mays
gtacagtatgtggccagtgcttgtgacaccgcttaatcgcccaccatgggaatgcgtgaatccaacaaacctttttttggggtgttgatggaggtgtaccatgatgttttgtgccggtgcaatttttagaactagtttaactattaatgtaagtatttgttattttactaaagaataagtgctaaaaaaccttaggtagctagaaaaatctagaaacttgcatgtacacttcattttggtgtacaatgttgacaaaaaaaatgcaatttattctgacaaagtggtgacatacatcctacaaaaatgcatacatccctcatataaggctaattactaagtgagagatgttcatgcttgtgatggatctatactaccactttctccaaatcattttaaactttaatggcatgtttattgaaccaacctatgatgttgtgtgcatttatgcatttttcagacctagtttactaattactgtaattatttgttgtatttcgtaaagatatttgttacaataccataacctagctagaaaaatctaaaaacttgcatgtacacttcattttggtgtacaatgttgacaaaaaaatgcaatttattctaacaaagtggtgacatacatcctacaaaaatgcatacatccctcatataaggctaattattaagtgagagatgttcatgcttgtgatggatctatactaccactttctccaaatcattttaaactttaatggcatgtttattgaaccaacctatgatgttgtgtgcagttatgcatttttcagacctagtttaccaatt

SEQ ID NO: 145148 - DNA, 669 bp, Zea Mays
caaggagctagattcactcgagattatcaaggttgtgtcagaatttccagatgtgttcccggaagacttaccaggcatgccaccagagcggaaagttgagtttgctaaagagcttcttcctagcaccatccccatttctaaaagagcctacagagtatctggaccagagttggttgagcttaagaagcagattgatgagctgtcagagaaaggttacatccggccaagcacctcgccttgggccacccctgtcttgttcgtggagaagaaagatggcacaagaaggatgtgcatcgattatcgagctctgaatgaggtcacaatcaagaacaagtaccccttgcccagaatagaagatctgttcgaccagttgagaggagccagcatgttctcaaagatagatctgaggtcaggttatcatcagctcaggattcgacctttagacgttccaaagacggcattcattaccaagtatgggttgtatgagttcactgttatgtcttttggcctaacgaatgcaccagccttcttcatgaatctgatgaatagtgtatttatggattatcttgacaagtttgtggtggtatttattgatgatattcttatatattcccaaagtgaggaagagcacgtggatcatttgaggatggttttgcagagattgcgaga

SEQ ID NO: 145149 - DNA, 420 bp, Zea Mays
ctagggcggcgatttaaagttctggggattcgatcctgaccaaccggtcccgtttgatccaagatcaacggcccaagacgcttctgcctagaccaacgtccagatcaaatctcggtcgcccgattacgcatcaacggtcaccggtctgtgttcctcctcacgtcgagaccaggcggcgatgccgtcgctttcgcagtggcaccatagtcgggatcgggcaatgagctccccccagtgaactccatcaaatcgaaacagagctacacgttgctgagactaaggcgagtaggtctagggcacacttgcccgtagttaggacgccgaggtaccccgaccacgagcgggggcggatctgtggcggcgaaactgctccgtcgagaaattccagaccactaggttatcattccctccagattaagc

SEQ ID NO: 145150 - DNA, 478 bp, Zea Mays
gtcgtgttgatcctacattattctagctacacagcgcaaaggttcctcctacattctagctaggattccacgaggacgacgtcgaacgacccaccgacgacgtacgcccgtacgaacaaagcacgagctgcggcggccatggcgctgtcggccaccaacttgaatacgctcaaggcgctgctctgcgccgtgttcctcctgtccacgaccgtcgacatcgtcgtcgccctcggccactgtgagcctacggcggcggtggtagtgcccgccggcgccggccggagaatgctgggcgccgctgcgagctcggcgtctgccgtgagcatgccgcggctcactcgccccgcccccgcggccgccgccgcgacgtactccgagtcgaagagggcgagccccagcgggccagatcctcagcaccattaatcaccaatttaccactcgctcttgcgcattttgttgctacgtgtggaactacgga

SEQ ID NO: 145151 - DNA, 931 bp, Zea Mays
gtccagcagcaccatccaactggctcatccgcaagcgaacccgatggatccaatcacaaggccggcagctccatcgttccatcggccagcagtcgcgaccgcgaagcatctccatcaggccgccgccaccttggctcggaggaatggagtcagcaggaggtgccttctgacgctgctgatgtccactgcggccatacctggcggcagcgaatcgaggaaggctctactgcaaggtgagcgggaaactgatcagacctttcctgggcttgaggaattggtattcgtggttcctttgcatgtaaactaatgcgggtccgcgtgcgcacagagtatctgaagaaatcgaaggagaacaaggaaaagaacgacaaggaggtaactggagactcttttcccgtggtttaatagtgccctatcgttgccagtcgattgaggggtaagaatgggtggagtgaactaaccatcccacaaacatggacacttttaagagaggcttgattacgtatttaagcgaacgatatacattgaaggactgaaaacacggcactgatcatgttgatatgctcatgttccagaggctggatgactacaacaagaggaactacagggactacttcgggctcatcgagggccaggtcagagagaagacggaagaggagcgcacggagtcggagaaacggatcctcgagtggctcgacaagaacaggtagtctaatgagcaggatcgaatggtcgatcatggagggccggccggtcgcacggggtgaaaattctcgcaggattcttcgtgttcccgctctagctatggcacgctttgtgtaaacaagtactccgtatatgattgactgagcgtactacgtcgtgtttgttttcctgttacagcgagagcgagcgaggaaacatgttatctcgttcgcaacataaacaaaga

SEQ ID NO: 145152 - DNA, 470 bp, Zea Mays
gatgccttgagcagaaaggcccagtgcaattgtatgagcatggatgtgggagttaccaccctgtgtgatgagttgtgcagattgaacctggaagttgtttcttcgggtgacctaagctatatctcggtggagcccacgttgcaagagcagatagtcagggcacaggttgaggataagggtgttcagattatcaaagatatgatcaagcaaaaggcagaaaaatacaagtgcttccgacaggacaacaagggaattatatggtttggagatcgattggttattcccaaggaccctgagctcagaaagcaaatactggacgaagctcacctttccaaattctctatgcacccgggcagcaacaagatgtaccatgatctcagatctctatattggtggactagaatgaaaagggaaattgccaagtacgtatccgagtgtgacacttgccagaggataaaggctagtcactt

SEQ ID NO: 145153 - DNA, 340 bp, Zea Mays
gaaagcgacagagcgcaagcaatcaggggatcgggtcaatctaagatccaagaaaaacgagagcccagaagccaacgaagatgaaataagaacaggggcacggtggcgctgacggatgccggcggcggatcgcggaacggtaagcacgacgactgcagatcgaagcggacgcgatgagcttttgcgcgaagaactgcaatgtggccatgtgggcccgcagtccttcacggcccataaaatgcatcatctattttttattttaaatttgctttataaaataaagcaccaaaataaaagatcataaagttattttcttagatattttattttagcttatttg

SEQ ID NO: 145154 - DNA, 526 bp, Zea Mays
caggagtcgaacctgggtctctcagaaaagaaccagctgcgctaaccagtccagacaagagtttagttttgtcaggtaatggaacatttagttatttgttttgtctttttgattagtttaattgccaccaaacggatctgaatctgcacatcgtcgtccacctctattcgatctgttcggtggccaccgcggctccccgacgcgacgccgccctgctccttctccttggacgcctttccctcctcactttcgcccccggaagacctcaaactgccgctcatcgttgctctccactctcctaactgtctggttcgacgttcttgcgcccgaagtgcttggatttgaggcctccctcatcctgtccgtcctactgttgctaggtgagcatgacgccatgacctctccttctcctctcctctataatttcttctttgaatatatacgaatagttattgctgaattttgattcaaattaaatttgtagtctgtaggtttgagaagatccatggtcaaaattcattgccgc

SEQ ID NO: 145155 - DNA, 388 bp, Zea Mays
aaaagaaaaagggaaagagagcttactgggccggcttaccacattttggcccaccaggaggagcaacccgcgcgagcccagctggtggagattggcgctgacatcttgggtccaccgggcagtcacccacgcgcgtgtaagagtgactccgcggctggtctgtgggccctaccggtcagtggaccgccgtcgtgcgttcgcggactccgtcttcctcgcgagcgaccaaaacaaactccacgcgattgctgctgggatttgcggtcttcgtgcgagggaggccgattctgtcgcgcaacggccgccgtgatccgtgtgttgcctcgggttatttataccgcgttgtagcgccctgttccccccaaccaagccctaggcgccattgctg

SEQ ID NO: 145156 - DNA, 404 bp, Zea Mays
ggcgttgttcattgagttgagacaaacttttatggtcagtcaggatggtgaattcgctatgttgcaagtaagcccgccattgttgaacagccaagataacagcaaggtactccttctcgtaagtggacaaaccacgagacctcgggcccaaggctttactgaggaacgcaagagggtgaccattctgcatcaaaaccgcgcccacaccatcatcgctagcgtcggtttctaccacaaacggtgtagagaaatcaggcaaggataacactggggctgaaataagtgctcgcttcagagtgttaaatgctagatcatgatcagatgtccacacgaacaaggggcctttcttcaacaacacggtaaaaggcttacaaataaccccaaaatgacggatgaactttcgg

SEQ ID NO: 145157 - DNA, 510 bp, Zea Mays
gctgggacattggtggtggcgcctcccccagaaactgatataaccttggatattcagaagcctgtcagtactcgcccaagacgcccttcccgggcccatcaatttgatcctcccgctgacgagcagaaaaagaaaaagagacgtctccgacgggtatctagtttggatcgagatgctggtccttcggctcctgctgctgaagaagttcccgcgcctgagcttactgacgctgaccttaatgagggtgctccacccgctgctgaccccaatgggtgtgctccacctactgttgaccccaatgggtgtgctccacctgctgctgaccccaatgggtgtgctccacctgctgctgaccccaatgggtgtgctccacctgctgctgacccaatgggtgtgttgtctgtgttgctgatgaggacgacggggaggaagaggatgaggtccctctgactcggaagaacagtcggcagtacatcgccagtggtgaaagtagtggagttccttctcctg

SEQ ID NO: 145158 - DNA, 1023 bp, Zea Mays
gttcttcttccctcaacaggccgcgcgacgcccgcggcaacagcgcaacaagcgcgcgattttcccgcggatcccctcgccgtagaattcgctgctggccgaatcccgttggtcggactccatcttctccgtgttcgcagcgtcgggcggaaactgaaatccgccgaactctgagcgcggcaacaaccgatcccggccgtgtttctcgccatccgtgcggactcggcttgagcccctggcctccctcctctataaatctctggtcgcttgtgaccatagtcatacctagctcctatgcaaaggaacaccaccgtcgaagagaagaagagaggagaagatttggccaccgcggatgcaaccctgcgcatgcgacactcgggcttcggtcgcatggtctgggcgacccgctggggtacatagatggcgtccgtggcacttgagcgaggagaagactctcggtggaggccgaattgctcaccggttcgtggacatcaccgtcgggccgcatctcaccatggggctggttctccactgctccacctcctagaattattctgggttgattccgctccacatttttgctacttcgattggggttcggtcgtcggggtgttggtttcgcgggcatcggtgagctatcggggcggagctcttcttccgccgccctgtcgtgcagtcgggagcaggaagaagcatggagtccattgatctagtgatcaacggtggctataggaagatgaagtggatgaaccaggaccgttagatggtgatccagcgcgtggaacccgtgatcgaatctgggcggtcgatgttaaatcatgcggtcgatgctggataccgattcgggttggagacaatctaatctgggccgcgggcttcagatccaacggcctgaattcgcatatacccgttcggccatgacttttgctaaagagcccccggggaatggtcaaactaacccgccatctatgctggttcaaacataattccaactgggtccttttatttgcagatttaaccctg

SEQ ID NO: 145159 - DNA, 620 bp, Zea Mays
aaaattctgtgccattgatgggggtggtggggagactgccgatgtggttgcctctggctaggttgccagtgaaggccttaacaagtgtcactaaggcggtgaagtatgttgttgagcaaatgtgttatgtaagtttgctgacttcgtcattttggttctattttggacatggataatcttggtttttctagtaggttggtgccttcgctaaccaagtggcgtcgatcgccttcgtcgactccgtcacctcgcaattgcggaccgagaagggggaactggaggctagggtggagtgcttgttggttgaggtgaagagttgagggcttgcgaagaaggctgtccagcttgagggggggagaacatagacctcagccatcaacttggagatctgaaggcgatggaggctatgaggcggttggaggcgctggcttctcaggggcgtgtagccatgatggaggccgaggtgcactgaaggcagggtgagaagaggtggaggttgagactcgggttggggtgggctcgagctttattttgcaaggcctactacgatctaggtgttgagttggtgcccttcgatgaagcggaggaggggctcaacacccatttccttggttgtcgac

SEQ ID NO: 145160 - DNA, 1042 bp, Zea Mays
ttcgcttgggtgatcgggatagaggccagcgacagcacctgcaagtggctagttttgtttgagcgttcgtttttgcgtgaactgatggagctatactttgtttacaccatgaaaaagatttagtatgtcccccataatcagtttttgacgaataattttgtatttccttttggagatgctctaagagtgaattatgatgggtactccaacagtttctttaattatgacatgtggcgcaatctgtacagtcgtcgggaggccgtgaatgatatgatacgttgatgaatggattggtgagagatagaacacaccaaaatatgagggagaggagactgtggatgcaggacgctaattttttgggggcaagaatgagggagctgttgaagtaagaaaaacaactattcttgactaatatttgttttaggattagtttacacattcttttggagttgctctaagacgagaaaaatgatgagtaaactagtagatctaatcttagcggcccctttaaacccgtctagttagtcgggctttgttgggatagcccgcgtagcagcggcttgtcagactattaaccgtgtcagaccgaggtgttaatttgatattttcattatgatataatgtgaataaattacgaaaatagccacaaaataagtgagtgaataggactcaaaactgttgttggtttgagaaagaaatacagccgcactcttctaaccggtgtaactcaagtttaattatgttatacgaaggatataccccctcgcgccaatgtattgtccaagagactagctagatgtattgctactgagtactcaactgacataacagaaaaaggttggaggaggaattagcggaaaaataaagagcagagtgtgaaacaatggcgaggcaacgaactccagcagccaaaaccagctgggaggcagcctggccgatccggccgggaggttgacttggatggcctgtttggttggtcgccctacatggccggttttgagcaatactatggttttactgtggtaaagtaaaaccgtagtat

SEQ ID NO: 145161 - DNA, 547 bp, Zea Mays
gtgtggattcaggaaattttaaattcatatgtgacatatgttgaatcccaggaactcattacacaactattggtgcatagccccaatgaacaagggtatagcttgcaacaaggcatcatcaaaaagggtgcaaagatcttgataggatctaattctactctcagaaccaaactaatttcagttttacatgatagtgccatggggggcattctggaatacaggccacttaccaaaggatcaaaaaactgttctaatggaaggggctgaaggtggatgtcactcactttgtccaacagtgtttaacctgtcaacaagccaaaccagaaaggacccatcccacagggctactccaacctcttcctattccacagggtatttgggcagatgttacaatggattttatcgacgggttgccaaaatccgaaggttttgatactatcatggtagtggtggacagattcactaaatatgggcattttcttccactcaaacatcccttcactgctcagggagtggcacatgtgttcttggagcaagtggtgaagtt

SEQ ID NO: 145162 - DNA, 453 bp, Zea Mays
gggagaggaagaggattacggaacctagctggcgcgaggatcggcaggtagttcgggcgggtcgttatcgctgcgaggaatcggtgaagaagatccacagggcgcggtgactgacgtcgtggctccaccggtcagtgacccaacgaggggatggaagcggtgtgagggggaaaggcttagcggctgccgtgtggggctgggtagtcggcgccaaggattgaagttgggctgctgcgcgcgcgaagtgaaatggggagatgggccgaactgaggttgagccggcccaagcagcgttttaaccttttcctttttattttcttatttttccttattcccaaattcagtttgaattcaaatttaaattcaaagcttgttatgagcttcacctttgagtaaattataccaattcaaaccctagtgtaggaatcatatatctttgtttacttatttttc

SEQ ID NO: 145163 - DNA, 608 bp, Zea Mays
gtgagggctgggcatgtcccaaccagggttcaccttcctgttttcactgtagtcaaaaacagattttgagacaaaaaaatgacttccatatttttgaattttgaactagaatccactaaaaattggaccagttttcgcaccggcttagtaacggtaacggagaaaacatcgaaaactgacgataccgtaccgggaagtaaaacccttgtcccaacaccgacttgttcgtttggatgtctgggcggtgtttagggcttggttgggcgtgcaaaaacagccccatagcgacatagcttggctcgacggatatgtctaaatcaagcgtttttgtgggcctgattgggcgagtgtagcgctggttcacgcaagagagagcagatggatcatccagacaactaaacaactgctccactcaaacatgctttcgacatgatgttcctatccaaccgtccaaacataccctatataatatatgtcgctggagttagtcaagttacccactataccattcattactgaaaaatataatttcatttgttttatttccttcttcctcacaattgtttttatgatccttgtgactttgcctccctacgtcgacctaccat

SEQ ID NO: 145164 - DNA, 428 bp, Zea Mays
tctgtattaagcatggacttgggcaagggtccagaggaggaaaaaacagaatattgctattttctctcggaattaaggaagaactcttccgtcctcctgcttccgatctacttcttctatctccacatttcctatatatgaaaggcagtagaaaacgtcgatgcagatagtatccacgtcatcttttattttcctgatcgtcggatcacaaatgaatggttcagcttctcctacaccaactagcctcttcattcacacgacaaatcacgaagcttccagacgaagccaaaacctctcagctcccagggcgatgtcgtccaagctaaaaagttcggccaccgcgacggcggcgacacttttttgctgccgagtcacacgacgccatgggcaccatcccctccgccactcccctcaggcctcaaccagcg

SEQ ID NO: 145165 - DNA, 609 bp, Zea Mays
gcgtgccatcagagaccctcacagaagcagcctgagcttcgaccttctgaatctgctgatgaacgaaagggatgtagaaaaaacccaaaccatccacggcgtaaccacacgctagtgcagatggtttatctccacgaaactgcagacacctctcagtattatgtgcctcagatcgacatatgtcacaatagagtttggttgtgcaaaccttcatgacatgccccttagtaaggcacctatagcagtatggtgccttgccctccttcgctgctggtttctctgtcccaggaggcttgactacaagatgctcatccgacactccttttcctttatcctcccaagaaaattgtgactgaccaggcactatggaagcagcagccgaggtaatctaaggcgtcggtgggttaatagcctggctcaacagcgccactgcttgagccaaaaggtcagtggagggagcagctaccccagccaatttctgcgcatccgagactgatggcaaagagactggctgattgaggcccctgccaccccggatactgcccccctgatgcgatgaagttccagttccagaaaagcgaccacgcgaaccagcagaaaacccaacca

SEQ ID NO: 145166 - DNA, 581 bp, Zea Mays
gaggtcagcctagttcaagatgctcctaggtctaaggttttcgagccatgctcgtgctgaatccgccagatacaaggggaggttccacattatgaaatcgtcgcgatttgtccctcctgcctagcacgctagctggtagtctcccaactaaaggcagagattcgattcctcggagtacctcatgatattgatggggggcctacaacgctatggtacgggtgctcgaaggatgtgatggctaaaggcccgatgtctcggtggcagggggcttaggcttcggtcctcatcgggggttgaagcagccccacaacgccgattatactgttggttgctatctggcagggggcttaggcatgctccacgctcttgcatccctaggcgttgaaagggtgaggtctatgccgtgcttcggtcgggaccgggtggctaccccatcgaagcgttgttttccaccggtgtagaagcggtgcactagttagccctcagctcccaatgtcgtggcatggaactctcggcctgttgatgcacgacgaagttgaggagccctcggatttctttgtgggtccttcgtttgctcgggg

SEQ ID NO: 145167 - DNA, 1112 bp, Zea Mays
ggagggtgcttatcagttcctcaagtggtggctgaattggagagacttgaatcatatgattgagtggggggtggtgcagacgaagttcaaagcttcgatgacaatagaagagaagtcggggcctaaagaggttaaggctactttaccaaaagtctggatccaattcacaggcattccaaatgacatgatggaattcttgctaatttgggcggttggatctattttgggggtaacaaaaactgttgatatgaagtttaccaaccaatatggtatttgtcgtcttcaagtgatggtgttggaccctttgctgatcccgcagttcattgaggtggtgattggtgaatgtttatttgagctgcaatttcgggttgaagaaaacatggatggtgacagcccagttccagtggatatggatgactttagctgtggggaagacgaaaataagtcggatcaattagaggatgtggttcgtgggggtaattctctgccccctaataatagtgctccagatagtggcaaatctgtttcaaagggtgctggtaatgatggtaatactggtaaaaagggagcggcgcatgatgttattagctcggtagtccagtatgctgatttgggtttgggtatgcaaggtgttgatcatgctggtaatcccactcaagctgttgtgccagcaacctcgtcgtgtatggctgtttcggtgccgtgtactccggatgtggcagctatggctgctgttccagaagcaactatggggctaaccgagtcaggcaggagcaaaagaagaaacaggagcgggaatggggacagcatgcaaagagcttcaaagttgaaggctgctcgcaatttagatgcggtcctctctacaggtaattccatacgcagcctaccttatgttcttattcctgatgaagtagtgcagcggttaacttctttaggttttgtttgtgggaataatgataaatcttgggacaaattcctagagttgttaaccaataagctgagtggtgagtctggtagtttcgtagatgccaagtcagttgctttagagagagaggaaaaagagaggttagaggatcaggagcttgataacttcattttgggctctttacgca

SEQ ID NO: 145168 - DNA, 376 bp, Zea Mays
gcgggtggcaagtagataacgtcgcgaggtgaaagtgcatcgccgtcggtgagctggactccactccggctagccgccgtgcccctcccctgcgcactgatctttcggatagggttctcaccaccgtcgtgctgtcaccgtcgcgcaccacgtgccttagcgctggctctcatcacggtgaatcatgcggtgcatgtccggtgatcaccagagcacctgccacggtgaaaggccactgtgtcatgcgccagagacctttttcctctccggccgccaccgcgccatcctcaattcaagtgccaccgacgaagttgcctataaattgagctcgtgactagcttcgcaatatcattgtgcacccccacgccaagtattg

SEQ ID NO: 145169 - DNA, 1203 bp, Zea Mays
gtagagagggacggcgggttaatttgactctcttcgggggtctctttagcaaagtctatcgacgaaggggtatcggacgggctgagccgtccgatcggatatcaagagtccagattagatcgaaggggggtacgggacagtgaccgtgagatcacagatcgacggcagaggttttaaagaggtaaggagggttctggaccgcccgattagagattcacggcccagatcggccccggccgaaggggtatcctatttctaatcgtagccgtccacgcgatgatcaacggtcgcggaagcatcgtctcctacccagcccgagccacccaactggcctcagcgcacggcagcggagtcaccggagtccatgaatccgaccaacccgagcgccagactcaaattcgttcggccctcgcgaaattgacgatgcccagagcctgattcacccatcaattgctaccgccatccatcgtaggacccggcccacagtgcaccgcgccagcatcacccgctaccccgaattgacacacgagccatggctaattgagtgcaatacaactgacaaaccgaggaattaacggtgtttctcatacctaattgcgcagcagaggttctccggccccggtggatagttggaggtcgagattccgcgacaacgacgaggaacttcagagagtcgcaacccaatttgtgtgtgtaggggtcttggtttgcttcctgtcgtactgaagactccaatccgcgacaaaccgaacccacacgatgtgagtgcggtgacggtgccgctcgcaagctctcaatctctctcttcctctcctcggatttctttctccatcgattttgcgttggcgctcggttccagctcagatgtgacgaaacggggaggccgaagtggtcgtggctggtggctttgtactagcgatgcaggtcgggatggctgtaacggccccgaagctcacggcgcgacgcggcatgcgcggagcgagagacgcgcggagaagacggacacattctgttgaagggaggctgacgaggcgatcccacgtaccagtgacaaggaaagaatccgcgcaaggaaggagtggctgaccaggtgggtcctacctgtcggcacacagatgcggatgggctgcgcggtagtgaggtgagatgtggtttgggccgagcgcaggtgaatccggcccaacagacttcttttcccttttt

SEQ ID NO: 145170 - DNA, 295 bp, Zea Mays
cgggtgtgtcctaatgcaagaaggccgagtcatagcttacgcttcacggcaattacgtcagcatgaggagcactatccaactcatgatttggaattagttgcagtggtaaatgcccttaagatatggcggccttatctgctggggaatatatgtcatgtgtatacggatcacacaagtttgtagtatatttttatccagtcagaactgaacatgagacagagaagatggcttgagctaattaaagactatgacttggaaatccattatcacccaggaaaagccaatttggtggca

SEQ ID NO: 145171 - DNA, 1033 bp, Zea Mays
ccagcgccgtggcaattgctccggcgatcaacgaggagcaagagtgagtcacggtgatgcggtagataggcagagacacgcagcggacaatggcgacgacttaacggtggtgagaatccttatccgagggtggtgagtaaggggagaggtaccgcggctagctggagtggcctccagctcaccgacggtgatgatctttcctaccccgatgttatctacttgccccgagcatgaatcccgacgccggtgtcacgaatcgtggcggaggattggtcatcggcggtgagagttccgcgctggcagtctgatcttgttcagagtactgtgccatcggacccttcttcagttcatctgacagagcattttcaaagcaacttttcttcagattttgcatgagaacttcatcaaccctctataccaaagttatagccccatgttccagctacaattttgttatgggaatcatgcccaaactttcactggatcatgtttaaatctgggttcaaagattgacccatcacaatgtcagaccaagtttcagtcatcagtcagcctgacagcctgactttgagtgggattatctcccatttcttctcaacaactttgtttgcattcttaaacaaatttgttcacctaggataggtctacaagtttgatgtggtaacctagggcaaaaaccttagaatttgaaagttacaaagccccaaagttgagcttataacattgatttttagacttagagtgaaatcacaacttggggtatttttgcaaattagtccaaaacatagggtttagcttgcaaatcttcatgaatgtgaaccatatgactttacataccttaacgttgtagtttttacactttagtccaaatgtgcactacttttgcacataggcccctagggtttggatttggggttttctagggttccaattagggtttctggtatctcaggggtataaatgtggttcaaattcatttttgggagcattttatgactattccactaaaggttttgggttttctctatttggg

SEQ ID NO: 145172 - DNA, 367 bp, Zea Mays
gccgcagttgtgacagccgtcgtctcgtgccggcttcttgttgccgacggcgccgccttgggcacctccacgggcaccaccctcagcatgtcctcgcgccccagccttgggcacctccacgcggcttgccgcgtttgcgaccttgtgtcgaggactcccccttcttcttgtcaccctggcaggcctcccactgctcccgagtgagatgtagcttcccgccgatagtgataggcccagagggagcctgtggttcatcgtcgtcgaccatcttgagacgacctatcgcctcttcgattgtcatcgtggagaggtctagcagagactcgatcgagcgagcaatctgcttgtacttctcggggatgcaacg

SEQ ID NO: 145173 - DNA, 370 bp, Zea Mays
gggcgattagtcccagttggcctcgtcttcaggatgggaggcggagaccggtagtcctcgcgcccagtcttcgcaccttccctgtttgtctgcccctgctaaacttcttacgaagtggattaatgcgcagaaaaacaactatcaaaggagtcgttcggccttcgcaccaacaattaaccttataacattagcatatgccatactaggtgtatgcccataccttgctacgaagtgaacatgtaatgataagatacattgaaatgtaaaagcactatttatctttatatgctctcgttataaaaataagtatcaggaagcctaagttaaccagtcccccgtacctggccgaccgcctaggccaccctccccg

SEQ ID NO: 145174 - DNA, 518 bp, Zea Mays
ctctaaggtcgatgaggcacgggacgctgctcgagataactccaacccggcatcaggcacatcagcgcaaacttccatcattccaccatctgccggctctgacaacagatcttttggaccatgtcttcaagagtctgatcaaagtttgccagagacaattcttgcagaccaatgagggcagacaatgctggagaaggaacaccactactttccctgctagctatgtagcgccggctgttcttccgaattagagggacttcattctcctcttcctcatcttcatcaataatgcgaacggtacacccattgggatcagctgtggccagattacacccattgggttcagcatcatcaaggtcacacccattgggttcagcatcagtcgggtcacacccattgggattagcttcagcaaaaactggcaccggcacttcctcagcagcaggagcagaaggaccggcatcctgatccaagcatgacactcggcgaagacgtctctttttctttttcttcccctc

SEQ ID NO: 145175 - DNA, 363 bp, Zea Mays
ccatgatctagagaaggcatatggtggaaaggctaaattggatttcatattgagaagtcaacggtgctcacttaatcgtgagggtcttggatatgttcccaagaaaggaaagaatgcttttataaagcaaaagacattgtttgtgaaagaatgtgacaaagtgtgtcacaagtgtcacaagaagggacatatcaagaagaattgtcctaagctaaagaatgtatcctccacttgttttgagcattgttatgttctcataatgcaaaaggtgttcatgctaaatttgttggtacttcaattgttggcaataagaagaaagctatttgggtaccaaagaccttggccactaacatctaaggaccc

SEQ ID NO: 145176 - DNA, 749 bp, Zea Mays
gaattctacatggtataggctcccgcttatttctttgttacaagcagtaatctaaatttgcaccattagatcctcaagccaaatttagatgtccttgctctgctattttgatgctcgttgttgtaactatgatctcgctcctattttatcctgtgtgttcgtccccgagtgtgtagtatgaagttatagcaagatgcttgtatattgtatatatatgtttaccgaaatgacgaaaacattagtggagcagttaccgacaaggtaagcagcgcatctacatagctgtccccgatgcatgcttgtcgtcgatgcatgtctcctacagtacgtaacgggagtgcagaattgttcgaggggggttgtgcttgtgcctgtgcatgcatatgcgttgaggccctttgtcggtagcgctaggtcgctagctctgcattcgtactccgttccgttctcggttcttctttggaacgtccggagcattcgagcgccgttccggccggacgcgcctgcctggtctgccaaagcgaacccgatcgatcgcccggcgcccggcggcgaaccgcgcatgcacgagcgagcgacaggggcggggcccgcggggcatttactgtcgggcggccgggctcgtgccgtggagtggagtagtggaagcgcgcgtgggacggagaggagcggaggtggccgtcgcttttgccccgcggaggaggcgcgccacgtgcatgcatggcgagagggagggcatgggcgttggc

SEQ ID NO: 145177 - DNA, 432 bp, Zea Mays
gcaattctttgttgtttgtcccttgttgtccacacagaaaaggaagaacaactttcttggttgagcgttgaatcttcctccaaagcttcaaccacctttcccgcctcttggagtaggttggtggaagttgctatgagaggattgttgctaggttttggactcttggggttggccttgttgtgcttgagattgactaggcttgtcttttgtgctggtttggattatggatgtttcttatatgcttccgatggaaccttcctctgaagcccctggtcatcttggagtacctttgagcttcttcccttctttgacaaaaatcattatctaccctgatatattcatccatcttctgaagcaacttttctaaggattgaggaggctttctagcaaagtattggatagccggacttggacgaagcccttgattatcgc

SEQ ID NO: 145178 - DNA, 709 bp, Zea Mays
ctaactgcgccaccgcattgccgtgcttcgttttagcttcccgtcgatcgccggagcaattgccacggcattggacacgaagcacttgcgccagtgaacgtttagtcctccgaccgccgcgcgtccttctccaaattcccggccaccgtcgatgccctctataaattgatggcacaggcagctgcgttaccttatcgtgagaccagagcccccattcctaccctcaatcatcctccagagctcaccaatttccaaatttccccaatttcggtctccgccgtcgtgaaacacgcctcgctgcggctagctcagctcaggttagttcataccgattgctccctcgtttgagtgctctcgtgtacctgtgatgcttaccaagtcttcaattcgaattgggagtccaccaatcgtcgggaacacgatcaagtgtcagtagtctccgcagttctcgtggacagaagagagtagatcaccatttgcacaattaagttagggaaaaggtttaggatgggttcaatttggtgtcagtcgctcgggaacgccggtcatcgccccaatcggccggtacggtggctcgccggagtgctccccgcgctgccgtcgtcgtggactaggtctgcgaagaaatagatcatgagggcttatctgcaagttgtcagcgacacagtagaatagtgatcaaacctgtctgcagatagataaaaccgcg

SEQ ID NO: 145179 - DNA, 408 bp, Zea Mays
cgagcgcttccagcgcgaccctgctgatgacctgtagagtagtagagacaaagcaagggttccgctgggaagcgggtgtaataacttttgattttgcaagatattctaagaaccgctaatgaggtagcattggaacttaaacttatctgtatgttatttgtccttgctgtgtgtagcgtcattaacttccccttggtacttggccccctgggaggtaggctcgacgtgtcaaggctggataccagtataccaaagataaaattgatggtccggcccctaggacctggacctgcacacaactccgtctttgaagtgttaggagcacacccatagtacccatcgtatggtatctgccatcctttgattcatgcaataggacctacaggacttagactgggaagccaagcc

SEQ ID NO: 145180 - DNA, 637 bp, Zea Mays
gggcttttctttatgaagcgtgaaaagaagggaaggtgttttttcgcctttggctcaaaaatggtacgtatgttaatttcactctacataaagaaaaatagtacacagtgcaatgatatatagaatacaatggcttttatatagagcaacacgcaaatgttaaattatttacatattttctacatatgaatttgacggtctctacaaacaatgcaatcttccttcagtactttctctgcagcttcgttcagtagttggtcgacggcttcgtctattgctgcatttaccactctaattttgccaaggatttcctttagcgacagatcagcttcggggtcatatggttctagtggtggagaatattcgctgctcaaagaaactatttagtggctagatgatgaatgtaagaaataacgaggagacaaattaaaagtaaaaacacatacatatgtgtcgttcaagctccgcagcttcttcaactttcttagcttcttctttagcctgatgagcctgagaaaaaaagtaagagtaagataaacgcggacataactcgcagatgcaaaaagtaaaggttcagaatttgaaatgacctcttcttcattttgtctgataacttcatctgcaatctccctcccac

SEQ ID NO: 145181 - DNA, 643 bp, Zea Mays
gccgaagcgagaccatatagggcgatgaataatccctctcacatcctccctctgactcaggtcattattcacataaaaccattcctacatccaagaacctggccaccttttccgaaacatgggcacagggtaattcgcctcagatcgaggcacgaagctgtaacaaccaaaattgttgtgatattgttcttttctgctcgccttcgtctgataagacagttcatgaatattgcaaaagcatcttgcatctggttccagtcattggctcctcatggcccagataaaacccccactctaataagagcttcgggggtaatctgatgaaggtatatctcaaatgttttcaaaacatcgactaacatcttatgaagcgggaaatgaagcccagctttcatgaagctcctaaagactaccacttcatcgctttctagcaagggaacaatgtcctctcccccatccctcactaaagatacatcatgaaagtatttccccttcatcacttcaatctaatcttgcttgatggtggatttccaaaaaacaacgtggctaggtctccacggccaatcttcggtaatctcattctctcacaatatcgaagatttcactatcgcttgaatcaccagatagcccagccaagatttcg

SEQ ID NO: 145182 - DNA, 320 bp, Zea Mays
ctcgggaaagcgagacttctgacataactcagctgttacctctaaaacgccgacaacatcaagcaccactcggccgtcacctctaaaacgcagaaagtgtcagccataactcggcagttatctctaaaacgctgacagtgtctgtcatgactcgattgttacctctaaaacaccgacaacatcaagcaccactcggacgttacctctaaaacaccaacagtgtcagccataactcggttgttatccctaaaacgccgacactgtctgtcataactcagctattacctctaaaaacactgacggggtcaagcataactcgg

SEQ ID NO: 145183 - DNA, 806 bp, Zea Mays
ccgatggtgtggattgcgaacgtgatgaacggggggcgcgggggattggttctggacggcgatttctcgccatcgaagttaaatccgccgcagatccgctttcaccgtggacagaggattccgcgccgctaagcttggtaagaattggttccacagtttcttctttgtctcgaatacacgtagcaccatccggggtagctgttggggctcttgggcgtcactctggtcgccggttttgtgtgccaccgcggggattgagatgctcctccatggaagaacaccggggggaagaagaagctagagagccatcggatccaagatgaagggtgtagattagatgggcgtatcgatcgatgtgggttgtctatggccgttggatcgatctgcgacggttgtgattagttgcgcaataacgattcggctggtgcgattgtggaccgttgatcggggagcggaggctccagattagaagtgagagtaccccttcgtcattttaagtctgagccatcggattttaatcgtgttgctctcggtagattggatcgtgggcattcgtggaccgtggatctctgatcgtacggttgacgttgcgtaccggcttataaagcgcccagatctaatctgcaccataggatctaatctgggcggtccgcgttcacccataccccttcggccgcgtcaacttacaaaagagcccttacactttctagaaaccaacccgccatccatcctaagccaaaacaaattgcagtcgagcccagaaaattatgttttagcccctgcattcttataaaattgtgcgccca

SEQ ID NO: 145184 - DNA, 528 bp, Zea Mays
tgcgctggccgcagtgccgcacaatcccacggtctgccgcacgccgctgcacagcccgacctgcattggccgcgcaatgccatgccggcccctagcaggtagaaatccaagattcgacaaattttaaaaatacaaggcatgggggaccgcacctgtgctggaagaatggagagccaacaatggttaatgggacgcgtgaggacgaggtggttctccaccgtcgttgtcgccgacgccgcagacgtcgcctctttgggatggacggtaagaaggtttccctcatagagttgatttgtacgtggactggaagcctccaggagaatcgggtagacatcgaaaaaagtattcgcggtgagggtaattttttgatcgctgcacgtagctactcgctgtgagctacttgccatcgatgtattatcgaacgactgatgatttagatactgacgtggacatcgtaagatcacagaaatacgccgcgctttaatatatagaaatatagatggagaaggaggcgaagggctccttcga

SEQ ID NO: 145185 - DNA, 413 bp, Zea Mays
ctagactgccctccaaggtcgacgaagcgtgagaaactgtctaggttatctcttgcccgacaggattaccagccaaagggacgtcatctaggacctctgttcggacgacagaactttcggtttcaggaggctccaataaaaggtcttcaagaagaatttcctctagggcatggtcaatgtcagacatcgtcaacccctagagactaaccagtcctgataaagcctgcattggaatatcattgctgctatggctgtggctgttcttgcgaatcaaagggacaatttcctcttcctcctcttcatcctcatcaagcacacgaccaccaactctaacaccagcacaatcttcaatgtcatcgtcgaggttggtgctcgccaggccaccaccgaggaccgaggcagtaggatcagca

SEQ ID NO: 145186 - DNA, 473 bp, Zea Mays
tttagtcaactacctattagctctagtgcattcaaatcagggccgtccctgtggggggtgcaagggtgcggccgcaccgggcccccaaaaatagagggccccctagccaccgtacggtagcattttttcctattaaacctatctattatagacacaaatacgtaaagagtgatgcgttattgagttatcgactagtcttgctcatattcttaaactgtctcaattacttatcgaatactccatccgtttcaaaatagtatttgttttagttcttgatttttatgtttatattgatgatgatgaatccactaaagaagcaaaacaaattctattttgatatagggagactgggagagtattataaactatacatatgatggttgctttggcagagagaagctttttaaaattaaaatatttttgtaaactattttttatcaacaataactcaagagatgttaaatggcttggtg

SEQ ID NO: 145187 - DNA, 489 bp, Zea Mays
agttgcgggtcttttggaccactgagtcaagaatctttattggcttttcccggtactggagatctttttgaatctggattgtctctgcctcgatgtggttctcaggtacttgcaggcacttgcggagctgggatacatgaaacacgttgtggatatctgacatggattctggtaatttaaggtggtatgccgcgggtcccactctgccaatgatgggataggggccgacgaatcgcggtgctagctttcctttcatttggaaccttttgacaccacgcatcggggagaccttgaggtatacgaagtctccttcctcaaatctgagttctctccgcctgttgtctgcataacttttctgtcgactctgagcttccagtaatcttttgcggattagggcaactttctctttgtcctctttaacaaaggaaggtccttccagtgtcttttcccctacgttggaccacattaggggggtctggcactttcgtc

SEQ ID NO: 145188 - DNA, 404 bp, Zea Mays
ggaaagccatccaggctgcagagggtgagcctccagagtcagccaaacccaacaacgtggcacccaatgctcctcgtacaactgcactgtgtacagaggggtgtagggtaaccagcggagcagagcaccccccacaagatggtgggaaaaccctcgtgggaaaggtagtcaaaactgaagcgagtgtctcctccattgacaggggtgggtgaagtcatctgtgaaagagggttagatgtaagtgttatggtagtggtaaggaaaacgtgtgcctgggttgttaaaaggaggtgggttaaattagatttgcctactctaacccatttcattattcattattaacaatgcctgttaagtccataattagatgcattttcccttagtttccaatttcttcatatttt

SEQ ID NO: 145189 - DNA, 528 bp, Zea Mays
cgagcacctaaggtcactcaaacacaagagcagcagggatgaactaacctgtatcgcgctggccacggcgaggtgctcttcgcggtgtctcagaacagatttgggggaaacttaaaattggtgctcatggttgcaagattgggggcgatactagatggtggagtgtgtgatgatgttgcggagctgaccacgggctcaatttatactaagcggaagcggtggccgggaattgggacgatgacacgtggcagtcggagggacaaggagttactggcgcgcgtaaactcatgtctaccgtcgtggcgacctcaccggcgatgattagattgctatagagagtcacggcgacgcaacagaggtgctcaattgcgtggcgcaagactagaaggcggctgacgccggtgagcttatcagctcaagccgcaaagcacgaggggtacagcggtgagtcaccggagtcatccacaggcgaagagctattagctggcaagcttatcaggtcactggtgacgtaaatctcaacggtgg

SEQ ID NO: 145190 - DNA, 440 bp, Zea Mays
cagcccattagtttcctcccccgcgcggcccaagaccctcctttcttagcgcgcgctgtcacgctggcaagcgggcccctctgcagtgattcggtctcctcgcgcgcgtggttagtggctctctgtgcggtgggccagggcggtcagctcgaccttctctccctcccagcaaaatcgccgcgcatggcgggcaggcgctgggatccattctaatcggcaagtccgcgctggaggaagttgaccgagggctcggggataaattggagacggaagacccacctgttaagccacatcgaactcctgaggccatcccaacataaaccgaagcgccgccagtgctcacgcgcagatttaggtagtcctccgccggtgctactcctcgtgttgccggtgtccggtggctcgaggtgtgaacgtcggtactcggcggggtccttggg

SEQ ID NO: 145191 - DNA, 581 bp, Zea Mays
ctcaagacacctattgtacatgctctaatgatggcatgacatattttttgaagcagtttactgtagggagtgggactatccacctatagtattttttattaattaataaggagactatgtacagattacatggggagggttgagtttgtacacacacgctattttattgttgttgtaaccatgtttgcacctaatctgcaagcaaaggatgaggatcatttctcttcgaagcatgtctttgtaggcagctaatgtgggtgggggtattctcgaacatctagttttttcagcatttccatatgcaccaattcatggttataatggcctctattcttcaaggttttgtcagttgcagtcgcattagttgcaccacgatggattgctgagaggtgtgaggtggcgtgattccaattacctatcaacatcttcgcgcgaagcagctccttaggaataggtgggagaccatttcataatttcttccttttgtagtatgcagtttttgcatgtgaacgagtcaagattcatgtttcttctccggatcagtgatctagtgttcaatctatctttcagtagcagccaaa

SEQ ID NO: 145192 - DNA, 374 bp, Zea Mays
atcgcacgctagctctagcctctagctgagtgttaggtactgagatgtaatcagaaggagagctcggatgcaggggtcatgtgtgggccgtcatgtgggtcgtgtttggccgcggcgtgtgagagaggttaaaagttgtaagcacgatcgggagggggaacatctagagagaattgtgttaatatcttcttccccaacccttctcctcttcctcttattctcattcttctcgctaattccctatgaactctgttacttctgagcaatacaagtaggtcactgataattggtatcagagacaacgatcacgggctagatcacatgttctacacccgtgcgccagacataccggggccatggaacctaatttgaag

SEQ ID NO: 145193 - DNA, 659 bp, Zea Mays
ctcgagtgcacgccaccatatggttgtatgcgagacaaggttatgcgcacgatgagtctagtaaaagtccatcggtgtcggcatggtttctgttgtatggcggattgatgccttgcttggtcaagtatcgcgttccattcccattggataaataaatgtcttgttgatcgattagaggtcttatatgagcgttatcgcagcccaataattattggaagcaagtagcattcataagtcagtcctggttaaaattggagaacaattcgatagcatatgcacctaagtgctttaggtccctcagtagccaatgtaagtcttacggagttttatgccaggtgttaatgcctttatgttagacctcctaaaatatgatgctttaagtgacttgtgtgttgtccagtttaagttgagaaaaggttaagaaacattaattaacttgcttccacccatgttttgagttgcaatgtctaaatggttcgctaagtcttctactgtgattagccaactcatgttaaataggagtcgatttcgttaagtgtttgttatatatatatgttgtgtctcggattgcgatagtaataggcaagccgacgtgtatgctgtcgagcggaccgtgtcgttgctctagttagccgacttgttagatgacttggtttatc

SEQ ID NO: 145194 - DNA, 310 bp, Zea Mays
ttcgcggtcgcggatgggccagtgctccacggctttggggttggggcctaggcagctaggctctcgcgacagtcagatggccggattggtgacaacccatgaaatcgacggtctgtgaaaacccatctatgacgtatggatatagaccgtttccacccacgatataaaataaatcgacccaacccaattcacagtcaagtaaaatccatcattacccatctaaattaaactcatatctaaaatccacccaaaataaccatttacacccaccccatttgtaagtctaccccagttgttactagggtttctg

SEQ ID NO: 145195 - DNA, 614 bp, Zea Mays
atggggtcatgaactttggtttggatgtggttggttatggacatggccatggagtgaggctctagtgcattagtctcgtgtgtgtcagttaagggccatttcttagtagtgatgtggcaagtttgaaggtaccatccatataatagggatatgagtttttttactatgaagttgagtactttcatatggctcaaggtcctaaacaacttttgagtgtttctctaaccatttgtagagttgtcagaagttggggaatgtccatgataaaacttaggggatgcaacccatccaagaaaaaacccttggatgggtttcctgatgtggtcaagccacttccaaacctgagttgtacattaggaatggccacctcgtatatgcttttggaggagtacatgtgtgtgttcaaaattgcctagctcaatgtacattgtttgcaatcaccgtacgtagacagtaaaaatatcaatttttcacatactcaaaatatgtcagcaaccttgaaataagagaaagataaacatattgtgagcatatttatcaaataacaagttgtctatgtacctaaagtgttttttctttagaacatagttgttgggggccttcgtcttccgaag

SEQ ID NO: 145196 - DNA, 296 bp, Zea Mays
tttagtggaagacacaaccctatctcaagatgatgacattcatatttggaaacttgaggatttagtaaaagtgtcttctaagtccttccataaaaccttctttccagactttattaaatttgaaccttggaaaaggttatggaaatcttagcgcctctaaaatgcaaggtttttatttggttggatattagaggctaacgctagacaaatgccagataagaaaaagaggcccttcctacctaaatagtatcctctccatgagatgatgaaactattcaacatctcctgacttgttg

SEQ ID NO: 145197 - DNA, 635 bp, Zea Mays
gccttccaagcatcgccatctgatggatgcatcataatgtctgggtcttggatctcacgttctccttccttatgccacaacattagcttcgcagtttctggggttaaaaacagacgtttaagccttggagtgatggacatatatcgaagctgtttaactgccacttttgtagcaaaagtagctccatccttttttagtacctccgcatatcttgatttaccgcatttctgacaatgggtggtcgcttcatattccttccagaacatgcaattatcttcgcacacatcaatcttcttatacttcatcccaagaccggacacaatctttttagactggtataagtcttttggcatcttatggttcgatgggatgagatcaataatcagattgattatatggttatagcaatcattcgagaagttatactttgcctttattgccataagatgtgtaaccacctgcaacacgatcacagtggtgtcgtcatgcactttttcctctgacgcgtgaagaagcttataaaactcctgcacttcatttggtgtatcctgttctgaggccaatgttggatactctctactaatatcagccaccaagtcatccatccgatcctcctcctcatcatcaattatttc

SEQ ID NO: 145198 - DNA, 1333 bp, Zea Mays
gttgctttgtgctatgtcggcaccactagagaggagactcgaatgctcattcaatcctcccttctagagagagtgtgtgtggctcagcagcaagatcgtttgttgcaggaagctcgaaagagggtcggcgatggtaaaccctgtgagttcaccattgatgagaatgatttggttcattttaggagccatctatgtgtgcctcagaaatcagaggtgaagatggatatcttgagagaagctcataaaacgccttacaccattcaccctggcgaaaccaaaatgtatagagatttgaagcaaaacttctgggtggaagaggatgaaggttgacgtttctaagtatgtggccgcctgtgaagtatgtcagcgcgtgaatgccgaacataagaggcctacaggtttattgaagccattggaaattccagagtggaagtgggagcatatcatgatggattttgtggttggcttacctcgttctcgaggcagggatgctatatatatgggtgctaatggattgcttaactaagtctgcgcactttattcccatgaagaccacaaattcagctccagagttggttcccttgtatatgaaagaagtaatcaagcttcacggggtgcctaagtccattgcttcagattgagactccaaatttgtatccaaattctgggggagtcttcacagtgctttgggtaccaagctctcttagtgttgcttttcacccttagactgatggtcagtcggagcaaactatccaaaccttggaagatatgttgcgtgcttgtgttctgtcttggaagggtagctgggaggatcatctcgcgttggctgagttcgcttataacgacagctactaggctagcatcaagatggcaccatatgaggccttatatggtaggcggtgtatctcccctttgtgctgggagactttgggagagagatctctagttggtcctgattgggttcagcagacatctaagaaggttcaggagaatattctgtccgctcagagccgtcagaagagttatgctgatgtgaggaggcaggacttggaatttgtagtgggtgatcaagttcttcttagggtatcacttactaaaggagttgttcggttcggtgtctttgggaagcttagcccgagatacattggatcattctctatcttggcctgggttggcagcttggcttatcgcttgcaatttccggattccatggcaggggtacacccggtatttcatgtctctatgttgaggaagtttttgcgggatctggaccatcaaatcaagctggaaccgattgctatgcagcaggatctgactctagagtgtcgcccag

SEQ ID NO: 145199 - DNA, 582 bp, Zea Mays
gccaccgggatcgggatggagccggttggtttagggtttggatgtggagatctcttggatgtgggaaatgaaatggctcgaacactagtttgacatcgtttggctacaaaccgacggtgatgggacacggataatgggaaatctaaatttatggtaatgagtggatgactatttccctaatggcacacagataagggctgtagattttagtggcttggaagtaattttctcaacagataagtcacaatggcctcaagttgaattggaccataaggttagggcacctttaggaaacagtggagttggtatacgaacaaaattgaacatcaaatgttgccttgaaggtgggaggaaatcaaaatcaactagtaaagaaggggatcaacctgcaaaaacagtaaaaagagggcctacaaaatgcaagagatgtggtgaacttggacataggcaaactagctacaagtgttctttaaatggaacaaaaaaggaaaagaaagcctagagctcgaagaaatgccggagaaaataggccctttaaataatggtgcaatggacgtgtccccaaatgagtcaatgtactaa

SEQ ID NO: 145200 - DNA, 470 bp, Zea Mays
cacgttgtggccagacatcgtcgtgccatcatcaccgatgagtcctcgtcgatcaagctcgcttcgttcttctctgcgggaaacgctagccgcatagggtagggtgcattggactgccatgaacgtgggtcgccggtgcttccatcatgggggtgtggcggcgccacctgtgctgaccgggaaggaagcaaggtccctcaccgtcgatccgttgatggacagatatcgttgattctgggaataccgtttctagaccgttgatccagagataaatgcttacgattagatcctgtgtatcccttgcttgagtcaatctagtccatcgatatcaggatgaacagatgctgttagatcactcgttaataaaaccctgaccgtggatctcggatcctacggtggacaaaacgtactgattcgagttataggcgatctaatctgggcccttggttcttgatcaagcggcccagggc

SEQ ID NO: 145201 - DNA, 586 bp, Zea Mays
cgactaactgacaagagcgatgtttttagttttggtgttcttcttatagagttgcttaccagaaagaaaccatatgcctacagatccgatgatggtgatggtctcgtttcagaattttcatcattgctagatcaagggaccttggttgacattatagatcctcaaatcatggaggaggataaacaagtcgatgaagttgccaaactagcagcaaagtgtacaaaattgagtggagaagatcggccgacaatgagggaagttgagatggcacttcaaaacttaagagccacagagaagcatgctcataataatacaacatcaacgaataaatatgaaaaaggtaaaacctctcagtacatgccatttggggggctcgccatagaaacaagtagacaatatactatggaagaggaaatgttgttgtcagcaaggtatccacgatgagatcctcttgtggccagaagaataatgccgctttttgtacccgtttactttccaaataaatgcatgtatcaaaccaaaggacaattgttcctcttgttcgatcctcttttgaatgatgcccgaaaattttcttggggatgtg

SEQ ID NO: 145202 - DNA, 396 bp, Zea Mays
ttgttttcgcctgtaatctctttttttaaagttttaataaaagcgcgctgtaggggtttcccttacaaccttttccccctaaaaaatgaaaaaaagacccctaataggtcagtacaaacccccttaagaggcgaaaggttataatccacaattacatgacatcaaacataacccgacccatcaacagtttaaggccaaatccttctaagccctgatgccccagctaagcaccacagccccacatcctccttcatgcacgtgaggatgttgtggtcgcaagacgagccccctcgaagacacaggcattgtgatgcttccacaaccactaggcaactaatgcaatcaccgaatttagacctctaaactcctttggaactttaggaacagtcaaactcc

SEQ ID NO: 145203 - DNA, 279 bp, Zea Mays
agcgtttttgaggccgaacgacatggaggtatagcagaaggctccgaacggggtgatgaatgctgttttttcctcgtcttcttttgccaagctaatctgatgatacccagagtagcaatccaagaaagacaacacagaacatctggcggttgagtccaccacctcgtctattctaggaagtccgaagggatccttcggacagtgtttgttgagatccgtatagtcgacgcacaagctccaatccactttattctttttgagtacaagaacatgattagc

SEQ ID NO: 145204 - DNA, 554 bp, Zea Mays
cacattgagaagcaacagaagtacagaacatttcttaaatcattagtcaagtactattgcattttagacatttttgtgtaaaataaacaatgagccaaatttcggatgattgcgtgcgagttagcatccacgggttgaaatagaaaatcacacacccatacccgtaaaacttcatattgggtgcagatgcatccacgagtcaaaatcgttacccatatacccgcacatatcgggtcgagtacccatcaagttttaggtctacacgctaaattgcggtgaaagaaaggtgttccgtttctggtgcaaaattggcaacggaaatgaactagcttagtatgtgctaccacattgcactagaaacgatctagacaactatggcgtgtttggtttcttgtctaagctaaggcggccccacaactcgtctatggttaaccgctcgaatgaaattaataactaagcttagacagagaaattaggcaagttgtgtggcgcatttgtccattctacttctaatagaaccttcaagaggaatgaacgtacgtgctgagtccatt

SEQ ID NO: 145205 - DNA, 532 bp, Zea Mays
ggtggtaatgtggtatcattgtcgtcgtccaagaccttgtcctcttcgaccatcccgttgatggtggcgtcatcagcaaattccatcaagtacaagctcttcacggtatactgctaaagatggtacttggagaactattctataaatttgaggtagtctgtggatgcaccgttaggccatcacccgcttgaaacgagaccttggcggtggggcacttttagtcgaggtcaacagtgtcgagggtagctatttaggggtgttccacacaaaggttgtgcacagcatggtggaagtggcaacaggtgccacgcagattgcagagctcacgcacgtaggcgcccgagtggctcttaagtctgccttgttgtcatgcaactagaggcggcgctcaaattcgtgtgctagtcccatgtcgtcatcgagtgtctctagagcatgcaattcgatgttggtctagaacagacccatggtgaagatgtagatctactgctgctcggttacgttcttgcgatgggccgaaaatggtaggata

SEQ ID NO: 145206 - DNA, 378 bp, Zea Mays
cgcgcggattattatcagaaagttcaggggcttctacgtaaatcgtcctaagacccagagcactctacgctggactgcgggttcatatgccagaaacagaggggctcttgtgctaatgtgtacaacgaaggggtaagtacagatctcagccatccgattacatgccgacgcaccagattaattcaatgccttcacgaaccggtatgccgtgcggatccttggatccagatcctacggttctacgcgttatgaaaataggatccagttacaaccacacgattctaatatgaccgcctgcattcgatgaactgaaggggtactctagatttgatctacgccgcccatcaatgatcccacgtttcccaccatcgcgaccct

SEQ ID NO: 145207 - DNA, 455 bp, Zea Mays
gctgagaaggaggcacgagcggcggtggaatctgctagtaatgtcgtcgataaggttcaacttgtcgtccaagctgttaagtatcgaagctttgttgaagataactccaaggtgactgattttgtttctctcttcctttgccgcatttggaatagggtttagggctgctgttcattcgaattagggttagttcttcataaacatggtaacttagtcatccacctaatcaacattctagttttatttctacaggaacatgttgatttgaagtatcacgttagcatcaagaactcactgcgagatgtcattcaagagatgaggaggcaatcttcactgttacataacatgaataggatgtgttgtagtatcccagaagttgaagggggtaaggttggaaagcttgctgcccatttgaaggatgtttgcaagaacctcgagaagacttgtattttctg

SEQ ID NO: 145208 - DNA, 587 bp, Zea Mays
ggagttcctagcctagtctcgcttggatgggatgttcgtgctgtcctctaatcaggatcttcctttgtgctattgggatagtcgctccaaaatccgaatccatagtcacggtgttcctcttttttggatcggtatagctgcttctacatcctaacccatgcagtttgttgtgaacttgggattcatgtgccacggggggtttgttgcagccccatcgccactgctgcagtgttgctacgagttaagtagtgggttgtgcccctgtaggggtagatggtattgacgatcgattgattagcaccagttccatatgatgtctttcttgcttcctgcaagtcgtttctgtacctttaagttaggctagatgtagtccgtctcacacccaagtgggattttctgaccagattgtccctgaacgtgtatttatgctgggatgctcccttcactcgtattccaggacacctagctgagtgtactatttaactgaacaaagcattgtttcctctattaccgttcaaaccctgatccattttgtagcatgttgacttgacattgggggaaaaagaaaaatactaggtataaaacca

SEQ ID NO: 145209 - DNA, 1005 bp, Zea Mays
cacgagccacaagacgagctttatacctctcaatggaaccatctgattttgtcttaattttgaagacccatttgcatgtaataggaacatgtgagggtaaaggaacgatatcccatgtaccagtgcgttcaagagcagccaattcatcaatcatagctagctgccactcaagaatcccagaagcttcctgataagtagtgggttcaacaattgccacaccagctcgtgggaaaccatagcgatctggaggttcaatggtaccacgatcacgaagacgatatccctgattaaaaacatcgttagacacataattgttagtacaagaatcaggtacaggatcaggatcaggaccagccgcagggatagaccgggaacgacgaatgtaggtttggatgataggtggtttggaagagtaagtagaggatgacgtggaggtggaaggtggtgttatgggaatgagaacatcagatgtggatgtagaaggtgatggttcagcagcaggaatggaaggaagacacatgaaagaagtagaatctgtgggataatatgaggagtgagtagactagttgtgaaagaagggtcgattttcattgaagctcacatctctagaaattcgaatacgacgagtagatggatcataacaacgatatcctttgtgttcaggactgtatccaaggaatacacactctacagattgagcagtcaatttagtccgctcacgaggtggtaacaaaacataacatatacatccaaacacacgaagatgatcatatcgtggagaagtcccaaaaagaacttcacctggtgatttgccagaaagtttagatgaaggttgtctattaatgagatacacgacagtggaaacagcttcactccaaaagtgtgaaggaacaaaagaagatatcaaaagagtatgagcactctcaataatatgacggtgtttgcgttcaacaacaccattttgggcatgagcaccaggacaagaaagttgagcgagagttccct

SEQ ID NO: 145210 - DNA, 295 bp, Zea Mays
cacgtttacagggtctccccattatttctgaaaccgtcccgatattatggcgatgtcaatgtcaaactaaaatccgtaataaaatatttacgcacaatgactcaacgttttacgccaaacggtatatactatttatgcaactattatgtcgtttcggttttatgccatagctttcaacatcttatgctacatttttttaccttccgcattacttcccatgcaagatccataaattacgcgcccacgtatcatagtaatcacgtttgcatgtggaaactattccctttaattccgc

SEQ ID NO: 145211 - DNA, 336 bp, Zea Mays
gaaacacattgtggatatctgacatggattccggtaattcaaggcggtatgttgcgggtcccactctgccaatgatgggatagggggccgatgaatcgcgatgctagctttcctttcacttggaaccttttgacaccacgcatcggggagaccttgaggtatacgaagtctccttcctcaaatttgagttctctccgcctgttgtctgcataacttttctgccgactctgagcttcaagtaatcttttgcggatcagggcaactttctcttcggcctctttaacaaaggcaggtccttccagtgtcttttcccctacgttggaccacattaggggg

SEQ ID NO: 145212 - DNA, 271 bp, Zea Mays
caattatcaaatgtctcggtatggattatgaaaagatttatgtgtgcaaaaatatttgtatgcttttcatgaaggagcatacgggggagaaaaaatgtctgaaatgtggacaatctagatttgtggaagttgttaatgctgagggtgacaaggtgatgacagatgttgaacataagaagcttcgttacttgccactgactcctcgagtgaaacgattgtttctatctaaaaaacccgctatgcacatgcgatggcataaagaaggtgtccg

SEQ ID NO: 145213 - DNA, 425 bp, Zea Mays
ccctgccgcgccgtgtgtgagcagtcagctaccccctgcagctccaaatgtcaacgtggggggatggtcggttgtccggccgcggcattggtggcgcaagatcttgcaggatcctgatggcgcttcacggaacctccaatcggacaagacaggcactagtcatttcaaattgaagctcaagggtaaatgctacaactgcttctcatcagcgcatctcgcgttcagctgttcggccccttcgcgttgttggctctgtctgaaatctgggcaccgggcgagatcttgcagccaaaaaggctaccagggaccattcaatgctgcgctcttcaacactggaccaaccaagcattcatcaaagagtaccaactaccaggagttactgccaaagtccaacttcctccataagtaccaggccctttcccagg

SEQ ID NO: 145214 - DNA, 403 bp, Zea Mays
taattgttgtagtagtagtagtttagtagtagtataatgtagtttaactagtagtgtaatgtagtttaattagtaatgtaatgatccccgacttatggaaggataaatgaagtctatttcatgccacttcgctgttgtgtattatgttcttttgtctgacggtctgttagctttctagaggtactgaccaagtcctgttactttgctgcgaccaaaactctcccgagccaccggcttgtccttctgcgcccgactcagtgtgccaacctgtacttttgtcgacgtcctcttggcccctgatccctagttcctatttttcctccaccgctttccagctttctaagtcccgcatcttttcgcgttttgttcttgaaccgcactgtttgaaaaatcgtgatggcgc

SEQ ID NO: 145215 - DNA, 419 bp, Zea Mays
ccggtggctgtgttgccgccgtattggtatgtgaccctctcccaggttcgttatactctactatacgtcctgcgaggcccggattgacgattggcgcacggaatcgccggtgggggttcaccggagtgccctgtgccacgcggtgtgtgtgcgccgccgccctgggaaaaacggaggtaggtgatggcccctggtccgtcggatcggacgtgtacggtcgggattaaccctgggcgcgtaccaattcagggttgcggtgggaccgtccgatttagatcggacaggcgagagcggtgcaaagttaattgaatttcgaccgttagatctagatcgggtggtccgcctcgtgtaccggttcgcaatctgtgggatctaatctagaccctagattgcagatcggacggtcagaaacgcttgat

SEQ ID NO: 145216 - DNA, 476 bp, Zea Mays
cacaccgaaaacagtacgtgcagtccaaaacagcaatcaatacatttcagcttctatacaattcaagaattgccgcgttctagagacttgaattattgtaacactttaacattggttagagttaaaataaccaattgagaactaacaagtggacttactaatttttatccgtgtcattatgagcactagaagtactatatttaattaacaacgcattctccccgataatcgatatcgaagtgttgttcacacaataatttgtattttaacttagacctcacatgagcactaatacttttcatccgcgaccaataaccatacgtatttagactacaacaagcaattcatcgtgaccacgagcttaactaaagtcatctaacaagttggttaaccaatataaaacttagcaagtattttagacttcgcaactcaaaaacagaggtgggagcaggttaattagtttttcttaaccattt

SEQ ID NO: 145217 - DNA, 399 bp, Zea Mays
gtcttcggatcaggatttggattactttgcagcattggatgtggctgcggcggaggcttctccgcatgtaatgggtgatgaggatcttccgggtgcgagtactgggcataggcggcgaagggtggtggcgaaacggagagtgagtgagttgtcacaaagtgataggcgtcatcgtggtgaggtggacggtggtcgtcttcgtgtggacggggctggcaagcgggaattgctggccttgccggctggggcgagtgtaggtgagggagagctgcgaagtctgtttgagggcgatgaattgaggataatgctgttcaactatagggagatgggtatcatcccgaaggttgagccgatgtaatgtgtgatgccctcgctgcatgtatgtaactataatttgta

SEQ ID NO: 145218 - DNA, 539 bp, Zea Mays
aaaattaacctctgaaggaactccgagacgaaaagggcgatgccgaaattgtggcatctatggtcactaggcggaggattgcaaacgcccgaagaaagggaagaaaaaggaagtgctgatgctggcaacctgtgatgtggttcacagacacagccagcatgttcatctctctcaaggcacaacacccgtgtcgatgtctgattatatgtgggtgctagtgctagacacaggtgcaaacaatcatatgacaggttcaagatcaatgctgacacagatcgattcaaatgttcagggaacagttcagctaggtgatggctctcgagtcacaatccaaggtatgggctctgtggttatgcaagatcagagtagaggtcataaagtcttgactgatgtttattatattcctgagatgaagtgcaatattgttagtctcggccacttctatactacatgtgttttcattcccattcccaactgtgtcctgacccgtttctcattcccaattgtgtccctccccgcactgtctttctcatttcctc

SEQ ID NO: 145219 - DNA, 606 bp, Zea Mays
tgacgttggcactccaaagttgtatcaaatctaagccaaaactcaacaaaactcaatttccgatggatgaaacgattgaagaatgaatttgagctttcagatcttgaagtagttcttaggactcctgctagaggtatatccataaaatatgctaggatccatgactcacgaatttgatacctatgtgccaaccattcattcctctccagactataaacaatcatgatagcattccatcgattctcaaattcttccggggtttctgaaccccatacacaaccattcaaatcattccaaaaatccttgttattgtttgttggatggccaactttctcagacatcttctccataatgtgccacatgcaaaatctatgagttgtatttggaaaaacagttctaattgctgatttcatactagcatcttcatcggtaatgataagtttaggagcttttccatccattgccaacagaaaagtttggaacaaccattcataagactcaatcttctcatttactatgaaagcacctccaaaaaagacactttgcatatgatgattcacgcctgtaaaaggtgcaaatatcatattgtattgattcgtactatat

SEQ ID NO: 145220 - DNA, 576 bp, Zea Mays
aagcctggaatatcggatgggcgtgaaatttggcgaatatgttactggaggtgttgtgaaagtgcctgaaaaatttgggttcaattggagcattttggctagtttaggcatttcaccgagcatgtggtgtgcgaggattttagggttttggagaaatggttatttgaggctgtgaaaccctccctaaggagctgagaacctacaaggatgttcaaggcatacagaggaacacatttcaccacatgatttcactggaattcatagggatttgaaatttgcgcaagaggtgggaagaagagcctctgctcaacagaacagagagggaggaaaaccgagggggaaaaggggctgctcaccgagagaagggcagggctgtgcacaaggtcgccggaggatcgccgccggggaggggagagcgccggcgaggaaggaaatcgccagacagagaacagaggctgggcagagaggagcaaaaaggagcctggcctcgggctcgggcagggaaagattttttaaaaaccgagtatgggcgcactggacagtctacagtgcctgtccggtgcacaccgaacagcg

SEQ ID NO: 145221 - DNA, 747 bp, Zea Mays
aggcttgaccgggtacagtgacagtgaccatgcgggtgttgatactcgcaagagcacgacaggggtggtcttcttccttggtgacagtctcattacttggcaatcacagaagcagaaaatagtggccttgtcaagctgcgaagctgaatatattgcagcagctgtcgcctcctgtcagggtgtttggctggcacggttgcttgctgaactgcgaggagaagaagctgaactggtgatgctcttcatcgacaacagatcggcaatagaattgtccaagaattctgtgtttcatgagcgaagtaaacacattgatacaaggtaccattatatcagggagtgtgttgaggaaaacaggatgaggattgagccgattgacactaataatcaattggctgacatattgacgaaggcattggggcgcggtcggttcgtccatctgcgttccaggcttgggatcgtcgacacaaggctgctgtgcaagacttaagggggagaattgttatctgttgattaagtcttgcacttcagtaggactacatgtttacttttcagttatctgcacttagtttgcatgcgccgagcgccgttgtgtggtggccgagcgcttaggagatcatgccgagaatcgctcggtcttagctgaactcgcggatcagtgcgcgcaatgcgggcgtggggatggacacgaccaagggcgtggcgcgaaactctcagcgacgttcgttctctctttcagttcatggcaat

SEQ ID NO: 145222 - DNA, 521 bp, Zea Mays
atgacacttgaacaaatcgagaaaaaaacgagcatgtgatcgagagcattataccataagaagagatcaatgaaactaggttaatatttaaggggaaacaatgccaaccgtaattcgaccttaggctcagatcatccaagtaccaagtactgttgatgtcgtatatagaaacctaccaagtgccactcaaatgttgcaatctcagctgaactgtcaacactgtggtgcaaataggttccaatatgagtttcctagtttctgttgcaaataagaaaaggtcaaacttgagatgccacaaccacccaaagagctttgcttgttgtacaaaactagggactctggttcacaacattttttagataacactagattctttaatattcactattctttcaccacattcaactgagtatgatcagaatctcgtgagtttgagagatggtgtttatacattcaatgaacatggtcaagtatatcatcgcatacactcttttagtcatagagaaagtgatccataagat

SEQ ID NO: 145223 - DNA, 410 bp, Zea Mays
aggaggagctgctggtgctcccgaccattgtgacgggcttcatgtccttcgcctccctcgtcacctgcgaggggcccatgaatgctttgtcccgcgaggggtgcaggcattacgaggtcttcgaccaagcggacgagaacattgaacgtgaaatcttcaaggtcgaagaccctatggtgaagcagtcggcaggggcactttttgataggatgtggggtccgcacggccgagaggctgtctgggatcggtccgaccgggcgatagagcaggtaaaggctgttttttgtgtggttgtaagtgtgggtatgtgtggtttcgctaaataagtgtgctgttgctgtcgatggctcatgccgaagacattgaggaccttgttggtctggacggcgcgctgccggaggccgtggcgg

SEQ ID NO: 145224 - DNA, 490 bp, Zea Mays
ccgggttggtagcttggcttatcgcttgcaattatcagaatccatggcaggggtacacccggtatttcatgtctctatgttgaggaagtatctacgggatccggaccatcaaatcgagttggaaccgatcactgtgcagcaagatctgactctagagtgtcgcccggtgcgtatctttggagtcctcggagcgtgtcatgagaaggagaacaattaagtatgttaaggtcttgtggactaatcagtctgagcacgaggctacctaggagcttgaggagttgatgcggcagaagtaccccgaactttttgttattggtgagtttttgtcttcgtgggtctttcctgtgtcgttctgttagaagcgttggaactcgaggtcgaattctttttaagaggggtagagtgtgatacccaattttataaaaagaagttaaatttcttttccctcttcttttgtgctccgtgccattggagtttggagttctgggag

SEQ ID NO: 145225 - DNA, 716 bp, Zea Mays
gaaaagattaaacagggtatttgatgctattggcttcgtataccctgattaccgctacctgctgcgaggacaagagaaaaagaggaagattgctacttcggtcaccccagctaagcctgtgccgaagagcaaaaaggtgaaggttctgacccaccggccgcgttacattgaaccggccgtggtgcctgaatttggcgcagggtccacttcagcagccgaagcaacacagactgcttcaattacacaaagcaccgaagagccaaccgtaatgccgaagatgcatacagtcaaggcagtcgaagataaggttgataaggctgaagagccaaaggttgaataaataataaggatgccaataattctgagccctccgacgaaggcaaatctgtcgaagatgcaaaaggcttttgccacaactcccaagaggagaaggatggccaatgtactggatgctgtgctggagactacaaaggcgttgagccctgctcctgcaaagaaaattactcaaactgaagccaaatcataggccaaagccgagaccgggcaagcagaagccgaagctacgcaagctcaagctgaagtcgaaagtgggccttcagtgctcatcgagacaaagcctgccacgcctgaagaaaaagcggcagagcaaattgctcctgaaaagatcgagactcttgctcccgaatctttgattgaaaacactgactacatcattc

SEQ ID NO: 145226 - DNA, 281 bp, Zea Mays
tgaaggcatatgtgatcagtcagattgtttcctttgcctacgatcagtcagattgttgcctgtaatgtatgtgattttcatgcttgatctgagatggtttccattgcctatgttgattggcaaatttttataccttgatctgagatgttttccattgcctatgatgattggcaaattttgataccttgatctgagatgttttccattgcctatgatgattggcaaattttgataccttgatctgagatgttttccattgcctatgatgattggcaaatttt

SEQ ID NO: 145227 - DNA, 365 bp, Zea Mays
atggtccctgaagatctgctgtccgagctgacatatggtggaatgatggaagtttgcactgatatgcctgatgtcgggttagagttatccctagcagcgtctcatgcctcatcgaccttggagcgcggtcttaagagtcaagaggctgatctagattgctccgttcccatgaaagtggttgaaaatccttcagtcttagaggtggctgctacagagaatccagtccccaaggatggtgctagagtttacccagcccccgagggtgttgccggtgatgatccggctcaggtgggcagcacgagatatgacccagcccccgaggatgtccgagcaggttccccttctcatacttccatggatgtcca

SEQ ID NO: 145228 - DNA, 377 bp, Zea Mays
gttccggtggaacgtccttacatccagttttggcggctcgcgctaccggcacccttgttgctcgatgctcgtagtaggtgttacaagtgggttatcagcagacgagagagtgaggaagggctcccaagtcttatgcgtgaatgaatgtacgtacaaactacggagctcgagtcctacactaaacattggtttcggtctctaggtctttaggtattgctgggcatgtgtggttgtgcgttcataagagattgactgccacaatttcattaaaccctgacccaaaacctggtcgcccgattccggatccacggccgagatctaaaacccaaaagggtatgagaccgatctaatcggagccgtcacttgcgagatcaatg

SEQ ID NO: 145229 - DNA, 902 bp, Zea Mays
ctctggcggcgctgcggcggtgaggaggccgagattggagagtacaccgtggaccatgccggcgagtacgtcccgaagagtgagcgccttgccgacgctgctgggcttattgacgccatccataggttcgtcgccactgccacggacaaccgacgtcgtgctcacggattactaccatagttcagtgaatatgtcacgtgtttcctcttttcctgggctagtgcttcggttgcagctgagtctgtcacgaactgtaattcatcctgcaaatttgcagacactgcttttaggctatgcaggtcgtcgtattatgtattcagcatgattgaatccgagttttacgaatgagaaatgttataccacactttgtttggacacatgattcttctcttttcttttctttttctctccggtgagtttagacgaatgttttgggaagcaggcagaccaggagacggtggcaaggcgaaagagacagggaaatatgagatggccgcagagctcgagcgaaatcctatcatgggtgcggccactgcggtctgcggcggggcggtggacggcagacggtaacagcacgttgggacttgggacgagaaagaaatagggcgtccggaggagaaagaaatacgaaaatggaaatcggatgttggaagagacgtgtgtttgatacgagtggaagctccatttttatttttattttcgaagttaagttactgtagaaaggacctacagtattttattatttcttggccaaatatgaacagtttacagaaaagtaaacgaagattactgtatagaacactgaatccagttgctaattttatcccctatctctggcttaactcggtggtacactaaactcatttctcttttaaacgtttctcgacactcattcactgtgg

SEQ ID NO: 145230 - DNA, 367 bp, Zea Mays
gcatgcaaactagcaccaggatagccacccattgatgggtaagcactttgattatatgttggatatccagatggtgggtaaccactatgtgaagagtacataggtgaaggatatggatatgatcctaatgggggtggagccatagatccatgttgtgcatacggatatggatatgcaactggaggcgcaaatacatatgatccagttgaatgtactggaggatagacagtcggaggataacatcctttgtcagcatgatgattgtcccttccacctcccatgttctgtcaccgagattattgtttgaagaatattggtaagtaaaaagtatacatactcataatgaggtaataattaatataaggag

SEQ ID NO: 145231 - DNA, 403 bp, Zea Mays
aaaagaaaaaggaagctgataaatcagctgatgaggctagtattgttgaaaatagtgatgatggagaagctcttatgatcacttctaatgataaaaagcgtatggcttgggtgatgttattattggtgatgaatctccacttgaaatttctggaattggttctgttcaaattaaagttcatgatggcacatttaagacccttactaatgttcgctatgtttctaagatgaagagttctttgggcaccttagaagcaatgggattcaaattttcttctgataatggtgttcttaaggtttcttaaggcaactgtgttgtgttaaaggctgagcgtataaataatctctattatttgcaaggttccacagttacaagtactgcaactatttctattgcatccaac

SEQ ID NO: 145232 - DNA, 539 bp, Zea Mays
taaaaatttgaagtagggatttaaagctgaaattggaaaatgaaaaaaagaaaagggaactttacctgtaccctcgacccacctcaccatttccccttgtgtggcccaagtccacggctccaagcgccatcacgcggccacctgtttggaccaatgacgtgtggggccacgtcgtcagctcctccttctccctcgtgttgcgtccgcaccagatcgtcgatgccacgaatccgccaccaggggttgtgcggatttcgctagccgttccaacctccccttcgacaaactcggccgtagaactcggacccgttctggccgttgctcccaggcgaatcctgtaacaggaagcattgaaacaactgggttcttctccataacaaattcagctagcgtcgcaacaaagctaggtaccacgggtctccaacaccgcccaactgaaccctcaccagccgccgagaaccgcggtcttggccccgcgcaagctcggactctccctgccttatataatctgaccgctcccgcgacgtcatttatctcga

SEQ ID NO: 145233 - DNA, 439 bp, Zea Mays
caatttgcaacatatttagagagagagaacaatcaacaccatacacaaaacaatgagggatgaaacacaattatagagtgatgatagaaagagtaaaattacacatacaagctcattattgcatagcatatgatatgaaaagttactactgctattacattaataatgtcacatctcatcacatcaataaaagagtttatggcttcagagccatgcatgcatcatacgatagaccaataattattacaaaccgatgttcgttacataaatagaaggtactgccaggctaagaaaccttctccccctttttggcaacaagaaccaaaaagagagagagctgccaatccaaagatcaccagttaggaggaggctgatgaggagcaaagaagtggtgcgccaggtgagaggcaaagtgttcttccccagactgatccggggg

SEQ ID NO: 145234 - DNA, 304 bp, Zea Mays
atcttcaactcaaatatctgttcgcaagcactgtagtacagaaatgtttggatgatgtgaggaaaacagaaatccaatctattttctgaattgttttcatttaacaacttattaatagattgggtgatttcttccccatagcgcgttggatcatgtcatgtccttacagagtccactggcttactatctgtctatgcgacatctgtctctcaaggaaagtactgtttatgcagaaaagctggctcaagaaccactagcaaggattttaaaatggcaaacattgcattcaaaaggcgagttatca

SEQ ID NO: 145235 - DNA, 512 bp, Zea Mays
tggacgtggacggagtgaaagagtgggtagatgggtgggggtgttggaaaagaatctccaaagtggcggatgaccgaaagcctgtaggggccaatgcagcaccaccatagtttaccccccacgttaaaacgcgacagaaacgaaaagcgacaacgcagtgccatcgacctgggtgtgtgtgtgtgtgtgttttcttcttccgctctggcagctaacattattgatgcgctatcttttgcaataataatgtgggacgcataatcaaaggtgatttgaccggagagagttatagaatacggctagcagggcagcattttccgagataattctagagatacccgagatggcattggagtagttcgttcttaaataaaaagcacatgtaagtcccctatttcacaccatttgagataattctagagatacccgagcagctctgtaagagtactccgttcttaaataaaaacacatgtacattaggttgtctttgacatctctcctatcgcatcccc

SEQ ID NO: 145236 - DNA, 338 bp, Zea Mays
gggtgttcagaccatcgatacaggggcgagagcgctggtgaccgccaccaatatccgacgatcattgagcttctactgcctcttgttctcttgcgacccgtgtccgccgaagatgacgttgactactccatcgacgtgggggaatgctccgcctcctcccccttcctgctgctgaggttgtcgaggttctccgggtcctcctcgtggtgggggaggtggcagaggttggaagggtcggccgttcctgatggagtgcttgaagtctctgcagtttaggagggtgtggtgcatgtccttatggtacgagcattgggcatcgaggatgtcgtccaattttt

SEQ ID NO: 145237 - DNA, 447 bp, Zea Mays
gtagacatggagcatagggatcacagcaggcacaggttcaatagccgtctccaagggtgaaatggcagcagcaccaagcattggtgtatcttccccatcacctaaaccctctgccatagaactagctccaccccccttcccatctattttatgttttttgaaagcatgttctggactcttatcctcttgttcataatccttgtccattccacccccaccatcattacgatactcctctctaaaaatcacatgagatgcagggatgaagttcttatcctccatagaataggtaatctcgtatcccttcttgtcaaaaacaatatcggtggtcagaggtagtggatctctactcatcattccaacaagcagcctgatgacgcccatctttctataggtgtacatgtctacatcaagagtggcgccgattaccgatcctagggcccaaaa

SEQ ID NO: 145238 - DNA, 587 bp, Zea Mays
cgccacttagaacagggaggaggggatttgtggactgtgtgagttctccggtgagattgagtcgattgcacaagtgctcgtgtgtgtgatgtggtgaagaagtagtgctcgggctcaatttataggcagatggtcgaagatggatgagattcacggagctgtaaacgcgctggcgagctcacctgcgcgggcagagccacggcgagggtccggtgaccgccgattaaccgggcagcgccacctcaggactttagcgccacgtcgcagaagatttttaccacggccgcagacccatccccagtcgcggtggcggtcttatccccggcgagatctttctgaactccgatgaacagtacgccagtcagcccgatttcaaacgacaatttcttcaaattttatgtgacttcataccaacaagtttgcatcaatgttgtaccaggactaatggtctttcatttttggtataaccaccatactgaaaatcttcacagatcaacacgattaggacactcaaattggcgcaataacattgaaaccttaacctgatcagatgcagtgaatgaacatatgtcaggccgactgacagc

SEQ ID NO: 145239 - DNA, 396 bp, Zea Mays
gcgctcgcggcttggagtcctgggctcggccgagctcccttgcgcacggccaaccacccatggccccctgcagatcctcgcatcaccacgctccgagcagccatggctggcgtagcctcccgttgcgcggtcacgtcaaagcttctgcgcacccattcctccctcctcgtcgtgcaccgtcccgaggtgagccccttcctcctcctccttttcccgtgacgatctctctttctctccattccggcgtgcttgtcgcagcaggcgtggccatctccagcaccctccacgctccactccctaggccgaaacccctgcgcgcggccacagctagcgccgccggcgtgctcgtcgggcccagcctgacccgcgcccccttcccctggctggcagaaccgc

SEQ ID NO: 145240 - DNA, 567 bp, Zea Mays
gccgagtgatagcctacgcttcaaggcagttgcgccggcatgaagaacattatccaactcatgacctagaattggttgttgtggttcatgccctaaaaatatggcatcattatctgctggggaatatatgtcatatttatacagatcataaaagcttgaagtacatctttacccagttagagttgaatatgaggcagaggagatggcttgagctgattaaagattaagaataggagattcattatcacccaggcaaagttaatatagtggcagatgcgttaagtcgcaaggttttctgtcattgtcttacaatgaagacttctgacattacgttatgccaagaaatggagaagttgaacctgggaatgattcaatatggaacatcaaatcacttgaagcttgagtcagtcctcctgcaaagaataattgacgcacaaagaaatgatgagggtatgaaacacattcatgagaaaatggaggtcggtaaagccaattgcttcagaagagatgatcaaggtgttgtatggtttaacaaccacatagttgtgcctaagaatgatgagatcc

SEQ ID NO: 145241 - DNA, 457 bp, Zea Mays
actcgggccatagagccctcaacctttgcccaaagtcatgcgccaaggattttactagtcgaatattgtatgtgcggtgaatcgtgttgtgaaatcctgcgaagcctaccagaaatttgcacctcaaaataggacgccttcgtagctcacgaagctaatctcccacacatggaatctgcagcgctggggcctcgacatagtaaggtcgcttcccaccgctcagggcaacctcaaatttgtctttgttgctgtagaatacttcaccaagtggatcgaagcgagggcaatctccaccataacaacaaaaacaactcaaaattcatttggaaaaacattgtctgtcatttcgggggtactctccgagcaaacagtggacaaggaaaacagttcgacaatcaagactttagggatttctacgcctccctagaaacaaaggttgtctttgcatcagtatgtc

SEQ ID NO: 145242 - DNA, 466 bp, Zea Mays
gcgacgaatccacaggcctgggaggctactagtgatgacgaaggaggaaaggatgatgatgttaatctccctcctgctaatgcccccattatccaaggattagtgcttcacaaagcgtaggctcgtcgttccgccaacgaacatgttattgatttcagtgccagcggagggtctgcccttcttcaagatatgcgattccagaatcctaccttccgtgttcgtgatgtcagtattgatggtaatcgcttctggactctccttcatgtcgatttctataattcagttatccttccaaagaagcaccagcccatcctccatcagcgttttatcaactggaggatgcgaagctattggggaacctgagatgacacaggtattgagggcctgtgagcaaaagaggatgaagactatcatgacattccaatatgattggaatgatgaaatcattgctcagttttattctact

SEQ ID NO: 145243 - DNA, 491 bp, Zea Mays
gaatgactgcggcatgattggcaacggaaaacgtacccatcatcacaggctctccttccggggtggtagccacttgagtatagtagactcgcccagttttcttctgatctttacctacctgagtgcttgccacatttcccttgccttgatatgtgcttccagaagccttttgagagtttgatttattttgctttggatagggacaatccttgatgaaatgtccagacttcccacagttgaagcagctattagatgaactgggtaaggccgggaaacgagtactagaggcacttgactgattgttttgagtaagggtaggagtgggacagaagaaaactagttgcttgaagagacaagcgtgtggacgaggaaaagagcgatttgggttaaagggacggatcaccaaccttgaccgcttctcggatccttgagaggatccttcacccccttcacacccaaatctttttgtctttccctgccccgaattcttg

SEQ ID NO: 145244 - DNA, 349 bp, Zea Mays
gtcacatatgctgtcggtattgcattggtccaagtcttctcagctctcgctgtttggttcatctagatgagcatacacatgcatgtaggctcagctcagctgtttgagaaaagaccggagaagggacgagccatcagatagcctgagaccctagctagaggcagttctgatttgttctatcaataccttagcctgtctccaacgacaggccatgtattcgcaagagggaaaaacgcatacagaagagatattgttatgcaaatttgtccaccatctatcccccattgcataaatttgcataggcatgatctgttggataaatttgcatatgcatcatctctcctccaat

SEQ ID NO: 145245 - DNA, 337 bp, Zea Mays
tgaaggccgtaaccgtaaggccttggcgtggtgttcttggtcttttctcggcgtcgtcgactgtgtgctggcttcttttctttgacctgtcgctgctgatgcgtgaagcctggcgccctggcatgaacaccgaccgagaccgagagaagtgaaaagacactagtccgtactgtatgaatgaccaagggagatctgagacgtctccatggctggctgcaacagagttgccgtattcgttggtgaatcgttattgcctgccgtctttttcaccctgcggtctgcgctcgatcgactacatactgccaccgggatcccatgccatgctactggctggctg

SEQ ID NO: 145246 - DNA, 517 bp, Zea Mays
gggaggaatccaattgaggccctgttcggttataccaaaccagacctggtttaatctgtggattgagatcaaatccagcccacaatccaagcccaaaaaaatccagaatgatttattttttcccttcgtttaagcccagtatggtttgtagcccagaggcttggattgtttttttgctcttgtactcctagattataaccctagattgtttgttctagaacaaatccaactcccaggtgacgacgcacatgactgagcgcgtcaccacccccgccgcctcatcctcgtctcgtcaccgccgcctcgttctcatcctgccatcatcgcctcgtccacgtcctgccgctacagcctcgtcaccgtctcgtcgtcgccgcctcgtcctcgtcctgccgccacagcctcgtcgccgcctcatcgtcgtcgcctcgttcccgtgctgccatcgccgcctcatccccatcctgccaccacagcctcgtccctgtctcgctgttgccgcctcgttcccgtcctg

SEQ ID NO: 145247 - DNA, 582 bp, Zea Mays
gttctgttagccaaatattcttgatctagatctctggtgctgatctattcggctaccaccctgaattcttctacagcttgttggcatggtgaccccgacgtcatgcggcacaggggcctagtcaacccgaagcttaaactcagcgggcttagcactagcgtcttcaacttctccctcttcttctcatcggccttgacatagaaccactcacttttccaactggttggccacttggtgcgatagctaagcaccggggccttcatatccttgtgatatgcaaagttataacagccaaagttttcatgcagcccgtcttctctggccttcgtctagtaatgtagctcatgcactcggcagaaagcttcaacatttgggtccattccttggcttcgaagggcccaaatgaagacgctgagcctaacgataacattaggggtcagctgatgaagatagatttcataattatccaaaacttccccaatcatctcgttcaaggaaaaccgcaatcccgctctaaaaaagctcttgaaaaccaccacctcgtcatttttgggctcgggagtggtttctccttcggcaaag

SEQ ID NO: 145248 - DNA, 371 bp, Zea Mays
acaagtggtaaaagagtattactgtattgacggcagctacaagctcttcggttgttttggatgatgtcttgtattgaattgactggagagaattaaagaaccctagatccaatacgttcaaatctggtgagtttgcaggctgacatgtaagtctaatgtcgaacccaccttgcttagcagcctcacaaaacaatccatcattaggtgaaacatgtggcttcgcattgtcttgttgtatgtatataggcttgttcgtgtcttcaagtggccacttagcacgaattgccggcaagaccttttcaatcatgaaacttcgcatgacatcctttgtgattgattcaatgggcttcatctctattgtccctgtcggc

SEQ ID NO: 145249 - DNA, 304 bp, Zea Mays
atttgcaaacccagtattttttggtgatgtttctcaggccaaccagaaccagaatactggcatgcagctatttgccgggtttcagtcaaaggtcttgccgagaacatcctcaaaggatttgactgatggtgataatgttgaacagacaattgctttagatccagtagaaggtaataaggagactttaacctctgctgtgaagaccatggtacaaccagcggagagtgcaaaatcaaagggtaaatggtgctttcgctgccgatcgaagggccatgtatcagcagagtgctccacaattttgttt

SEQ ID NO: 145250 - DNA, 464 bp, Zea Mays
gcaagggcggcctactcctgctggctccaaggaagaattggctgaagtgccaaaggttcctgcaaccgagtcggccgaagcgccaaaacatgctcccgaagccaaaggaaaggcaaccgaagagccagagcgagaggaaacggtagggctaccaaaaatcttgagtccgccaccgaagccagaattgccgaaggtctcgaaagcccctgcaataactcccaagaggaggaggatggcaagcgtgctggacgctgtcatggagtcgacaagggcatcaactccttctcctgcaaaggagactgccgaagctgctacagctcgtgctgaacccgaagctggaccctcagtccccattgaaacagaacctgttgggactgggcggagtgttgaacaaggaccctcagacatcggtcttattccggagaaagaggacacgcccaagaagattgaatctcctactcccg

SEQ ID NO: 145251 - DNA, 549 bp, Zea Mays
cgaggtcgaagtaactgagactgcaccaatatcagaagtgatgaggtaatcgggtcttcttgtgctagaggaggctgttgccgaaggtaccttgattactgaagctaaaagatcgcagttgaaggagggagtgagaaaaaagatgaagaggattacactaatatgagcccagcgaaacccagccacattgaatttggtaaatctactgtgacggcggacgacatggttatgatgaagaaattgggctactttggggaggccgagagcaaacttgtctgatttgctggggaagaggtgatgaagtcgtagtttttaaaagtttcttcagggcaaaactttgtttccctctgcatgagatgattggagaagttttgaaaaattttgagatatactttcatcagttgacacctaatgcattcattagacttaatgtctacatatgggccctccgaagccagggtatgagtcccaatgccgaagttttctaccgggtgcacgagctgcactaccaaacgaaggccagagaagatggtcttcatgagaactttg

SEQ ID NO: 145252 - DNA, 477 bp, Zea Mays
atggaacaaaagtttggattgattcgatgcacgaagacgcaaaagccactatttgccgcacaacaactaagagggcctgccagcacttggtgggcaaatttttcagcaatccaaccagttgggcatcagattacctgggaggaattcaagctagcattccgggagcattatgttccagagggagtgctccatatgaaacaagaagagtttagccggttaaagcaaggggggagatactgtaatgtagtatctcaacaaattcaaccatctctcccagtatgccattgaccaagtgaatacagatctgaagaaaaagaattgttttatgaggggactcaatgacaggcttcatcggaaaatggcaacatgcttggaccttacctacagtagggctgtcagtatggcactggcagtggaagctaaaactgcaggacatggaaaatccaaggggtttggaggtgaaaggtctaatcatgg

SEQ ID NO: 145253 - DNA, 398 bp, Zea Mays
ggaaatgaaaactcaccttatgaggccatcaagaagcttgcaataggtgaagtaaggccacaagagaaggatgatgacgaatggagaatttggatgacaaatggggtcattgatgggggtgcaaaggtggttggtgataaatcttccacccaaacaaacccatgaacctcaagtcatctaattcttgaagaagttctccaaccacaagagatgccaagcattgtggaagatgagcaagaagtggttgctagtgaagatcctcttgaacaagaggataatgatgatcaaatacaaaggcaacctctggtgcctcaacctcaagtgcaccagggcattcaaagggatcatcccatggacaacatccttggtagcatcaggagagggataacaactcgatc

SEQ ID NO: 145254 - DNA, 348 bp, Zea Mays
ccgatctaagccgacgaagaccgacgcccgggttaagcgccatgggagcacgaatatatcaggtggagtagttgggcacacccgacaggctaaaccctcggcggtaactcggacggatggatgaagaggactccggatatgtagggataccgtctgcgacaaagaaggagataagcagggagatggaactcacaccttataatgggataactcttcttggtcgtgtacatagtaccgagagggacccccaaccatttcatctcaccatagcccacctactcacaactctcagcttgtaatcctcatatcaataccaaaaccaccataggaagtagggtattactcaac

SEQ ID NO: 145255 - DNA, 822 bp, Zea Mays
cgatccgagataactcttttgcacaaagctgacagaagaaataactcaactctgaaagcgctagccagacatgctcagggacatagcctcgaaccatcgcaggaagaatccgttcaatccatatgtggaagtcatgactcttcacccctaagactcacatagtagataagttcaccccctactcaggttagctgcatacccattagagaacatcaacatcttgatccactgaagtacttccttcctctgggccctgcttagtacgaaatcggccttaggccttctccacgtctttcctccacttggcggcttcatctctaggtttggtctatcacatataacgctgccagatccactcttgccttcacgttatcctttgacttatcatgaatgtccataattgttgcccacagtgcctcgacaacattcttttcagtgtgcatcatgtcaatgttgtgtggaaggagcatgtcgtcataataggggagccgagtcaagccagacttatgtgtccacatatgttgctcaccatatcccacaaaaccaccttctgtattggccacgagcccatctatctgttgacaaatttcggcaccagtcatcattgcaggtgagcggtctgtcactacgacacctttcataaagttcttgatgtctaggcggaatggatggtcagcagggagaaattgtcgatgtttatcgaaggacgaatatttgccaccctttttcaaccaaatgaacctgagagcttccttgcaaactgggcatgagaacttaccgtgaacacaccaggcacagaatagcccatacactggtaagtca

SEQ ID NO: 145256 - DNA, 565 bp, Zea Mays
ccggctagccggccggttggagcggaaagccgccggtaagtccctcttccccgacagtccgtaaaccagcggtttgaggcgatttatcggccggtttgagcggctaatcggccggctagctccggcttatcgggcgcatcggctaggacgcgtcgcgcggcttaccggccggttaggccggtttatcggtgatatgagccgattaatcggccagatgggccgattagccgagctgtcgagtaggggtagggttaggttaatttttccccttttggcttcaaatcatttgaaattattggacctccgattctagcaacgaaagacaaggttcatcttcacccctgcttccctatgtcaattatccggttggtgaggtaacacagcaaccaacgaggtgggtgtacgaatgggaggaccctgagtagcgtaggaccactcacacagggatcggacaccaaggcctacagcaagcatattggacccccgattctagcaacgaaagacaaggttcatcttcacccctgcttccctatgtcaattatccggttggtgaggtaacacagca

SEQ ID NO: 145257 - DNA, 541 bp, Zea Mays
gacaggacgacgcacgcgcccaggtgtggtcttttctccctcattcttttttaaatcccccttttattccttcgcccaaattcatctgaattcagccggttggatgtctggatgtgaatcacggcacgatttgattccccagctatttttttgacgggaggaacatattcacgtgggtaggggaagtgctttgttgggctcatggagaagaacttctatagctcggagaatgcaaagatcctaggttgtgagaaagttccatcaaatgttgactgggagtgcagtttcatgtaccgtcatcagccagaatcaaacagccatgatattcctgagctgcttcggtgagtccgcggagtttgaattgaatacatgaaaaacatttttaatttaccaagtctaatagtcatctgaagtgaactgtaaaccaaactaacgacatgatgcaaaatgtgctgtgcagtgcaatggtatctgaatatgcagaagaggttatcaaactggctgaacagctcgcagcagccatgagtgaaaaccttgggct

SEQ ID NO: 145258 - DNA, 532 bp, Zea Mays
gcctctttaatttttggaagcagtgtaataataccataattaattctgctaacattcaaattcccaccatagaaatcatggaacatgttgacaatatcttttttaacaatgtcccaacaaacttgataaaaatcaattggaatattatctggaccagtagctttattgcgttccatctgaaataaggcatctttgatctctttcttacagaattgaccacaaagaacttggttgtctatatcatccaaccgttcaattccattccatatttccatgtcaatttgaaacaaattacccggagcagggcaaaaaagctcagtataaaactgagtagcatgttccaaaatatttttatcccaaaaaatcctcttatctccatcttccaggaagacaatattattttttcgtctcctactattagcatgcgatggaaatactcattatttccatcaccatgcataagccagttttcatgcgtcctctgtttccaaaacagttcatcttcatcagtcatcagaaaattctctttcat

SEQ ID NO: 145259 - DNA, 338 bp, Zea Mays
cagcgatcagctatcgcaccaaatggccaaccggctggaagaatgagtggttttatgttaaggttgatgaggggaaggagaagatagttcagagcccactggatctaaccttcgggttaactaggcccctatgcgacatgctgcaagggtcaccatgccgaacagctgtgggcgaatttcgagttgtgtctgatcatattggtactagagatttggtgcaggaatacttggccaatagagtatttccgacattaaaggaatggaatatgccaaagcttaaagaagaaaagaaaaaagaatgaacttgtctgactgtcctatcacttcaagttcaagaa

SEQ ID NO: 145260 - DNA, 483 bp, Zea Mays
gcgtaggaaaatttgagggccgtcgagttgtgcttgtcagatgtggcgacaaaaaataaaaatgtcggtcgatcgtatacgaagtgcgagtctgtgggtgattgtgtgtgccgagatgcgttgtagtagtaattgcgttaagttaatcggtagtgtctcgagtgcacgccacaatgtggttgtatgcgagatggggttatgcgcatggtgggtttagtaaaaatccattggtgtcacttgtgttaagttgaggtttatttgtgcgtggaaaataataatgtgtttaatacttagaactcttagtcgatggtagaaattgtctcggcttaaatagaggggtgatgacatggcaaggtagtcatcatttcctctatgttcataagtcgagtcgagtcgatgcgcattatgtgttcgttagattatgttttgcatatagtgtatggttgtgctctcggattctagtagccacatcgggtggtcaag

SEQ ID NO: 145261 - DNA, 1098 bp, Zea Mays
tgcgagccgcacacgccagccactcccgcgccatgcctctccctcccgcacgccagcgcccaaccgccccacctcctattcttcttccccaggactccacccacggccacgacgcaaaacacatggcgccccatatttctctcctataaccgcccagcgaccggctcgccgtttgccgcgtcaagcagcaccctcgtctcgccatcgacgtccgtgcagtaggagcctgtgtccggactccccggagcatccgtccaaaatcgccgtcttccttgcgcgcttggtccgtcgttcgtcgtgcgcaggtgaggaatccccttcttctccctctcttccatgcccctctctgcgttcccatgatcgaggccccggcggccagtcggcgcggcagcctgcctgcacagccagcgcggcgcgcgcggcggtcggccccagccgagcctccccggccagcccccagcggcaagggccctgcgcggcccctgcaggagcagccgagcaggcgtggccatctccagcaccctccacgctccgctccctaggccgaaacccctaccgcgcccccttcccctggccggcagaaccgcttgccgcgcgtgccgttcaacagagaagaagtcaaaagcgaaaccatgcgttggccccacctgtacgccacaatcccacgttgtttgtttttcctttcttgcatgcgtgaggccgtgctttctttcctgcaccacggaaaaggagaacaggcccacatccactccatccgcatgcacgtcgcattcaacctaaaagccaaatgcgcatcagaaaatggtcttccccgcatgcatgtccatgtgctaatttttctattagttattagctaggaaggatcctttatgatgaccctctttgtggtcctcattgtggccattttctagccatagaatcgtgccacatcgtcgttaatccaagattaataaatatttgattacttttgagttataaacctgattttatattcgtattagcgtagtctacatgttaatactaatgtttcaccattaagcatgttttatataattaattaaatgttagctgaattaacgttgttaaattagctctcta

SEQ ID NO: 145262 - DNA, 472 bp, Zea Mays
ctcgcaacttcgtgttgctggtgattacatgtccttttatctcatagtttgcttcatgtcatttagcgacaaagagagcaatgtgctaacatctggttgagcaatatatggctgagatttatagtcttaaattatttagtaaggccttttgcttactaatagaatcccaatttgtgatgttttctgtgccaaaaaggctttcatgcactaatattgaatttcttcaggttacttcgggtaaaactttatgcacgaggagagagcagagatttaacttatctgtgtttcattgtatttcaatttaatttcctagattattcaagcactatagagcttgatatagttgttatggccacttggcaatataaataaatatatgatgccacacaaaacaatcaaataaaatatagagttaaacaacattgtttacgaaggttgcgctatgctgtgacttcaggggctcgaacaatcc

SEQ ID NO: 145263 - DNA, 333 bp, Zea Mays
aaaagtggagctcgcccacgatttcccctcctccagcccctcgcgcgcgttgtcgtcattgcccgatcgcccatcgttatgtgagagagagtaaggtacgggccaccgctggtgattttcgtccgtgcctacgctcggtctgcgcgtgtggtcgagggcgttcactgggaaccattgaagctataggatccctcaattcgagcttagaacctcgggtgactcaggaatttcttgctggagttcgagaagccgcctgcgccgtggccttgaattcctcccctcccaatcactggtatgaactcgccgtgtgcccttgccttggtctactctttg

SEQ ID NO: 145264 - DNA, 437 bp, Zea Mays
gaagtactaagatgtaccaggacctgaaggaaaagtattggtggtacaatttcaaaagagatgtggctactcatgttgcaatatgtgacgtgtgtcaacgagttaaagacgaacaccaaagactagcaggattactacaacctctcaaggtaccagaatggaaatgggaagaaatcgatatggatttcatagttggactacctcgtacccgggatggctatgattcaatatgggttatagtggacaggttgactaaagtggcacaccttatacctgtgaagacaacctactcaagagcccagttagcagagttatacatgtcaaggattgtttgtctgcatggagtaccaaagaagatcatatcagatcgaggaacccaatttaccttgcgcttttggaaaagactacatgaatccatggataccaagctaaacttt

SEQ ID NO: 145265 - DNA, 850 bp, Zea Mays
gccaatatgagccgtctgatttgaaaccatggctcggattagacgctggtcaggctgaaacagtgtactatggtgaccgcgggatctagaatttatgacagcgatttaatggatcaggactccatcctggccgcccgttatagatctacgtcctagatcatcctaacgtgaaacgttcccccagatctaatctagaccgttgccacagagaccaacgaatccactatcccgacgtcgccccaacgcccgagctcaccggaccgaggcggtgccacccgcttccgcggcggagacaactctagcgcacatgcgatcgccctgaggtgctcccttacccgactagaccttgcaacgagatgcggtgaacaacccaaacacattccccgccatattaccttggattgtgcactgtcgtgctccaccgatgaggaatgcggcgagtacaggcgtatgtgagtgatcatcgggtgagtgacaggcaggcccgtgggccgaggctcacgagcgcataccgaatcataacctggtcaggaccttcgccacgctaagttgctcgacagggacttggtctcctgctctgcctcgaaggtttgttcggctagggcttggtcgtttgcctcgcctcgctaagtttttcggtaaggacttggtcattcgctccgcctcgcaggttgtttggctgggacttggtcatacgctccgcctcgcagggttgctctactgggacttggtcatttgctccgcctcgtagggttcctcggttgggacttggtcggcttagatgggtcgtttaaggatcatgggcttactttaggtaccccgttcctcggtattcatcaacatgccacat

SEQ ID NO: 145266 - DNA, 329 bp, Zea Mays
aagtgtcaaatactggtgctcctattgcctattctgcctggaatctgccaccttccaagacttttttcagttttgtgtccaatcctcctgctagtgacagtggcatgggtcttagagtgcgaccctctcccgaagaagtcgaggctctggttgcttcacttggtgatctccccaatgatgaaaggcaagttcactttgagatgcctataaacccgagtgatgcagagataagtgctatgctggacatgttggctgaggattcatctgactccgtccctgctgaaaccatagctattgcaactgtccctgagcctgagaaaaccttgact

SEQ ID NO: 145267 - DNA, 291 bp, Zea Mays
aaaagatcaaggccatcatgagaatggaagcgccacgatcacagaaaaaggtatagaggcttactggatgcatggcagccctgagtaggttcatatcaaggctaggcgagaaaggcatgccattttacaaattgctcaaaaaggtggacaagtttcagtggaccatagaggcacaggaagctttagaggcactgaaaaagttcctgactacaccaccagtactcaagccaccacaccgagccacgccgaatcagccaacagaagatctgttgttatacatctcctgcatga

SEQ ID NO: 145268 - DNA, 822 bp, Zea Mays
gccaccgcgacctcttccatagctcccacgagtacctcctcgtcctccacgagatcctcctcggccaccatttcctctaggattgggacaattgtaactcaggtgtccccttttcccacaattataacattttctatcctcaattgcaacatatgttgtctccacatgattaccactactcatcacttgaagtctgctctcttcatctatcatggctgacacagcctcatccatggtaggaaaactctctagtgacaaaaggccgctctcctgctctcaaacttagaatccagattcgttagaaagtgggtcactttcctatcctctacccacttatgaaccatttgtgcatcctgtgggcaaactatttggagaggagcgtaatgatccagctctccccataagtactggagctcactagcatattgttccactggtctccccatctgtttcactgcatctgccttgctatgaatttcgatcattatcatcatcacattctcctttcgagagtatatattactcaaggtcttccatatctacgatgcagtgtgcatggcttccgccctcttgctaacagtgggacacatggataccaataaccatgcaactatcacagagtttgtcgcatgccagattctccattctgtgccgagcttatcaactaactgaacacatgtctcctctaaatgatgctccactcccttgcctcctagaagtacacacactcttttggacgagcttaggtaattcttaataccttctaactttatatcattagatacaagttccaactttaactcagatgagttgatattaatc

SEQ ID NO: 145269 - DNA, 294 bp, Zea Mays
gtgataatgatgaaaagcataaccatggacagagttaaggcaagactgacgaagtggagaaaacaatcaaggtaagataggtgatgtttcaatagaatggttgaagtaagaattcattaccgagggaagttataaggaagcaacgagattaccacgggcgtgcaaaataaaattaccgctcatggatcatcaagaaacaagggtggtcaaggacaagtaaaataaaatatcttaaccagaccttgggatataaaggtaagcatagaaaaaaatgagagtatgagagatttcaag

SEQ ID NO: 145270 - DNA, 376 bp, Zea Mays
gaacaaccagcggttgagtcaactacctgatctattctagggagcccgaagggatccttcggacaatgcttgttaagattagtatagtcgacgcatatgcaccaatcaattttattctttttgagtacaagaacatgatttgctagccactcagggtgcagtacttccctaatgaaccctgttgacactaagcgggctaactcagtgtgaatagcttcccttttgtcaggcgtgaaacgacgtagcttctatcgaatcggccttgcttgaggatacaccttcaatttgtgctcggccagttctctcggaactcccggcatatctgcaggttgccatgcgaatatgtcctggttatcttgcaggaaccggacgagcg

SEQ ID NO: 145271 - DNA, 874 bp, Zea Mays
aggatccagacatttgtgttagactgttttggtagtcttcctggattgcctcctgcgtgaggcacttctatctaggctagtatagcagcatggtctgttatggcaactagaggttccttccttaagtagccagatctgctgtactaatttaggaaagaggatatctctcttttggtaggcctgctctgattggcaccaggctgccgcacccttccctggtgcatcacatgtgtggcctatatattgtaagcctcatctcctttattgaatatagaagtctactccaaattacctctccaatatggtattggagattcctagtccctgtcttccacctatctagcttctgcctctccaaagcagccgttcttcctcctccctcctctcaccctcccatctccaccatgacgatgtccgacgacgaagcttcttttctgcagcaaatcgcgactatgatcaagaccgctcaggatgctgagtagcaggctgctgcagcacgcgcccgtgtcaaggctgctgcggccgttcttgagaaggaacgggccactgctgctgctctggaggagcagggagtcaccgccgccaagcagatgacgccgccccttcttcgccggttctcgagctctctagtgaccaagctgctggtgtgcagaacatccgctcattggtcccagtgaccctcgagccgtcctccaccaactttgcaagctggcgtggtcatcttcttctcaccctcaaatggtatgccttgacggatcatgttcttgctgattcctacttctccaacgacacggcatgggatcgcatggacaacattgtcttgtcttggatttttggcaccatctccatcaagctgcaggagcgtcatggcacg

SEQ ID NO: 145272 - DNA, 416 bp, Zea Mays
atgagtaagatctttgtaacaaaattgtagttggtaccttggacgacaaaattaatgtaggcaggtgagtgagttgttacatgaaaaatagagatcgaagcgctccaaatcgttctatcagagcgtctaatgaagatcaccatggtacagtgaccagaaaaatctctggtgccgtgaacttgacgccagtgatctccatcgcaattcgcgcctgcctgggagattcgttccacgggagaggtagataacatcggggcagggtgaaaatatccggggaggcgaatctagtcactagcgagaccggctgtcgtgtcccgctgcggtcagtcgcgctggcatcaccggagctcatcgttctctgactgtgacacgtaatgatcactcccccatgtcgtaagtgtcgtggcaagcagccg

SEQ ID NO: 145273 - DNA, 424 bp, Zea Mays
ttcaactgacatgcacgtgcccgtgttatcggcccatgcattatatgcatgagagtgacatcctcctcatcctctccctcttgaattggagtctttctcgacttagatggtgggaaaggggtggtcgagcaaccttagagtgtgcaagaccttcaggttcaaaaaacaaacgtcgttgatttctggcagattctggatgtcattttgttacgacgattcctgtcagctccgagcattttttgatatggtaccagacgggttggaaagcttatcttcttagctttccaatagtatgtagaacgtaaaaaacgaagtctttatgtggcttgggcatccatcttcgtgagacacgctcctgcagtccgaacctgattcttgaataaactggacttcaacttcccttgagcttaaaactttgtctttt

SEQ ID NO: 145274 - DNA, 297 bp, Zea Mays
ccggaaaaagggacatcaatgcaaggattgtcccattggtaacaaccccacctctagcttgtcaatcatttcgcatgtaactaggcaacccaaaattgcaacttgtgctagaaaggtaacaagtttaccaagcgctaacacaaaggacttttgggttcctagatctttgtttactaaccttaacggacccatcaagcgatgggtaccaaaatgtgcttgacaagctttgtaggagaaggagatggtatgaagccttggggtgcttaagggagttaattcaattcttatcaactcaag

SEQ ID NO: 145275 - DNA, 336 bp, Zea Mays
ctatctgttgtgaccatactttaatactaattccagcatcaagtaccttctgcaattgctcctatgaaatgaccatttttagaacattattgatgtcaacttcagaagccttgtgcagtagaagtttgtcagctctcctgaaggatcagcatgctattctggttcacgttcaggccctgtgatgttgcacgccaccatcaattcatcatcgccattgtcaagatcgccaacgatagacacgtctagagggattaactcaacatcacaatgcacgtttaatggatgacgaaggagcaagaaatgattgatgggtttctcacccttagcagggagatg

SEQ ID NO: 145276 - DNA, 904 bp, Zea Mays
tgttggtcttgaggtgccatttggatttgatgaaacccagcacgtagatcaagtgtagagaaccatgcagctccatgtaattcatcaagcaattcatcaattacaggaaccagaaaacatgtcttaactatgagggcattgagatgtttgtagtcaacacagaatctatatgtgttgtctttttcttgaccagaataaccagtgaagaaaactcactcttgctcttctaaataatatcggaggacaacatctcctggacctgtttctcaaattctgtcttcaatgctagcgcatacctataaggtctcagatggaatggttgagcacctggtaataggtcaatatgatgataacagtctcttggtggaggcaaccctgaagctatgtcaaatactggctgatacttctgaattagagattgtagctcgcttgataacttggctaggatcgactgatccttgtctagcaagtccgacaactaacatagtttgataactggtccttgtgaaggttgcaagccacatatcttgacccgagatcctttataaggaagaatcacccaattttcactccaatgtactatcatagggctgcataattgaagccaatccatcacaataatcatgtcatatgtctgaaggggtaagatatgcaagttaggatgaaactcataacctgacagcgaccagacagctccaaccaactattgtgtacactgaagacgagcttcatcagccacctggactgatagtgtttttggcaacgaagaaagacctggaacatgagcagccacatgtgtactcaggaatgaatgagtactaccagagtccaactacaccaaaaggtccatgccctgcatatgctcgagtaccttcatagtttttggagtatttctgccatccac

SEQ ID NO: 145277 - DNA, 657 bp, Zea Mays
gggagattaaagaaatggaagtggatagggtggggaatacatgggatgatatggagcaactaggggtgagattggactagagcttacttggtcccattctataggctgcaacacatgctcttgtgagaaaaatattttaacaaggatgaagaaagtacttttgggaataggatattggcaaggacctatagaagagtccaatgggtacataatggctttgaggagggtgtcaactttagagagagcaaggaagccactagaggtagaggaaggtgatgatgaaaatgaacataagaggtaggaagtggaggacatgatgacctttgttgattaggcgagattgtaggagtggtctgccaggaatgatgagagttataacatggaattgtcaagatttagggaatgacttggttgtttgtgggcctctagatgtccacatgaaggggctccctaataagtatatgtataccagaggtatcttactgtcgattaaataagagggtcatgacaggtaggtccgtgagctcagctgaggtgcctaagggctgggtccatggactagagagaaagatctacatgattggaagtccaaggaagatcaagatggtaaagaaccaatcagattagataattagtattaatatcttgtaaacaagg

SEQ ID NO: 145278 - DNA, 296 bp, Zea Mays
gttgtcacatagtagaggcgtaggagtgtcacaacagacacctagatcagccaagagccatcagagctaaattatctcagcagtagcagtggcaagtgcacgaagttctgcttcagtactagatctagatacaacaaactgccttttggatttccaagcaataggagatgatcctgttaaggcccatgtagcccatattagttctgcttatatattctgccaagtcctaaggactaattgctctctctctaatccaagtttagtaacatgatacccaagcaggttagggttagggc

SEQ ID NO: 145279 - DNA, 302 bp, Zea Mays
aaagcgtcaaggaagagcgacgttttcagctacggggtaatgcttctcgaagtcgtcactgggaagaagcccaccgacgccatgttcagcgaggagctaagcctgagagagtgggtcaggcaggctattccatcaggactcgctcatgtcgtggaccatagcatccttcttgtagacgaggaggcaacaagcagtggggatgtcctgcgtgccgactggagctgcctagcgcagatgctgaacttgggtttacagtgctcgtgtgacttgcctgaggatagggtgtcgatgaaggatgtggc

SEQ ID NO: 145280 - DNA, 746 bp, Zea Mays
ctgccattccctattgcagcaacttgaacaacatgctctcttaatttagaaatgacaattatcaaaaacagcaagctattgcacacccaatctttcctggagcaacatgtataccttcattttttaaaagctttacatgtctcgagatagataaactaggttgctagtacaagcaggaaccagtggctcagatatatacagacccaaccattttatattgtgaaagctggttatattaaattgctggcatctaccttcccaaagcttctttgtctgatcagctaactgtgtgggtaaagcaacatctataataaattccaacgagcttgcactctaggagctcgccttggcagcaatgtgccttgtagttgacaaacccgatttggcacgtatgaaactttcattgagaaggtggcttgacaatgtcacattgtatattagatttttcttttgccagtatccattatctcacacttttttagttgagtggagtagcagaaatagaaaaccaaagattctcaggcacctcattacttacatttgcagttttaatctgatgtagggagaatctaaaagcattaagggtaaaagtgttgatgaaaaaatcaaccgggcattgattcgtttgcagatggaaatggttgcagctttaacagaggtaaaaatatacttaggccgatgtgaaatactgcttgcagtcaaggtaaagagatgaaactggattgcaaaccaaataacaaaaaaat

SEQ ID NO: 145281 - DNA, 442 bp, Zea Mays
gcgctgctgagaagcgagtccgcttcgtcgtgccgctgcagcctcagcaacgcctcggcttgcaacgccatcacctggcagagttcaccgcgagaagttctcacgcgtttgtcagaatgctggccgcacgtgcactatacagggtttcatgcagcagtgtggcacatgtcgtggcggaccagggcgctgacctgtggagcacagtcggcgccgtcggacgcggcggcctgcgcttcttggagcaccgtgaaccagttcttgagccttcgcgcgtcgttgctcttagcgatgcggctcttcaccgactgcgcacgggaaacgtctgcgctcgcggattcgttggaagattgcttcaagtggtagatggctttgtcagcttctcctaatctgagcaacacgtaaacgagttgttggatatcataaaccatttgatagctcaaca

SEQ ID NO: 145282 - DNA, 388 bp, Zea Mays
aaggtagaggtctcctagagattctgcattgactaccatgcactaaacgactagatgttcaaggacaaattccccatctccatcgtcaaggaccatgactctgtcttcactagtcacatgtggcatgacctcttcatgatggttagcgtcatgcttcacttgagcacaacgttccacccttagatggcaggtcgaaggtagtcaacaaggtgatcaccatgtacctttattgtgccatgggggaccattcgtgtgcctgggttgattttcttctttggaccgagtattgctataataatttgttccacatggtgctccacataacatgccctttcaggtattgtatggctaacccatgtcacttgttcttccgcacaccacagaggca

SEQ ID NO: 145283 - DNA, 961 bp, Zea Mays
atgtacagatttaaggtctccctaatcccaagcttacagtacgccttcaatgtaacaacatatatttcatttgcttggtaacttggctgcttaccgcggtcagggttacttgtactgttgcattactccatatcagcagactttttttggtaaagctgaccattcaaaactaggcaccaatgcaatatatcatgattgaacaatttaagttatccagttttatttgctttcaacgccatacttaaactacgtgctttcctggaaatctggtgtatggcctttggatccaacaaccaattgtcctaaaatataatgcatggtctttggagtatcattttcgttgtttcttagtggtaacttggctgcttaccgcggtcagggttacttgtactgttgcactactccatatcagcagactttttttggtaaagctgaccattcaaactaggcaccaatgcaatatatcatgattgaccaatttaagttatccagatttatttgctttcaacgccatacttaaactacgtgctttcctaaaaatctggtgtatggcctttggatccagcaaccaattgtcctaaaatctaatgcatagtctttggagtatcattttcgttgtttcttagtggttccttcaatattgctaggcctgcttgtgtacttgctatgcattgtttctgtaccttcaccttaaaaaacaaaacaccatgtattgccaggctgatagggttgaaatgcaaatgataaggttgcggtcgggtcagtagacatatatagtactttgttcatctattgccaaactggaaagtttgaacatttttatccatgtacccagactctgaccgggataggtgacctgttcactgattcgtcccaagtgtgcttgaaactctggtggattttgcccatcaaattgaaacaacgtattgagacgacaaaacatatgtcaaatttgaatttt

SEQ ID NO: 145284 - DNA, 610 bp, Zea Mays
gtcgggtatgagtaaaatactttacccgcgggtatccagtggatatccaagatatcaatatacatctttaaatgtgttatatccactaaaaattaaggaccataatagaatggagccaaaaaatacacagcaatcctggttttgttgcatgctggttgctgctacttcaccatggacacaggcacgaccacgggctgctgttggtggcggcaggctactgctactatacaccatgtcacgggttgcttgagctagttgctgcatgctgtttttatttatcaagttatcatggcgcatgtgttgttgattaatgaatattaatttgtcctaacagtcaactgtaatgtactagagaccaataagacattgacaatattatgcatgtcaactgtcatgaactcattaagcttttattctctgtactcgaatttaaatctattggatgcgataattatgagttgagatattgtatcgatgtgtagccaaatatagtcattctcgtgttgtattggtgcttagatggaaactaaaatattttatgtatttattataacactaactgaatgttatttagtttacaataacatatccactggatacccgatacccg

SEQ ID NO: 145285 - DNA, 667 bp, Zea Mays
ccgcgatttaccagccgcagactccacgtttggcgcaacaaacccatggaatcggttttcctccgccagcgccacttcatctggacttcgtcacggggtttatagggttcaatccggtcctacaaccgagcgctgacagagaaagagagaaagggccgagagcctcgccggtgagagagctgagctcggcgagaggagagatcgagcaccatcgtcgcgcccttcattcccatgccctataagatagatccgtgaccgagcccgtccaaccgcatcaaggctcgagctgacctcaaccacggaatctggagcagcgcgggtcaaggtcgggcacgagattcgccaccggcgtccctcacctccatgctcgtagagcatctgctgcgtgttcagaggtgtgcgcccgtgaaccctctgcgtgaaccggtagaccgccaagcgcatggccgacaagaggtacggcgattgctcgccgtcgattagcgccgtcgcgggcccgtccttcactgcgaacacgcgcgtcttcgcctctaatctcggtaaagaaccctttccctctgtccactttcagctcctcttcgcaatgcaccgatcggatttcgctattgggcgcttgggaccgaaatcgctgtgccccggccatggcaccaccgtcagctcgggcagc

SEQ ID NO: 145286 - DNA, 698 bp, Zea Mays
ttgaaaccgagggccacgattaaatctggccgcgttcgaatcggtacgcaacccgaaccccacgatccaagatctacgcccctgatttaatgtgactacgatcaatcctatgcccttggattccaatctggtggtcccgttttaatgagccgaaccggtacatctcccttctaatctcatccgtccatcaagatctgacggtgcacgcgattctcccaatcccagagcgcccaggcggcagcgccgtccacccgacgacggcgaacccgccggagcggcgtgctcccgcccctcccgggcctatttccttatccgaacgacactacacgaactagagatgaacgcgagtcgggggaaggagtccttaccgtgaatcacgccgagctgcgccctgcccacgaaggtgtgcggatctgtggcgtcgccattactccggtgagcaatcaatggcgcaggaagcaggaatccccccgcgacagccggtccgagatcaccccacgcaccggcgcctatccccggtctcccaattccatggattatcggcgtcagtgggcaattgaggtggtcacgatttctctccctcgcgcggtaatgtctggcggcggcgtgcagataggggaaagccactgggtctggcgtagacattttataggtcgggtaccccgcactcgaaggctccatgcaggactcggtccccg

SEQ ID NO: 145287 - DNA, 403 bp, Zea Mays
gggatgtctgcgccttctcaggtgccagaggaattggagctattttggagaagtcaggttgcgaggatgtgaaatctttggcccaagctgaagctaccttatctattgatgacacgaaggacccctcggctgaagcgagcttagtcggcggaaaattctttactgacatatggaagaatggcggtcgagggatggcccacgagataataaaaaagagcgaaaaagattctcacgatgcaagaaaagcagtagaggcagctgaaaaggctgcagaactcgaaaggcggataggtattgcctaattgcttttaactttatgttttatttttgcgtcttcgaacttatttatgttttttatcgcagcggcactatctcctcccccagagcccgtcgagtcattggc

SEQ ID NO: 145288 - DNA, 536 bp, Zea Mays
ttttgatcagacttatttaaacatcataccaagatatcacttattacattaactaatgcaagtttgggaacagtcggtcatttgttctgctcggatagtctggttatggtaataatcttcttttactacaactttctctgtattttgcataatcacatccacagtaaactcaaagttcagaaagagctaattcgcaagagacatacatggtagcacaacagataaattggatcagactaggatcgttccagtattcatcccaactgccactccaggatagtgtataaaaagtggagcctgaactagcaagagaataagctcataacaaggttcccaaatgatgttacttcactattttcactaatgtaataacatggtataagtgcatatacaaacctactcttagctttattctcacagtatgctcttagtgaaaatggcatgacaattagacttctagaaacactaattaaaaataccttattaaatcctgcttgatcaattactgcccgaacattttctgacatgaagtcaac

SEQ ID NO: 145289 - DNA, 298 bp, Zea Mays
ttaataactctgatggaaaggaagttctcctgcaaggaatcaaacctcaacttggaagttgttggcagctgtcaagaacacaacttagagggctggtaaagcaggatgttgtggagcaacttctggaaatctgggtggtgacagagactgacaatctagtgatgcctccagtgattgaacaactagtggaatgttatcaggacttgttctagaaaccaaagatgctgccacctaaaaggtctatagaccattccattcctctaatgcctggtgcacttccttttcggttgaggcctta

SEQ ID NO: 145290 - DNA, 791 bp, Zea Mays
caattgttgaagtttttgaagatgagtacctgagatcacctaataagaacgacacaactcgattactagacctggtactatttttgtgagttcacaatttactttgatagtgaaaatattgtggcatatgaggatgaattttgtatcctcgattggtggcatgagtacaaactaacatccaattttctctataatggctaaagatattatgttagttcctgtcacaactactttggaaacttgcattactctttataataggtttcttgaggagcgacgatgaaggagatgtggatctgtattatggcttaggacttagccaacaaagagcacaacatgttgtggaggacaaagagactccttcaagaacttatgggttgaacaagattaggaacttgttgattagagtgtgttgagtctatgagtgtcacttggtgagtaatattaagggcatttttgcatcttgggctttaaaagggttggctaataaattggctaattgcaggtagagatttgggaaattatttgtccattagccatttaaccttggtaatatgtaacaatagatcataaagaggaaaatatactcttggttggtttctttcctttgtctcgtggcttattgtttgtacaaaatatttactatgtgccaagactccaaacatactcttactagttgtttgatagctaattatttacaagtatgactataaattctgacatttaagatcaaaactatggtttataataaattttgaacgttgaattttaaaataaggttcttgtccttt

SEQ ID NO: 145291 - DNA, 381 bp, Zea Mays
atgagcagaaaaagaagaagagacgcctccggcgagtatccagtttggatcgggacgttggtacttcggttcctgctgctgaagaagtgtctgtgcctgaatttactgacgctgaccccaatgggtgtgctccatctgctgctaaacccaatatgggtgctccatctgctgctgatcccaatgggtgtgctccatctgttgctgatcccaatgggggtgttgcctgtgttgctgatgaagacaacagggaggaagaagatgaagtccctttgactcggaagaacagtcggcagttcatcgccagtggtgaaagtagtggagttccttctcctgctttgtctgctctcattggtctgcaagaattgtccctggcaaattttg

SEQ ID NO: 145292 - DNA, 761 bp, Zea Mays
tcgcagccctgaccctaaaacttgccctaaaagaaaatacctcttaccccaagaaaagtcttctctcctcttccccaatattaacagacccttcttttcctattccagatggaagactctctggccattaggacatcctactgctcagaggtggaagggttcccacatctattgcgaagttgtgcgcttcgcatgggaatccgcaaaaagccggaatacgtctggaaggagtgtcccgagaacgaaatggagaaatgctctatggcagtctacctgggagtaagtcgaaactatccaaaccacccttctttccaagtcacttttaccggataccgctttccagatacttgccagaatgttgcccgaacagccctctgacaactatgccagaactacaacaaggtgatctttgaaactccccttcgctactttccacccagcaacaagaatacccccacctggaggaaaagacttcaggccctgtcaggaggagatcctattgaggatgaccccaccatcgtatacatggctggataccttcacacccttgataaccaatatgatgacctcaccctccactgcacccacctaacctcccgggtggaaagcctggagcaaaaagtcagggaacttacaagggaaaaggcgtcccttcaagagagcctcgaaatagcagaaggcgaggaaaccaatacccgtgaggcctaccgcaccctaaagatggattacgacaagaaactgaagaagctcgcccccgcaag

SEQ ID NO: 145293 - DNA, 488 bp, Zea Mays
atttgaaacaagtgttagacctgatcagtcagcaacaactttatttgagggaatccaaatgtgtgttcggtcaggcaaagttggaatttctgggtcatattgtaagtgcagcaggtatcactacagaccccaacaaaatcagagtgatcagggaatggccaaaacctgcttgtgtgaaggatgtccgtatttttttgggcatggcgggttattatagaaagtttgtgtccaactttggaatcatcagtagatcactcactaatctattgaaaaaagatactgtgtttgtatggactccaacagaaaatcaggcatttgtgactctgaaaacagccctgattcaagctccggtattagctatcccaaacttccgcaaataatttatcattgaaacagatgccagcgggggaggaattggtgcagttctacaacaggaaggacaccctattgcatttatcagccgagctttagggccaaagaatctggga

SEQ ID NO: 145294 - DNA, 413 bp, Zea Mays
cagcggcgcaatacggaccgcggcagcgacgacggccattgccggcccagccaaacctcgattacgagctcgaaacgccactcccaaaccagctacacgaggcggaggtaaatgcgaagtcgttggagggatactcacaaagaatttgctcgcgaaggtgccctgcccacggcgttaggtgatcccacagcgactggtaacgatggcgagaaattggagcaaaaccttcggtcgatcacgagtagcgcggcctcacatgcccctcccagaacttgaggaaggtccctgtgcacttcaacggggcggacgactgctcggctggggatttcccccgcggcggcgcacagcttctctcctccaccccgccccggctgcgaatacgacggcgcacacgctgctttcttttctccagg

SEQ ID NO: 145295 - DNA, 297 bp, Zea Mays
ctgccatcctttgaaactgctacaaaataactgcaaggtcatcgccgtccctttgcctgaaaatcacagcaaattcagtatgcaaaaacataaaggtcgtttgtgcatacaacatagcgacttaccttcaaatttcaccttgacgattccacacatgctctatcaaatctttcttgagccgcccattagtgtattcgcatatgattttgttatgcccgatcaactcggcaatttccggcacatctcttatcgatgcttcatagtctgtcccagcaagtcgttgtagatttgattcaa

SEQ ID NO: 145296 - DNA, 458 bp, Zea Mays
tccttttcctcttcggagtcgccgtgaggtctttttgcgccttcagcactgtcattcctgccggagggcttgtaacttccactatctttgttttcgcggtctctatttctttaatattatcggccttcggcaatatagccagctcttcattcttctgagtaagagaaggttctttggcttcagtagcagtagaggtctcaccaccaaattcgggcaccgaggccggttcgatgaagcgtggtcggtgagcaaggaccttcacccttttcctctttggcgcaacctcacttagagaaaccgaagtatcaccttttccagaagttgcgctttttctcttttgccctttcagcgggtagcggtaatcagggtacataaacccaatagcatcgaaaactctattcagcctcttctttttccgccctccgaaggtcgcagatagagcgttatcttctgtcttt

SEQ ID NO: 145297 - DNA, 445 bp, Zea Mays
caacctttggaaccacggtggccctaactggaaacatgaattcaagattttttcggttgaagaagcggcatcttggctgaatgttcggggcaggaagagtttatcttttgcggatattgttaagctccctctcaccggtgctaatgttgtcctgattcgtagcaatattaagttctctggtggtgatgagcatcaggcttgggctagaacatctgtgttcaattgtatgggctctccttctcgtaatctggctccggttcgcagcgttaagaggttctccgctggtgggttacatcagcctcgccatagaatttctgcgttcaatcgtctgggcttgccggcccctgggtcgtggtcttcatcctctcggcggagggctatgtacccatggttttcgaactccaggagggtttcctcatcgctgcttttccctgatcctattggc

SEQ ID NO: 145298 - DNA, 483 bp, Zea Mays
gtcgcgggtagtgccagcaagcgggaacgcacacgagtgagatctagcatcgaaagacaccggtggcgggtgaattgcccaacggaatcaaagaagaaggtcgtggacgcaggattcaccgtcggggtcgatctaccactccctctgcggtaaaacttctttccccaccatgttcatttggtccgtagtaccgatttgcgcccacatatgaccgtgttggggctatggagggttggattcgtgccgacgtaattgctccggtgtggtcggaccaagccattgcgaagaactagtgtgcatagggccacatccacggaattgagcttagggtcaggttcgccatgcgttaggcaacaggttgtgcccaagggagagtcgcgattggactttgtcaccagaattgggcagggggatcatcgcggtcggcggcgccgccgtggtcgcgctgggaggtaggcgatgtcctcctggccgttggatcgg

SEQ ID NO: 145299 - DNA, 533 bp, Zea Mays
aaatcattaagtgacagcttatgggcagcatcattgactttttgtgtggaacaacacatggaccatttgagcaaaatatacattaagccaggtgtgcaaacatggttggcaaacaagaaggtgtgaacaaggagcaaattcaatgtattttgtaaagttcactatgtgaacaataatttggcagagtccttcaactcaatggttaagggggtcaaaggtcttcacatagttgatgtattggacaagataagacaaatgattatggtaaagtttgagttgcgcaaaagaattgcggaagaaagatttaaaaaccatgagatcatcccacttgtcatgaagactttgcatgcaaaaacaagaggtttgaggatgaccatcatgaaattcaagccttatgtggcagagatgattttatttgacaaagagaagacggagtggaggttttcagtggacttagagaagagaacttgtacatgtaggcaatggcaaatatgtggattgccttgcactcatgcactttgcttcataacttc

SEQ ID NO: 145300 - DNA, 686 bp, Zea Mays
ctccaatcagaagccttgccatttccctctcagctgcaacttggagtggtatctggaacttgaaggtagggtcttcatatgttcctctccgtgctaccggagtagagtttgtctgaataccatactttatctgagtggcatttatatcttgaaaatgtaaagccccagggcaacgcattgggttttgaaacaaccaagcatcaacatcatctggagtcctaaaacctaaaacctgaaagaatcactgataaccaattagatgacgtgttgagtgattgtcaattctgggttgcagtcacagaacttgattaagttttggctagtgcacatactccctcaagtcataaatataagctgttagtattaacaaagtgactcaaagactttgttgcccttcatttatacactgagaaagatggagcgcttatttagaaatggaactaaagcaaaaatagggataaaagtgcttagaaattactgattggctgagctttacagcagctgctgttgtggctgcacagcatgtgctacagtgtttcataggtgtgaaacagcagcagatgctgcagcgagcggagtactataatgaaggattaattatatacatgttactcaacttctacaaattaatgagcaacgttagggaagtacaaggaaaggtcaaaacgtttacatgtggattcggg

SEQ ID NO: 145301 - DNA, 527 bp, Zea Mays
atacttgagttgttcacctcatggagcaatgaagaggatccctgcgcctgctcccagcagttttaacgagccatcgaaatacattcgccatacttcagtagcctctgggttgttaggaacttgttgttcagtccattctgatacgaagtcaactagtgcttgagtctttactgttgtgcgaggccgaaactctatgtcatgagctcccagctcacaagcctacttggctattctcccgatggcttctttgttgtgaagcatatcccctattggaaactcggtgactactatgactttgtggtcgtcaaagtactgacggagcttgcgagcggttagaagtaccacatatagtagtttttgaacttggggatacttctttttagagggtcctagaacttcgctgatgaagtagaccagatgttgtactagatatgtgtgtcctccctccacccgctcgactactaacgcggtgctcaccacgtgagttgtgcaggagatgtataacaacagatcttctgctggctgat

SEQ ID NO: 145302 - DNA, 1254 bp, Zea Mays
gaggtcgcggacctctcgtgctcctacagagagcaccgtcaggttattttatctagtgtttggtaccacatcggagccagtacactttttggtgattccgctaggggcgaagattgcaaatctacaaaaatcggtttctatgtccgattctaaaggtctcaacgatgtttctctagacagcgacacaaggctaactaatttatcggccattgagcatgaggaattaaaagagtacataaagaagtgggacgaggagttctagcgacaacaagcttagaagcatgaggggatggagaagcggtacctctcgcgcttcagcatagattgccaccagaaggtcgtccgggagaatgaaataaactgcgattcactgtcagcttgttgcagcaactccccattgtaagtgacaccgcatcattcgatgatattcaatctattaaaatttcttttgataaccggattgaaagtatgacataggatatagagaaaatgacgcatgcatttgtaaaatctcatacgcctaattttttgtcacatgaattgggcaccgaaacaattgtgccaaacacatcgacaacaaatgtgttttctcagtcccaactatattatgatatgtcgatgaacttgtatccggggaaactgtagttgtcttcttcattatacggtggatcggctctgagcacgaccagacagtctacgcacgatctcagaccgtttggcccttcatcggaccgttcgacaccttatgccggacagtccgaagtcacacggagcccaccacaatgctcgaaggtgaagcctggtcacacaggtcggaccatccggaatatcgaagtcacctgtgaccgttctagacttctagtgcagaagaccgacaaaaagatagttggccacctgagccctaggatgaatatcacgacaatggtagttcaggggatggaaaaagttacatgtcgctaagcttgtttggcctactaagactaaatcttctgctcactctcacctgcacttggcacaaaaggggaaagttaagttcacatttagtgttgctaagtgtgataaaatatttgatgagttacttaagaatgacaacattaaatgtcgcatacaattccctcgatagaagaatggaaaagatgtgcgtattgtaaaatgaggccttgactctgtcccctagtatttaccatctggagggttagaaaatgaggccttagaaaagatgcaaatggtaaggattttggtaaaactatcttg

SEQ ID NO: 145303 - DNA, 415 bp, Zea Mays
ctggggtcgtgcagctccactctggttgtgccttacaactcctccatggctgctgcggctgggagctctggccttggccttggggatgccatcaacggcgggttcgccgcgcggtggacggccggtgcggcgtggtgtggagactgtgtggattccggaggccgctgtgggtataactccagcagccctactgatcatacctgttactgccctgatggcacatcctttggaacatgttcgtcaggtacacttttgtccctccaaaagaatcaagctttgcaagccaaggtttcttgtttctatcaccatatcaaggctgctctgtagttggttagtgtagaaaactgcaaacgagtgtgatggagatggagacaggttggctcttgtcatctggagtagtatatgggtgtagttc

SEQ ID NO: 145304 - DNA, 442 bp, Zea Mays
cagaaactgactgatcgatggtcacaacatacgagacagcacacacatcagctgctcaagatacgaaggaattcgtcaaagaaagctgcccacacatcaccaccatatcaagtgtttgtcggccgaggcgggagtgattcggtatcccaaggaattcgtcaaagaaagctgcccacttccacttttgcccagccttcaattgatgtccagagaatgcttgctcctagctagatacttttgcccgccgctgaatatacgcacaattggataattaggtgcattcgcttaaacacacttaggctttggatcctcgcggctaattgtttgttaatggctaataattagctgacaagtaattagctagcagtaattagccagagtatgtttgaagccttggctaatagatatatttttctctatacatgatctattagcacttatt

SEQ ID NO: 145305 - DNA, 326 bp, Zea Mays
gctgtaatgactccgtaaggggaatattccggagctgtagcaggtaactaggggctaattgtacttaggagggcacaaccacctactcggttacctataaattctcccgcattgtacattgatgggacatgcttaacgagaccctacagttccttgcctactgttttgttcagcacctgagtaccctctttccagagtgattagtcagagaccctcttaacaagatgctattgggcagaggccttgaatattgctacccaactgctcaaccgccttccctctaaggcggtgagtcaccccacctcctatttcgccttgtatggcac

SEQ ID NO: 145306 - DNA, 292 bp, Zea Mays
tccgtacgttgggtccaatcttatgggactttgacgacctttgtatggcattctggcgtgggggtcggcgggtcttttggaagggacttgggtcaccacgcaatgacatccatgaaccagccactcgttcactacagatggcagaccctcagatgatggagcaactattgcagtcatttgaatcagtgtttcaagaaccacaaggacttcctccagcccgccactgtgatcacaggattcacctaaaaacagggacacagtcagtggctgttagaccatacaggtatccaca

SEQ ID NO: 145307 - DNA, 456 bp, Zea Mays
tgggaccactatgattgaatgactggcccggtaagggctacatgattgacccttcgatagtggtctttcttctgtcgttttgtgtcgaactcggagttggatcctccgataatcatgtgaatgacccctcgaaagggttgatcggttaagtcctcttgtttcggtgctgctggtggtggtaacggctgatttggatgatgtggtggtggtggaggcggtagagctaggatctcttggttttgctggtgaggatggaaatgttcattgtggaattggtgttggttgtactgatggggatggttggtgtgggcgacaactctttggttgtcacccggttggtttctggccatttgatcctttgtggctttgatttcaaggcaatccctggttaggtgtgctgagtcttcgccatggaaaagataatagaaccttcgctgctgttggcctcgacctctg

SEQ ID NO: 145308 - DNA, 613 bp, Zea Mays
ggccttgccgccctgatctcgctaatgggattgcagggattcatcaccagagtagaacattccgtcgatctcgcgctctgccgtgacctgggaccactgcgcagcgattcacggtaagatcactccaagagtattcgccgttccctagagtttgtgtagatgcccttggatttatctttgcggctctggcgtggctgttcgggggtgtatgtcggcgttcgtcgtggtggcggagctgcgccgccacattcggctagcacggggggggggatgagaatgtccctggccgtcgatgcgagagttgagggtcgagattagagctctggttggcggatctggcggcgggtgctaaaccgtaggatgagtaaaggatggtctggattggatccaactgtgaggttcgttcttaggtgtttgcgccatcgatctgggatcgaacggatccccatcgatctggcttgtttaaaatctgggatgatggatctagatccaagggccagcatcacacatgggtctaggactgctcggatccattgatttgaaatcggacgaccctaatggccccgtaccccttcacccgagccatgtttcacataagcccctgcgtttgttt

SEQ ID NO: 145309 - DNA, 651 bp, Zea Mays
gtagatgcaagaagagcagaggccgggaaccgcagggggtatagtggaccagagctgttacatctgaagatctcgcgccgagtgggtagatccttcacagagcagccaaaaggatcaaattcaacagagcaattattatcagtggtaaattgacggacagaaatcagatccttaatgagggagggggaaactaaaacattgtgaagagaaagattatagggaagacgggtggtgccagtggagataacagggattagatgaccgttgccaacgacaatatgagtaggaagatgctgggaagaggggggatgagatattataccagcgtcagatgtcatgtgactggaggcaccagtatcaaagtgccactcttgttgaggcggctgctgaagagtgacagtttggaagttggcagcgagggtgtgttgatcccagacgggtgcaggcgtagaaggatcggcgtaggcagggggcggcccatatgctgcagcgggaactgcccactgaccaggagtgtcggcgacgaaggcatgcggtggtgggggcgaggcagcaggcggacgaggagtcgaaggtggacgttggccaggccacatgtagatggcccccgtccaagggttgtagtagttgtagttggaagatggtgcaggg

SEQ ID NO: 145310 - DNA, 428 bp, Zea Mays
ctcacaagccaaagcgccgccgccattaaccgccgccgcccgagcccgtttctccgtcgacgttggagccccgccgtgccctctgccacggtgagcttcgcctcgacgtccgcaacccgggacacgccccaatttcccctctccctccccaatttcctctgcccgcgctcacccgccgttctctgcgcagtcgccgaggtccgccaccgtcgactcgggttgccgccgcgccttcgccgccaccgaggggtccccggagttcgccttgaggtaaggaacctcccctgccctctcccttcctttctattgctccctgttgcgcttaattcctcgccggagtcgattagcgccgccgccgagccgcttcgccgtggaccgcccccctccggtacccctgtcccgacctagtccccaccagaaggttcccc

SEQ ID NO: 145311 - DNA, 747 bp, Zea Mays
gattcgttccatgccgaggggtatttagacggggccacccaggagagaaagagagggatagagagatctgctcgccgccatatttgtgcagctcgtgctctggatttgttccgccacaccatactgagaagaggatttgagagagagaggggtggagcgtgccagcgtggtcgcgattgctcctcatcgccaagcgtggtccggtggggacctggcaaggggcgccacgacgaaaggactgggcttcctcgtcgtgtgcagaagacgaactgggcggccacggagcgtatcagctcgtgcctgtgcagtgccacggtaagtcttgtgcccctgggctccctcgcccttaccttcctggcggtagtgcttgcgtagggtaggtgctaacctcggcaccttgatatcactccggtgggcgcgcaccagccatggcgccgccaccgctgtccggcgtgtgggaggaaggaggcacttgtgccgtcggatcagtttccagcggatgagattagaatcggtatagcgatttggtgaaatcaatctggtgcctagatctgagatcgggcggtctgaagtgggtgaatcaataattaaatctggaccgttcatttataatcagacgactgtagactcaagataccccttcgccgttgcaagttcacaaaagaaaccctggaaaaactgtgaatcaacccgcagttcacataacagtactctgtgtcttaggaacacttgcgctgaagcccctgg

SEQ ID NO: 145312 - DNA, 490 bp, Zea Mays
cccccactgtaccttttaccgacgtggtcgacatgccatagtgatgctatccgtggccgcgaggtgatcaccggagttattgccatggcgttagccacgtattcactgcgccgccttcttctttatctccggccgccaacacggctcggccaaattgagcaccactgctcgcggacgctataaattgaccgtgcctccagctccgccatgcatccaagcatctactgcacccacctgcatcccaaaccccccaccagagaacttgaatttggaatttcccccaaaccggttgaagaacgccgtgaacctaagctcgtcgtggccagccctccccaggtccgatcgcgccctctctaatctcgttttagcatccttaagcttccctcaaactcaccgacgcatgcaattgaattagaaatcctctggtcgccgggaacgcgaccacctagccgcaatactcacggttgccgtggtcagggcaaattagggc

SEQ ID NO: 145313 - DNA, 540 bp, Zea Mays
ctagcaaagatgaaacacaaagcgcgacgtgaaaaaccctgacgacgtttattaaacagatttctgctagtacaaatttcctgaaagaatttaaatcatttgccttttctcttgaggaaacacgaaaaaatgggcaattgtaggacgagcgccgcacgacgggtcccaccaacgctctcaggtctcggggctcgccaaaccaccaaacaccggtgcgttcgggcgagctcaatccttcttgaacaagtcctcgccgagagtccgagtagcgaccggagcaatcaggaccccgagctgtagcgcgatggcatccagttcacgaacgcagccagagattagcgccatccgaggagatcgtgcggacatctcccccgactttgaaaccctgagatgacaacatatgaggttgatggccggagacaaactggagcactcagcgttaagagcccgaaggcgctcctcctcacgcgaaacctccttcagcaccattagtgacaaaaacaagaaaccctgtgagacaaatgttggggccctaagggc

SEQ ID NO: 145314 - DNA, 1062 bp, Zea Mays
gtggacgagcgtctggcgggatgacactcgaatactcgactgtgagttgttggccagttaggttagtgaggaaagctcccaccaattattggaaccaatcgccattcggcagtggcagctacaggagaagccggcgcaaccttatctaggtgggcgccctccttcttgcgggtggagaagcgggcgggagtctgttgtggagtgggtgagtgggacgcgacgactgacatggcatggaggttacagatggcgtgaagactggagattggcgtggaggatatggtttgttggcggaggaagttcgttgtgagagccaatcggcgcgaacgcgagaagcgggaggctggctggggcgtgtcgtgcggagggtgcaggaggcgatacgagcgttggcgagcgtgtgcaggcctggggcagagacatggtctacttgtgtacgatagaggtgagttggtgtgcattttggtgcgggtggagaagcgggctggagtatgttgtggagtgggcgggtgggacgtgacaactgacatggcatggaggttgcagatggcgtgaagacttgcgactgacgtggaggtcatggtttgcgggcggaggcagttcgttgcgagagtcaatcggcgcgaatgcgagaagcgagaggctggctggggcgtgtcgtgcagaggatgcgggaggcgacacaggtgttggtgagagtgagcaggcctgggggagagtggagtcatggtctgcttgtgtttgtgtatggtaggggtgagttggtgtgcgttttggtgtgagtgtgtgcatacatgaacagatactacagctatacttgtaagtgagaggcaataaaaaatccattgcactgctcgggagacttgccgccagctacacactactgggggctgggttgtttatgcacttaaactcaactgccacttctacgtgtatgtcgttgttgctaattgtttccgggttgtcgagctaccaagtgtatcgaactggagctagttgtgttgggcttgggcctccgatgaaagaccgccatgcttgggcctcgagaccggaatggccaat

SEQ ID NO: 145315 - DNA, 681 bp, Zea Mays
cgcaactgacccaccgccgacgaccaactacatggcgaattgtgccgtcgccggtccacgttgtgctctgggtaggtgggtaacacccggtgtacgctacgccgccgtggataagctccagccattaaaaattccggccaccatactacgtcaccgcggtggaagacgataagaacgccggtgatagccgtcgtccgaccctacgccacgtatccgggcacctctgtcgggtcatcgtgtttccccgctgctgtctcaccgatgccggtgagcccgccacgacggtggacacgaaaccgtggcgccagagtccttcctcatctccggccgccagcacgaccttgcaaaattggacaccaccgtcgatgggatctataaattgagtacgccaccatctccgtagggcagtaaactatccagccaccacgaatcagccgcaaccattcgctagaatccacgaattttgaattcgccccaaatcagtttccgccgccgtgaagaacagctcgctgcggccagctcgattccggttagctcgcgcccctctgtttcttgttctagcgtcctcatgtgcccttgatgctcaccaaaccgtccaattacactagaagcccaccaatcgctgggaacatgaactaacatccatggtttccgctgtcctcgtgggcagaacgaaatagg

SEQ ID NO: 145316 - DNA, 745 bp, Zea Mays
ccctttcacatatttgtggggacgagcgttcacagtgagaaccgatcacttcagtttgaaatacatactggaccagcgcttatccaccataccacagcacacatgggtcagcaaactatttggatatgacatggaggtggagtataggccagggaagatgaacggcgcggctgacgccttgtcaagaagggatgaggaaccaacagcagcagtgaatctgctgtccaccccaaccttggaagtctttgatacactcaggaaggaagcattgacagatccgcaagtccaggaactaaagacatagttggcggcaggaactgcaggagaagggtgggttgaaagagatggattgttgatatgccagggcagagtcttcgttccagataattcaagtgtgtggtgtcagttgttgatagctgctcatgcagtaggtcatgagggagtagagaagaccttgcatagatggaggagctcattccacaatacccatatcaggagacgggtacaagaatttgttcggggctatgcagtctgccaaagaaataagtccgaacatcttcacactgctgggctattacaaccattaccagttccctctgaagtatggagtgatatctccatggacttcgtggaagggtttccaaaggtggggggggggggtaaatcggttatcctcacagtggttgatcgtttctccaaatttgctcacttcattcccctgagacacccttattcagcagcttcg

SEQ ID NO: 145317 - DNA, 560 bp, Zea Mays
atccaatcaaaagtgagttactaacaggttagttaattcggtgatatgggttagacactgcttcaacaaacataacctaacctaaattaatgtcatataccaacttgtctataaacaacaatataacctacatcacaggctgcttagtccatttgttccaaaagcaaaatacaactctgttcaaacctacctacctcgtgtaccccgactatcctaactatatgtccttaactcggatggcacctccaagaagaaagaccaaagaagaccaaccacgtcaaagaaggataagcatcaactcaagccttcaaagatcaagctaaatcatcagatgaatcaagatccacaaatcttggatggagtctttccttaccctacactttcttacccaaacctatctatgctttaaagacatcttctatcctacataataaagtagacatacatatatacacccatgctttcctaatcacctgccaatttgggtttagacttggaaaaaaatattttggtactaaaactacttagacactgaaatatagattacaaaccaatctctc

SEQ ID NO: 145318 - DNA, 749 bp, Zea Mays
tttctgaaacaagtttccctttagggtatgccctagagagctgtttgacggagaattttcttgccgatgacgctcggcgaaccagcaattcctagatgagaggcttcagcagcttgatggtgcacttccccagcagccttttgtttctcgaggcaaacgcgagagcgaggcagcctagtggcgtctacggtgagcgcgatagcctagagcagaacagttaccacggtcctatcccctgcgctcctgcgttgatgtgacctttcatttatagacggagaaaaaaaacgagcgagtgcgcgggatgcagagacgtgtagcagtcgtgcgcacgtcgtcccagatctggcgcgaggcaggcttttttactagacgtgcgtgggacaaagaacgtgcgcgcgtgctgcatgcgctgcatctatgcgggagaagcatgcaaaaagctgcaagctagtagctttctctttctccctttttttatcatgtgattaaggaaatacttaattatgtccactcaaaagctatgtgtgtgagaatggaatatagcagcatgcatgcgtacatgcaaatgcatagttgattgatgggaatgcatagttgattgatgggagaccaatccattcaccactattgcacgtatccgtaaaaaaaatttattcatggctagaggctatgacggttgtatgagagtaatacgcatgttctctcttcattatttcatattatttatctaatctgttttattattatta

SEQ ID NO: 145319 - DNA, 429 bp, Zea Mays
tgcaaagcgggtgagcaataccttcaaatcggtggacaccacgaaggaagtaaccttggatcccgagcgtgccgatgggcgaatgatatgcattggggccaagctctctctcaaataggaaagcacgtcattgacttcctccatgcggagaaggacatcttcgcgtagaaacccttcaacatgaggggcatcctaagggaagttgacgagaactctctgtgggtcaagcccgggtccaaactcgtaaagcagtggccatgacgttttgatgtaggaaacacagtgtcgtcagggaagaggtcagcaagctccttgcgaccgggttcattagagagatacaccccttgagtggttagccaatccagtattagttcacaagaagagcgggaaatgaaggatgtgcgtcaattacaccagcctagagaaggc

SEQ ID NO: 145320 - DNA, 674 bp, Zea Mays
cgctctaatttggaccgccagatcgattccaacggtcgggattagatccgccataatccgaaccggtacacgttggccgccatcggatcgatgatcaacggaccaaagccatccacaccagccctcggtcgtgaccgctagatctgatcctaacgcccaagatttcatctagccgaatgggtatgcatggcgaaatctcagccgttaacatagaaatcggtggacataatgcttgcccccaaccttcacctccaccggtcatcagcagaaggcagcaccaacatccctatggcggcgccacggtttccccacggtggaagtcgccggagttcttcgggacggtgccccattgctccccctacccctcaacaccgagattcgcaacgaggagaaagatttgaacacgtcggggatacttaccgccgtagaagggctacggagggagctggcctcatttgacaatggcaccaggcgcggaggtgagccataggtgagaactcccggccatgccccaccgccatcaagccagcagatgcgttgcctaggtgcagcgcagattggagtatccccagcttccctcgtaaagccattaccattgcttgactacgaccctgatgtgcactctctctcctttcccttccccggatccctggcaaccccaaggctgcagcccg

SEQ ID NO: 145321 - DNA, 589 bp, Zea Mays
gcatatatttctggacggggtactattgtggtaataaacggtggcaaaacagaccaagggcggtactcccgactcccgtactacaaggctacaaacaatgaaacagtggcaaaagaagttgagttcaaaatcctgagtaaggcaatccagagacttcactcgtaaatttcaggccatggaaagctagttccaggcttcaacaggggcagagcaaaagaacaggtcctgcctctcctgaaactttggccggttttaatatgggcaaccgcaaaaagaaggataccaattcacagatctctggccccctctcgataaagttgccgtcaaataaacagaagcaccgcaagggcaaggcgagtttacagcaaaaacgcaacggcgcttcgccccatcccgacaaactcggattcagaaaccgcaatcacaaagagcggcagctagctagttgggaatgggaacacacggaacaacggcaatcacaatcagaaacgcccgaacgaacgcattgcaccatgaagatgaaggttacggagtcgtctgcagctaggattcaggacaattttaaagcaaatcaggcctttaatagagc

SEQ ID NO: 145322 - DNA, 372 bp, Zea Mays
cactggtggagtagtggggagtcgcacgccgttggtggaggtcgagtggagctgggcgtcgccgccgccgtctagaccatctggatgctgaatgaaatttggttccaagaccttgacgcaatggagggggctcaactggtgcttaaatcagttattagtgctatttttatagctcagtagattatggtaaaaaatagcagttatcagtgcttaaagaaaccaaatttgtgatctccaaatcagttcgaagttagcacttatctccaaatcagttagctgttatcagtgctataactttgtgatttggaggtcacaaagaaggtgctcctccaaatcttcttctattactaagctagctaacgtcgccgtaca

SEQ ID NO: 145323 - DNA, 483 bp, Zea Mays
ccacaattcacatgtccacacatcaactccacacacatacacactgtaacacatagttaccagcgtccgatggggtaacagggttggggtcttggggacatggggtcaactgcgctagggcctaggagtttacgggaggtagtctgtgtgtggatggacaccagttgccaaattaaatgggtagcgggtcttacccgcagttgaaaggttatgcccaaacaatacctgcgggcgagaactcttacccgtatccttaccccgcgggtgagattctgtacccgtatctgtttccattgggtacgaaacccatggatacccatgtccgggggtagaattgtcatccctaactgggccgcggacggtccaccccttggcgcggatggtccacgattagatcagaaaaaacaatttagccccttttccgtgtgtgtttatccgtttaaactcgcgaattctgttggagaacgcctaggaacgggtcca

SEQ ID NO: 145324 - DNA, 515 bp, Zea Mays
cgatgataagctggacggcgggttgagtcatgaaatgtgcaggggttcatttgtaatatgcgcaagccgaaagggttccgatgatgtgggtcgtccgatctgcaaccgagcacctcgattgggtcgcctctaaatgaaaccgcatgcgatagccaccctacgatcctggatcaacgaaccaaaaccacccttgccagcacccgatcctgaccgctagatccgatctaacgctcacgatccaatcggtcccaaccgttaagttgtctctaatcgtgaccgtcccactggatccaacggttcacagaccccgatcctcccaggcagactggacggcggcgccccaccggaacggcccctacccacgctctagattgaccatcacactaaccggagagtacaactcgcatgaaaggagatggtgaaattgacatggtgatcgaacctgcgttccgagcgacgacgaggtcggaccacggcaccaggtgccatcgcggcggagctacgccaccgacgag

SEQ ID NO: 145325 - DNA, 381 bp, Zea Mays
acgtgacgccgcagttaaacaggatgcgatgggaccgctgtcccatccactttcaccaactataatgatgcacgcccgggaataacggacactgcccccacgccgtctattgtgttcaaacaactctggatgggacgtgcatacttcagagcatggtctcaccctcgggagggaactccacctcgcccaaagtcggtctcaacctcggagaaaactccacctcccatgaactcggtttcggcaaactgccccggcaacaactcctgaatctcgcaggaggccactccgacaactataataacccctccttgtatgactacatgccccgagctccgtctcatccgagtctgacctcggcctagataacatcgaccaaaggac

SEQ ID NO: 145326 - DNA, 276 bp, Zea Mays
aaaaccccagtttccacaagatgcagaagatcgggctcagaaatgacagacatgtggttaccggcgaatggaagctggctgttgggatcaatgggcggaatgatcggaatagcggtgctctgtctcttccacttgggagccatcacaatctctcgggcggagtgggcagactcgagaatccagaaaacagaaaagcggcggagaagaaaagtgagatttagggttcataactcaagaagacacgtcggcatgagtataagttggctctataagtcg

SEQ ID NO: 145327 - DNA, 631 bp, Zea Mays
catttatttctacttttcttttgaatagtctttagacatctctcgattggatagcaccaacatccctgcacggcccccccattcgtgcctcataggggagatgaagaatcaaatgctgcattggattgaagaagccgggtggaaatatcttctcaagcttacacagtaacacgagtgccaatctttccaagtctgcaaccacggtccgagataactcttttgctcaaagctgatggaagaaatagctcaactctgaaaccgctatccagacatgctcagggacatagcctcgaaccatcgcaggaagaatccgttcaatccatatgtggaagtcatgactcttcatccctaagactcgcatagtagataagttcacctccctactaaggttagctgcatacccatcagggaacatcaacatcttgatccactgaagtacttccttcctctgggccctgcttaggacgaaatcgaccttagtccttctccacgtctttccgccacttggcggcttcatttctaggtgtggtctatcacataacgctgccagatccactcttgccttcacgttatcctttgacttatcaggaatgtccataattgttgcccacagtgcctcggcaacattctt

SEQ ID NO: 145328 - DNA, 321 bp, Zea Mays
tatttgcaggggcgtacaagcgtgctgaggatgaccctcgaggttcgtcttgtgcagtgtgcacgcgttcaggcatggcgtggcgatgatgcgtcttatcgtgatgggtgcgagttcgcaccaccgggttcagatctccacctcatgggtgcaggtacttggtcggtagctctagcgtgctgacttgctcagtggggacttggtcgaccgctctgcctcgtaggcctgctcagcgggggcttagtcggccacttcgcctctctagcttgctcggtgagggcttggtcggccgctttgtctcgcatccttgctcgacaggga

SEQ ID NO: 145329 - DNA, 508 bp, Zea Mays
aagtggtgacagacacgccacacacacagttggtgtgattataagcccttctggtacaactaagacaatagtgcacacaagcaccaaatggtaagaggtgttctaacctcactcaaacactagacctaaacatagggcaagcgcataagtaggagtctaacaattctaacaatttcgcaaaagcacctagctaatcaacaattgatatttgagcactttggttgtatagagctactagaaatgaatctcaactcttatgtcatgttccttagctcccccactctcaaatggccggtttgagtggtatatatagccctcaagtctaaaactagccattggatgggatacataaattatgcactcactggacatgcctgatgcattcaccaaacatgtgtggtgcatccatgttagctaaccattagaagtagtcgttgtcgaccatttgaatttgggcatatggtgttttgactggtgttgcattggacactttactgcattatagccc

SEQ ID NO: 145330 - DNA, 366 bp, Zea Mays
gcgccatcgtgtcgccgtgactccctaccactgtcctgtcaacgccggtgagcttgccacggcgttagccacgaattcaccgcgccgccttcttcttcatctccggccgccagcacggctcggccaaattgatcaccaccgctcgcgggctctataaattgaccgtgcccctagctccgccatgtatccaagcacctactgcacccacctgcatctcaaatccctcactagcaagcacgaatttcggattctccccaatccggttctaaaacaccgtgaactcaaccccgccgtggtcagcccaactccggttagctcttcccctctgctcccttgtttaagcattcttatgcgtctgtgatgctt

SEQ ID NO: 145331 - DNA, 301 bp, Zea Mays
agtgagtgcataacttttttcgtacatgctactgatagacaatcatgagatacacggtttttagtggcctatgcaaatattcattgtgcgagatagattttacatttttcatggtatgttttcatttcctagataacgagcgtcaccttcgacctcgagcaactccacaagaggtcaaggatccgtgtcgtagctgctctacacgcctaggaaaatagacatatcgttgactgtaacatcccatatttttcaccactagaataaagttcatttttaaatcattgatcactaaattaactta

SEQ ID NO: 145332 - DNA, 574 bp, Zea Mays
gttcaagcaactgcaaatcccggggtcccgtttgggaccctcacgcccattctacggagtgggaccacaactggtgtatcccctggggagcatcgcactcccggttacattcgagactgaggagaacttccgcacggagaacgtcgtgttcaacgtcgcggaggtcaacctcccctttaacgccatcattggcaggacggccctgtaccggttcatggccattgcccattacgagtatttggtcctcaagatgccatccccgactagggtcctcaccgtgcggggtgaccgtgccgccgcacttgcggccgtagagaagctgcacgccctggcggcagagactgctcgcccggacgacggagggaggaaccccttagcctccggtaccaaggcgctccccaaagcgccaaaagtacaaccatttggagcggatggtgtccccgtcaaaggcatccggctcgctgcggattccacccataccactcgcattgcaggtgatctggacaagaaataggaacttgcgctcgtcgccttcctccaggcaaataccgacgtgttttcgcatgggagccat

SEQ ID NO: 145333 - DNA, 351 bp, Zea Mays
cctccctccctgtcatgcagcaggtcctatggtccacagagcaattgtctgattggtttgtcggtgacgatggctacaagctcttgcagtatgtacactgttcaatcaggcatgagacggagaggcgttgataacaagcaatgccttgttggaattagccttgtggtattttcatcatggataactgcagtggatggaaaaagctaggtgcgctagaaatctgaacattggaaacttttgggtgctattaaagtgtaccaaaaccttttggtgctattttgctgaagtcaggaactttgggtactatagaacatgtatgtcaagctgcttacaagttatatttttgtttct

SEQ ID NO: 145334 - DNA, 475 bp, Zea Mays
ccaaaagccaaaccaaacacaccctaaaggtgagttgaatctaaactgcagatgaagaactgaagatagtggtaagttattatgatcaacctgggattgccctcaccaacgggcgtgaatcgctcaggagccatcgatcccgtgtatcttttaactagaagtaatttatgctgggacaaagtctaacaacatttttgagcaagttactaataacatcagtaacttggatggttctatcgctataaatgttgattgtgcttcaaaagttgatgatgtctctttccaacctgacatattcgattctaggtattgggattcactaaattctaaatagattgacatcttggcacaaaagaatcctaaaagagacttaccattttagaaagttcttaaggacaggtttagaaaaagttttatgtacgattttatacaagaattctactccctccgtcttaaattaaaattctgtcaccca

SEQ ID NO: 145335 - DNA, 465 bp, Zea Mays
agagactattagtcgatatttcaatcttgtacttgaagctattgtctcattatcatctaggatgatacaactgcctccaatcaataccccagttgttatatctagcaaccccaagtttatgccatactttaaggtaacttatgccctatttgattttaagtaactcatgctatacttgaaggtattatactttaactgttatgtttttttaggattgtattggagcgatcgacggtactcatgttcctattactatatctcctagcttgcaagacccatatcgaaatagaaagggtggtctatcacagaatgtaatggtggcgtgtgacttcaatagtaaatttgtgcatgttagtgctggatgggaaggatcagctgcagatgcccgagtgttataggatgcaatggctcatgatttctatgttcctacaggcaaattttatttagttgatgcaggatatgcaa

SEQ ID NO: 145336 - DNA, 388 bp, Zea Mays
ttaagattgattttgagaaagcatacgacaaagtacggtggtcttttgttagacaaactttgttaatgaaaggtttctcgaacaagtggtgtgattggattgaggccttcacccaaagaggtcacgtgaacataaagattaatgaccagctcaccaataactttcaaacaatgaaaggtctaagacaaggtgacccgttatctccagtcctgtttaatgtcatttttgacatgcgggctactcttatcaaccgtgccaagagagagcggcatattgagggagttatccctcacctgctggacgatggtctttccatcctccaatacgcagacgatacaatactctttatggatcatgatcttgacaaagctcagaatctcaaactcat

SEQ ID NO: 145337 - DNA, 400 bp, Zea Mays
gggtcagactaagggagtagtagccgagaagaccgtggaagaaggaggagacgggtaaactaaaccccgaatcaagaaagggacaacaacaatagatcggtgggtatcctctgtggggacgttaatccccttccaaaccctccgcaaactcaactctttgggtggaagaacgctcatcttaacaaggcacaatacatcagacttagagatgacagaggcatagttaccacaaaacaaaagttggctgttagggtcaattgggggatggcggctgtcgaggctcccttcttcttagtcttgggtgccatgtgactcctcacaagcacgaaatcaggcgcgaagttgtaggggcagatgaatttcgaaggagaagacacaacaaaagcagcactagggtttt

SEQ ID NO: 145338 - DNA, 621 bp, Zea Mays
ctccaccgagtacgtgagttcgtgcgcaattgtgcagtttgccaacgcaacaagactcagcaccttcatctagctggtttgctgcaacccttgcccattccttctatggtttgggctgacatatcaatggacttcattgagggctttccaaaggtgggtggcaagtcagtagtgcttacagttgtagactgattctcgaagtatggccatttcattgtcgtgggccacacccctacacggcagtctcagtggcgaaggctttcttcgatgatattgttgaactccatggtctaccatgttccattgtaagtgatcgtgacactgttttcactagccagttttggactgaactgtttcacatggctggggttaagttacagatgagctcagccttccacccacaatcagatggtcaaacagaagtggtgaaccggattattactatgtacctccgttgtctcgctggggatcggcctaaatcgtggttgaagtggctcccatgggctgaatattgctataattcatcatatgagtctgctctaaagtgctcgccattcaaagtagtgtatggcagggacccccctcctatggtttcctaccagccagggaactccaaagtag

SEQ ID NO: 145339 - DNA, 383 bp, Zea Mays
tgatagaatgtccaacacaacatcctggactaacttatttgctaagtgtaatactacaggttgactggtatgcaatttgaagattctaagtccaaatgagcttaaaataggccaagaaatgcaactttgtgcaaaggggtaaaactgtgaggtttaaaactttagatatgttacatatgcccattacaatgtttctatcactttggtttgatctctagttcagtttcttgagaaaaatgtgttttggacttagtttgagctaaatcagaaatattggtgaaagagcaaggaaaacgtgagtacctatgacttagtgaattggattatactctaatatatgggaagatcccaagaaagttgaccaagtcagaaagttggcctaa

SEQ ID NO: 145340 - DNA, 687 bp, Zea Mays
ctggcggcttaccaggtacaggagagcagggggcatctagcaaaaagcaagcaccaggttgggggagataatggatgaggcgggagggtgtaaacgcaaatatagcagggaacgttggatgtgcaatggatggtttggattgattgattgcatgcgtgcaccgaagtacacgattgcacaggatatggcctcgttaagatgtttcctaaaataggagcacctgtacctgtctgaaattttgcagataaatattgcagggaacttaacggaatgttcaactaaaatgtttgccaaagaaatgtcagagctaggctccacatggttcccaattgaaaatagagaaataaatgtcagttgcaggacagttaaagataacatgatacctaatgatattgggagttttgtttctgcgaaatgtttggtttctaactgtgcctccaccattctgcagctatgaatcaaccttctagcacaaatgatgggtctcccgagcaatggtttctaactcatgtctcccatttactgctggtatccatcctttaattcggatgatgattaaaagtcgtccaagccaacagaagaagtatgagtagcaacgacaatgatcacatcaacatgttcagctagccgatactaggccagtaacatcaattatgatccgacttctaacgtgagttttgcagagat

SEQ ID NO: 145341 - DNA, 609 bp, Zea Mays
agttagtacaaaacataccttcatggacacctccatcccagtatgcacatgtgccatatcattatgcatacccaccaccaccctatgcgacaaataaaatgtgggggcatgccaccatatccatatgggaggccataatattctgcttgggggcaccccaggtttcagtgcttgacaggttagcaccaccagtgcaagaccgattgagtttgcctcaatccagtcatcagacacaggaacaacaagattttcaaaacacttgaccaccaaggccgaccaatacggcagcggggcatggagagaaagtgtccacaattgaagctaccaatgctaaaagaacaaccaacagggatgttatcaagataggcacaatagacgtcatcatacaaagaaataacgaagggccgatgttttttggtgaatcggccaaaacaaaggagaagaaatacatagaaacaactagtaaaacatcggacacaaaatacttcattcctcgatggtgcccattgggactaacacgctcacaaaagcacaaattgtagcgtctgagagcaaacgagctgcagggaaaaggagacataaaattattcaatgatacacatccacaat

SEQ ID NO: 145342 - DNA, 406 bp, Zea Mays
cttcattggcacaagagacataatccaagagcacataacctacagagtgtggccacttgtggatagttgggagatgccaaaggagattgctgctagatccagcgaaggtggattagttcgattgaaatataccttcagatacagagagaagttcaacaaaccaaatgatgattggttgaaatgcattgaggctactagcgacgagttgcttgggatatataccagggctgaagatgatgctttgtcctcagccttcgggggttggggcaagaaaagattgaacatgatttttgatgcaattggcttcgtatatcgtgattactactaccccttgcgaaggcaaggaaaaaagagaaaaactgccgcttcggccaccactgctgtgccgaagggcaagaaaataaag

SEQ ID NO: 145343 - DNA, 452 bp, Zea Mays
cctcggcccacctccgctcttcggacgttggtgacgccagcccacatgggagctggctcgacgacctctggcccagcctcggatccggactgaggccaagtcgggccaccatgtcatcgtcttcgtcatcatcatcatcatcgtcgtcgttgccaggcgtgtccggcgacggctccaacgggagcccatcccttgcttgcctctgacgacgcttctccaaagcttcccgagctcacatcctctcgcgagctcgggccttttccgcgtccttcttctccttgtccttcttcgcggcgagcctacgcgcggtccggcccgccgcgtcctccgggaccggtggccaagagagtttaaaattcctcaacccctagggacgaacgaaaatcccaacagtaagaactaaagacgtaagaaacacggcgcaaaacagaaggagggtcagacacttacca

SEQ ID NO: 145344 - DNA, 349 bp, Zea Mays
gcgaggggcttctaccgcacgacgttatccactcgcccagagcacgaatccaacagcggtggcgtgaatcacggcgaaggtcgtcggcggtgggattcttctgtggcggccgatctgatccggttagggcactgtaccatcgtgagctcccatcagagcacctgacagcccatatttagggtcgattttctccaatttttgtgtggtgactaaaccaaccgtttgtaacaaagttgttgtccattataccatcttcatctttgttacagcagccatgggcaaatgcttactagattagtcataaactgtttccaaagatgatccaatgtcactgtcagtctaattttcg

SEQ ID NO: 145345 - DNA, 1178 bp, Zea Mays
ggcccacttccccaacacgcgccagcctcctcacccgcgcacgagcactgcctcgctgggcccacgcctcagtcagacaccccaccccggacacggtactgctgtctttgccatgtggggtctatgtaccagttagttcttccctgatgagatccccaacggaattccgagcatggcccgcctgcgcgcatactgcggaccggccaaaccgccctgctggaccataaaagcgcgcggccggagcttctcgccctcccaaatcaaaaacgccgacccagctcgtcacccggtgcagagaagagaggaagccgagagccatcggctaggtaatccgccgtcgtcgacgttctccgcttcggtcgtcgtccggagttctcggtcggggtttggggactgattcgcattccctagaagaagttcatggccaccccgagcgtgattggttagcctcgacgtgggaattgctcatcagagcagtccttcgccagggatccgccgctcgccgtgacctgcgccacctgcatgacaatctatggtgagactccttcccccagtttcgtcattgtctccgttgcatgctgcgttgtccgcccgggttatcgatcggggaccggagcttttggctctgccggcaatggcgccgccgctctgggcacctccgccgccactatccgtcgtgggagatcaggaaacaattggggatgtagatctcctaatggacggttaggattgcgcgttgcatacccattcggctaggctcaatctaaaccattgatctggcgatgtgcgagtatgagtgcatcgcgttcattttaaatcgtgtccgttgatcgctcattggacgttaaccagtggataccggttcgggtgcggatcaatctaatccgggcgctcagtttctaatccaacggcttggcttcaccgataccgcttcgttcggcttatttgctaaagagaccctagggtttcacctattcaacccgccatccattctaagtgaaaaataatcacagacagatcctgtttttagcactttagcccctggctttttcagaaatcgggttgcaggctgagacctcgatttatttataaactaaatacagaaaatgaatttttagtattaaaataaattcagaaacttagataattcataacttctttattttaactccttttta

SEQ ID NO: 145346 - DNA, 689 bp, Zea Mays
cacattgccgctttaggaataacagccgagtgattaccggcgacgtcgacgtttttagaggtaatagccgagtgataacgagccacgtcggtgttttagaaataacgaccgagcggttacaagcgatgtcggcgttttagaagtaacagtcgagtcctttggagccacgtcgccgctttaggaataacagccgagtgactactggcgatgtcggcgttttagaagtaacagccgagtgacaacggaccacgtcggccgctttggaaacagtggccgagtgaagtctggtaacgtcagcgtttttagaaatagcagctgagttatattgggccgcgtcggccgttttggaaataacggccgagtgatgacatggcacgccagcgttttagaaataatagttgggtgatgactgggcactttttagaaatggcgtctggcccgggaaaaccccatatgtactgcactgtcgcatgcctatgcattctgagccctagttttgcttttctgcatccagatcttctctgctctcttgcgatattgcttccgctccgctcgccagcaagattgagatggcgcccaagcggaggactcagagttcatctgtcgcaatcattcctcccatcgattccaacagccagttgcctttcgcaggtaaccacatgtctgttgtttctgaatccgaccttctc

SEQ ID NO: 145347 - DNA, 455 bp, Zea Mays
aagtcaaaatcttgggaggaggcagtgggttgctgttcagcaaagggaaaagtggactcatcgaaaacaacgtgatgggaaaggatgacacggttggataggaggtcaagacaccagtaccctttgtgatgcgacgagtagccaagaaaaacacacttagcggaacggggatcaagtttgtggctagtggtggcagataggttgggatagcaagtgcaaccgaacacgcgaaggtgttcataggagggtacagttttgaagagggcgaagtgaggagtagaaaaatgaagggtcttggtgggtagaacgttgagaagaagtgttgccgtgtggagtgcttcaacccagaaggttggtgggatgctggcctgaaagagaagagagcgaatggtgttattggtagtacggatgatgcgctcagctttaccattctgagatgaggtgtaggggcagaa

SEQ ID NO: 145348 - DNA, 427 bp, Zea Mays
ctgaaccagacacaatgtgaatctagtcatttctatgatacttctccctcatcgtcaacttgttcagatcacttgtgatatgatctgttgctcccgtgtcggtgtaccagtcggtgtcgacattgtacgcgttcatggtgatggcggcgttgacatggcgctcttctgggacatagttttcatcaaaacgatgctagcaccgggccaccttgtaacctgttttgaaacagatctgacagagcggcacatcatcagacccactcgccgcatcgggtcgtggttgtcgccctccattgtgttgcttcggcgcgccacttcctcggccacgcacctggccgcacccacactgaccacgaccacaggtagtgcccgagacacggttgtcgttgccacgcccacgatttgccacgtgagcatcagagccgcc

SEQ ID NO: 145349 - DNA, 290 bp, Zea Mays
gtgaaattgaagcctggtatatcggattggcgtgaaatttggcgaatatgttactggaggtgttgtgaaggtgcctgaaaaatttgggttcaatcagagcgtttttggcttgtttgggcatttcaccgaacacgtgatgtgcgaggatttagggtttcggtgaaacgactatttgaggtggtgaaaccctcccgaaggagctaagaacctgcaggggatttaatggagcactagggcacacaaccatgcacaggtattcacaagatttacacaagaatttgaaattggca

SEQ ID NO: 145350 - DNA, 732 bp, Zea Mays
gcacccctctcaactgctccgacgtgtcggcggcgtgatgggggtcgggtgcctggagccgtgggctccatcatgagttggtgggtgggggcgtcctcggtggggcaacaggatcgacgtctcttggacgggccacgctcttggccaacggctgggggctctctggctggtgcccacatcctatggctagggtctccccttcggtccatcacatgtctacgatcggtggcggtggctcgtgcggcttggacccatgggtgatcttggtgacttttttccgctcccgtgtcttcattgctttgctagtgtgatgcttagaaaccttgtgacgtgagtcgtcttagcgtcgatacacagattcgcttactttgtgatgtgatctacctttagatgtgtactatggactagattatcgtatgcctatcggctagttcgagaattagtcctcatagcacccgacatctaaagacgagttgtctgttacagagtttgtggttgttgttatcagctaagattaggtagtataatagcgctggcccggatagtgggtggtggcatcgttgaatcctgatctttgacctcagggagatatccctaggcatgaccttagttggttgtgcttggcaatggccttgctggaggcattgtttgttggtcaaggattgactctctgtagtgaaagcctttggtctggtcttcagtggttggaccatgacaacgatggtgtgtgta

SEQ ID NO: 145351 - DNA, 378 bp, Zea Mays
caaaaaggcgccaacacactttttggcgactccgctggggacgaaaaaaatcggatctatcaaatccaatccattagatcagatatattaaatcagatttatcagatcggtcgcagtggccaatcccaaagatcacaacaacgttatcctagacattaacacaaggctgactaactcgccggccgatgaagatgagaaattagaagaccacatgaaaaagctggacgaggaattccaacgacaacaggctcagataagcaaggtggcgaaaaagtggtacctctcgcacttcaaggtagatcaccaccagaaggtcgtcaagaagagggaagtaaagtacgattcactgtcagccttgctgcatcagctccccattgt

SEQ ID NO: 145352 - DNA, 278 bp, Zea Mays
aacctctgttcgaaggttgttgagagcaatggtgcagctctcgtcttcagcattcttttgtgcccttaaggcattgctgagaattaagccctattcaaaaagaatgaatggattaacacaacagtaaaggattcattcaaaatccacaaaattcaaagtttacaatctttgtacctttagactgttatatgcaagactatccgcaagatcctccttcgtcatggcgcaaaggccagcttcaagctttgggaatcccatgcttctagccatttcccggc

SEQ ID NO: 145353 - DNA, 343 bp, Zea Mays
tgtaattgaaaaatacgtcatcaataaaagatttcgttcccgaaggcattcaaactattggttatcaattgacttcgacttgattagactcagaatcaacacgcttactcgacttagggtgaccactataccctactaacgaagcaatcgacttaagtcggcaatgacttaagacggtgcaacatgctcacgcttactcgacttagggtgaccactataccctactaacggagcaatcgacttaagtcggcaatgacttaagacggtgcaacatgctcacgcttactcgacttagggtgaccactataccctactaacggagcaatcggcttaagtcagcaat

SEQ ID NO: 145354 - DNA, 492 bp, Zea Mays
gcgacaacggcatgcgcgcggccaggcatacgcggcatggttgggccctggaatttcttgccgcagcggaactccgcccaaatctgtgctccgtcgcggactccgcagccgtgttcaatggaagcgcccgcaatatactcgccgaccaccaaacggaaaccgtgatctgcgctggctggagtgccgtggatcctcgcgattcttaagcctgggatcgccccgcccctataaaactcggacgctcccacctcagctacctccatggcgaactctctccggtggctgggctcctccgtcgtgcccctgtccctgtgttgactgcgttcccttgcacgccaaacctaggtaaggaacctacaaactgagtccgcctgtgtcttctctaagcgtagctcgctaccggtaggagaaactgggctccgtagctccgggcgcactactcaccggcgagagcagccgcacgggctatgggcgccgtcgtgcgcagccgcc

SEQ ID NO: 145355 - DNA, 982 bp, Zea Mays
cagtcattaattaccaaatgccttagcaatcgaaagtgaattctagcaaggttaagcattgcccaggtcccataaacctgagcatttcaccaggatgagagtagagagctggcgaaataagcataaatgatggaggactgatgattgtcttgcaacattcatatgtgattctccagccatcatgcccttgagctcaagtttatccagataaggttggttcatcagtaaggacaagatggcatcttgcccaatttgagggcagcttcccagagtaagggactcgagtctcttggcatactgcataagggctcttagagacgcctcagtgatggacaagcacccttcgatatggaggaacttcaggtttctgcattgcttagcaacctgaggaagaccatcgtcgctgattgaagactgtaacataacgaaattttctagtgcagggcagtttgaagcaatgatcctggcagctttatccgtgagagagaggcagtcaacgagacaaactgacttcagattgccgcatgcactgcttacaaaatggatagcactatcagtgagccgtggaacaccagcaacaacagtcccacatggtgcacaacaaagaccaagatcagttatcacaccccttgcacatatgttgacaacagcggctgcaagcttgacatcatcaacatcagacatatgcaggcaagggtgaacaccttgatgaacactgaaggggccccaaaaatctggccgctgagggaccaatatgttggcccgtctccaacagacacaggcacatgactggcgatcttctgggtttcccacatgcctgaatatttcagctatgcaagcttctggcagctcatttatcaagtcctgtggaagagttcttgattgatacatggaagaacctgcgcttaccttcttacaagcttcataagaagttctaaggcagcttgattgcctcatgtttcctgtcatacaaacaatttcg

SEQ ID NO: 145356 - DNA, 425 bp, Zea Mays
ttttgagtggcgcaagtccgttggcttccacgcatagctggcatatgtgtgcaagcgactagtcagaggaaaaaaagtgagtgttagtgccttagtggtgcttaacgacctgtatctgttctaacggaagtttggcaagtgacaacttatgctatgctagtacaagctattaccggccatgtgcatggaaagtgtcggttagatatgccaaaatatgaacatgacacttaaaatgataaccagggagccatttgcactagaggtcgctaaagtttggctgcacttcatcctatttgtctctcacgcctatgtgctgatatgctgtgctaagctggcatgataggactctttggcttcttcaaagcattgatgccaattgcaataagcgtttctggctccaagttgactattcactctatcttttg

SEQ ID NO: 145357 - DNA, 708 bp, Zea Mays
tggtataaatgtgtatatcgattgcgcccttcacacactaatttgcattttaacttgggcatcacatgaacactactaatttttacacgcgactgtaaccatacacatttagactacaacaagcaaatcatcgtgattacgagcttaactaacccatcaaacgtttcggctaactacagcaacgacatagcccgctaattaacatacacgtcggcttgcctactattatcactatctaaggcacaacatacaccacaacatttttataaacatacatattcacatgtatattcgcacattgaccaaagcatacgaatcgtaaaccactagtctacagttcgaaaccatcgtgcgcttatttcccaaatcatgaacacataacgtgtatcgacccgactctagatatagaggaagcgatgactacttacggcatgtcatcacctcactatataagccaaaacaatttctactatcgactaagagttctaagtattaaacacattattattttccacgcacaaataaacctcaactaaacaccagtgacaccgatggacttttactaaacttatcatgcgcataaccctgtctcgcatacaaccatattgtggcgtgcactcgagacacttcgataatcgtagcgtaaccactaatatatgaactccgacactcatatcttaataattcatcctccacacactagcattt

SEQ ID NO: 145358 - DNA, 272 bp, Zea Mays
aaatgaagcaacaagtctaggtgtcatgcttgccgctgggagggtgtgccaactgggtagagaactcagcaacgggagagtggccagttcaggatgtgttgtatccctgcattctatatccggtgggcggaggatgaatctgttttaagagatggtactgctagagggacgtgtgctgtttactgggttcataactcagcatttatgaaactgaccaagatgaggtggggtgcagaacactccactattggatcattggatgagaaaattcc

SEQ ID NO: 145359 - DNA, 300 bp, Zea Mays
gtttggtgaaccaactcggagtcaacaacattctagagtaaaactatgcttttttatgttgcccgattagtttaggtctttaggatgggtataggatgcaattgtgcaatattaatgattcactttagtgtcatgtcacatgtgctgaatttcattgtgattaggaattggatttccctgttatctcggtggtaaaatgcaatactgcagaggtgttttcacttcctggttcatctttcaattggaatcacagttgctaatcattcccatgtgcatcaatcaggggtcatgtcgcaggcc

SEQ ID NO: 145360 - DNA, 1134 bp, Zea Mays
tgatgttcaaaatcaaagaggtggtcgcaatattgaggaggcgaatatgggagagggggtgataccttgaatcaaggtaacccatctccctgggaaggtcaagttaacagatctgaggaaaagaatgaagatagttggaaaggaaatccccatcctatgggagaagatggtcccaacgattcgcatgtgaaaaaagaggtaactcgcagttttaatctggatagatctggctgtgctttttgtcactttaaaaatcatcttactaaggattgtcgacatcgctttccttgtgacatttgtggttgtgatgatcatgttgtgtttgattgcaaaaaacgcttgccttggaattttggtccggaactttgtgcgacacaagttgaggatcatagttttttctatattgaagaaaaagtggataataggatgattaaagaaaaatccagcactgctattatcactgttgttcaagggaatgttagtgaaaaacagattgaattggaattcatgaacatgttaggcaagaatttatggcggtggtctgctagatctgtgggagacaataagtttgttatgagatttccagatcctaaaatgataggggatcttggatactttagacctttgggcatgagaacagcgaaagctcagattacaattgatccttggacacctgctgttaatgctaaaggttgcttgcaaaaaggatggttcagaattagtggcattcctatggaacaaaggtctctggtgacaatcgctaaagttggtgggctcgtgggtaaggtgattgaaattgatgaaaggactagacttagaaatgaatatgtgagagctagaattgcttacagggatgtcacgactgttcctggtgttgtggaaggctcccttggattgtttttgtatgattttttctttgaaagggaaatacactcggaagaggatgaacaatttcttgatactgggattagagttgatgactctaaccagaaagctgcaaaaagatccaagtatgaaggtaaaatgaagaaagataagaaagtggattatgggaatctggaggatggaaatattaaacagcatgatgagtgtagcagaaaatctcaaagttatacttatcaaatgcaagggctt

SEQ ID NO: 145361 - DNA, 1663 bp, Zea Mays
gctcggcctaggcaatagtgtgtcacactatcaccacacccccacattgtcgtccggctagtgtacatgtgagccctgctggtcagctacacatgtcacatgcgcacataggaaccagccactgccatgtgggcccatccatcagaagcttctcctccctcgcatcgtaacaaactcgttcgtagtgtcacgccaagactcgaccaatgacctatcgccctaggctccgtacttggtgtatatatgcatacatcgtgacattctgtggccatagattgagagagcaagaaccttgggtcgccgagccgtgcacctggatagagggtgaggtagccgctgagaaagagaacattagtcgtcatcatcattgtacgtctataccgccgaccgagccctgatcgatagctccaagcattcaccaaagaggggtcacaagaatgccaatgctaatgcctcaccctaaatcctaatccacagaaggatccatctcctaggtgtcggagtgaccggaagagtgacatcctaatggtggtactggatctgcccccttttctacaggacagcggtgggaggcgacgtcagtaaggaccagatccatctccactactgcagggagaaggtatgaactcctattcccctctgcggtcgtgttttatgtgcactgatccaagatggattagttccctgttatcttctaaagtaatctcggagttctaagtatacacagttagatccctaatttctatcagatatatgttgctctgtttatctttatacactttcctccttgatagcctcttttcgggcaaaccatgtgaagcaacttggcttttattcagtcttgtagcatcaacttttgatgttcacactttttggtcatgcagtttctctttctacctggttgattacccgcaccattccatcctgaatcatcgcgtgcgttgacttttctgtacacgaggaacgattactgcatgagtggatgcaaaataagtcgttttgaggccatccacctgcatctgtatatacgccagatatggtcgtacctggccggccaggctcgcgtgggactggctgtgcgggcgcagtaaaccaatcaggcactttgtgttcggggtcacttggctaatgtagctaaaaactgcagattttacggcaaacttcatgaggtgtcagtgcttaactgcttaagttagagtgctacctttagagtgcaatggagtgtcatctgcacaaatgatctatagtgtggttataacaatgtaaactgcagagtttcatgattagaaataaataaaggaaccacaaaatcaagggatcatacactttgccgaggtcatgtgcacaagggattttttttttttgatacgagggcatcaccatttatattactttcataacagaaatgcatcacagttcaccaaagagtacctgaccgacagacggacaacctccgacaaaagacggcaaccagaaacctgaagtttcgccaagagttgtctagacagcctctgattcagggagccagcacgcaggacaaaatgggccatcaagttcaacgggcattaacccaccaacatatatagtagagtaatacagctactgctcaaggactcatgcaggagccaaaagcataaaaaactacgatcgaatccaagcaggc

SEQ ID NO: 145362 - DNA, 409 bp, Zea Mays
tggacgtcaaacactaaaatctattataggaaatgttttaagcccatttcccatgcagcaaagggatatattttttgactacgttgcatctgcgggttcagcctcagcatggctctacgcagttaatcaaacagtagctacttggtcaatgcacacgctcaatctggatggatgtgcgcatgataccaatcagttcatgtgggtgtgtgatgcactgcacgttagactctatgcactgcttccctctctccctcttcctagcctgcatgctggccacagtgacccgctaagactatctgcaatgattcttcttaaatttcactctctatctcccacttttgtaccacctcacctatatttcacccctactttttatctctcgcaacgtttcctccctaaattctctcca

SEQ ID NO: 145363 - DNA, 446 bp, Zea Mays
gtcgtcaaccaccaaaatctatttataggaaatggttaaccctatttcccttcagcaatgaagctcatcgcacggttatgctcaacacaatcatctattatagaattgacaacatcgatgagcgtaaatgagactaatgatgatgtattatttttagtgttggaccttcttacacttgagtagattatcaccaccattctgcaaagatataactacattgtaagaattatcatgtgaataaaatcttgcaagtaaacaatgacactcacaatacaaatatagacttcacaatacatgaaatcatgtacataaacaaaatctccactccaacataaatactgacttaagacgataccagcggcaacatgacattttggtcactaaagcgagaataaggtctaaggatccccatactaagcacaagatgtgatgcatgtttgtcctat

SEQ ID NO: 145364 - DNA, 529 bp, Zea Mays
gaaatatcgaaagattgcacgttaagattgcttagcttatgactaattccgatcaagagtcgtctaagactaagagtgtatattgtcaacaagcttgcttgtgggatgcctgcgttcagaggaaaaaagcgtgcagcagaacaggtcatctgctgatccattcattcatctcgatggtcgtcgatgcatgaatacagaaacagaaatgatcaatgagcaggccgggtctctttttggagctctagtcgtctgcccaagcaagctgcggggcatgcaggcgactcgtcttccttctctagctagaaattaaactggagcagctaggtagctatgggacatgcatatcctcatcctctagttgatcgattggcattttatctccaccacaacgttgccctgcatatgcgccatgtgctgtgctccacacacaaggccaaatggccccaaaagctccattcgtcggtctccactaggaacagtaccgggcccatatattgcatgtgcatcccatcaccacccccccaaatgc

SEQ ID NO: 145365 - DNA, 470 bp, Zea Mays
attcaggtgagtgtgttggtgaatatactgttttgccattcgagttggtgccacaatcatttgtagacccatttaatgggatcatattgggggcagattgagcatcatgcacggttagcacaacctcgacaccacgatcatagttttcattttcagggcgagaggcaactaacaaacgtcgcaccaccacctccatgacttgttttttggtcttcatagctgatttaacataattatcccaccctcgctgacactcaattgggacgataagtctttgcacatttgttggaggacctacgtttagcaccctcatcaacgacgatgtcgtcagcttcatgccaaccgatcttctccttagccttagcaaccacctcactaaaggagggtttatcatcgaatataacagccacacgttgtatgtcaacgaactcagcatttccataatgatcttgttccactatgactctaag

SEQ ID NO: 145366 - DNA, 540 bp, Zea Mays
attgatgtgacgagtagtttagagaatgctagtttgcgtagatgatgtatcgttaagacatgagtgtcggagtccatttatattagtggtcgcgccacattgattgaagtgtctcgagtgcacgccatgatatggttgtatgcgagacagggttatgcgtatgatgagtttagtaaaaattccatcggtgtcagttgtgttaagttgaagtttatttgtgcatgtaaagtagtaaggtatttaatgcttacgactcttagtcgatggtagaaattgtcttgacttaaatagagaggtggtgacatgccagagtagtcatcgctttctctatatttataggtcaagtcatgacgatgcgtattatgcgttcgttaaattatgtttcgtatatagtgtatgattgtgctcacgatttcgagtagacacttcaaataagtcaagttggtttataatgaaagatgtgtgatgaagttagtttgttttaggatatttgttgaaatgctccattcatgtgatagacatgtgtggttaattcaaatc

SEQ ID NO: 145367 - DNA, 928 bp, Zea Mays
tggcgaccgagcccctcattctctttctcaagtcagccaaccttctccaaaaggttccgactcttgttctcggctgcagacttgtccctgatggcttcagtgttcagcatccgaaggcgctctatcttatcgtccaatcattttcctctcggaacgcagttgcgaggtcacaacattcaccagcgccctagatgccacttgatcggcaaagaaagcagtccgcaattgcataaacctcggtaaaaaaactcacgaagcgaagttgtcgtgcgacatttgctgccacaccctcagccgcagacacgctggcgacctctctgcccccgtcaatagcaacgcagaatcgtgcccacgtgtctagcgaagtcatcattgcaaacttcgcctaggttctctcttcaaccggctacgtcggcactaccaccatttgcccagacccagcacctgtagccgaaaatagatcaggcgggggcattctcctggcagccaccgaaggcaccgcaagcggaggcatcacaatagccacgatggagcccttctcactgggacgaggcgccttcacgtcacatcatgggtccaccagccatagtggagccttctccttcttccgcgcagactcctggcggtccttttccatcactgttgttacaacagcaccaatgcttctcccataaggatgtaaaataatcttcaccaaaggctcgggggatagggtcttttttatgccactcacccacagtcacctttagcattcgcgaagatgattttcggaggtcgggcgaagtcatgacctccccaggctcagtgcacgtcttcgccaactcaaccaaacacatttgaggtcctcgaaaccccggatgccttcatcgtaccttttacctcaacttttctcttctacgttgccataaccacaactttccaattcgag

SEQ ID NO: 145368 - DNA, 699 bp, Zea Mays
cagtcggggcacaagacaacaagtaagattcactggggtagaacatatcgttttaccacgggtcggtagctccttctatgaaaaggagccgataaccgatccccttctcagtctataaaaggaagggttggagacgaacacaaaagaggacacacacgcaagagacactcgataacgccagaggacgacggaggccagaaccaaggagcgaaccactgcgacgtccaagacttagcagagagctctagtccagtagtccttaggtctagccatgcatttacttaggagcactttttccctctctcgcccgcttgtaacccctactataagcattgagcaacgacgatgtcagtagcgcgagccaccgaagactggatgtaggaacgttctgctcaaaccagtataaaccttgcacccaccgaacacatcatccagaacccagaacgcacacatacaaatttacttgtcagagccaggttctaaaccgacagttgacgcaccaggtaggggccttgcgctttctcgatgaactctctaggcaccagatggccggtcacaacgccgatcagaccctcgagatggcgaccgtttcgggaacctcgacttcgtcctcgatggcgaaggggaaatggtcaggcccccagaagcctgaccccttctgcctaggagtctcgacattgccacgagggccagcggcgg

SEQ ID NO: 145369 - DNA, 432 bp, Zea Mays
cggaagatcatgcaagcggaccacctgatccaaaacaacctgagccacttgtgttgcagtgaaagggtgtttcatagctataaaatgagcgtacttcgagaaacgatccaccacaaccaagattgtatcatagccactcgacttgggggcagtttttctatgaaatccattgcaatatcctgccaggcgccttgaggaatcgaaagcggttgcaataaaccagccgggtgaactcgctctcctttggccttttgacaaatttgacactgtttgacaaaatcttccacatcaatcttcatatccttccaaaaaaacaatttcttcaatctatgataagtggtgtgcacccacaagtgacacctgtggcactatcatgcaatgctgccaccaacttcatccggagaactgaattttggccaacccaaatcaaac

SEQ ID NO: 145370 - DNA, 356 bp, Zea Mays
cgactcgcccgaggccaccctcgagcgggagacataatcacgactcgtgaggccaagcccgggcgggacaggcagtcacaactcatccgaggccaagcccgggcagcagacgcagtcatgactcatccgaggccaagcccgggtagcagacgcagtcacgactcgcctaaggccactttggcagaactgtccgcacccggcctcctccacctcttcccgcctcttgctctaaccgcaccatgttccacatgttgcagccaccatccacctaacgcccccaatctgccttcgatgcaattcgcggtcccacacacccgacgccccgcccccgagcctgcctcccaatgtcacctccc

SEQ ID NO: 145371 - DNA, 417 bp, Zea Mays
tatcgtatagtagccttgggtatgtctactgctaatgtcatggtaatagtgcacctccttgatcgtaatatcttttgccgatgtttggaccagaagatcctatcgactagtgaaatgatgttgcgtgccctggcctagatgggtgatgcaaggagacacaagtctttatcctggttcgaacaagagaaggccctacttccagcagaggaggtgagacttatatttcttgcacctaagtgcttatagtagggagtacaagctggtcgggagagggaaggatcctaagtccctggggttgattgaggcaagtgccaatatcatcatgaaggtgaaaaccatgaagtgttcgcctgccttgtctgaagccctggatgtctctatttatagcctcaaggaggacctccaggagcactgggg

SEQ ID NO: 145372 - DNA, 305 bp, Zea Mays
ccggacatgcgtagatcgacaaatttatcgtcgatgtgcgtgggaggctgttgttgcccaaggtacatgtctatcggcatcccataaaggggttgtgactggtcgtgacaacctgtagccgatgaattacgtgtgtattcccttagtttaacctcgtgcgaaggaagatttgtaatagtagacttatcaaacgcacgcattagccttttatgatctttttgtatatcccctacgatacgttgcatctgctctcgttgttcgtctatgtaagctttaagagattggagttcattggtgctacttac

SEQ ID NO: 145373 - DNA, 445 bp, Zea Mays
cgattctttgcagtgggagacttggtccttcaccgaattctaacaggggagagacgacacaagctgtcaccaccatgggaaggatcgttcatcgtatcagaggtcacacggccgggatcatatcggcttactcagatggacggcacagaagtggggaactcgtggaacatagaacacctcagaaagttctacccttagcaaggcctcaaaaaactcttgaaggaatattgtactctgtaacccgaagatttcatcatcaataaagctttcatttttcaaaggcattcagactcttgacttacaactgacttcgattgggcttgactttaaatcggcatgacttgacttaggtgaccactatgccctactaacggagcaatcagcttaagtcggagatggcttaaatcagtgtgacatgctcacgcttacttgacttagggtgacc

SEQ ID NO: 145374 - DNA, 763 bp, Zea Mays
ctcggggtaagaaatatcgcgttggggatgtgctcgggacactgtttcaccctggccaccatacccccttgccttacggtcagtctagataacctcgccggagttgtccgcctgccgcgcgatggccacgtgccttgaagctttaccacgtcgcagtaagccgctttagatagctggttcatcgccggtaagcttgccacggtgaaagccacgcatcccttgcgccagtgacctcccctctctccgatcgctgcgcgttttctcaaaattagccaccaccgccgatggaacctataaatttccgccctagtgagctccgctaagtagttgtgcgtccagtgaaccagccctcacctccaatcatcccccacagctccccaatttgtgatttcccccaactttgtcaagaacaccgcagtgtgtgagctcgccgtggccagctctccacaggtctaatcacgccctcctcgcacttgtttcagcactcttgtgtgctcttgatgcttcttgacccaaccaattgagctagaacacgtaggatcaccgggaacgcctcagttcatccgtagttcgcgccatcatcatggacagagagattaggagttagaactttgcaattgagtgaggggttatggtcgtttagggtagaattaggtgtatgccatagcggagcaccgatcgttatgttttccggccggtacagactcgccagagccacagttccgccgtccataatcggggacctctgtgatacccggtttgc

SEQ ID NO: 145375 - DNA, 382 bp, Zea Mays
ctgccgtcaccatcacggaagagaggaggaaagggtagccgccataagtcgacccgtgcgctcatcgccaccgcttcctcggtgtcgtgcctaggggcttcactggaccacaaggatggtgtatgtggcctcatcaagcgggattagcaatcagggacctcgagattcctcgccgtcgcagaaatctgtcgcggagctgcttcacgccgcagaccggcatcgtcaccgtgcaatcccagtaaggcccctacctgttagtttaccgcaagttctggcgtgtaacactcttcgtgatggccgccgagggtccggtatttatcgccggatcttctccgacgccgtagatccatcctcgccgtgggcagccctttagacactgccc

SEQ ID NO: 145376 - DNA, 619 bp, Zea Mays
gtgattcgtggccccgggggagtttggccgcgattgtggcctggtggaagaccacgaagtgtggcggggcatacgcaaggaagtttcgggctgatcacctgcgctgtggggcggattgctcaccgacgatcgattcgcaccgctgggccgccagtcctcgtcgatagagcgcgatacttcgaaattggaggtatgatggtggggtatgtattgggggtgtgcaccacatcgcgtagcaagttgtaggttgaactgcggggcaccaagcgctgagaatcgaccgcactggcggtagctccgccatggggtgggatgacgccgtcgtcgtccgtgtccagagggagaagacgatcgcgggccattggatgatccctgagcggtttagatcaggccgcgtataccggttcggttcaacgtcacggaaccgtccgatctaaatcgtgtgcacaggataagatcttaggttattaaatcgggagcgttgcatttggatctgacggctgctatcgcataccgcttcgcgggagatcagatctaatcgtagtcgtccctggttgatctcacggcttggattagtcgataccctttcgccctgtcgtttttgcacaagaacccttag

SEQ ID NO: 145377 - DNA, 430 bp, Zea Mays
ctatggagctcattgcgtgctcaatttataggtcccctgagcggtggctagtgaatttgaaggagacgcgcggcggccggagagatggaggggcactggtgctgtgattcatggcaattgcgggataagaagccacgacggtcactgggtaacaatcacaactcatggcacaatcgtggtgaagggcgcaaactccggtgacggccacaaggctacgtcgccgatgcaagtggtcgaggaacaacgaggccacagtagcccgaactcatccgtgacttgatcttttcacggccgagcttaatctacttccctacggcacgaatcacagtgaccgacgtgaatccaggcgcacaattcaccggcgccgaagttatctgatcctgggatattttcagtactgtaccatcagaaatcctattgagagctcctg

SEQ ID NO: 145378 - DNA, 974 bp, Zea Mays
aaacaataatccaaaatgagaagtacctttcaagtagcgaagaatccactttactgcattccaatgttctttaccaggattatgcataaatctgctaaccacactaacagcatgagccaaatcgggtcttatacagatcatagcatacatgagattaccaacagcattagaatacggtatgtgagacatgtgttctttctcatcttcagtaacaggacattgcctcgatgacaatttaaaaatgtgaagcaaatggtgtagcaacagatttgcaattactgagattatacttttcaagaactttctcaatataacttttctgagatagaaaaagagtaccagcacgacgatcacgctgaatttcctttccaagaatcttctttgctgatccaagatctttcatatcaatttcatgactaagttgagccttcaattcatcaatcaatgacttgaaatgagaagcaatcaacatatcatcaacataaagcagtagatacacaaaagatccattaggaaactgcttcaaataaatacaatgatcataattgcttcgagaataaccatgtgcaagcatgaacgagtcaaacctcttataccactgcctaggagcttgtttcaaaccataaagagatttctgcaaatgacaaactaaatgctcttgaccaggagcagaaaaaccttgaggttgtgtcatataaatctcctcgtctaaatctccatgaagaaatgcagttttaacatcaagttgctctaactccaaatcaaaaaagcaacaatagcaagcataactcgaatagaaatgtgacaaacaacaggagagaacacctcatcgaaatcaataccttccctttgttcaaaacctttcacaactaaacgagctttaaatcttgcaggttcaactccagatataccttccttcttcttataaatccacttgcactttaaaggttttttacctacaggaagctcaacca

SEQ ID NO: 145379 - DNA, 582 bp, Zea Mays
ggaacgcgccaatgggaaaattttcacagctgtcaagaagatgctccttgatgaaaaaagggcagatggaccgaattgttacctgaggcagtctgggcactaaacacgactgagtgcagagcgactgggttcactcccttccgccttctatacggatcggaggccatgaccccgcaagaaataaagcatgggtccccgcgaacagttccgtccgccgtccccgacgtggatgagccaacttcaaaggatctcattgacggagaccgagtcttcgcctacaggccctaaacaaataccaagcccagaccaaagcatggcgcgaccacacagtcatcccaagggagttcagcgaaggggacctcgtactcgtccgaacagctcggacggagtccaggggcaagctggagcccaagtgggagggccccttcatagtcaagacaaaagcttcccccagcgcttacaggctcacaacgccaaacggcgaggacctggagcactcctggaacatcgacaacctccggaaattttttgtttgattcctcagggccgatttcgcccttgtaattcgcaaaaacaatcttg

SEQ ID NO: 145380 - DNA, 2905 bp, Zea Mays
cgtgggtggtcgggcgcaggcgacgcaggcacgcctgcccaggcaacgcgggaggcacgggggcagccagccggcgggctgcccaggcaggtggcctggtggctggcggcagcaggggaaagaataggaacaagtactggcctatgggcgcatagggcacaaggcaggcccattgaagccaacttcagcagctagggacgacgcagcgtcgcctgggagcctgcctagtcgccgtggtgtcgtctaaggtgaccaggtgtccgcctaactaggtttaggcaacgcgactgggcatggcgtccattgccggccgcatggatgcctaggcaatgccgtgataactatgccgctctctttgcttagaaaaaggctcagcaattttttacaagaactctgaactctaatggctaagctaatgacatgagccttcagagggatacaagctatcccttggtccccataaattagaactgcatacaagaggcaacaagccaacagagaattccttcagaagtacaaaactaacaaattacccaagcctgatgcgctgatggttccagatgtatgcacagtgacacttcttgccctattgaaatgaattacagttccttgtacgagaccccagacatcaatatcttcaacacgacagacctaaataggagaaagataccataagctgcatcttatgagagaatctatctgggagctgcatgcgagtgttcaaaaattgagtgtacctgaagggtaaatgacaatgaagaatttagattgcaatcttctggtggatgaattatttccacagggcagctatcagcttcacaattcagctttggggccctaatagatgcgcaagagcttattaatgagcaaaaagatttccaacataaaaaatagggaaaaagaatgtctctatgtgatagctgaaggtaaaagtatttacacatcatcgctacttctgtttacaagtgggccccgtaaaacagaaccaggtccaacctacaaaatgaatatttatcactattctttctttaactggtcacagaagcgaaaaagaacataatatctcatgtgaccacatattgaacattcaacccgggtagttgtaaatttgaattgtgtgtacaggaaaaacccatcagcagtatagtatgacacagcagacaccagacagcaaacaagacaacacacaaaagtatgacagtcattacagcagtataactattgcttagatacacttaaaataagtggggacatatgactgaaaccattacgattagcattgctataaaaattacctgtactggcaatcaaaaaaaatgaccagtactgcatctttggtttgactagagcagtgcagcactgtagagttcaaaatgtgaattgctatgcgatacgctaagattgcagcaataaacaaatacatcagaaaggtgatggctaaaaaagacactgatgctgaaaagcatatatatcatacttgtatgctgtagaacagcgaaagaataaggtgttgcgcctcaattgtgtctccgtccccagacaaatttaggagaccttggccccgaactccaagattagcattagagtgtatcacagatgattcctgaaaacatatgagcaatagttatacatactgagcacaagcagcaaaataggaagagcggtaattaacattggaccaactagaaaccttcagaactatcaggttgctagcatccaacaaagatgttgcaactatcgaatctccaccgccatcaatttccattctggagttccacataaggagcatctttacagacattctcaaagcaccgaacacctagaaaaaatcaagttaaatgtacttgtaaagcagatacaatgtagatgaataattgaatatcacaagaaaccaacagggaaaataccttgattgttgagtcactcataagaagctcctcagccatcagttcaaactccgagtatggataacgagtgagaccaaaagttagaatagcaccagaaagaaggctaagttgcccttcgacctgaaaattataaataagaagtcccatacttcaaattttagaaagaaaacatgatcaaccctaatataagaagcaactccacaataggcttatttctcattatagaaaagcaccatgcatgacttatgcaacttatatgtgacattgatttatggagatgtaaagagcttcagttacaacagagtacaaaaaataaatagaacatcaagactccagtatgtgcagccatatagtcatcagatttgaaatgtaaaatagttgaggtttcttttttgttcgacattatatgagaacatcacatctacactttcgtactttgcattgtgaacaccacatgcacttccgtaattcaccattgagacattgccacattgattcgtacagcctatgtttacaaccaaaatgcatatatgtattcataaaggatatataatttgacgatagactgaagagcaggaaagcataagactatagacctcaacaagaaaatgtcagaaaaccaattaaatgttacaaaagacatcatggttggtacttggtagagtgttaatcaagatagcattacaaagccacatacctgaacgcgactccagagcaaggggacagcaactttggcacgatttcttacaaaaacatttgtccacagtggttgatttggaaactccaaaagaagagtgtctgtttgtgtactcagattgttgttactgacaataagactttttggtactgcttcataaagagttccagcagctcctgcattatctggacagcctgaactccttccccctgaaaaaaatgacagacattaatttcaaacaaaataaaacaataaggtcatctcatcttaacaataactttagacgtgtggtctgtatcac

SEQ ID NO: 145381 - DNA, 760 bp, Zea Mays
ctgtgagaacggcgtccacttttgttttgctagagtgcagtcctcgcagacttggtcgaggtggtcaatcgccggcagcccacgcaccatatccgcacgtccgagcttgcgcagcgactggaagttgaggtgaccgtagcgttcatgccagcgccatgccacgtcgccaacccccatggtgagacacactagggcaacgatgtttatgtcgaggaagtacaattggctaggtgatcgattcaccttcgccagcagtttgcgctgcaggtcgtagaggcgtagaacgcccgactcaatgtcgaccttgaacccgtcctcttccatttggctgaggctcacgatgttggtggtgaggcgcgggatgtagtagaccccatcaagacgacggtgctcgtcggacttgcacacgaagaggacagtgcccttgcccttgatgtcgaccaccgagccgtcgccgaattttacggtgccgatgacaccggtattcagtacgacgaagacaacccgcaagcccgtcatgtgattcgccgcaccagtgtcgagcacccagcgacgagaaaccgcagtctcctactggctgagatggaggagcaccttcggttcatcgaggtggacatgaaccggcggctagacgaggtgcagcggtgacctgtgaggtgagcacgacatatccggcattgttacctcgacgtcggcggcaacatacatgagtctgtgctggtcttcctcggcctgcgcgacatgagccgcacccttcttc

SEQ ID NO: 145382 - DNA, 394 bp, Zea Mays
gaggagcgaaaagaaagaggattgttagtattctgaataggcaggccattcagtccgtcaaggaagatcagagggctgtcaagaagcaaaaagttctagtggagtcgaaggattcggctcccaagaaacgaaagcttgttagaatggctcctgcagagacgaaggtacaagatgtgccagaaaagactgcatgcccttcttcaccttcctctattgatgtttcaaaaattctgaaggtaatgattgaacccttcctgttcgtaatgctaagtcctctagggtcagatctaactagcctattgcagtcaaaggagactgcttcggctaccgggggaaatgctggtggtcagaagaagcggtgaatgatgaacgtgatgcaagccatccaacagac

SEQ ID NO: 145383 - DNA, 741 bp, Zea Mays
ctccgatcaaggaccaaggattagggcctgaccacatggaaaagggtgtttctcgagaacaatccagtggtgaaggatatgaaatgcctagctacccttatcctagcatagatagggttgcttgccatgagttgcaacgtgaccctacttatgatccacgagagtgtgaggtaaagtacacatccttaatttcgtgtgtgtacctaattagctgacttcacaatgtctattacacatgcatgatttcttgtgcactttattacatgaataggaggtcttgtatcaatatcgtgcgatacttgatgaagtcgcggcatgattccaagatgcaccagagtcgacccaagatgcaccggaactgactgataaaaccaccgagaggtcaaggaaaaggaagctgagcgatcgaaaaagagctgataggggtctgaacaagtttccagacaaaacatataaaatctcatatgtgagcccgaaaggtcagcccctaactccagaagaggcactccctaagttctggaatgcacttgggttcttagttagagataaccttgacatcacaatctaacagtcgagaaatgtgccagctgatgtcaagaatcaaatatggaataagctattaatgaggtttgttctgcctcggggttcataagaacttgtgaaggaatacacgatgaagtagcttgccctcaatttccgaaactggaggtctgagatgaatacaaagttagcgaagaaagg

SEQ ID NO: 145384 - DNA, 556 bp, Zea Mays
gaacacgttgacgaattacgtgcttctcgcgaaaaaaaatcatatggctcatagagacggcccaaattcataatttctaggccgtgatttgtagaggttattgcaggaaaaaaaagagagaaatttttatataacattaaatgggatcgttacatgtagctgcatgcggatgtctttatttgcatctggtgtgatggggatataggctgcacctgggtgtcttcttgcatctggtattctggtggatggatgctttagaagcatatacgaacgatgtggtgcgccatccatcagtcgttttgctgcaaggatgcaatgcaacccacctatgcaagcagtaccgcgcttgccgctacaggagggagtattgtattgtggtggatactgtttgacagaggtttatcatcggaaaagaagtgaatttggatctagaatatacttgaattctccgaagtgtttgttatagcttccacgcttctctcggtctcagacctctacttggagcaattgtgattataaccttctctgattatgtaattgtgattttactcctcgt

SEQ ID NO: 145385 - DNA, 367 bp, Zea Mays
gttcgatcagggaccaacgcccaggatttaaatagccgagagagaatcccgtacatccgattagatccaacggtcagactctgacacatgaagggggtacgcgacgcacgatcacatccatccatagccgaatcaacggtccacccatcttcttccttaaaccatcccgacggcgacaccgctagccctaacggcggcgccatgaccagcgaatccgccaccgcgcctgggtgcactaattgataaagtaaaatgcgctaaacgactctaatgccagcgcgaatcgaataggaggaaacttaccggaattggtgcgatacagactactggccacgggatggccatgatccgcggcggagttccccca

SEQ ID NO: 145386 - DNA, 517 bp, Zea Mays
gaagcttgtcgccttggcctgtatagaaacggtgtttgtacgatagcagaatgtgagcgtggatatgtttttaagaagcacggggtttcctcctcctctgtctctaagcatgtgtgcgtgcaatgaaccgctgcaaaactatactctctctctgttcatttgctcaaagactaagaaatatatttaattctctatattactacaatgtacgtgtgtatttaaagaacaacgttttatattataggacacgaaaaaatagttacgccttatattttatattttaagacggtgtgtacgtggcacgtgaaaaggattgagaggactagatctctattacacgaaaaacatgcggtacaattaaacctgcacgcgtgtgtaaaccgtataggagtccggagaacccacgcctgacactcgcatacctggcaaacgaaaccgttactgcccagtcctccatacaacctattttcagtgctactatttgttatagtttaggtttgggtttattcgatgggac

SEQ ID NO: 145387 - DNA, 453 bp, Zea Mays
caaagtttgaggccttcagatcatctatttgcctctaaagcagtagaggattccactgcatcaaagatgaaacttggtcggggacaggggcaccacaagatttcaactgggcagatacagagctgaagacattctgcaagctcaaaagttagcaagagaacccgtttgtcaacgtaaataataaaaggaaaagatcggctcacctggagtttagaaagaaataaaggaagtcccagagctggaagcatcgatgcactgtctatcgatggagcattgacagggacaatgttgagagcaacactcgaggagacctcagctccaacagcaggcggcggattcccaacatccgggtcactggcctctaaggtgaccggaccaacgagagtagtaggtaaattcgtcaccacgggttcctcagattgaaccggtggtgatccgacgtgaacatccatg

SEQ ID NO: 145388 - DNA, 494 bp, Zea Mays
gcggcatcctgccaattcgcctcggagcaggccgagcttgagaaggagcgtgaggacctcaaggaggacatccggaaggtgtctgaccgagaggaggagatgacccagaaggagagaagcttggccaggaaggaaaaacatctagaccaaaaggaggaggccgtcacagcactccatgataagctgaaagcttataatgcagtgcaggagaaacagcgggacaagcaagctgcggctgaggcgaagctatagaagctgcagcaggaactctccgacaaggccagtgatattgctcgcgttgagggaaacctcaaggcgagggaagcttccctggcgaaacgaacaactgacctcacttggcaggaggaggacctcgtctttagggaggagatgtgggcaaggcggaacaagctgctggatgagcttgagctcgaggcagaggagaaagtgaagcgtctagaagggaaagtgcggacgctggaggggcaggtccg

SEQ ID NO: 145389 - DNA, 734 bp, Zea Mays
agatggtgcagagccctgccttcgccatcgatctgcgagggcaggatgcagccgccttcgttagggaggtggagtcgaaggctgttaaaattgttggtaaatatgtgccaaagacagagatgataaggagctaggatatacgaggttccaacgttaggttgaaccgagtttttgaactgaatagcctgcggtacggccattacccggagggggactttgctgatgctggggacgaccgagggaaacaggtgaagactcggtctaaagagggcacctcgaagggaaagaatgtgattgcagcgactcgtaaaaggaaaatagaggcgaaaggtatggagagggaaacggcggggccgaaggcctctaggttatttgttgaggaattgacgaggacatgtgctgggcctggggaggttatgacttcacccgaactctgagaaacatcttcgcgaatgttgaaggtgaccgggggtcggtggcataagaaggaccctattccctgggccaccggcgatgactattttatgtcttgtatggctcgtgaattaaaaatatttccttacggaagaaacattggtgatgttgtgtcagcagtgatggataaggatcgtcaagaggcccttacggaagaaggtgatgcgtgtttatgctaacctgtgattctggtgtagggactaagaatggtcagttggtggtggcaccggcgaggccgtccgctgacatgggggcttcgg

SEQ ID NO: 145390 - DNA, 590 bp, Zea Mays
gggcactcggctcggaaacgatcgctcgaaacggggaatttggtgaaatttaagcctggaatctcggattggcgtgaaatttggcaagtatgttactggaagtgttgtgaaggtgcctgaaaaatttgggttcaattggagcatttttggctggtttgggcatttcaccgaacacttggcgtgcggtgaattaggttttgggagattgaggcaaattaggttgtgaaaccctcccaaagggagctagaaacctgcagggatgctcaatacacacagagacacacataccacaacatggattcacaagatttcacaggatttggaattgggcaaaaggggtggaaaacagaggtgcttcactgcctcagatagagaacaagagggaaagggatagagggagaggagagcggagtactgctcaccgagcgagggtcacaggcatagggcgccggaggatcgccgccggggagggaggtcgccggcgacggggaaaagtgccagagacacagagaggatgcagcaggggagaagaaatgagcctgggcttgggcagagaagagttttttaaaaaccgagtatgggcgcaccgg

SEQ ID NO: 145391 - DNA, 482 bp, Zea Mays
ttctaaatcattttctatgattttcctattcactggactgggcctcaaataccagaaaacacaggggtctcggtgtaattcgccacagacacagggaacagtgacatatggacggcgggttctatttctgtaaaacccaggggctctttaataaatttcctgaccgaaagggtatcacgcgatctgagccgcccgatctaactctgacggtccagattagatcgcgttttaatcgaaccggtatgcgattcaagccctcggattcgaatctgacggtggttattttatgaaagcaagatcggatcgggtccgtcagatcacatccaacggtcccaatgccacgcgtgaagggggtaacttgaatctaatctcgtccgttcatctcgcatcaacggtcagggagccatctccccaatccagctcaactcgccctacccgacggcgctccccggcgatggttcaccggagtaggcgcaattccg

SEQ ID NO: 145392 - DNA, 386 bp, Zea Mays
cagctattgaggatctttttgaatatgtcgccttgattgtgaacaatgtttgtggatcttgcaagaggatggatgtattgctcgataaacatagtaaaattcttgtggataaattgaatgctggtgagatttcatctagaagaggacaaaaccaagaaacttcattggctagacctggagatacaagatggggatctcactacaagactttgcttcgtattgaaacaatgtgggagtcaataataggagttctgggaattgtgaatcaaggacagcgaaatccatcaagggctagaggtttggttgctaacatggagtcattttgttttgtgttaatcatgaagatgatgttgcaaatccttcgcatcacaaatgagttgtccctt

SEQ ID NO: 145393 - DNA, 304 bp, Zea Mays
ctccagcatagcaaaacccatgaccgaacttctcaaaaaggacaataagtttgtgtggacccccaaatgtgaggaaagtttccaaatcatcaaggagaagcttacaaccgcaccagttctgactctaccagatatacaccaggattttgtcatcttctgtgatgcttccaagcaaggcttagggtgtgtcttaatgcaaaatgagaaagtcattgcttatgaatcccgcttactcaagtcgcacgagcagaactaccctacccacgatctggaattggcagccatagtgcacgccctaaaaata

SEQ ID NO: 145394 - DNA, 297 bp, Zea Mays
gtttggattcagttgtgcaaggagcattttcctgagcagcacaaatccaaattgatgccacgaggggatggtccatttcgtgttcttgccaagatcaatgataatgcatacaagatagatcttccaccaagctatgacgtgagaaacacgttcaatgttgctgacctcttaccatatacaagtgaagacacttcagagtcgaggatgactcgttttcaaggtgaggaggatgatacgaccacgccattaaacaacacgttacaacctcaagtcatactacatcaactcaagtacaac

SEQ ID NO: 145395 - DNA, 325 bp, Zea Mays
gctggcttaataatgatagtgaaaatatccaaactctcaaagcatcggatgcaacagtggcaccaagctctaccaagcatcggctgatgtgttccacatcatcagtgcaattttgaccattaaacttggagaacatccggatgcaatactcaggtgggaaaggcgtgaggttgtatgtctctagtagggcttggagtaaataattgccttttttggtgttttaccgaaattatctcgcatgatctcactattatgtctctagtagggcttggagtaaataattgtttttttggtgttttaccgaaattatctggcatgatctcac

SEQ ID NO: 145396 - DNA, 675 bp, Zea Mays
cggtcgttggcctcggtgctggcaatcacctagtcgttgcgccagttttcccacctcgcaccaccaaaggtggggatgtagactacggccggatctggccttgtctgaaagtagtaggcaccgatgtggtccctagtcttcctggacctgaccagcactaaaaaatagcggaagagggaagtgcaggggccacacctacaaacatctcgcagaggtggacgaagatcgctgcctggaggatggagtggggcgtgaggtgttgaagctgaagcccgaactcctccagcagtagcaggaagaagggcgaaatcagtagcgccaacccgcaaaagatgtacgaggtgaacagcacaaactccccggtggcgagatcgccaagggggacagcgccggcacggatccttctggcgagccttggcgtgctccacccaagcaggccacacaccagattgagctcctcctcagcctggaagcgatcaggatgaccgagcgaagccatcgcgtgtgcgacggcgcgggcgtggaacagaggagcacaaaggcaaagggacgcagccgattgggagagaatgcgaaaaggtaactgctgcacgcgaggtgaatcctttttcagggaaacctgaatccttttcagggaaactctcccgcgcgcccctgaatcgccgtaggaaatcc

SEQ ID NO: 145397 - DNA, 606 bp, Zea Mays
accgtgccaagtgaagcaaccaaacaagccgggggagagaaccgatgccgctggggtcgacctgcgcgcacaccggcgatgaggcctcaacgaccgacttgagctcctccttgggatgcctggagtttgcccgtgacctcaaagggtggcgcttgtgtcgggatggcgcagaatttgtccccgaaggccaacctccgccacgagtcactgtagggcgtatgcgacattatcggtgccctcatcgtgggtaagatcactcccatggagttcgccttggtctcctatgtgcgcagcatcatcagaatcataggttaccgacctatagcgtgggtcgggaaatccgaccatgccgccaccgttgacttgtgggcggcggcgttggtgctgtcagaggaagaaggtgaacctagggccgtttgatccactggtggcgataggattagatctgggggtgtgtcatcgtttgccattgatgctaatatggtcggccacgattatatcctggcataccgattcggtatgtgggtactggccatccggtggggatcggaggaacgtagttcgatcccgcgtgagttaaatctggaccgctggtcgctaatccgt

SEQ ID NO: 145398 - DNA, 398 bp, Zea Mays
cacaggtttccacccatgttcccaaccagactgaccctatcaattttgaatctgaagcagaacacagtgtccaggaagttaacagccctagcaaaccttcagatacacctgggacatttaggaggacaaaggaacagaacttcaaacctgatgaagacatgttgctttgcaaaacatggctagagattagtagtgacccagttattagcacagggcagaggaaggagggtttgtgggctagaattgagaaaaggtacaatgaacttaggggtgagtttccattgagacttaatagggctctcagcagcaggtgggacaaaataagagctgaaacatgcaaatttgctggattctacgctcgagtactaagggaaaaccagagtggcctcacagataat

SEQ ID NO: 145399 - DNA, 332 bp, Zea Mays
aagcacaaatcgcacaagagctgtgcgaccagcaaggttaaaaatgtgtgctttccaatttggtagacgatcagcaatcttgtcagcccatatcattagatcactcctcctaggctttttatctaatactggaagtcccaaataagtgcaagggaaggcagccggtgcacaccgaagagtcctgcaaccttcctgcatagctgacccatcacagccaataggaatggcacaacttttatgcatattggactccaggcctgatgctgcaccaaaacagtccagaatgaggcgaacacatttcagatcttcctcaagtggccttacgaacagca

SEQ ID NO: 145400 - DNA, 455 bp, Zea Mays
atctttcggatcagagacactgccagttgattcctttgagagaacagactctaggaacttgtcatttggacacttcttggggatagcaaaagagagagtctctaactcatgctccagcagggcaggaggaatgtctgaagacaggaatgactttgatcagttgaaggaatcttcttggagcaggttcgacaggaaaaaaggagaccacttcataaagatctgcattgagatgtcagggttaccagcaggagcaaaataatttgcccagatcctgtataattgagcactccttttcctttccatgaggctcaagaaaacagggtctggctgccaatcctaggagaacatataattcatcaccacattgttaggaccattgtttatttgctcccctggttgggcatcagggagaagaatatcctccagcacatggtggcccccctggttaggtgggc

SEQ ID NO: 145401 - DNA, 366 bp, Zea Mays
aaacggttttgaaaaatacaaaaaggaattgtaatccgcactcgaccgtgtcgcttaaggcaaacacagattattggtctaggcgtgagtgagtgtgtgactggtaaaaggagtttggcggttaactcgccaactcaagctacgtaggcgacggtgaggctggggttaggagtaaacgtttcctcttacgttcgatcgcttgtgtatggggccatgcaatggtcggctccgcacgtcagtgactcatctgcagctacgtccacggtggtaagtgcagagggacaagacaacaaccatgatatatgttgatctcataatacgacaatcatgtattcatgtttgtcaaacacatcctaatgatacgtg

SEQ ID NO: 145402 - DNA, 453 bp, Zea Mays
cacctcgtcgtcggcctggcaagcagaaggtcgacaaaggtgacctggtcacaagcgaacgggacctcgggtatcagacctccaagcaagtcctcaaggacatcgtcactggagattccgactccggtgatgacgacgaccgccgcaagaagctgtacgttatgtacggtggaagctaggagctcacctcccataggaacgtgaagtccctacaccgcgaggtcctttcggcgaccccaggggtcccgaaggcagctccccatcagtggtggcggagtaccactatctccttcggggcatccgactaccccgaaaacatggcaggggccaatatactaccactcatcactgcccctgtcatcgccaacatgcggctgcatcatgtcctgattgacggtggggttgggctcaatgtcatcagccatgctgcgttcaagcagctgcagatcccag

SEQ ID NO: 145403 - DNA, 377 bp, Zea Mays
gaagaaggtgtctgagatgacgaaggtggccgaggagaagaaggttgtggacccttttattgctgggttttatgaatctatggcaaaaacaaatacagaaaagattacagaggagataatggcggatctatctgaagattctaatgacagtgatgactttgaggtggaaagtggagatgaagattccgaagatcggccttggcgaccaagccatactatcttcggaaagtcgaccattaaacagagtcaggttgacgccatgaggggaaggtactttcgtgatatgtctattgtgagggttggaggagacagcagcgcccctgttcctgaagaaaatgaagttgttgtttacggaagctttatgaaggcaggccttc

SEQ ID NO: 145404 - DNA, 298 bp, Zea Mays
ccacaagactatatgtgcatacagatgggtgtgagctttgcggaagactcgtcgcaatcgtagtaggtagtggatagactcgtgtaagtgttctgatctatacagggatatcttctcagtccgctatataaggctgaggagtacctctacaaatacattagacacccacggaactgcgcagacctatccagatctgatcatcgccttcatctcctaccctcagcacccacttgtaatccctgaaccgagagcaatacaaccacagaaacacacatgatgtagggtattgcacctcttg

SEQ ID NO: 145405 - DNA, 563 bp, Zea Mays
accggctgcacccgcagcatggcggtacggagagggaaatattaaacacaagacatatgttgattcgtccctagacggctagaccagttcatcataaagaggagagaggacccattgcatcgcaaatcgattcatcatatcacacagagagtgggggccgggtgattcgtagatagcttcagcacacatctcaaatccattcatcaattaatcatacagagatccgaccagggttaactattccgtttttcataatttctcgctaatcacgggccgggaacgagaaaaccggacggttttcgaaattcccggtggagaaatgctgtttcctactagctgggttttttccaccaagacacgatgcttgcttctctggtttttcgacccaaattcttgcaatatgtataggcattggaaattaagaaacgaaattcgggtttcttggccgagatcccatgtttttcggcgaaattcgttgtttttttaccgaaaatgaggtccggtaatgaatagtattttttttatttacctctaagcccattgctaaccttaaagtgtgttcg

SEQ ID NO: 145406 - DNA, 375 bp, Zea Mays
gcgaagactatccgcgcagaagtcgcctaagggtgcagccgggaaaaaatctaagtctatcgcgaagactatccgcgcaaaagtcgcctaagggtgcagccggattagcacaacaagtgcggaaaaaatctgagtccatcgcgaaggctatccgtgtagaagtcgcttaaaagtgcatccggatcggcacaacaagtgcgaaaaaaccgaagactatctgtgcagaagacacttaagggtacacctggactagcacaacaacggccgaaacgacaacatcaaaccatccacaccaagaccaactataatcaagccaacacagcacagcaaaacaaatcagtaagtacaaaacgccttcgcacacacacatgcacg

SEQ ID NO: 145407 - DNA, 302 bp, Zea Mays
gatgaactctcctatcaatataatggtggcgtggttgctacgacaaagatgttgagatgcactctcctatcaatctaatggtggcgatggatgaactctcctatcaatcgaatgaatcttgttcatcaattcttgacctttgactcaagataaacatttgtgcagaggtgagcatatgcattctttgaatagcactccttctataatcttgtaaggtcttgttctggcttccattcttattatccaagcttcatcatcagttggatggcttccttagcgaaatgtcataatctctgttctcc

SEQ ID NO: 145408 - DNA, 472 bp, Zea Mays
attttcagactcacagtggactgacatcaacttcaagcccaatttcaagcatgatccagtggctttttgtggcaacaccatatagcaatgttgtagatggtatattgctctacaattttgctgcagagcgttgatcatgttgccatatgaatctgggagaaaatggagctccaaagtgctctgtcaggtccactgcttacactccgcgatggtacagtagctgaaatggatgagatcgccagcgcgactgccctcaccgctgacgactccctccgccgcgattcgtgtcaccagcgtcgggattcgtgcctggatggttggatagcgccgcagggtaaaaagatcgtcccccccgtgcactggacaccactccgatgattcccgccgtaccccctgctttgcggcttgagcagataagctcgccggagaaccgccgtcgaacggccttgcgccacgtatccgaacactccca

SEQ ID NO: 145409 - DNA, 389 bp, Zea Mays
cgtatacgttaaacctgaagacttctcgtgcgtccgctatctgccttggcccctctttcgggcagcttcttgtcgctgttagtgaggccactggttctacggtgccccttcctccaggccggctgctgcaaacatgaaggaagttgattccatggtggcagtgaggcgcccaagcggctattactggcggatgttttttattccatttcctccctcggtctagtttatttgcttggctggaatccgatgaccgtcttgttagagttaacgctaatataatatacaatatttgaagttgataatttgtattggtatagtttataaaatatagaggataagatatatgggacattgctggagactgagaaaatatagagaacgaaatcttt

SEQ ID NO: 145410 - DNA, 375 bp, Zea Mays
cggtgccaccctcccaaacctccagaacctgatcctcaacgactgccagctgcgcggccgaatcccccgatccatagggaacgcgtcgctgctcaggtacatacagctcggcgacaaccagcttgaaggggccctgccgctggaagtaggcagcctgaaggatctcgaggtgctaacagtggagagcaaccggctggaggacgagtggtggggaagtgatgactgggacttgatcgcctccttgtccaactgcagcaagctgttctacctgtcccttgactccaacagcttccgaggcgtgctcccgccttccatcgtcaacctctccagcacgatgcagaagcttcatctatcacacaacggattccacggagc

SEQ ID NO: 145411 - DNA, 409 bp, Zea Mays
gaggggttttccctttattttctttattggaaaatataaaaaatgaattaaaaaaatggccagccagctgggccgctactaggccgcttggccgagcagcccagcaaggccagccggcaaaagcagcgagcgtagggttcgctgagtgcgtaccagagagtgagcggcaggggatcgagaagccgctgaggccctggcggcgctcaaccatgcgcaaggataggggccttggcggtggctgaggaagatcagttcagctcgtgccaatctcctcgccgtgccctgtgcaactgttcctcgagctcggctccataagtatggtgtcttgcccctgtttagcagcacgcaaaacactgcaagccctctgctcctctctgttgtttgctgttccattctcctcaatccatta

SEQ ID NO: 145412 - DNA, 606 bp, Zea Mays
gccgaagcgagaccatatagggcgttgaataatccctctcacatcttccctctgactcaggtcactctttacataaaaccattcctgcatccaagagcctggccacctcttctgaaatgtgggcacagggtaactcgcctcagatcgaggcacgaagctgtaacaaccaaaattgttgtgatagtgttcctttccggtcgccttcgtttgataagacagttcatgaatattgcaaaagcaccttgcatctggttctagtccttggctcctcatggcccaaataaaacccccactttaataagagcctcgggggtaatctgatgaaggtatatttcaaatgtttgcaaaacatcgactagcatcttatgaagtaggaagcgaagcctagcctacatgaagctcctgaagactatcacttcatcgctttctggcaagggaacagtgccctctcccccagccctcactatagatacatcatggaagtatttccccttcatcgattcaatctgaccttgcttgatggtggatttcccaaaaaaacaatgtggctaggtcttcacggcttatcttcgccattctcattctcaatctcaacatcgaagcctt

SEQ ID NO: 145413 - DNA, 583 bp, Zea Mays
ggcagcacagagaagaaagcaaggagcaaagggggcaaggattacgggggcaggggcaacaacctgttggtggcaacccccagcaccagatcatatgcgggattttgagcgctgagaaaaggctttccggttccacaaacaagggcaaagccagagctgaggtcgccggatcaatggcggaaacagttaagcgctgccgctgctccgggccaataaagaaacgccacagatgcagaacaggagcgagcctaggagctgcccccgggaacacggcggaaggcacggatgcgaccagcgctggggcgcctcgagcaatgcaaggacctgagcagcagctcagcgggtggcgcggccgcggatttgaagccctggggagggagatgaccagatggcgcagagagaagggggctgcaggcagccaggcagtgctgtgcaactgtgcaaggacggacgggactcgctgctcctcccttctcgtctgcgcgggtgcgcgctcgcgctgttcgagaagacgactggcagcagagaagcagggagaggagggtaggccggtaggggagtggggggagagcagcagccagca

SEQ ID NO: 145414 - DNA, 355 bp, Zea Mays
tgtgcatgcacttcttccgtccgttcaaccactaatgcggtacttaccatgtgtactttgtggtggggcggtggaagttgttcgaatggtcgaccgtggtcgaataagttcttgaagtccctacaattatgcagggtatggcgcatgtccttgtggtatgggcactgggcgtcgtggatctcatccaacgttcatatgttgcatcgtggcacgccgcggggccgactcaccggggcctagcgcatgcactttgtctcttggcctcttgtcctagcgcttgtccagctgctggtttccctccttcttcggcgcctagggtgcaggcttcgcgtggtcgatgaggtcctgggaccgt

SEQ ID NO: 145415 - DNA, 311 bp, Zea Mays
atggaggtctgcttagtgacgtagactctgggcccgtgctggactcgatgtgtaaagccggcctgctatcctccccacagttggcagcgaggcagtgatcactgctctgttgagccagcctcatcgtcaatgaggtgccgagctttcgctagagctcccgtcagccaccaagtacccaacttgagacgggcagcaagccggcggccaaggcacttgcccatacaccgagtcccaggcccagaagagtcgtaactaaagcgcatccgcaccacccttaatgcccccgcacgggttacaagccctcgctactg

SEQ ID NO: 145416 - DNA, 422 bp, Zea Mays
gagtcacggaggcaaggcgtgaaatttccaaaatcttcgggacgtgggacgaggtggcgttagtattgaccgctaatgtgcgattcaacagcaaaaaagcaatgaggcagagggaacgagaggaactatcgagaggaagaggcagtgatgcgaatgcaagccattgatgcacaatctagtggcttggaaaaattgtgctgacgtggctaggctaggaagccgtgttttggagctcctttcatatatagaaaattgaccgctaatgtgcgatccaacagcgaaaagcgatgaggaggagggaatgagaggaactattgagaggcagaggcagtgatgcgaatgcaagccgttgatgcacaatccaatggcctggaaaaattgtgccgacgtggctaggcttagaagccgtgttttggagctcc

SEQ ID NO: 145417 - DNA, 450 bp, Zea Mays
gtgaatatacgcacaaacaacatagtgaaatcacacatttaattccttatggttaagaggaagtaccttgtggtaagcattgatgcatcacgagatgaggaggcagacattgctcgatcaatctcctccgttgtgaaatccatctcctcctcttcctcttccccctttcttgctcgcgcgactcagaagaaatcaaaatcttcctttctgcacccacaggaacaagagtcagatcaatcgtcgtctcatcctaggcctcccaagcaacaaactccggcgaaataataaatatggaattttttcaggcgcacgtacctcgttcaccttgtaccggtcgagggtcacctgcaccagcgaactccccgagcaaagcgtctgcgccacaagagaacgaagcgcacaatcagcaaccaacaaacccaaccaacgaaacgaactcagatggagtca

SEQ ID NO: 145418 - DNA, 515 bp, Zea Mays
gaggagggaggctgtcggcactggacgcctggcagccctatgtattttttggcctgtgaaaggcccaatagcacgtagaacgtcctgatcacgcctagaacatccgaaaacgagaaaacgacgtttaagcgacgtttaaacgtgataaacggacgtgctacgcgtttttgctaaaacgaccggacgttctaaactctaaccacgttttgttgtttaaacgacgcttaaacgacgtttaagcgatgttttaataacaatggatctagggcgcagccgccggtgctgaagatctggggtgcagccgccggtgctggacgtcgggcaaaagagaggaggcacataccagcatgggttttggcggctatgtattggcagaggagaggccaggctaaaagatcctataaatcgggcgattagtcgccctaatcgacgactagtcggatgactagggcgaccagtctaatcgagtcatctagctagtcgtgaccaacccgactaatcgcgattagtgggac

SEQ ID NO: 145419 - DNA, 356 bp, Zea Mays
ttggtcccttgggtggaaatccaaatgatcgagtcttctggtgccggtcttgctgctgagcccgaagaacttggaactttcttttgagatgccctttttcttcctcctttgccctttcaacttgcatggccttgttggaaaggtgagagaaactgaggaagtcttggctagccagaattgttttgagttctggcctgagtcccttcaggaaacgggccatctttttgccctcggtactgacgtcatctggcgcgtagcgggctaactctgtgaacttgtgcacatattcgctgacagatcttccgtcttgagtcagttctcggaactcgtcctccttaagttgaacgagcccttgg

SEQ ID NO: 145420 - DNA, 638 bp, Zea Mays
ttccagtagaggggatgagacttatattacttgcatctaagtgcttgcagtagagaattcaagctggccgagagagggaaaggaacccaagtccctggggctgattgaggcaagtgtcaatatccgcgtgaaggtgaaaaccgtgaagtcttcctctccacgcctgaagctctgggctcctgtatttatagcctcaaggagggctacaaggagcgtcggggcttgtcgcatatggtagaggcggccgagctcggacgaggcggagtttcctcccgagggtcagaccgtgctttgtcgtacgcgtgtcccatccggagttgtttgaactcagcagacgacatgggggagcagtagctgttattcccaggcatgcgtcatcgtagtcgatgaaagtgaacgacaccgcggtcctgtcactcctgtttgactgcggtatcacgtgggggtagatattcgcattgaatgctcatgtctccgtggttcccacgacctttgactgagggcaggctcggggttgtcctcctgcccgagaagggttcgaacgaggcagaaacaattgttccatggagaggggacatcggacaggacgagggttttcccaagtgttgccctcgcgaccgagttttgagcaaggcgaa

SEQ ID NO: 145421 - DNA, 402 bp, Zea Mays
gttcttgcttgttttcgattgcttgcaagttcaaggttgttcttggcacggaaagaacagtaataacaggagccagtgtaactatcgctaatgcgcaacacccttgtggttattgtagtcggatagcacaacgttgacctccaccctaatcgtagtcatcaggagacagtgtacctgtcgctcaaggcgtcacactatcttggttgtggtggtcggacagctaacatcggcctccaacattttttcaatctccaccatctctcatcgaaagatcgagctccctcctactcgttgggtttatcaccggatcaaggttaggccatgggctatttagcacgacctgtacccatgcttagtgtcggtttgggttgacctgcgccttcctgttgaacatgtcaggtc

SEQ ID NO: 145422 - DNA, 612 bp, Zea Mays
ctctggactgggcctcaaattcataaaaggctagaggcctcggtgcgaaaaactctaagactcagcaccacccgcgctggaccgcgggttattttccctatttcctgagggctctttaacaaaaatgcctggacgaaagggtatcgcccgttcctgaccgcatgatcttctatcgaccgaaaggattagacttagtctttcacgaaccggtacgcaatcgcagtcgtcgaatacagatccgacgatccagatctataataactagccttcgaatcctattcgtacgatctcagatccatggtccgaaatcaaccgcgtgaaagggaatatcatatctaatcagggccatccgtgaacggatcaacgacacaggcactgtctccttcccccggccggctaatcatggcggcgtagcgcccgcacggcagcgcaacacaccggtgatccatactgccgcgcccagggacactacctcaagtctaaaagcgtctacacgatgcggagattattgcgaagacatgggtgaacgacttactagcaatgacggcgtagaaaatcctggtcgcggaacggtgctacccgcgacggagttcagtcggcggcgagaaattg

SEQ ID NO: 145423 - DNA, 578 bp, Zea Mays
gaaagtgcacgactcctctatattgggatcagactggagaaagacaattctttggacctgagcttattcaagaggcagaagaacaagttcgaatgataagagaaaatttgagaattgcacaatccaggcaaaagagctatgctgataataggagaagactagtggagtttaaggagggtgatcacgtgtatctgaaggtgtcaccgatccggggtatgaggagatttaaagttaaaggaaagttgtcccctcgcttcattgggcctttcttgatcttaaagcgagtgggagaagttgcatatcaactggagttacccgatcatctatcagatgtacatgatgtattccatgtgtcccagctaaagaagtgcctcacggtgcctgaggagcagctacctctagaggaccttagtgttcaagatgatctgacttatgctgagtaccctatcaagattctggacactttgactcgtgttacaagaaataaggtgataaagatgtgcaaagtacaatggagtcaccacagagaagatgaagccacttgggaaagagaagaagaacttcgcatagacttcccc

SEQ ID NO: 145424 - DNA, 839 bp, Zea Mays
aggcggcgggggtggcagacgcaacgtcgaccatggcatcgcccaccgtctcggacctcctacgcggcatccccgacaccccagatgccacccggagccccgaggcggctaacttcgagggggcccagtccctcgaggcgacctggggaatcagtcgaggagcatatcatcccacccccatcatcggggtgggtggtgaccttgttcgcgctggactatacctctcgacgtgggaagggccgaccctgacatagatggcactgagggcaacccctacttggtcctcgatgacgcaaaggagaagtagatgtggtcagaattccgaacaatagatcgggtaagggaatcattccttagcgctagagatcccttccgctgagtggtgtgatgatgtggctcttctcctttacaggggcttatgcgaagtccgcgaccaagtcgattttcattcatcgtgagcgcgacgtctgggccgtgttgcaacaccatcaggccatgttgtgtcgttcaaacgaacaactggctttgaagagtgtcgaggcgatggacctattgtcactatgcgcggaattaaaggacgaggtcgtggccacatgcgggagggtggtgccactacaagaggaggtgcgactgctgaatgagagagtggcgctgctggatcaggaggcgatgaagtcgctgagggagagggtggtcccgctggaggaggaggtgcgacgactgaaggaaagtcttctagcggtggccggtgaacgagatgagtctcggcgccaagccatcgatgcctttctccgtgctgactcccttgcgagggatctggagaccgagcgatctgccca

SEQ ID NO: 145425 - DNA, 558 bp, Zea Mays
gcacggtgcacctacaagtgcatagtacatctttaaactagaaaaatactgtactaagttgtatggatactggagaggagagcaacattccgtgcgtagattgtagacgatgccacggcagagcgcagatcgcaccgagcaccgattttgtaaccaagactgcaagataaagtagcaagcaggtccaagccaaaaatatctctccgaataaagtgcacaagctcgatatagttttaatctactgatgtcgacactcgtcactcgactatactatagtagcaaagttgtgcagcaaagtcaatgttacatggatatgcagataccccaccagaaacagctaattatgatcatatcttaggtgtgtggcatagacaccgggagagtaacagctacgtttgcatcttctgaacatccatcacgccaccaaagcatcattttctaccgcgtaagctgatcgattaaccacaagagtagcaaagtacgacacgcctgagtcttcattgcatggttccctcttgcagagctttcaccttcacaaatcacaagtgagcggcaagc

SEQ ID NO: 145426 - DNA, 480 bp, Zea Mays
gggcatatataggtttgggtaagaaagagtaggataagaaaagacttcatccaagattgtggatcttgactcatcttggtgatctagcttgatctttgaaggcttgagttgggactgaagaccatatttggcttgactcttatccttccttaatgcggttgatccctttcttcctcgagctttggtgtcttcatccgtgtttgtgacaagatgggtagagggttcaatagctacatgctagatggaattagttgtgtaacctgttttgtaggtcaagttgttgggtagggtcgagttgatctaagatctcaaacttgtttaaaggagcagggtctaatgtattccaccaggattgactatcttgttagataactcattttagattggatcatagtagattagatggagtctagattggattgatatcactagattagtttaaacaatatctaattactttggattaactcatggttgtta

SEQ ID NO: 145427 - DNA, 542 bp, Zea Mays
gtcacatagtcataagtatatgaaatgtgaataaatacatacacagagaaatatggcacagaaaacaagagatgagacgatcgagaggtcaaacgacgtgaaaacgatgtttgaacgataaacagtgccataggaggtttgaaatttgaattgaggcacgaaacgacatggaattgagccgatacttcacgaataggtttatataggtgaatacgagtgaagtgtgtgattggtttgaatttaggcgaagaaaaagagatttgggcactcggctcggaaacgatcgttcgaaacggagaattgagtgaaattgaagcctggaatatcggattggcgtgaactttggcaaatatgttactggaggtgttgtgaggtgcctgaaaaatttgggttcaatcggggcaattttggctggtttgggcatttcaccgaacacgtggggggcggagtgttagggtttcggggaaatggccatttgaggagtgaaaaccctcccgaaggagctaggaacctgcaaggacactcaatggccacaaaggaac

SEQ ID NO: 145428 - DNA, 370 bp, Zea Mays
gagcggtcccgtcttcgactagatctgggtagtcaacgcgatctactgtcctcgacgtccggaacgtgtattggggagggggacttgcagaatctgtttaagggcgaagagttaaggatgatgttgtttaatttccgggaggttggtcttattccgaaggcggagcctatgtagcaattttgctggcctcgctcttgtgttgcgatagtgagtgaaaacgctaccctccccctcttcgcaatagagaatgagggcaacaaaatgtgatttgtattattgtgcgatgtgtccgccgggccttatgctttatttatgtaacctacgatggcatattgcgtgctgtacttattgcaagattgcttcaatttgt

SEQ ID NO: 145429 - DNA, 506 bp, Zea Mays
ctaatggagaggtgttgctttgtgaagaaaaatggttgcaggttccatggcaaattcagggttgcacatttctttcagacatcctgtttcttcctttgcgcggttgtgacatggtagttggaatggattggttgcaaaccttcagtcccatgcgagttgattgggtacaacagtggttagccattccttaccagggacaagaatttatattgtatggtcatacacatccaataccagagtgcactgtggtggaactacttttggtcagtgacgacacatccgtccgtccaagctctcagttaccggatcagattcaggcactcttggagcaatatgcttctatctttgaggatcctcaaggtttgccaccctctcatgattgtgaccatactatacctttagtgccgggtgcccaactgttcacaatgcggccttatcgatatcccccacaattgaaagatgagattgaacgacaagttcatgacatgctccagcagggtgttatt

SEQ ID NO: 145430 - DNA, 319 bp, Zea Mays
tcctctccgccaaaatcaaccagctccttttttgcttcactgaaatagcccagcttcatcagcttagacatatcaccttcggtaactgtggatttcccaaactccaagtggctaggtttagatggcacgacgctgtaatcatcttcagattcagtttcctaagcatcgacctgcttagcttcaacgacaggtgcatcctccgatactaccagccctgaccgttgcatcacttcagagattggagcggtttcggcaccttcggcttcctctccgtcgcgagtaaccctagctgttgagcgtaccctagccatctgatgat

SEQ ID NO: 145431 - DNA, 400 bp, Zea Mays
ccaattggtgggatgcttattgaagcactgatgtcgtagctgatactatcacttggccggaattcaccatgaactttagaagccatcatatacccgctggtttgatgaagttgaagaaggaactcctctcactcaagcagggagggatgttagtatgagtgtacagagacaagttcatccagttgtctcgctacacacctaaggaggttgtagacgatgagaagaaacatgacttatttatttctaggagggctgactgggccagtccaatatcgactgaggtcccacaccttcccttccttccaaaggctaattgatatggccatcatgttggagcacaagcgtgcttaacttagagggatgaagagaaagcccaccacccaagtacgagtaggtagca

SEQ ID NO: 145432 - DNA, 333 bp, Zea Mays
agcttcgctagagctcaagaagtctaagacaagctccaccaaaggtctaccgacatcttatccatggacttcgtgacccgagctgaatgatgtcgccacaccattgactgccactcctcgacccacaccaagcgatcgaccagtacgaagcacttcacacgacgataacaaacaccctgtgccccaccctatgttttttgtgcctaaacccacatcaatgtcttgtcatagttgctccgagccatcatgttgagccccattcccgttggtatagggctaattcctgtcgtttctcggccgatgggaattacctggattcctattgtgtcccgc

SEQ ID NO: 145433 - DNA, 671 bp, Zea Mays
ttcgtagccatccaagtagcatataataaggttactgggttgatgtggctacacaaggttctatttttgcgctcccggttaatatatagaatttatccttttaaaacagtcttcttcatacgaaatctccatggagaattggtgacatgaatagtagcaccagagttaatccaccaagaactaggaaattataatttttagcaaccttagcatggcccatgaaaggcactttccacctaggccaaaagttagtccaccttccctgtgcccactgatctgaatctgaagattgacactcgcccgcgttcatccaaggatggtataaaaccatgggtttaggctaataaggggaaaaccctaatcattgcttcgcccacatgtgaccctcttccgctctcgcctccttccctccctctctctctctctcgctcggtcctccctttcttagccttctcccctgattgtgatgagtgagaaagagcatgcttggaggagggatggcgccgtccatgccccctcgctggtgtgtgttctttccattggtgtgagtgcaccaccaccaagtgacctattgggggtaccctagtggcctgcacgtggtgtcgtgtgcaagaccgataataaccacatctcctctgcccttgtcattagtaaccaggtaaacacttacc

SEQ ID NO: 145434 - DNA, 746 bp, Zea Mays
gcagctgctgctgtctgtgtcgcctcgagcgctcaggtagccaggcagcaacttctccgtggcgtttcttcttctccctccctgcccagcagtcgtttcttgctcgacttcttcaatgttattattggcgaacgcccgtttctctatgccatcagacgacgcttcaattggtaattcaatccgtggttaattcgtctctaatcctcctcttgttctctcctatattagtgtcagcagctcctccacctaaccgaatgtagcggtagccaccatttccctgctctttcctcccactaaccaaatccatatgttcctgcttcctccataaatgccgacagtttctctcgccattgtttgttacaacgtcttcaccggcgacctctctgtttctcttccccacgacgtccgggctcccttcgtctcactataaaaggcatgccctcgacctcgccaatgcccgttttttgtaccctttccctagctcgtgcccttgcatgctgcacgttgcgtcgcgctgttgctgttccctgttccctgttcgcctctgctcctcaccggtgaagtcgccggtgaagtcgttgagcaccttcgttccttacagcctctagaaaatgttccccagaatctactctgcctcgttgccagctcccctacatcgagcccccgacgtcgttttctcactctacttgcttgtcgtgccgcctgcgcgcctgctcaattcagtaccaccgtcggcgccattcgcc

SEQ ID NO: 145435 - DNA, 323 bp, Zea Mays
ctgtcatgaaaaccttagcaactgtcagtgctgtaaagggatgacgcatggccacaaaatgagcatatttggacagcctgtccacaatcaccaagatggtattatagttccctgaccttggcaatccctcaataaagtctaaggaaattgcctgccaagcttgttgtggcacaggaaggggctgcagaagtccaggataccgagaacggtcgggcttagcctgatgacaaacaatacatgcagctacaaaatccttaatggttttcttcatacgaggccaactgaaaagttgcttgatgcgtcgatatgtcacaggaaactcg

SEQ ID NO: 145436 - DNA, 380 bp, Zea Mays
caataatcgcatgaagaaagtaggaacaggcgttgcgatcccaggacgcaagtttcatggaagcgacataccagatgattattgcagggtagaagtgacgacggtcgtccaagtattcgaggacgacatgctagacatccctgggcctgaaggaatcgagacacttggacaagccatcaaaaatttcatcctttggcctcgaagggatgtcaaattggttgatccaccaacgccgtcatcatctcatccccaaccatctccgcctcctcaaactttagtacctgtacatccatcatcacctccacaatcttcccatgctgctcctcatcgtctttctaatcaactgtcttcgccacaagcatcaacatttaggacaccac

SEQ ID NO: 145437 - DNA, 407 bp, Zea Mays
aggaattaatgatatttctatcacacaagaaaataaagagctcaaggaagaagttgcaaggctaaggaggagctttactcttttgaagggaaagtgtcatgctcaactttctcacgataaccgtgataacatggtgaagaagcttgagaaggggacaaccgtagcatgcacaaacccgcttcaaaataatgctaagttccctaagaaaggcatgatcaaacatcaagagaagaaagccaaagctcatgacaagtgcctcaaccatgcctccacatgctccacacaaggtaacaaacaagccactcttctaaataagagaagatgcactagaaagtgttatcaatgtcatgagaagggacatgagattaagtcatgtccttacataaaagatagtggtttaactttgg

SEQ ID NO: 145438 - DNA, 335 bp, Zea Mays
caccaaatttgcctttagcgcctctagaggtgcctcggggggtattatgatgggttcgaataattctttgcttcagggctcgatccaagaggttaatcttttctctattacggtggagtttgtctctcgtctttctgcggaccattggaagttaacaatcgtgtatggtccttgtattagatcggatcgtattgcttttatcaactggttgagctctctcgacatctcttcaatagataactggatgttgttggggatttcaatttctatcgctcagcggccgacagaaataagccaggagggaatgtttctgatatgaataccttcaactctat

SEQ ID NO: 145439 - DNA, 617 bp, Zea Mays
gtggaggtatgggaggcgggaaggatggggacagagctcatgagtcgtcatggccatggaggagaaaaccttcccaaaccaagatcccgctgcttcacgaactgacgaacagagaggagcaactaaacaaaattacctttggaattccgtgagggccatgtggatctcgtcccgggaggcatcgtggggaggtcaccggaccacggcagacgactgctacgagggagggtaaggaagagaggtcaggtgaagaagatatgtgtagggaggttatgcgaggacgtccagccatttcggagttaggtgaagaagataggcaaaaaaaataaaaaaaggaagccgactgctacgagggagggtaaggaagagaggtcaggtgaagaagatgtgtagggaggttatgcgaggacgtccagccatttcggagttaggtgaagaagataggcaaaaaaaataaaaaaaaggaaatagctgaatagagttaataggagtcgaacctaccacctcaggtggttcctatacagagcggaccattacactatgtgaagactggtgatgatgtaacggagctagtcttatttgttagtagcagttgtagtaaaaatggagaaccgaag

SEQ ID NO: 145440 - DNA, 501 bp, Zea Mays
gcggcactcggtggggttgcgcagcagggagcacaaaatccagctcacctcgccgggcagatctcgtcgaagttggatgcctcgaccgagctgttgctgaccgtccccgcgcttgggggccaccgagcgtccggtatggtgaccctatcagcctcacgttcccttcttgaatttgaactgagatatactcgcactagaatagttgggcggggacctgagaacgccagtgatggcgtcgccaggcttgtggtttcggccacgactgctagagggctggggaatgaagaataggataggatcgttgatcttgtaacgaacagctaggattggacgcggtacctggtctgcctgatcagtctggttcgcccaatcgttcctgcgactgggttttgatctcaagtgttttaaatcctgaccgtcaatcgactatccaatggccacaacgtcgtaccgcttcacaatcttattttgaccattggatctagatccgatggacatcga

SEQ ID NO: 145441 - DNA, 696 bp, Zea Mays
gatcctctttcatgagaatataaggtcagtgtctctcttatcaaactgatctaatacctttgacgatctatttttcttctgctaatgtggatggttgtttgtcgttcttttggttctttcttccaggactcatgaattccacaggtaacaacctttgttattctaggatatgttaattcattcttctttaccagcatatgttattacagaatttctcactggccagtttttttaaaatgcagcccatattctgtaaaagtttttgtgccatgcccccaaaatgcacgggtgactctgaaggttgatctaatatttgaagaatatggtaatatcaccatccggtagtactttccttcaatgttgagtctcggtagattattcacatatcatttttatgcttacatagtttatgttttcaatgatatgctgaagttggtcttgatgtccacaagaagcatgtagtaagcagggaagatggtttgtacgtgaccaaggagcatgggatagataaccttgaacctacgtacaatatcccttcagagatttgtttggttagctccaggacaactcgaacaagccgatctcaatctcacactgaacagaaccctctttccaaagaggtttatgtcatagaagatgatggcgctgctgtgagtgctgtcagtgctctcgagaaagctgatgatgcagtgggaa

SEQ ID NO: 145442 - DNA, 1120 bp, Zea Mays
ttaggatcagctgtggccagattacacccattgggttcagcatcatcaaggtcacacccattgggatcagcatcagtcgggtcacacccattgggatcagcttcagcaaaaaactggcaccggcacttcctcagcagcaggagcagaaggaccggcatcctgatccaagcatgacactcggtgaagacatctctttttctttttcttcccctcagcaggagaagtgggttgagtggctcggtgaggacgcttcgggcgaacactatcagatctctgaatatccaaagctttgctagcctctgagatgggtactacagccagtgttttagcaggggctgcatcagaggaatcttcagccaacatatccagcatggcgcttatctctgcatcacttggattcaaaggtacctcgaagtgaacctgcctctcgtcgtcagggatttcactaagtgaggcaaccaaagcactaacctcttcgggagaaggtcgcactctaaggcccaaaccgctatcaccagcaggaggatttgacacaaaactggtaaaagccttggaaggaggcagattccaggctaagtatgcgacaggggcaccgatgttcgacaccttgcctctgagtatcatctcgagtcggctgaccaaatccacagtaggaattcttctattggtaacccgggtcaaatcagcgaggccttgatacagataagccgggtatgctctgtcttttagtggctgaaggttcttgaaaatgaaatcggcgaccacagcttctgcagtcagacccctctctttcaacaatccaacctcagcaagcagagcccctacctcagccacctctaggttcgtgggggattcggtccagctcggagtgcgaacatctggctgtctccctgaccgtggggggagggaattcccatgattctccacgataaactattccaggcgccatcctttgatgttgtccttgagtgggatgtcaaggtagtcggtcttcctcccacggcgcatctccaaactcgcgccccccacaagctggtgctgccctccggccatcctaggccgacaatggtacaagtacttccataggccgaactatggcagaataccaaggaaagcttcg

SEQ ID NO: 145443 - DNA, 313 bp, Zea Mays
cccgccgatccgctacatcccggacgcattgcaacctctgtgcaacaaccccgtccactctgtgtcccgatccgctacatcctaggagctccatgtcccaagccccgcatgcatgcaatccgctgtggatatggatgatcgcgcgccgctcgggtgggggcgggtggtgtagtgcacgcgacgcacgcggcaacctcagctcgacattcacagtaaaatccatccacgcctgcgcatccctcgtccttgtctctctcacagctgctttattccttcctgttcctactcgtcgcctctcgaaagccatgaggac

SEQ ID NO: 145444 - DNA, 405 bp, Zea Mays
tcgaaatcttctttgcccgaaggaccagtatcaatttccctttctttatctggcgttgtggccatgtcctcctctgcagccacatctttaattacatttgatataaccctgtcaatatctgacatcgtagcttcgacttcaccagtgtccttggcttcaacagcagctttagctttagcttcggcacccgtaggagtcacagttttagccaccgaagctgaaggcggtgtttgttcaatggttgcatcacatttactatttgtcgtttcttttgctcttttactttctcctctaaagccaaaggatgtcctttcttctgtaaaaattgtgtcagttctgatcccagtggacttagcagcttgaagggtggaaagtcagtcattaccttcagaatttttgctactt

SEQ ID NO: 145445 - DNA, 561 bp, Zea Mays
tcctggggtgacagtgatcagaaacacctttttagcgatgtggtcagaaacttaataagaactttacaactatgaacagctatagtgatgtgatgtccggtatcgatgtaaaattagtcaaagaagaccagttatggaatctgcacaactcacaagccatttctgagtagtatcaggaatgcccagttggaagttgatctctggtggagaatgatgatcctgctctggaatttcgtccttcgtaggcagtaaagactctgggacctcacagttactagacattctgccttcctgcttggtggaacgatgttctgcatgggtcacaagccaacagactaattagaaacacactatccgatcagaaaccactctttagttttatattcaaagaaaacatgttatccgccctttaattttacagtcaaacaaaacaagttaaaataagctcacctgactcgttggcaggtacaacaatgtcgcaaattttgctgcctacaccgctcctcgctggctccacttgatccattttggtttcaaattgaacagtagttcctaccaaac

SEQ ID NO: 145446 - DNA, 420 bp, Zea Mays
caaataatgcagagactgaatattgtataacagtgtaattgggcaacctttgagctgggattcgactatgatccagtaaatgtttggctatggttgctatatcaaggttatagctggatcatagggctacaaatttgttaaagacggattagcatgttcttacacgaaaattcgagatctgggcaccacaaatctgtcttttaggcgctctgaacaacttcccaatggtacagtatccggatcagaacgctaggttcagatgtctcaccgccggcgaccgtgcgcccggattcatgcccgccacggtgattcgtgcccagcgcagatggataacggcgaaggggtaagaaatatcgcaccgtggatgaactccggccactattctactccggccgccgtacccgcctgagtcacggccgc

SEQ ID NO: 145447 - DNA, 450 bp, Zea Mays
catgaagacactcaatccattgataatcttgcatgttttcgatgtttggcatggtgctgcaatccaaatatcattccttcttcaagggatttgtggatcgttgagccgtttcatgctgttgagagcgacgaccatggagttagagcgctagtatacaaagtggcgaacctctggtatgtcgctctctggtctggcggcttcggttcaggccctccaccaccaccaccacagtcaggtggccgacgtgacagtgcggatggacaaggaccttcaccagcttttgattagtctcgactgccacctccaacaccggcaggtggccgtcattctgctctggatcatcttggccctttaggtgaaagcaatgatcacacaaaacgcagtttggtttaaggtcatgataaggcatatgactcattattatggaattcaaaccttcctgggagccat

SEQ ID NO: 145448 - DNA, 760 bp, Zea Mays
tccaactctggtctttctttattgacttgtggcatgggcgagccatcgattggtgctgactaatccaggtccaacactggcccgttctgaccatgttggagttgtatcgattggtatcgatcaatcagtaccaaacgctaagttggagggtctagtcggtacgaactgccttaagtcatatgtggtgttctggttggtttatgccattgaccgttaaagtctaaaaaattgaaaaacaaaaaatcatagaaattgacctataaatagagagaagtgtttggactcatttacacccccccactttctattcaattatagatcataggtggagtttaaacttttaaaccttcattgacttgatcagcgactagcctccacaagttctcactataactatgggggtcttcttcgatggtgtttctatcgtacatcatcattaggaggatgtttctaccatcctcattagtcattctctcactccagaacctatgttttcatacccataaactcctccatatctgtaccgaccttccatggatacttctcctaataaaaatcatgccacctcctaccactaagctcttaccattgacgctcctcctccaccattcatttacacatatcctcactcatacccatgtggatattcatatatggtggtcctctatatggattctaagtgcacctcctctgttctgtttgttgtttggtgttcctccttcatacggtgctcgtccgctccttcatacgatgcccgtcc

SEQ ID NO: 145449 - DNA, 468 bp, Zea Mays
gtatcttgtaaaacttgagagtttttcttcgggtaattatgtccttttgatccaagactcgagtaggatactcagaatatgtcaagtctggttctagggcaacatccgttacgtcaacggttcgatcgagaacccgaagacacttcttcaattgagacacgtggaacacattatgtactgcagacaaggtttcgggtaactgaagtcggtatgccactggtccatattgttcaagaacaggaaaaggaccaatataccggggtgcaagcttccctttaatcccgaaacgtgatacccccttcatcggtgaaactttcaggtagacataatctccaactagaaagtacaagggttgtcgtcgcttgtctacataacttttctgacgaacttgagctttcttcaaattatgaattattttctgaaccttttcttcggtctctttcaccatatcaggcctgaagaagtacc

SEQ ID NO: 145450 - DNA, 672 bp, Zea Mays
acagggctttgggaataaagtggaactggaagttaagagacaagcataaagcaatacgatcttctttatctgtgagtgagattctgatttgcattatactatttgtcaccagggtgtggctcaagagatcagactgttacgttacagctgctgacaacttctgaacagaaaatgctaacacataataccaaaggactaagtattcactcggaatatgatcatacaaaactaatcaaggatgacaggtgttctatagctgatatcgttcagctcacgaattctgttctatagcagatatggaccacaggtgttgtgtcaagtgtcaaccatgctcaaagatgacagcttgagtagtgcagtccctatcttttcctcggggaggaggaaatacatatcacgacagtgttagattctttgtttttgagtggataagcgagtagtttgtacaacaatcttttccatggggaatttgtttgcatgacagtagctagggggagaattgacatctacctagctgtttatcctgacagaatttctggctgctgcaacatggaccaaatcctgcttgttctgatgaggatgcagggaatggcaatcagaatgtaaagtggatgtgcttttacctcagtggtagcagcatctaaccgtctcatcatcagcattttatttaat

SEQ ID NO: 145451 - DNA, 308 bp, Zea Mays
ggcgttaggacttggctgagggaccagagttgtcgtgtgactagccgtggtggctgacacctagaacacgcactcgcgcgagtacgtggcggagcaggtcgtgttgcgggcgcgatcgaggattggtgggacacgtgtccaagacgaggggaacacacacgtggtgcgatactgacgacggtttcgtggttggtcctcgaaaaatcaccccgcactgcgggcaacagattttgctgggtttgggccttaaaactcgacgtcgacagttccagatgtaatctgtggcggcacgtggcatcatagcgaag

SEQ ID NO: 145452 - DNA, 391 bp, Zea Mays
gtttgatgtaaattgtacatatctgttgcagttactttttttatttaatccctggtttatgctttttgggtgtagaatgatatggaagttcctcaccagtatgtttctagggggatgcataccaaaagtagcaacggtaatagcctgagcctgcagagttcattccataagccatctaaagcaaatcaagctttgaagaggtctacaagtcaaaaggatttctttcattctagagacagcagctccgtgaggtctacaagtcaaaaggattgtggcggtcgtcacggcgaagtcgttgtagacgtaggcgagaagatgtactaccagccactgccatcccaaagccaacgaggttcactcactggtgctaatccgtacaatatgcctttac

SEQ ID NO: 145453 - DNA, 344 bp, Zea Mays
tcttgatctttatcataccagctggaatatggtagttcctgaattgtgtactgaactccgcccaagtgatagtatcagcagcatcgtgggcagcagtatatgaatcccaccagtcagcagcaggacctgtcagatgtccagaagcatataaaaccttctctcggtcagtgcattgtgcaatattcaacatcttctcaacgaacttcagccaatcatccgcgtccagtggatcaggtgagttagcgaatgtaggtggcttatgactcatgaactccctatgcttatctcggggtggaactggtggtggtggtggaggcagtggtacttgttgctgttgctgctgt

SEQ ID NO: 145454 - DNA, 518 bp, Zea Mays
ggaagaccgagatgaatagggattttgttaagaagaatagggttcctccgcccaagaaaatgggtaaaatcactcaagctcagtgggaggaatttgttcgtcagaagaccgaactgaaggccaaagaactgggcgaaactaattcttagagagcgaagatgaacaaacaccccccatcgcctagggtcagccggatatcaccctaaagttgtgtagtggaacagggtaatagaggaagctatagctaacggcactttggacccaatattaaaagatatcgatgagctagctattcgttggatcttaggttgggcaggtttgactgaggacgacaaacttttgcatccagaattggtaggcgaagtttcgacaaaaattcaagaatatgcagaaaagagaaagaagggcgaatttaagcctcggagggagaatgacatactaaccgcagcactagacaatcctgaacacactggacgggctcggggaatctcttctaagatttcctagagagaggcctt

SEQ ID NO: 145455 - DNA, 360 bp, Zea Mays
tgctgcttttggctggattcttgggcgtcagacaaagaaggaaaaaaggaaggtagagtaaggaagcagactcattagaaagatggcaagtgaagtgatgcgtcgtgccttcggctggtgtccgatagaccgatggatcgttggaagttaatcttcatgtccctttgagctcttggtgcttgtctgtttgtgtgctctttctgcgtttgtctggacctcttgtcttgcctcctcaggagcgcgtttcttgtaataagtggatctgcgactgtgccgtgtgtgtctgtttatgctttaggctgtttccttctctatcgagcgcactcgattttgtttaggtcgcctagcgtatctcctttt

SEQ ID NO: 145456 - DNA, 491 bp, Zea Mays
ttaaacaagtttttgcaattaaatttgtactataaactattttctaaatatttttcctggttttatcaactatcaggactgggcgcactattacagggaaatgcaggggtcttggtgaaagaatcactagacacagaacccatccctgtgaactgcgggttctattttataaaaacaaagggtttctttaagaaagtcgcctgttcgaaggggtatcgggtactccccgccgttggatctgggtttagcgcatgggattagatctccacctctatggaacaggataccatggtagccacgagatccagcatcaacggttcagatcctatacaatcgtcgtggaatcgtacacacaggttcacagatgaatggtcagggttctctgttaatcctagcccttcaaaactgatccagcggcgacagtgttatcttcttccccaagcgaccgagcccagtggcgcgggactccccagtatcttctctctctcccg

SEQ ID NO: 145457 - DNA, 442 bp, Zea Mays
cagcggtcgcgaacttctagtacgactctgctggtgttgggtagtttatacctgcagagtagagatggaagtagggttccgctcgaaggcagatgtaatacttttgtttttttgtaaggtacttttgagcactatttatctagcagtgttagcacttatctgtgtaccacctgttcctgctgtgtgtgatgctatgttgttgactcctccctggtacctggccccccgcctgggatgcaggcttgatgtgtcgaggttggataccagcttatctgaaagggttgtcaacaactctcgggaggcagcctcaccgggatctagatctatacacagcttcagctagggagcgttagtagtacacccatagggtcccctgtctgatattagccatcctttgatacatgctcgggactcacagggtttagtccgagtggccaagttg

SEQ ID NO: 145458 - DNA, 831 bp, Zea Mays
gggtccgcctactgccccaacgcaggcgcgtcgacgcgtaccgatgaggcgatgacgccatcaccgaagataggcgatcccgagctctgatgttctagcgatggcacagataagcctatacatagcagagaggatcacaaattgggtgtagggatccttacccaagttggggtgtagaggtgccccgccacagcacagggcggactctggtgggggtagttcgcgtaggtgaggaattccaggtgctccggccgtctacacgcttggtggcaccccgcacacaatcgatgccccagggagacacccacgaccacaccgcgggctcccagcgacagtggagccgaggaactacgacagcgacgatttttatctcttggtaatggcgagctcaatctctctctcaatctctgtggaatggaccgtgtagcgtgacgaaggcttgaggcaaacgcgctaggctttatgttcggcatggccgcgagtgagctgctggagtttgttgcgccagcaggcaatcacgaagatcgcggaagggcggttaggaaacgcggcatagacgcggcgaagaagactttgacaaggagggcccaaactcggcgtgagcgcacgagagtatgcacaatctacgtgattggttgactgtatagagataaccaggctcctcgcgtgctttgaccaagcacgagattctgattggttgcttggatgtgaggatgctggccagcatgcggtcgtgcacgctagaactatttttcactgcccgcctgcacgtgtggagatggcgctgatgaccgtcgctgaggagccaggcgcatgggagacctgcgcgcg

SEQ ID NO: 145459 - DNA, 295 bp, Zea Mays
gttgtgatacgctctgcgaagtacctacaagatatgcgccgctacaatgagaacctagttaggggcaggtcacttaacatcggcgatttagttttaagaagggtgatggccaccaaggacaagctcaaactatcgccgccttgggagggtcccttcatcatcgcccaaactctacgcctaggggcttaccgactcaaggacaacgacgacaacctcttgagagacgcttggaacattgaacatttgaggaagttttatccctaggcaaacttcgcccgcctttggcatacaagca

SEQ ID NO: 145460 - DNA, 318 bp, Zea Mays
gtatgccctgacccaatctgagccacaccatttgggatcaacgaccacacttctaaactggtgcgatctaatctcctccgcccatatccaatctaacggcccatccaccgtcttcttccttacgccccttaacctctcacctcgcatgccaacaccagggacgggatggtcgatgctccctaggcggtcggtgcctagatccatactggcgccctccccagcgatcctaaaatccggaaccccacatcgcagccaaactgaaggcgataaacgtcatgggaacaaaagcaaagcaatagggaaaatcctcaccgagcg

SEQ ID NO: 145461 - DNA, 486 bp, Zea Mays
atagctttaggatcggtgttgtgccgatcgaaagcgaggagaggatgtgatgcggccatggcaaccaccgcgggcaggactccaggtgtcgccgcgtcctgccttgtggggaagaaagccctcgggccgttggattcgcaaacgacgatctggattgggcagaacagaccccttcgcctgatctgatctgggccatagatcggcggatgagcggtgttgagctgtgcgcgcgacttaaaaatctgaatcgttggatgaagatccaacaggtacgattgcgtaccggttcagtgttataaaaaaaatctaatccggaccgtatcctttaaatccaacggctctggttgcttcttaccccttcggcctggccttctttcaaaagagccctttcacttttataaaactaacccgccatcctgtgcagagttctctgtgtctgggggatttcacgtgttagcccccgagttttcggaaaatagtagtcgc

SEQ ID NO: 145462 - DNA, 635 bp, Zea Mays
attctgatgaacgataatccaatgggaaccccagaagcataagccagcattcatggttgaaaagaagagcccggtggttccaagcatcattgtgacggaccgcggtgaaagtagcatccagatattgctgggggcccagcagaaccaaattatcccgctccaaaacactacgaaactgcactatcacctgccccaagtgcgagcgctgaatggcacgaacaccgacccgatgatgctcaacaagatactccctgaccacatctctgaccacagggaacaaaaccccgtgctcaggtaaaggatgaatattgataatcgcccagtcctcatgcattggcggcaaacgctgcgagactgacctgaccatgatcccacggtgctggaccaccgcggcgctgaagcctggtggtaggaacggctccgggtccactcgtcggtacgccattgccagaatctcagaaggtcaccggagagccaagagcaaaggagcggtttggggttttggtgaagtgacacccagcgagagctccaaggacgtttcgggcgcctgttcgtatatttttagtaagaccgccctggcgaattcaccgaagcaggcaaaggcaggaggagtcccacccgtcagggacccgggt

SEQ ID NO: 145463 - DNA, 282 bp, Zea Mays
tatcaacacaagtaaagcaggaaaaggttagctcacctgaaggttagaaaggaacaaaggaaatcccaaagccggaggcattgatgcgccgtcaaatggaggggtactagtagaaacaatattgagagcagactcgagccctaaaggaggattagaactcgcgcccaaggcagtactcagtgaaacctcagccccgacagcgtgcagcgaattcccagcgctcgggtcactaaccactaaagtgatcggaccaacaagagcggcaggaagactcatcaacac

SEQ ID NO: 145464 - DNA, 380 bp, Zea Mays
caacatcattaaagtagtataatatgtaattgtgattaaactatctcctcatgtgtgttctctggggtgtatgcttgcagtagaaggttgtgaatgattgtaaaacccgattaagcaactattcctttttaactaagtctgtctatgtgtaagtcatcgtaaatttatgcgtacttaactagtttaataataagtaaccaatgaatgattaaggtgagcatagtaaatgcgtgtacttgtgatgtcgtagtcgcgttccgtaaataaataaaatgttgtcgtctttctaatggtgttaaggttgaacgccgatgtcgtgtagataactaaagctaacatgtggttgtctacggtgtcttccaatttaatgtttagttcgc

SEQ ID NO: 145465 - DNA, 359 bp, Zea Mays
acctacttgacttacttgaagtgtctactcgaaatcgtaagcacaatcatacattatatgcgaagctccatttgacgaactatgtacgcatcgtcatgactcgacttataattatagagaaagcgacgactactttggcatgtcaccacctctctatataagccaaaaccatttctactatcgactaagagttataagtattaaacacaatgttactttccacgcgcaaataaaccttaacttaatactagtgacaccgatggatttttactaaactcatcatgcgcataacctcgtctcgcatacaaccatatggtggcgtgcactcgagacacttcaatcaatgtggcgcgaccact

SEQ ID NO: 145466 - DNA, 383 bp, Zea Mays
ttaaataaccctgatctacggtcaagatagacaaacgatctgagccgcagctatccggatcaacggtcacgattttaaataaccctgatctaatccgacgcacacgatacgggatcgacggcacagatcaacgcggcgaaggaggtaagtcacgttctaatcttagccgctgaaatcgggatccacggccacggtaccaccaccatccatcctcaacgcgcaggcacagccgcgacccgcacagacggcggcgccatggccggagttgctgtccacggtataagcaccctaaactccaatgctaatcggttcgacgcgttacgggaaggaaagtaaacataaaggcgcggttcataccggaattcgccgggcagagatatccc

SEQ ID NO: 145467 - DNA, 400 bp, Zea Mays
tggtgtgttttgttatgctgtgctggtgcgattatagtcggtcttggtgcggacggttcgatattgtcgtttctgcttttgttgtgctagtccggttgcacccttatgtgtcttctgcacggacagtcttcgcggtagacttcggttttttcgcacttgttgtgctagtccggctgcaccattaggtgtcttctgcgcggatagtcctcgcggtggacttcggttttttcgcacttgttgtgctagtccggctgcacccttaggcgacttctgcgcggatttgtcgcacgcgagggttgctagcacttagcctcgcggtgacctcgaattggtcgaatgtcaaagaccgttgccgcggtcttttttcgacgcatgtttttgcgggggatttttcacacat

SEQ ID NO: 145468 - DNA, 483 bp, Zea Mays
aagaagtatagcttcaccatgcactgtcaattttgggaacggtggagggaatttcacgaatttgggacttctactgagctttactggtgtagacgaaaacaccttgtcgtggctccttgctccatttataggcacggcggcccaacagacgacccccgaccacagatagcagcgcaagcgcatgcctaccacgtcggaaagagatacagtgagggagatggaggcatgggtgacaccgcggcaaagtcactgggtcacggtggccgccggtgaagactccggcagggctagggcggtggcgccacgtatggttgtccctccccgacgttatccgttccctactgcgcacaaacccggacggcggcggcgtgaattttggcgcaaagaggtcgccggcggtgagcaagccgcgttggcaaccatatccgttcagttactgtaccatggcgcacctccatcagtcacctgaaccgaccaccttcc

SEQ ID NO: 145469 - DNA, 366 bp, Zea Mays
aggatataatgggacatagttgtcctggctgtctctagccgttccataaccaaacacgttctaaaagaagcgcatagttttacatttgcattttgttttcctgcgtccccactcacaatctttattctaggcatcatctttctcgctcaccttcgagagtttgggttcggggcgatggtggtgacctctactacggctgaattcggccattcaccctctctctcttcgtaatttctatttatattaaatagatctatctttcccctatttcatctaagggtgaaaacggccggtaacggtcggaaaaaacctctcaccgttttcacccgcataaatttttgttcggtcggaatcggtaaacgggaa

SEQ ID NO: 145470 - DNA, 531 bp, Zea Mays
cttgtataagccattcagcagacaaatgggtctatattgctgaattttagtggcctctttaatttttggaagcagcgtaataataccataattaattctgctaacattcaaattcccaccatagaaatcaaggaacatgttgacaatatcttttttaacaatgtcccaacaaacttgataaaaatcaattggaatattatctgggccagcagctttattgcgttccatctgaaataaggcatctttgatctctttctcacagaattgaccacaaagaacttggttgtctatatcatccaaccgttcaattccactccatattccatgccaatttgaaacaaattacccggggcagggccaaaaagctcagaataaaactgagtagcatgttccaaaatatttttatccccaaaaattctcttatctccatcttccaggaagacaatattattttttcatctcctaccattagcaatgcgatggaaatactcattatttccatcaccatgcataagccagttttcatgcgtc

SEQ ID NO: 145471 - DNA, 1617 bp, Zea Mays
cacggttaaagagatatgattttgagaagttttaggtaattaaatactaaattatattttagattgattgatgtaaatcatgtgagaatatatcacctatgattaattgaactttagtctatgttataactgtattagattcatatttttgttaggctgtagtcatagattaatttataatgtcacattaaccttgattagaaaagtcaatgtaataaaaaagtatttaattatttctgaaaacattaaaataaatgttgtgatcatgtagacaatactaatatgaagctaacgcaatttgaatggattaaattggagttgcaatgccaaagttatggactaaataagttttatgagttaattgatgtaaattttatatctggaattgcttccagaggattttctgcaaacgccaggggcctctatgcaattccctactactgtcgggacgacgggttcaattgtagaaaagggtaggggctaaactgcatactatccgggttgaaggggtatccatgtacgagggccgatgataaatctgtggtcagaattagattctcattgtaacgaaccataacgctataacgaccgtcagatcaaggtcagactatccggatcacaggcgcggagggactcgaccagagttgcacatcaaccaatctacgaccctgatcgggtcggatcaacgcggcaatccggttctaatccacaccgtctatcaccggatcaatgacttgacactaatcccccaacatccgcctagatacctaatcttaaccgtctctccacgaatcaacgatcgtgaatccgcgacccccatcctgcacgactctggcagcgctgtcaagtctgcagcggcggagccttcactggcgacatcgggttctaagtgccagggctctataccccaaattaatccgcccaacgcaacaccccctaaccctagatctggtacgccccgcatatggtatcagatagtgctccacggacctcggtcacggcgagtagctgcgccacggcgcaatccagcgctggtgagcaattcacagctgataaggcgcttatacgctataacacttgatggtacatcgcatggagaagcaggaaggggcagtgggagatcttcatcggtggtgacgccgcgaattgatcgacccgcggtgtggggcggaaacacgatagagactcccgccaatgtgtaattcgccgtgagcagggcatctccgatccctggcgacctccgctctagctactgcggcttcctggtgacctccccagcgtgtaaccggatcaaatcggtggcgagccgtgggctgcgtgtgatggctctcaattcgcagcgcgcaatggtgaccttcacccaattacagcggcgtatgacaatggctaggggcagtatataaatggacaacgcccgaacgagttgcacacggacggtattcgggcgggaggtgcggcggatctgttatgcttcacaagcagattgcgccgtggggaagatacacagttgcggccggagcagaggctggcaagcaggccctaccggtcaacggccggacgcgcttggggctgatgaggtgcatctggccccgcgtggcagggacgtgagtgggaggg

SEQ ID NO: 145472 - DNA, 1122 bp, Zea Mays
ttggattattttgcagcgttagatgtggctgcagcggagccttcgccgcgcgtagagggttccgaggggctcccgggtgcgagtactgggtataggcagcgaagggcgttggtgaaacggagagtgagtgaattgtcgcgaagtggtgggcatcatcgtagtgagatggagagtggtcgtcttcacgtggatgggactggtaaacgagaattgttgtcctcgccgattggggcgagtgtaggtgaacgggagctgcgaaatctttttgagggtgaggaattgaggataatgctattcaactacagggagatgggtatcatcccgaaggttgagccaatgtaatatatgatgccctcgctgtgtgtatgtaaccgtaatttgtatgataaggctgcgcgcctttgttgatccggccgtaccggtaggcgacttctgcacggagtattttgtaaaagacttcgatctttacgtacttattgtgatgttccggctgcacccttaggcaacttttgcacggagagtcttttggaaaagacttcggttttgtgcacttattgtgctattccgactgcacccttaggcgacttttgcacggagagtcttttggaaaagactttgattttgcgcacttgttgtgctgttccggctgcacccttaggagacttttgcacggagagtcttttggaaaagacttcgattttgcgcacttgttgtgttgttccggctgcacccttaggagacttttgcgcgaagtgtcgcacgcgagggtagtcagcgctacccctcgcggtgacttcggtgtggtcgaatgccgaagaccgtcgatgcggtctttttcgacatattgtgtcttagtttttgcgggggatttttgcaggtatattacaaggctcctcctcattaaaaacctcaccccccgggaggaaaagagtgtgggccagaatgatactgtttggtgaattacaagggcgtgttggccctgaggattcaaacaaaaaatttgcggagattatcgatattccaggaatgctctaggtcctcgccagatggcgttgttagcctgtacgcgctgggggacgccttcgtcttgacgatgaatggaccctcccactttggctccag

SEQ ID NO: 145473 - DNA, 500 bp, Zea Mays
atttccaagatggtatgggaaggggctgtatggtgcctgctaccttcagatggctggccttgactctctggcaagtgtcacattcagatacatacttagcaatctccctcttcattctagtccaccagtacaaagatctgaggttatgatacatcttgttactgccggggtgcatggaaaatttggaaaggtgagcttcatccaatattttctttctgagctcggggttcttgggaacaaccaatcggtctccaaaccatagaatccctttgctgtcctgacggaagcatttgtatttgtccacctttagttcgatcatttccttaatgacttgaacacccttgtcactgatctgtgccatgactatctgctcatgtaaagtgggctccactgaaatataactcaaagcaccggaggaaacgacttctaggttcagcttgcacaactcatcacattgggtggtgatttttgcatccatattcatacagttgcactgggct

SEQ ID NO: 145474 - DNA, 291 bp, Zea Mays
gtggtggtggaccgtggtggcggtttacattagaatgtggaggcacgaaccaacaagattttggtcattcacaaggctaagatctgggacttacgacttcaagtacatgctaacaagtttattgacttcaaaaaggagcaggataggggctcccaaaactcccatcgcgggcagctcggtctaaagtaagcatgtggcttcgttcccttggatctggttcaggacttttggtttgtttctttgggacaatctctcctacctacctgtaatacaaactatgcttccactttt

SEQ ID NO: 145475 - DNA, 683 bp, Zea Mays
cccctcgtgttgggcccaatgtgagcagaccggcccctttacatcaaccgcgcccactgttggagtcgcgcgctgacacgcgggaccctcgcgacagcctctccgcgcgcgtcagcctgggtgccgtgctctccctttttccccgcgtggcttacctgtgggtcccacctgtcatcttgtcgccccagctgtgtcgtggccgaacggaccgcttctttcgccatggccactgacccgccgttgcaacctccgcggagatctcgggctcctggggttttccgcgactccaccttctggatcgtccgccacggataaatactctcccggcagctcgggcgcagcacgtccctccattccactgtcagctccgtgaaccgagggaagagagaaggcggagcaccgccgcgggtgaactagggaccaccgtcgctccggtggaacttgtaggggagatagcttcgcactctctggtggatcgtatctgctgttctcgttgagctcctgtggccgtaaatcggtggcgattgctcgatgactttcccccttcgtcgtggcttgcatctctgcgtgaactgcgctaccatcgtcactaacccaggtaagtgatgcccagagctattcgtcgtggtctctacttcgtttagcactaggttgattcaggattgggcgtcggacggtacgag

SEQ ID NO: 145476 - DNA, 868 bp, Zea Mays
ttgagaaggaaatcttttattgatgacgtattttccaattatagagtacaacattgctctgatagctttttgagtcttgctaaggataaaacttcctgaggtgctctatattccatgagttccccactttcgtgccatccatttgagtaagctgatatgatactggccgagtgacctccgatacaatgaatggcccttcccatagcggtgacaatttgtgtcgtccttctcctgttagaattcggcgaaggaccaagtctcccactacgaaggatcgatgtcgtatagccttatcatgatagcgcctcagggtctgctggtatctagctgactaaattactatattcaatcgctcttcttccagcatgtcaatatcttctagcctggtagcttcagcttcagctatgctttcgaagaccagccttggtgccccaaacctgaggttggcagatagcactgcctccgaaccatagaccatgaataagggggtgtttccatgcaaagctcgactgggttgagttcttaggctccaaaccacataaggtaactctctgattcacttccctgcgaacttttcattcttgtcaaagactttcttcttgagtgcttccagtatcattccattagccctttccacctgaccattggctcttaggtgtgctactgatgcatatttgatctggatgctccgttgttcgcagaaatcaaagaattcagagctagtgaagttggatcccaggtcggttatgatgctattcggtatcccaaacctgaatattatatcttatatgaattccactgccttggctgaagttagagaagcaatgggtttgtattctatccatttggtgaatttatcaatggcgac

SEQ ID NO: 145477 - DNA, 471 bp, Zea Mays
ctggtgctttgtagtttcgcctccagaggctgttgtttcaatttgtgctttttgagcttcggcaacttttttcggcgtagagcttgaagactttattgtctccagtacatccaaaacattaaccatccttttccttttgggggtcacagccggacccttctgagcttgtggcaccccaacttctgctgaagggcttaaaatttctgatacttttgtcccttcagctttcgactcttcagttctttcagccttcggtgttgcagacagctcttcagctttctgcgcaggtataggttttttgacttcagtagccgaagaagcctcgccgacaaactcgagcaccgtggccggctcaatatagtgtggccggtgcgtaagaaccttcatcttttttctcttcggcgttggctcactaggagcggccgaagcaacttccctcacagaagttgtaccttttcttttttgaccccg

SEQ ID NO: 145478 - DNA, 439 bp, Zea Mays
cttcccctatgtacatagagtctatccaccatgctagggcaaaatagaccaactcctacgttttcgatctgacggccacacgctccacacgaagttgcttcgcctcgatgcaccctcagctgtgacagcacgtgtcgccattagttccctctagaaccgccgccaccgagtttgaggctcaaactcagcaaatcccaccgtctgtagcgtggggtggtttttaaaggatcaaccaccaaaccgccgtgagtatcgcactacgtgtgtgtcccccacatcctagacacatgtcccaccagtccatgattatgtcggcaacatagcctgctcggccatgtcattgcacgagtacgtgtcccaggtgccagccactttggctagtcacccggcgactccagtccctcagtcaagtcccaacgcttgtccttcaccgctcctg

SEQ ID NO: 145479 - DNA, 674 bp, Zea Mays
gactcttttgtaaagccaccgaccaaagaggtatccaggaaccccagacgtcagattagaaatcaacggtgccgattagatcgattacataaacggatcattatgcagtgccgatggtccgatccaaaatctatgctccatatttccccgtgtccagatctagtatgattctcacgatctccaaccaacaaccacgattcactggccgccaattggtaacccatagctaatctcgaccgtcgactatggatcagacggtgtgcggtctatctccctcatctgaccgcgaccggcggtggtggcgccctggaggtcaaatcgtgccggcgaactcttcctgcccggtgattcagagcaccatacttcgattctactagcgctaaatgaagaggacgaccgcacgaacacggaggacgtatactcaccgacggttatggcgtcgagtctcctggcgacgatgtggtgcggcttgagcgccaaccaagacttcagtgaggaattcccggtgatgtaggggccaatcccgccgactatgttgtggaggcctttcccctcggtctgtagatggctccggactccacacacggcgcggatggcggctcggtgaaaagttcctccgcagcggcaccacacttcctctccctctctggtttgcgacgtggccagggtttcca

SEQ ID NO: 145480 - DNA, 438 bp, Zea Mays
gatttggttcattaaacaaacagcacggcgaaaacagtgtgtgcagcccaaaacaacaactataaatttcagctcctatttacttcaagaattgtcatgttctagagactgaaattactctaacactttaccattcattatagttaaaaaaatcaaataaggaccaacaagtagacttactaattttattccagtcgcttcgtgtgctagaattaccatacacaaataacaacgcatctaccgcaataatcatacccggtatatgtgtgtatatcgacgcgctcctcacacactagttcgcattttaacttaggcatcacatgagcactactaatttttatccgcgacataaccatgcgcatttaaaccataacaagtaattcacagtgtttacgagcttaaccaaagccatctagcaagtcggctaaccagaggaac

SEQ ID NO: 145481 - DNA, 408 bp, Zea Mays
ctctaaggatcatctcaagtcggctcaccaagtctgcagagggaattcttctgttggtaatccgagttgagtcggctaggcctcgatacaaataagctgggtatgccctgtccttcaacggctgaatattcttgaagacaaagtcagcaaccacaacttcagcagtcagacccctctctttcagcagtccaacttcagctagcaacgcacctgcctcagctacctcctgatctgtgggagactcggtccaacttggggtgcgaacatccggctgtcttcccgaccgggggggagagaatttccgtgattctcaactatgaaccactccaggcgccatcccttgatactgtctttgagagggatctcaagatactcagtcttcctcccgcggcgcatctccaagctggc

SEQ ID NO: 145482 - DNA, 271 bp, Zea Mays
cagcagtcgagcgaagcgagcaggagctagaggacctcgtcgtccacaacctcccctcctcccttcctccattggcgcgccaccacaagcagcaacgggggagaattgtcccttctccaacggctctgtgacataatctccttcttcggcggccatcgcaaggatcatgtacagcgcctgcgcgcgtaagaggagcggtccctatggccccgcgacatcatcttcggctccagcatgctctatggcaccgaaggcgaggagctcgcggtcc

SEQ ID NO: 145483 - DNA, 301 bp, Zea Mays
catcaaggaggatatgatgggtgctttgcttgctgtgcaatgtgggcatgtctccaaactcaaactcctcaacacgacttttatcaccctcctgcctaagaaggtggatgccttgctggtcaaggattacaggccaataagccttgttcacagctttgctaagttggtaaccaaagtgctagcagctcggttggcaccccacctgccaagtatggtctctatcaaccaaagtgcctttatcaaaggaaggagtatacaagacaatttcctactggtgcagcaacttaccagatccttacac

SEQ ID NO: 145484 - DNA, 610 bp, Zea Mays
gaaacaacaacagaagcattaaagagatcagtggtagaggttcttagtgctcatggtttaactattgctaaacttcggggccaagggtatgatggagcttcaaacatgagaggtgaattcagtggtgtccaatgcaaaagctaattcgtgatgagaacccctatgcctactatatccattgctttgctcaccagttacaactagtggttgtttcagtctcaagatgttgttcttctatggaagatttttttgagtatgtcaacatgattgtgaacaatactagtgcattttgtaagagaaatgatttgttgttggaaaatcatcgtataattcttttggataagttggagagtggagaaaattcattaggaagaggacaacatcaagaaacatcattggctaggcctggagatacaatatggggttctcactataagactttgcttcgtattgaaacattgtgggacccaataatagaagttctatcagtcatacatgatgatcaacataatccatcaagggcaggaggtttggtgcatatcatggagtcctttagctttgtttctatcatgaagatgatgttgcagatccttcgcataacaaatgaatt

SEQ ID NO: 145485 - DNA, 523 bp, Zea Mays
cgaatccagatctgcgctccaaccaagaaacggaaccaccgtaagacgacgaggatccaccgccgctgctcgcggggatccacctcgagggcggagttgctgtgacgcatgacggccgtccatcctctccaacgtgagccctattcttgaggaggagatcaccggagaggttggtagatacaacgcacctgggccgctcctccccggtagaaacctcctagagtagggagtgaggtccctgatgcgacgaagaggagggcaaggaggaagccactggtggggtaggggaatatggaaggtcgcctcgaccgatttgtctgatcccgatagacaccgacgggggatttgcgcctcctcctgcatccccacgcccccgccgtcagcgttgaaggaggggaggcggaagaggttcgcctcgacgacgctatgcggcttaggctacacgtcggcgacggaggaggggtaccacaggaggaatgagcggggcggcgatattgaagatggaggttggatgcgggttagg

SEQ ID NO: 145486 - DNA, 809 bp, Zea Mays
caacgacgcagagcaacatcccccttcccagcagagccgcgcggcggcgctaccctcccgcggcggcgccctcaccggagaaggtggacaccgagctcctgtgcctgaaactcaaatccactaggtgctacacgcataggagagcagcgcagagagtagggaggaagtctcaccggagttggcgcgatgaagaccacaggccacggcgtggcggaattacggcggagttttttgactccggcgaggaattaacgggctgtggtcgaacgacgcgtgagcacacccacccagacaatgtcctcggccccagggaaatccttcgcgagcaccaattgaggcccgccagtggaggtcacggcgaaatacgatggcggcagaggagttcttccgcccaggtggtactcggtgatggatttggggacggcgcgagcgatttcgagagagagggggtcgcggaaggatgggacttcgtatttaggatctaaccgcgcggagtcggtaggtggtccagctagcgcgaggaaaacagaggctcaccgcgcgatccgcgcgggcggttgcaacggcaggcgacaggatgacgagctcggtcatggggctgcgaaagaacgtagctgtcggcgtggtccaccctccagtctcacgggagcacacccctgcgcgcaatgaacggctccaatgtgcgcgcgattgactcggcatccgttgcgcgaggtgggcggagtgcggcgctcggggagagggatgacatgtgggtccgctgtggcagtggcagagaagtctgggccgcgcgggtgtgattcggggtt

SEQ ID NO: 145487 - DNA, 329 bp, Zea Mays
caacgcgtatgttgcgtcttttctgaggtaggtgttggttccataaaaactctcgtggtgtttttcatggtgttggttccataaaaattctcgcgacgcatacgttgcgtcttttctgaggtacaggtgcaggcgaggagacattcgaacattgctctggaccgtactagctataaacccgccgagatagcttcacgcgtacatcaccacaaatccccgaaaaatggcaccctgcttgccgcctcacacctcctgtttccagatccttgttgttatgtactgcctccgttcacaaatatatgatactattgactttttcgaaaactttg

SEQ ID NO: 145488 - DNA, 642 bp, Zea Mays
attcagatttcaaaacatgaactgaacatcactcactactcactacataacatatgatgtagagttgcagacttactagtatataaatgccaagtaggcaagtatagaactacagacttactattgacctaaagaagtagagcctcatccaattgaaaagcagcatcactagcagccctccacccgactcagattcttcttcctcatccacttctccttgagtttgtactggttgttcagctagatgatcactaccatcttcatcatcaggataactaccatcttcttctccaacatcttgagcattccttggacgcttcctagttcaaacataggtccttggatgaggctgagaagaagaagaggccccccctaaccagaccaacagtagccctaggtacattttggccccagagaccctatgttgcacccaatgcttcatcaacggcagtccaaagattaccactatcagattcctcatcaacccattcattttcccattgaaactcttcaagcaccagtgggttgcttttcttgcgtttggaactgagctctcttatttttgcaaaccgattttctattttctggttgtagctcacatacaccaacttattcaatctttggtgctctaatatgtttctt

SEQ ID NO: 145489 - DNA, 1007 bp, Zea Mays
caacaagcacccagatcagatcttacttaaaacgaaccggatttcttcaggaacccttggatctgtatccaacgatccatagcctatctgcgggttggatggcagggacagatccatccgtcggtccccagatcaacggttctgattcactgcaaccacgcgacgccccagcttctaatcccaaacgtccagcagggatccaacggcccaggtaccttctcctacctccagcttcccaggcacagacaccgcgtcctccccagtgctctctctctcccccgttgatccaccggcgctagccaagacccgacaggggtacccggcggctcgtcggcccctaggaccgcctcctgaccatgaccgccacacccgcacccgaacacccgatgcacacctaacataacgcagaggaaaaggagtctcaccagcgatggtgtccggcgttaaccgccgatgttccgccgcccgcgcagctcccaatgaaagcgccgtgccgatggagtggaggaacggcaaccgcagtgccctaggattcgacgggtgaagtgcagtggccaactctaggcgaggggaatagaggcgatggagggggagatccggtacacagcttttatcgcccacgctttatggggccagagaagtccgtgcgtggagtcgtggtcaccaaagtccgcggttctcgtgcggcgggtatggcgcgaggaaatcggcgtctgttgtaaggatccgaggaagaaggaagcgcccgccatgcacgcgcgttcgttgcggcgaggaagacagagtcgctgcgcttgtgagtctgcccggtgggtccgtgaagcagccacacgcgaggagcgcagtcgcacggtcggtcgactgggtcaccgggggatgggtcatggctgtcagcgtaggcaggcggaaaaaggggctgttgggctgcgcagtggaccaatgggtgaatgggccgaatgggtggattcggcccaactgcagggattattccttttctttattttttt

SEQ ID NO: 145490 - DNA, 467 bp, Zea Mays
gtagccactctgtcgctcatccacttaccggcgacgtggccgcatgtccatcaccggtgtgccgccgttcttcgcagttatgccacgccgtcagccatcttaccacgtcgcggtcgatcgcaacacaccgtccttctattacctaaggccttgccacggggtttgccaccaatcacacgtgccagtgaactttccctcctccgaccgccgcgcgtcatcgttccaattctcggccaccgctctcgcttagtataaattgagcccgtcgtgagctccgcaagatcatcacgcaccacaccacccagtattgcctccaatcttgcaaccgagagcttgaatttcgaatttcccccaaatctgctctaacccgccgcaagaacaccctcgccgtggccagtgcaattcaggttagttcaaaccttctgctccctcgtttgagtgatctcacatacctgtgatgctcgtcg

SEQ ID NO: 145491 - DNA, 834 bp, Zea Mays
ccggctccggcgtctccagtgacggtagtactgcgcatagcccgtaactagctggttaattgcatgcacgcacacccactagcagttaattggtcgtgcgacttactggaggaacgttttacagaacagcaggaactctgtttaaaaatgcccgttgagtcacgactgcacttgcaactgccaaattcactggtggtttacacacgtggaattcatggcgtgtctcctatctagtactcggactactactaccatcatgccacctttttggcagaacatatataatccaatgatgatgtaatccttgtttttttgttacagggaggctcagatgaggtgataatccagtccacgccgccacaggttgagaggagaagagacgacgtgaaactggagcgactagagcttggcctcgcgagagctcggtccgcgataatggaagccatcaggaagaaggacaaggtatctccgttgcctgacaaggactacgtgccgatgggaccggtgtacaggaacgcccacgtgttccacaggagctacctggagatggagaggcagctgaaggtgtacgtgtacgaggaaggcgagccgccggtgttccacgacgggccgtgccgcagcatatactcgacggagggcaggttcatccactccatggagacggagacggaggcggaggagggccggcggctgcggacccgggacccggcccgcgcccacgtcttcttcctcccgttcagcgtcgtcaagatggtgcagacgatctacgagcccggatcgcgcgacatggccccgctcaagcgcaccgtcgccgactacgtccgcgtgctctcc

SEQ ID NO: 145492 - DNA, 422 bp, Zea Mays
cagacgtttctctgctgccatcaatggtggccggcctctccatcttttccacatgcccccacatgaagcacgcgtcttgcagccgtcgtgctcgattcctcgcctccacattcttctcccgtcccttgctattgctgtcgcgcgttgccactcactcagccactcgccaccatcatttcggcacgttgagccttccctatcgttggcgaagtagccgtcgagtccccctcggcctcctgcaccggatccccttcgcctcgacgtcgcactcaccttcgcacgctcgccctctgctcgcgccgccacgacaaagcgtcgctcttgtcctgctctcgctcaccatgtcgtgtcgagccctgctgctgctcgaacttcgtggcgcttgctctttgtgctatgtggtggtaactcctatgcgacgc

SEQ ID NO: 145493 - DNA, 345 bp, Zea Mays
cttcctcaagtttggaaatgaagttctttttctttcgataacaggcctgcatatggaagaacttagtgttggcatcaccctctctaaggtactggatccgtgatctcagccgagcaacagtcctctcaagagaagcaaggctaaggcatcgttgttcaacattttcagcaaccaaagttccccactagaaagaattctaatgtcctgcaccatttccagcttatgcaacacttccctggcaagccccaattgcaccctcacattgcccacttctttatgcccccaggactgtaactcacaagccagcctttttagcttcaatgacaccctttccagaggacagga

SEQ ID NO: 145494 - DNA, 577 bp, Zea Mays
gcacaggagaaatgcacaattcagttagcattaaacacacacttaagacaatgttttaaaatggacattacgcaatccttttcctagggttatggtttggcagcttcctagatgttttaaggcattcccgtgtttaagccgtctttccgaaatgaatattcctcagtattatcttcaccacccttgatttcaagaatggttggaccttcatcttcttgaatgatgtttatagatgcaaaactatcaatacggagtgaatgtttatagactttggttactatagatgaaatatcctgctgacctagtcctatctgattcagttgaaaagtagttgcaactaactgggctgctttttttgtcccttgagatagtgctgtgtccacctattataataactaacgttctgacctgcctaaggcgtgtttcttcctattcacatttcactgcatgttgattattgggagtccaatctattttactcagttcttagttctgtgctggatgtatcgtcatcatacccaaaccaattacataagccattgcagcttcatcaggtttctaatagcctaatatgttg

SEQ ID NO: 145495 - DNA, 1079 bp, Zea Mays
agacttcacccccatgggagttagatccgtcaatatagttgattgagtttatggttgtcttgtccatcaaggatttcgaaggccacacaacgaggacccgatcgaagaccgcggacgtgctaacgaatacctcatggctccaagagtgacttagaaggcgctggaaaccttatactcgtcaacttgatgcgcatgtcttgaatatagtgtgggtatgtaattgggtccctcctgtcaggatccaacattttgcattacagaatgtcttgaatctacagtgtccaaagtagtcgatcaccctaaccccatcaactatatgatttttaaactgccaacacatttcatgcaaagcacagaaagcatttatgttcggtgtaacttaatgacataaataaaaaatgcaatctttgatatcctattaggtgttttttgaggtgcgtttgcacctgctacctatagtgtaacttcgaccttgctcaaaaccacagtttataataccacaatttataatagcacagacatgacataactatgatctattttatcagttcaatctaacatatgtttggagacaaagtattttagtcatagtgtaggagaagagaacactacatctacgtgcaagccaaaaactttggtccacaccaaagtttttttttaccccaaaaatacactggtatcggtaaaaccatggtttaaaatatagagtttttactgtactccaaacgcattttggtataaactactatagtatgctaaaaaagcatggtactgtcttgggactaaaaaaatattgtgttcccaaaacagtccctaaaccagagagtttgataggcgaaggaaggtcaaaaaaatgaaccgacataggagtgttctctttgagccctccctatttctgatttttttttctcctaatgtcggtcgatccaaatgaagcttaaagtttaatttcgtttataacgatgaattaaagtcgcaaaacagcatcatcctgacagcgttttgctaccccaaaaaattatatacactggtgactggctccaaaacgaggcaggaccagtttacagcgtgatttaaac

SEQ ID NO: 145496 - DNA, 487 bp, Zea Mays
cgtgcaaggtggcgacatggatagtgaatgcgacctgccggaggacgcccacgcaggtgacgcgttcaccgttcgccattgttgccgtaagccgcgaccgactttggagaggcagcccggtgcgtctggccgtggactcggatatgaagtcatgtgtcgacccggagtcgagtagcgctagaagaggggaggctcccaacatgacggcgacctgcatcgtgccgctgaagcggacgcctgcgagggcgtgcagggaaaagacgggagtctccgcctccgtggtgtcgtcaccgtcgtcgatgtccactccatggacgtagaagagtcgcttgcaggtgcggttgtgcccccacgtatatttctcgtcgcagttgaagcacaggcctaaccagtgacgctcctgctccgggcgcgataggcgcttcactggctggccctccgtggcccgcggtgtagccgtccggtctcctgggcccacagagagggc

SEQ ID NO: 145497 - DNA, 545 bp, Zea Mays
gacaccttgaactttggtggggtggcatccgaacaaacttgtttggatagggattcgtgtagctgatcgccttccatttggtgaggatccgaaactgattgttaagattgttaaacatagaataaattacctgtacatggaatgcctgcatgcactccttccttagatagctagaccacattcctgtaatctcgtgcatgctttctttcctacgatagctagactgcctgccagatatgcacgcataaaattctccatgtacattacctatataaaggaatagcacaaccctgagaagcagtgcattaggcctaaccaaacatggtatcagagccaaggttttaatgtccacaataccttcttctcccacaaattcctccaccaccacgtcctcctccaacatggtatcttctgctgctcacattccaattcatcaagtcgtcaccattcgtctcaccaaaacaaactttcttctctggcgtgctcagcttctccctcatcttcgtggtgcccaactgatgggttttctagatggctctaatccg

SEQ ID NO: 145498 - DNA, 425 bp, Zea Mays
ctctctattgcgaagagggggagggcaacgttttaactcactttcgcaatgagagcgaggccagcaaaaatgctacatcgactccgccttcggaataagacccacctcccggaaattaaacaacatcatcctcaactcttcgccctcaaatagattccgcaagtccccctccccaatacatgtccccgtcgtcgaagacagtagatcgcgttggctatcccgatataatcaaagacggaatcgctccatacccatccgacgatgtctcccactttgtgacatcccaccaacactttgcttcgacaccacctttcacctgtggtggtcttcggctatcgccatggccgggggagcagactcttcgcgcgcatcaaattgcggtggggactccgatgcggccaaatccaacgcaacaaagtagtcta

SEQ ID NO: 145499 - DNA, 323 bp, Zea Mays
ccccttgttacctataaatacctcgcactgcactattgcaggggggctgaaaaacgctgttgcgctaatacactgtgttaacaaactgtgttaacaagtatcaaatcattatcgcacactcactgtttgaattagcttgaccacatgtctgctagttccaacaatccccatcgatccctgtgcaatcaagcctgaatttgccttgtatcttctgtgatgcaaatttcgtgtagcccaaaatttgcatttcagtcattggtgctaatgtcagaggtggtgccgtccaagccggtgccattagactctggctctggcttttgtac

SEQ ID NO: 145500 - DNA, 324 bp, Zea Mays
gaaacaaaccagtcgccgacctccctccatccttccctctcaggcacgcagctcgcgtggcattgcgttgcgcggcctgcttctctccggtctccaccgcgccgcgatcgacagcccggccagcgagctcctctcctccgccttctcctcttctaccgctcccgatcacgcggccgcgacatggaggacgacgaggggaagaagcagcaccaacggatcatccccaacgccaacggccacgtcatgatcgtggtccccgacgacgcgcacgcgcacgcgctgcccgcctccgcctccgctcctcctcgtgacgccgacggccca

SEQ ID NO: 145501 - DNA, 575 bp, Zea Mays
ccgtgcacattcaatttgggaggagggggcagaggcaacgcgaattttggattgcgatcaactcactgggtggaggtgtgcataccccgccgtggttcatagcgctatttatagccacggcggtctggctagcgttctctggccatggataacttcgttagcgcatgcttaccacgtagggaagagacacagtgagggagatcgaggcatgggtgacaccgcggtgaaagttatctgagtcatggtggcggccggtgattaactccggccacgctcggctcagcacgcggaatggtgccacgtcccgagttactcccttgcgatcatatccccaccgattcatccgagctcatccaatccaacagtgccgcagatcttttctttggtgttcttcagatttttcagtgtattggatcttcagaacttgtctgaaccgaccatcttccacccccccgatctctggatttttgttaagaacagagcaacttccctttaataaaatttgtttactaaacatcagtctacaaacttactataggattcttgggtcaaaaccgaacgaattcaaagatatg

SEQ ID NO: 145502 - DNA, 542 bp, Zea Mays
taggtcttggtatgctcgtaccattggaatcttgcatactcttatttttatatatgcttacctttatgtcccaatatctgtttgaaatatttcagttaacatgcccttgaccacccttgtttcctaatgatccaggagtgatcattttattttgcacatctgtagtaatctcgttgtttccttgtaactccactcggtaatgaatctttacttcaacccttctgttggaaccttaccgatcttacccttgattgttttctccactttgtcgtttcacgagtcttgtcttaactatatcatttgttatgctttttaattattatcatatgcacccttgacacctctatatcctacattgatgtttgtctcatacctgccatttaaaatcgcccctcttccgtctcataccttctttctcttggtcgtatcctcttctttggctcgcgagtttgtaacctcatcctttgttgtgcttttgcttcttattgcctttacccttctcatctctcaaccttaccttggtgattacgctatgttcgtta

SEQ ID NO: 145503 - DNA, 372 bp, Zea Mays
tggactttgttagaatagaaccaaagatggtggcttcaccatttggaaaacaaaagcacccacgatgtcgctcatttggcactcatcgataggagattgtctaccctgttcaaaaaagataggagaccgtcattaatccagtcaccagagaactaagccatcttttgcaaacgacgtcaacactatcgttctagagctcatatgtcctcactctcctcccacctcgtctccaagaagagatcttcatcgtcgttgccgacggcgtgctctacgacccttcctcccttgtcgtttcaagggtctaccccgccatctccaccgttcttgcagaggtggatcccactgtattacaagttgcccctcgggcctcgc

SEQ ID NO: 145504 - DNA, 368 bp, Zea Mays
agcaattcttggttcatctacctccagagttatcatcaatggtcaacaatcagacaaaatcattcacaggcgtggtgtgcgacagggggatcccctttcaccttttctcttcatattagcaatggatccgcttcagaggatgatcgagcgagcggccgaggctgggttactggggcgggtcctgccaagaggggcaaaacttcgttgttccctatacgcagacgatgcaggggtgttcattagagcggataaagcagatctcaaagtgctaaaatcgattctagagactttcgaagggtgttcagggctgaagataaacttcgataaaactgaaattttttcgatccgttacccggaggccctttggc

SEQ ID NO: 145505 - DNA, 442 bp, Zea Mays
cttgcgggcacggtcgctgccgatgcgggtcgcagcgatggcgtcccaggcctccttggcagtccgcttctgggaaagcgaaaactgcatctcggacgggactgcagcaatgagggcatccagcgcccaccgatcctcgtggtagtcgacgttgccgtaccgaactgctttccacatttggcgaacctggagccgtatcctcatcaccgcggcccactcgacgtagttggtcttggtgagggtaggccacccaccgccgggaccgatgtccctgacaatggcctgggccatgcggcgaccatggtaccgatccggggagggagagtcgcgccgcctgtagaggccgcgatctccgtcgacccagtcgccgccgccgggagcaccgccggtgcgtctacgcccgtctgggctgccgccgcgtgcgccctcgcccggagcgccg

SEQ ID NO: 145506 - DNA, 472 bp, Zea Mays
gatatggctaggtctatgttagcagaatataatgtgtcggattcttattaggtcgaggccacaaacaccgcttgtcactcatcaaataggctatattgtcacaagctcttgaagaaaactccctatgaattgctcattggtagaaaaccaaatatctcatattttagagtattcggttgcaaatgatatattttgagaaagggaagccatctctctaaatttgagaagaaatgtgatgagggttttctacttggatattcatcaaatagcaagggcttatagagttttcaacaagactcatgttattattgaagaagcatatgatgttgagtttgatgaaacaaatgggtctcaagatgaaaacgataatcttgatgatgttgatggagctcaattgagaaatgctatgaaaacaatggctattggtgaaataaagccaagagaagatgatgatgataatagtgtggttgtc

SEQ ID NO: 145507 - DNA, 294 bp, Zea Mays
acaaggcagcctcaccctccaccaccatggagaaaaagattcccgacttcctcgaccggtgatccggaagcaattgcgctaacaaggataacgtgaacttaggggaacttcccaagaataccacctccctacctaacggcgcctgcaataacactgtcttccaaaaacaggatataactgcgcgatactgggataaccaatccatacccaagataacatcgaatgcccccaaggaaatcacaaccagattggccgaaaagacctcatcagcaagaatgacggaacacccctgac

SEQ ID NO: 145508 - DNA, 436 bp, Zea Mays
tcctcagaacactccgctgtcgccaatgtcaggttcgccgtcgagacgccgatgcacgtcgccggcgatcttgacctgaatgcaaccacaaaactcacgcgaacacactgatgaacacagggacggttttttcggtgctgcaactggcagcgttttctgactctttatgcatggtcatgcccactcaggccgacatgcacgacacgacatgctcctcttcgcggcgaacgccaacggaacctgccgtacggcgtgctcccgttcatacgagtacacgtcagagctgagctcatatatgcacgcgatcatctcgacgacgcacctaaacagataattagccagcagctctcctatctcatttcctattctaccttctatttcaaatttcattctacaatcagtgacatatacaatacaaaatacaaaaccttgtttt

SEQ ID NO: 145509 - DNA, 844 bp, Zea Mays
atggggatagagatagttataactttatgggatgggtatgaggtatctaatcccggattgacagtttgacacttctattgcagcaaaagcataccattttgacttagagttttccatctatgataccaagggcaaatataaggatgggaacgtgctcaataggaaaaagggcatcccgtctaattagcaccgcaactctttgatctccatcgactacaaaaccaattaattaatgctcacattcacccataagcaaatgcagaactaatattgctaagagagagacacggttgcggcggaatgactataaaggcaatgcttgaaatcaaatacggtgtatgcattcatccacaagctcgatatctccatccgcacttctgcaggagggaaactgaagaaggaaaagcaatcttacctgcggcacgggcggctcgcccgtcctcgtagcacgagcgcaggagatgcggcccggggtgaggcactgaggcagggtcgcggccgaggggatcgcaacctcagggcgagatggcaatggtagtgtgatggggagatggcggcagcgggccagaatcaaagagtttagtcaaatctataccaaacaaaagtgcaattcttgtttttcgtcaaataaatttaagtttagttgaatctataccaaaatttagtaactttatggtaccgaataaatcctggtatattaataatacactacctccaaatttttatttgactaatttggaccgttcgtcgtcaaataaaaaagaatggatagagtattaattaaaaacaattttaatatttttataagaaaacatataagttgcacatggatcttggattcaca

SEQ ID NO: 145510 - DNA, 864 bp, Zea Mays
tgtagcaaattgatgtgtggtgttttacttgagtggacataaacacaatctagttacgccttgaatataagggattataggaaacctggtaacacaaaaagttatttgctagcccaataatgtcttcatcctctagttgtactctaataccctctcgtgcgaatacagtgccctcaatatcataaaaacatcatttgtggtttaaaaggtgatctattgttttgaattcattatattccaactttttagcaaccgtatggtggaaaaatgtgccttacaactttaacctatgtttggatagttctctcactcaatttggctaaattttccatggtctttattttattgagaaacaatgtggcatattaatatgttgtgttttatttgagtagacataaacaccgtctaggtatgccttgaatagaggggattataggaaacctggtatcacaaaaggtcattagctagcccaataacatctttatccactaattgtactctaataccctctcgtgcgaatacaatgcccttgacatctgggaaacatcatttttagtttaaaaggtgatctattgttttgaattctttatattcctgctttttagcaactgtatagtggaaaaaagtgccttacaaccttaacatatgtctggaaagttctcacacacaatggctaaatttcccacggtatttattttattttgagaagcgatgtggcatattgatgtgcggtgttttacttgagtggacacaaataccatctaggtatgcattaaatagaggagattataggaatcccgctatcacaaaaggtcatttgctagcccaataacgtcttcatccactagttgtactctaattccg

SEQ ID NO: 145511 - DNA, 848 bp, Zea Mays
cgcctctctcgccgtcgctttcagcaccatggcgatgacccctccttcctccgactgggtgatcgactctggtgcctcctaccacaccactcccactacaggaacgctctctcgctccccatccccccattcctctcatccttcatcgatcgtcgtcgaaaacggttccactctgcctgtcaccttagtaggtgcctcggttctccttggaccgttctacctcaacgacgtactcgtagcccccccacatcactcataatcttctttttgttcgtcatttcaccactaacaactcttgttccattgagtttgacttctctggtttctctgtgaaggatctggccaccaggactcccttcgcccgctgtgacagctcggggcccatctacacgctccggccatccacctccggtgcgtctccgcctcctgccctggtctccaccacttggcatcgtcgtctcggacatcccggacctgacgtcatgaccaagattaccagtagcctagatctttcatgtagtaggggacattttgagggcctctgtcatgcttgttagttaggtcggcatactcgtctcccattcaccacctcttcttctcgggctgagcaggcttttgacctggttcattgtgatctctggacctcccctgtactcagtctttctggttataaatactatttggtgattttggattacttttcccattttctttggacttttcctcttcgattgaagtctgacacgttcaccaccctcacacacttcttcgcctaggtctccacccagtttcaccgcccggtccgtgccctgcagtgtgacaacagtcgcgagtttgactatcacgcc

SEQ ID NO: 145512 - DNA, 579 bp, Zea Mays
gcacgtggaccgggccaagaatgaagaggccgacgcactggccaaggctgccgccagaggcaagtctctgccctccgacgtgttctaccatgtcatcggcacgccagccgtccagagccccgaagggctccaaataaccagtgacagcgagggccaccgcatagtcaaccttattatgaccgaagattggcgggcaccaataaccctgttcctacaagggtactaccacccaactgacatcaatgaggccaagcgcctcaaacatcgaagccgggacttcgcgctgattgagggccaactctacaagaaaggggtcagtcagccaatgcttaaatgtgtcaccgagaccgaaggcgtccaaatcatgcgcgaggtccacagtggtacttgcggctctcacgcagggccaagggccctagccgcaaaagtgatccgccaaggcttctattggcccgcaatgatctgcgctgcaaatcgggttgcaaggtcttgcgaagcctgccagaaattttctcctcgatcaggtagcccctcgcaattcacaaaactgatcgcccacacatggcctctccaacgctg

SEQ ID NO: 145513 - DNA, 481 bp, Zea Mays
ttaaattctaagcatattacatcgagttgacataaaaacttgaaataattcttcaaggttttttataaacctcgatgagttccaaacaatttccttggcattcgtggagctatatgtacatttagcaatagttattccagaggcaacgccagccagtgccaccttgtcacgtctcgtggccaccgtcgacgagaaacgggacgtgagactccgacaaactcgccttgccgcttctccacgaggaagacgactggaaaactgttctggatattctctttgatgcccctctcgtgttctgaatgtccttttgtatcagcatctcgacttgggccatggactgggctacggtgtcaccacttcacaagtgggccggatgttacattatcgccccatcgaaatgttgcttgtccccaagcaacaacatgttatggttgtagacctggattccaaggtctaattatccaaaccgcactataccatt

SEQ ID NO: 145514 - DNA, 654 bp, Zea Mays
ttaaattcaagaaaaagaaaaaaaactagaattaagaaaagaaaaaaaagaagaaatactcacatgggctgaattcattccgtgcgacctgtatagtagtagtatcttgaggacctcgcatgcttggcatcagtgttaaaaaaaacctccgcggtgacgcataattaaacgccaaacccttttagtttgtctctaattgcatgcatctgttctgtgtcatctttaaatcaagttgttgtttgctttaatgtacgtgtgtgtatttttttccccttgataaagagagccagctagcaagtaggcattccagtattattcttccatcgtagtactctgggcaaacaaactgctccttcaaagcaagtacgatctgtgttgttcttgaagctaatggcaggagatgcatgcatgcctacgtgagaagggaaaactcacgtagcaagcctccatggtgaatggctcgagccaaaaaaaaataggaagaatcaaacagaaacggcggccgaaacaaacttacccagaaaatcacgtaatgaccgcccagactctttccatcgtcgtttcctaacctttcgggcgtaacaaacctcacccatatcttgtggacccagtcggactcctctctctcgcgtaacaaacccaccgcgtcgtccg

SEQ ID NO: 145515 - DNA, 525 bp, Zea Mays
cacatgcgacccgatcattaacgtcacacaacagacctaagtcatcattttactttatttcatatcatttacataccaaggggtttagggttaattgttgaatattgtgagtgagatgtaccattttctataagtgtgtctacattttgttctttatctaactattcttttaatagatgcacgagaaagatagactaatacagaggcatacactacaacacatgtagctacgtattgcccccatgctctgtgttgtttccttctctatggcctgcactgtcgatgtgcggcgcaagcgctgctacctcctcctgaacccctccgtgtgcacaaggatgctctgccatgctgcccctaggtgctaactccctcacctgaatcgcttaatttttctctcgcctccacccaatctcagatcaagtccaagctgttgggcccactctgatgacccagccccaaaatccccaatcgagcttgatcaaagctcgtcgattccaccggatttgacctcccgccgcatttgaa

SEQ ID NO: 145516 - DNA, 550 bp, Zea Mays
ggcgacgattactgcttcgccggtggccgctccctcatctctttccatgcccggagctcgtcgtccctgaagcacatggtgacctggtggggaagggaggaggcttcttcttcggaggttgttttgcacggaatgcgtggtagagaagggataagacgcacgacagttgcggatggtgcaggtgactatcgcacaggtccaatcgttgtgtgagaagtgggtggatgttgcagctagcgcaggcggttggcgcggaggtcatgggcgggtcgttcgattggcgacacatacaagaatggtggatgcaagaagaaagagaatgcacgaaactgctgcattatattagtaaagatatattagtagagatagagaatatttggaaccactttagtttatataaactaatttcttaaaaattggatgttttcaaacagactctaggtttggccgttgtaaattttcatgtttcgttaaaattggttattatggacatgtttggtatgactttagaacaaaactctaataagaagctggtcaaagtctgtcaaac

SEQ ID NO: 145517 - DNA, 481 bp, Zea Mays
cggcggtcggaggaggaagaagagtactggcgcggtggcttggtgtccagcgccgtggcaattgctccgacgatcaacggggagccactaaggcttacgacgatgcggtggaaagttagagccacgcggcggacgccggtgatggcttaacggcggtgagaatccttatccacgggttcggtgagcaagggggaggcacggcggcgagtcaccggagttatccttaggcgcatggcttttacctggcggccttatctagtcactggtggcgtaaatctcaacggcagcggcgtgaattgcggtggagatcggtcgtcggcggtgagattgccgcgctggcgttctgctctgcacaggcactgtaccatggcaattggcattcagtcgttctgacagaccattctttgagcttgattttctcccagattcatatggcaacacaaccagtgatctgcagcaatattgtagtgctataaaccag

SEQ ID NO: 145518 - DNA, 407 bp, Zea Mays
agtgtatatgcatggaaaataaaaaataaatcaaatagataaaggaatcctgttaatttggactaaaatatctcattcgtacttctcgtacctaactaattcaatcgtttgtcgtggaccatgaagcccaacagagcgacaaagcacatctcagtcgtggtcacatcttgcagccccacgtgccatgaagacaccaacacctcctccgttgacaaaacgtggctccgcgttgcagctaggtgcctagacttgaccgactaactgtcattgcgttgcatctggcctcgttgttgcgttgtatgtcgtccgtcgtccgaggcttcaatccaccgtagtgagggcgtcaccacgtgccaggacagacaaccaggggcaaggtcgcatcgtgccaatgtccaagcctaccc

SEQ ID NO: 145519 - DNA, 894 bp, Zea Mays
tttggaaactggggtcctaaccgactagtagatttgtgatgtgtgtccctgtccggatgggtaaatggtgatgcaagaagacacaagagatttattcaggttcgggcaagagaagaccctacttccagcgatggagggaggtttgtattatcttgcacctaagtgttcatagtaggggttacaagcagtcgagagagggagtctgtcccaagtctcttgagtatgattgaggcagagtgccaatatcggaggtgaggagagttgtgtgttgtgaagtgtgtcgcccccacccccccgttgaaggccctgagttcctctttttatagtcgcaaggaggaggcccaagggtacaagggttgatgcgcggttgttgtggtcagaggagacgcgtccgagccctgtagcgacatgactggcgggatggcccttgtcctcgtgtccgagccctgtagcctgttcttttgacggggtagagagccgaggctgagctcgggagcatggtcatgtgcccgagcccagcctatacatgggcacggatgtcgagttggagtagttgtcacagtgcttggtatggtcctccacaagattcgcggaagaataggtggcatttaatgcacgtctgctggggcagttggccgaggccgagctcgggcgaggcggagatttctcccgaagccgaggcctcgactggacgctacgtgtggccacgcttggagaggttgaaatagtggccagagtggaggaacagtgtccggtattcgcaccatgcgcatcatcgtgggcggtaaaagtagattagactgtactcgtgtcttcctttgttgactttggcacctcagcgaggcaggtgaatgtacgaacacacattccggaatcgaagtggttggctgaagc

SEQ ID NO: 145520 - DNA, 372 bp, Zea Mays
cttcatattccaacatcctaacagtacactaacatattcaccaacggtcttccatctttgcggaattcatgaccagtctgaatgttcattccaccgacaatcggattgtaggggcatgctggtaaagaatatgcccacgaccgcatggatctcatcccatgtgtgcgcaggccagaatagggaagagagatcatcaattaggaaaaatgtgggttaattaggcaaggatctgcagtgatttgggggtgtttctataaaccatgtgcagtaacttctatatatatgtagcctatacctttcaccataatcaattacttttctagccacatacatttacaatatatatatatatagggcggatctatttgtcac

SEQ ID NO: 145521 - DNA, 640 bp, Zea Mays
gcatgggaaccacccgcattaaagatgggcaagatgcccacctgttcacactagtggcaggcatcatgtgcagtctgcaaggtcttgggcacgccaataacccgcgtgttaccaaggcaaaggccattgacccactgtgtcgcacgtgggcaaccccatcatgatttctattattcccgctacggaggtaggcgacgaagacatgcggaggggactggacgacaccgtccacctactcccctacgcaagttgacaagataacctacgctgcaacctacaccagagccttcactcacacgctgacaagacgaggcaaagacgactctggccagaggagcccgcatggcgacaaagagaagattttggtccaccagctctttctatcgctccacgcttatatttttagtattcatgggccaacctgtcggggcccagctcccttgtacgtgccccttagcctataaaggggggagaaccctggaagctctcttgagctcgcccgggaagggactcgaactcccttggaggcatctcaatccagacctaggctttctcaagctctcaacaatacagcttacaatggagtaggctattatactccgacggctcgaaccactctaaatcctcgtgtcctcttatg

SEQ ID NO: 145522 - DNA, 384 bp, Zea Mays
tcgatcgccaatccaaggcaagtttttgctgtattatatacatcttttttaagatttatgaaacaaatggattaggagtgtggtgatggattcttactattttttctgaataaccagccgaagtgcaggaccaacatttttgatgcaccgcgccccgtccctactcctcggcccaccattaacatccaacttccatcgatcaaggatatgatgtcaagtaagatcaaccagctcccaccctgtcagcatactaaattcacagagaaacttgctggatatgacttggaggttgacaaggcatgcttagccataaaagacagccttaacaaaattgttgagaagcaatatgatatagcagacaactttatagagctgatcgacgag

SEQ ID NO: 145523 - DNA, 489 bp, Zea Mays
cttggctggtcttcatttcgctttgtgcttcaatgcttctgctgactagacttgcaattcagtagctatatttggctttcctttgatctctatcgatatcttctttctgtcttaacacattcattacgtatactgtatggatgtgactgctttagaaaatctattgaaaaatcctggccgtcccccacccaatgggtgttttccaatgggtgtgaccaagggacgtcttggtacgcaaagcgtttagcacattgtcctagagtagtaacttgacgtgaccgctgggcgtaatcatattgcccaagcagttgaccttagtccaaatggtgtcgtgttacgcaaagcggcgtctgctgcctgactcacctttaggcgatttgaattgcttattgaatacttgcgactgtttggtgggcgtggtaggagatgaacagttgctaccggcctctataaatagcctgtttgcttcgttgttgttttcacacatcc

SEQ ID NO: 145524 - DNA, 398 bp, Zea Mays
tgccttgctgccgccttcccttgcttccccccgttcgccgcccgagaagaaaatagtagccgcagctggtgaaatctgactcaccgtcgacctcgccattggtggtgtgccaaggagttctctggacagggtgtgggcgggcgcatccgattagcgctagagttagccgctaggacaccctgaattcttcgccggacaaaggtctccgccgtgctcggtagattgtgggcaatacaacgttaatctgggtaacaatgcctctctttcagtttgccatgacctgtgctacgttttttgcctagccgtacttcgttgtgggccggggttggtcgcgtgcgtgttatctggcgagcttcgccgtgggaggatttggtagcgccgcggcagtgccggccggg

SEQ ID NO: 145525 - DNA, 498 bp, Zea Mays
cctctccctctgcccggtggggatgacctgtcggcgctagtttccttcgcgcacgcgctatactcactctgtctcgcgggcctcgcgcgtcagcgtcggctgcctgttcgctcgcccgctctcgttggtctgtgggtcccacttgtcagacccatccctcccgaaccgctcgtgtgcacgacccgcgcgtcgccatggactccgtgcccacgacgcacgctgaggccacgcctgcccctccttggccttttctagctaccccatgccccactcactctccctcctcacccactcgctcgctcacacacctcagcacttgcctcgcaccgcgcgcgcacccagggagctccaccaccgtatgtcgttgcctcaggcctgttccgcggccaccgtcgcatccctgtcgtgtttgttgccccggagagctccgcctcgacgtcagcaacgcaggacacccctaggttcgccccttccccctctatcttccactactcgcgc

SEQ ID NO: 145526 - DNA, 286 bp, Zea Mays
aggccccgggccatcttttcggtatgttggcaccgggtagcttgcattagagcgggcaatgaacccgtagcagccgaagttgttgtggtattgttctttgccaatagccttcgtctcgtacaaaagctcgtgcatactgctcattgggaaccggagacctgctttcaggaagcttcgataaataacaacttcgttttcctgaggagcaggggcagtgttgtctcctccaactctgataatagacatgtcgtgaaaagacctccccctcatggcgtcaatatgactc

SEQ ID NO: 145527 - DNA, 594 bp, Zea Mays
gaatccacctgtcactgatggcagtttgggccttagagtgcgaccctctgctaaagaagttagtgccttggttgcctcgcttggggagattcctgatgatgaacgtcaggtccactttgaggtgcccctgaatcctagcgatgcggagataagtgctatgcttgatttgctggctgaggactcttctgatgctgctcctgctgggacatcggtggtggcgcccctcctagaggctgatacaactttggatactcagaagcctgccagtactcgcccgaggcgcccttgccgagccagtcaacctgatccttctgctgatgagcagaaaaagaaaaagagacgcctccggcgagtatccagtttggatcgggatgctggtacttcggttcctgctgttgaagaaatgcctgtgattgaatttactgatgctgaccccaatgggtgtacccaatccgctgctgatcccaatgggggtgctccatctgttgctgatcccaatgggggtgctgcctgtgttgctaatgtggacgacgaggaggaagaagatgaagttcctttgactcagaaaaataatcggcagttcatcgctagcgg

SEQ ID NO: 145528 - DNA, 994 bp, Zea Mays
gcccactctctgtcgcatgggaacacggggtcagtgactcacctcacccgcgctagctcactggcgcgtgggtccgatgggtggaacggtactcgcgtgctcggcggactcgtgtgggcgctgtgctgtggggccaaatcatcaacgctcccttcttcctcgggtcgtgacaacgggcgtggctttcatacgtgcttgacggatctcaccgcaacgtccggcgcaaggttcgctcgttcagttgggttgttgaccgtataagtgcgtgcgctcggtgccgagaccactcatcgccccacctggcctcatccgcgccgccgttaggtttttagtgcgccaccgcgggggaaatccacagccgagtagtcgtccgccccgttgaagtgcacaaggatcttcctcaagttctgggaggggtgtgtgaggccgcgctactcgtgatcgtccgacggttttgctccaattcctcgccgtcgtatcgcacaccgcctggatccgccgctcgccgtggccgagactgtctgcgacaaatcgtggggtaagcacacgttcaccgcattcctcttgcttagggtatcgagtaggactcctcggatcacagcgttgcgcgatttgctgagctttgggatgtcccaaccacggcgccgccgcgccaggtgctccgccgtgtctgttcgccgggaagagcaggtgatggggagcgacgcgttagaagtcgtcgatcttaggattagcggttatgattagatcactgcttaccccttcgcgcttaaaatctgatccgttggcggttcatccgagggcttgtgagcggagaaaacgtggttggatctggggcgtagatcttagatcctgtgggcgacgtagcgtaccggttcgtggccgactagttttaatctggatgctccattaggatcagacggccgggatcaaaccgcacctattcgctctggcacaattgcataagagtccctcgggaagtaggaaatagaac

SEQ ID NO: 145529 - DNA, 352 bp, Zea Mays
cagcctcgctgacaacgcgctcaccggcgcgttccccaacgtgtccgcgctcgccgtgctcaagatgctctacctgtcacggaaccggttgtccggcgccatccccgagggcacgttcggccccatgcgcggcctccgcaagctgcacctctcctccaacgagttctccggccccgtcccggagtccatcacctcgccgcggctgctggagctgtcgctcgccaacaaccacttcgagggcccgctgccggacttctcccagccggagctcaggttcgtcgacgtctccaacaacaacctctccggacccattccagcagggctcagccgcttcaatgcaagcatgttcgca

SEQ ID NO: 145530 - DNA, 606 bp, Zea Mays
ttctggtgggtcgacaccagggcaatccatgtggtgtcgagctcgtgttccgtccaagctaagatcataaagatcaaacggacctctgggtgagcttcaccagcctataaggatgctagaacataaacttgtaggggttaagccataccacaatcgcctggccatgtgaagtcgatgtgtgggcgaggtggtcaccagtcatgctcagtggcttgatcaatgaaactgggcgcgtccaggatatagtttggggaagcagtactgctaatggaagctactcactatggttaatggtcgaagcatggatcactgaactggctcctgccttcttccccccggttgctctttaaataggcagtgaaaagatccgagctagctggattcttgagcttataggggggataactatgtgcatggggtgtagtcgtggctcacccaagaaagcccacgccggtgctgcagggtgaagaatatccatggcaaagggagggggtaaggataggaaagcactgtagtggatatttctaccagtgatatttcagctgatggcctgattttgaatatctctgccctcccttatctctaccatctcccatacccaaatag

SEQ ID NO: 145531 - DNA, 396 bp, Zea Mays
aacgccgacgcaaatccttccgctgagcgccggcgcattccatccaagcaagtggtataccatttcgagcactcactcagtttgggtgtgcttgggatgaagtcacaaggccatggaaaactatggcaacgcaaagcggaaaccttgaaggcaaaggggcatagagagctcgaagatgaaagggcaccgcgagtgggagagaagcaagacatggctgctacccgaggggtgaacccctttttaaaggcagatttccccactcgcaccctgaagcgtcacgggcaaggtctcccccgatgcgcaccagggttcccatcctatgacacgggggccaggcctcacatgtcatacaagctggcccgaagcgcgaagaaggcgaatcgtcgcacaaggagc

SEQ ID NO: 145532 - DNA, 281 bp, Zea Mays
ccttaagtcccttgataattacgcctgttggtgtgattaggtgttgttgttatgcagtacaccctcgttgatcatgtcttgtctgacccttcgtcagacaccgattcatggtgagatcagatggacaacatcatcatttgctggatctccgacaccttcgtcctaagctgcgccagatcaccatggagcgcgatggcatgacacaccacctctagctcgctcttgagaactagtttctcaggaatcttgagactgcaccctctagctcgacggcaccttcc

SEQ ID NO: 145533 - DNA, 925 bp, Zea Mays
cttagaacttcgttcatcaaacgcataaaggtgcttggagcattagtcaattcaaatggcataaccaaccattcatataacccaaactttgttttaaaagccgttttccattcatcacccagtttcattcgaatctgatggtatccactacacaaatcaatcttagtgaaaataatggcaccactaagctcatctagcatatcatcaaggcgtggtattggatatcgataccgaattgtgatgttattaatagcgcgacagtcgacacacatacaccatgacccatctttctttggaacaagtaaaacaggaactgagcaaggactaagagattcacgaatgtaacctttatcaagcaacacctacacctggcgctggatctccttcgtctcatctggattcgtacggtacggggcgtggtttgggagctgggtgccggggatgaggtcgatctggtgttcaatgccgcgaagcgggggaagacccggtggcaagtccatggggaaaacatcagcatactcctgcaaaaggttagaaacagcagggggaatatccaaaggcggggtatcatcaagtgaaacgagcatactagaacatacaagtgcatagtagggcaagtgagtatcacgtaggtcatcaaaatcagcacatgtagcaagtaaaacagaagcatgcaacttgattaggggtggatggcataggtgcatgttgctttgcagtttttgaagcccgagcaagatcatcttttataatttggtcaggggtcatgggatggataattattttctgacccttaaacatgaaagaataatgattcaaacgaccatgatgtaaactatcattatcatattgccacggtctaccaagtaacaaagagcatgcttccataggaataacatcacaatcagcataattgttgcagccg

SEQ ID NO: 145534 - DNA, 504 bp, Zea Mays
cccggaggcgcttttctcgtagagtgtcccgttgataatcacgaaggattttgctttccaggagagctgcctggctgcagtcgtgtcttcggataggaccccgtcagtcagtcggtcgatgaggggctgacgccagtctagctgatcggtcgttgccaccacctcatcggtgtgagccgccggagctgctcggtcatcagcttggttgtcctgctctccttgcgccctcttgatcttcatggagggcccatagaggtcgatggtgaagaccccatccaagataggctttcgtcctaacgtgatggttgaaagcttgtctgcctcggcgttgaagcgtctgtagctatgatgtagctcgaagcttttaaacttctcttctaccctttgtacctcaacgtaatatgcacacatccatgggctgcgcggctccatcgccttcatgacttggtcgacgactaacttggagtctcccactcactaggagtcgcctgacccccacttcga

SEQ ID NO: 145535 - DNA, 1325 bp, Zea Mays
ctaggaatctatggcgtggtgacttgtgtcggcactatgccaagccagcaaagaatatgcaacaagctattaagaactgccctaaagattttccacaagctgactgggagtggttggttaaagaacatttctatagtaaggagttcattgtaagtgctatactgctgcccattactgttcttaattgtttactgctgagatgatgttgttaacttgtatagtaatctaattattcattgcattctaggcaaggagcaagagaaattcaaaaaatagatctaacttgacaatcctccatcacagtggcagcaaaccatttagaaaagtaatttatgacaatgtaagtatttgacattttatctcaacatgttgattagttttcttgtattacttgttagttttgattacatatgttccatgcatatactagggcggaaaggataacaaccctccaagtttggatgccttatttttcatgactcgcacaaagggtggtagttttctagattctgaatcctccagcaagcatgtgagcttatgaagtcatatatatttctgttttttggtgatatatcataatacaaacctctgaaattaaggtatctttgaatgcaggcacaacttgaggaacaaatatcattagatccttctctttctaatgcagaacttatggataagtgcttcccttcaaagagacaggatcacattgtcggatatgttggtggcgtgaaagcaagacaccttagaagtccatgcattagtaaggctgaattgatagaaaagttgaaatagtccgaggatgagaaaagaataatgcaagaagaaaatagagagctacgagaagaaaataaagctacaaacagtcgtatgagccgtatggaacaggagtgggaagaactaaagaatagattaagtagtagttagacaaaaagtcctagtgtgagcattcttgtaaagatttttcaaattttatactatatggaaatacatctcatatgtaataatcagatttgttttggttaatacaatttatacttgtttcaaatgaggttcatatatgagctatgaagtgtttgttggtgtatgctgaaatgaaatgtagtttcctgtctttgatatatactattaatgtaatatgattacagatgcagttttcaatactattgtaagtggacgttaatgttgacatgtggttgttaataggcatggctattataactaaaaccaaggttgttgatgcctcatatgtggtcgctaaaagctacaaatttggttgttgatgctttttatgcggatgttaataccccacaactaatgaccattat

SEQ ID NO: 145536 - DNA, 414 bp, Zea Mays
tcaccgagttggagtaagtaggcacggatgccttcaactgaggacaattattcttgtagtgactggggtctccgcagtgctaacagacattggctggaggttggttgcttgcaacggagggggtctgaagggagctttgaccctgctgactgaaacgtgacggggtgggtccagctggcttgttgaagcttggtcccttgggtggaaacccaaaggatcgaattctctggtgcctgtcctgctgctgagctcagaggacctagaactttctcttgaggtgacccttttcttcttctttagccctttctacttgtatggccttgtttgagagatgcgagaagctgatgaagtcttggctggcgaggatagtcttgagttctggtcttagcccttcaagaaatgggccatcttctt

SEQ ID NO: 145537 - DNA, 598 bp, Zea Mays
aagaaatgagctgtcttggtcaacctctccacgatgacccaaatagaatcatggtgtcaggaggtattgggcaatcccacgataaaatccatgcaaatatcctcccatttccaagatggtatgggaaggggctgtaaggtgcctgctaccttcaaatgactggccttgactctctggcaagtgtcgcattcagatatatacttagcaatttcccttttcattctggtccaccagtgcaaggatctgaggtcatgatacatcttgttactgctggggtgcatggaaaatttggaaaggtaagcttcatccaatattttctttctaagctcggggtccttgggaacaaccaatcggtctccaaaccatagaattcctttgctgtcctgacggaagcatttgtatttatccaccttatgttcgatcatttccttaatcacctgaacacccttgtcactgatctgtgccatgactatctgctcatgtaaagtgggctccactgaaatataactcaaggcacctgaggagacaacttctaggttcaatttgcataactcatcacacagggtggtgatttttgcatccatactcacatagttgc

SEQ ID NO: 145538 - DNA, 835 bp, Zea Mays
gacttatttatatgacttgccttctcatttcccctagccttccactgcaaactcacattcatcacacactctcgtcgctggacagcgttcatccaccaattcaacgtttgcgccatctcagccttctgtcgtttccatcatggcttgaagctgcagataaggtatggtttctcctcggtcctcacacgttcgtcaagtcctgcaagcagcagatgagaccccacgtccgagtccagcagcagttctgcttggatacttgagattcatgtcaccaaatcaactcggcttaatatccgatttcatctgtgcagagaaagctatgatatgtgtttgctcgttttctgaacatgtgtgttttttactctgtttctccaattatttctttttttagaaaggacggtaaaagctttgccgcaaattttattggatgaaagaaaggaaaataaactgtacaaggaattacagaggaacaaccacaatcacgcgtcacgccccactctactgaacaactcaaaaggcctaaacaaaagaagtcaggcgtgcgctccataattatttcactgcagtatttaggagaatatctgttgaccttttggattcaacatctgagattccaaattaaagtagcaaataatgttgactgacagtctgacagaggaggaaatctttgtgaagatttgttaaccagactgattgtaactgtataattcgtttcttagaattaaattctatagaggaaaatctaggattcttaacacaggaaatcatctttggttgtatgtggtagtggttcccatgacatatggttgtgaacagaacatcgtaggcaagtgta

SEQ ID NO: 145539 - DNA, 563 bp, Zea Mays
tggtattcctgtcctcgtacttggcgaccgcgaacacggctgcggcgccgaggaggcggatctggcgctcgtcacggctgatcttcttggccgacaagaaccggtcgacgaaggagaccgcgcggtgcagcgctcccggtgcgaggtcgtagcttgtgcagaagcgatgcatcttctcgacaaggtcggcgcggtccatcatcagcatctcccctgcctgtcgattgctgaggtagtctggcgacggccgctctatggtctctttctccatggttcggagcgtggcgtcgatgtcggcatcgtagtcgtattgtggtggctgctgcttcgtattcgtggcgaccgcgtcgacgtcgtccgtggcatcgtcgccgtagctgagcggcgctgcaagcaccaccgctcctgctggcgtcctaggggacgtgttagaagcatacatcgggttattgggcacatgaggaaagacagcgacctccacgtgcgtggccatcgtcttcttcttcttcatcacgtcgccgccgacgaggcagcagggaagaacgataggaggtacggtgcac

SEQ ID NO: 145540 - DNA, 657 bp, Zea Mays
gggttactgtgtcaaggttgaagaggtgagcaggtttggtgaattatggtcaacctgttagcattggaagttaggtgtttgagaggagtcattagggagggttcagtcgagttatttgtttcagggattgatcagactctgaaaaagatcttcacccatgccgtgctccacttgtgctgctctagctcgaattgaggataagaacgggggcacgaggggtactaggggtgaggagtttgacgtggctgacgcctgagtcgtgagcagcatgtgagttatccacgccggtgactcacctggttgtttatttctggtttgctcgtcactgatcctgcctacatggcttcggcctaatatcgagcgtgcgtggtacatatgcatggacgccatgtaaacatgtcctagcagctgctaacaacgtaccaccccaatcctcccagatctagcctcaccttgagctgtgtctggcactgtctttagctcagtgtcgctgctgccttcgggtttagcaaaattcaccgtgcccgcgagttcatcacccaaattgataacacactatgcttcgccaccctcttgcgcttgtgtaaccacaacccagccgcatgtcttcacccgagccccctgagaggcgtcttgccctactgttcatcgccgcgc

SEQ ID NO: 145541 - DNA, 572 bp, Zea Mays
cccggcagccaccacccaagccagtagcccatgccctgctatgcccacaacactgttgcggagtgcagctgtcgctaccagtgcatgaccaacgcaaccgatagctcggttgagtggcgcgtcgaagtaggtgacgggggacttcgggtcgtcgtcgagggagctgtcgtagccactgtgtgggggttcatggagcacgcacttgacggggacgaggatgtcgacggcgccgtaggcgttcgggtggccggatccgtcgcggcgagtgtactgggaccatggcgactccagagaggggagggatgcaggatctgcgccgcagaggtttgaagatgctcgatggatgagtccacatgggcccgccagacgtcaaacacctggacgacggattccagcgcagcgacacgaactccaccatcttcttcgatttgacacaacggggagtcagtgttcacatcggcggcgacggcataggactccaacgcgatgacgcggggtgcccgagcgccggtatcgcccttgatctgacggatccgcacgtctgtagccgcgtccgagtcggtggagatgag

SEQ ID NO: 145542 - DNA, 328 bp, Zea Mays
agcgctcatatgcaggccaggggcttcggtagcccatatagcattagcatgtggcgcgggttcactggatggaaagccggttttgcctcctcataagactgaataaattgtctctttcatctctaagactatctctagcaacttacctatcccatcgtctatctcataatttactctgtaaacactatcatctatagtgtcgtgtcaccgatccaccaaagacaccctaataatcatcaaaattacttctctatccttgctcttcaaggcagtttcgttattctaatttaaaaattcagtaaacacctgatcaagttttcaaactatg

SEQ ID NO: 145543 - DNA, 335 bp, Zea Mays
ggaaaacaagagttgtgagtttggagagaaaagaagggctgccaactagggacaggctagaagtagttcatgtccccgatataataccactccaagtccaccagctcgtggcggttccgagcagcaaactcaaccgacacaaacagttactcctcaagcaagcaccccagcatgacccgttgctcctaatacatccaccagcagggcatgcttcaagtgtggacaatcgggacactatgccaactactgtcccaacagggccgcttatactacctcggctccaatgaagcaaggacaagcctcagcaggcaagagtcagcccttatcgatgaacc

SEQ ID NO: 145544 - DNA, 486 bp, Zea Mays
ccgcgccgtcagcaggaaggcgctggccgcctcctccgcgggtgacgatgcgggcgccgtcggggaggggcaggcgattcaggtgtccgccagcgactccgccggcctcacgacgcggtgctgcgcgttctagccatgccggcttgtgtagattggcagtgatcgtcagcaacatcggctattcttcgtacgtatagatggaaaaggggggaaaatcaaaatgtgatgttcaagggaaagagcaaaaggattgggctgcttcttcttcattgtcgttacttgtctgaaccactgtcaacggctggattattcattgttcaactgtcctaattccaacagcgagtacatttcataagaggttcctaaatttacaaatttaaataatagtaggattatatataggaaattgtaactagactaagtcctcttttttcttatgagtactaagttctaaatttttcgtgtctttgtctgagtaggatcaag

SEQ ID NO: 145545 - DNA, 473 bp, Zea Mays
gttgaacaacacgcgacacatggggcaaggccttcagcagggttggccgatcctccactccagttcaccgtcctgatccatagccatgtggacagtaagaacccgtctggttgggtgaccctgtctccactagaactcgcaacagctcaggccgtagaactggtgagctgccacgtcttggcctttgcagcctggacgagattgttcccatgggatctaggggaacaaccttggcatatgttaggttctttattttatttgcaaataaattaaagccgagatgtaaaaggcttctagttagggtttcactttcacgtgcatatcaagttagacagcaaggctgttgccatgcaccccattacagctcgaggacgagctgtcttcgaagggtggggaaatgtcatggggcggcagcccagagcatggaggccatagagataggctcagggttaggattagtggataaagattag

SEQ ID NO: 145546 - DNA, 271 bp, Zea Mays
cagggccttaccagcgatggggcgccgacattgttggacgcggtgtggtggattcgtggcagaagcggggtgtccggcgagaaattgcctccggtttcgtggattagcctcctaattgtggttacgcccggcttccctggacgatgacgatcttactcggcccctcgccgaggacggaaaccacacagtgacgagaatcacctacggcggctggtttacctccgtgggcacggcggtggcttgcagcgggggtcagtggcgggtatgtggc

SEQ ID NO: 145547 - DNA, 399 bp, Zea Mays
cttgtatagagaaactccagttcaaatcaacgtaaagacacaactttgcagcatgatatgtgtacatgatgcgattgtttcacctcttgttgggcccttaatgattagtcgatgtatgtgttgatgtcgtgttggatttttctccatttcaaaggtccacccttttaagcatgtggaatttggatacatatgtactttcaaggttggagtctaacttgaacaaggctaataatggatacatcagctgcaaaaatgttgcatggaatctacttcctcacactgtagtacacagcatgcatggcatttcgtattccgtggagaggacacatgcatggacgctttcataccaagtagctttccccgacttcagagtattggtatatgtctttttcccttgtt

SEQ ID NO: 145548 - DNA, 908 bp, Zea Mays
cgggtgaccaagggaatctctagaggggtagagggaatgccatgcttttccacaaaactagtggctataaaagaatgggatgctcctgaatcgaaaagtacgatagcgggagtaaattcaacaaggaactcaccgagcactactcccggagcttgctgagcctccttagcatcgacgtgattaactcatgcccttccttgatactgggtcttgttctgctggctaatggaggagggcgccttgggggcggatgcagatgtattcttggggccattcatcgagttggagtaggcaggtcctgatggattcagctggggacagttgttcttgaagtgactgggatctccgcagtgccaacatgcattcgccgggggttggttgcttgcaactgagggggcatggaaggagctctgactctgctgactgaactgtgacggggtgggtccagctggtctactgaagcttggtcccttgggtggaaatccaaaggatcgagttttctggtgccgatcttgctgctgagcccggaggacttgaaatttcctcttgaggtggcctttttcttccttcttttccctttccacttgcatggctttgttggagaggtgagagaaactgaggaagtcttggctagctaggatggtcttgagttctggtctgagccccttcaggaagcgggccatcttcttgacttcgatactgacgtcatctagcacgtagcgggccaattccgtgaacttgtccacgtactcgctgacagatcttccgtcttgagtcagttcccggaattcgtcttccttgagctgaacggtcccttggggcacatggtgctcccggaaagctatttcaaactccgcctaggtagcatctctgatggtgacattgaaggtatcccaccaagctaaggc

SEQ ID NO: 145549 - DNA, 281 bp, Zea Mays
ctggggtagatgtcatcctagggatgaattggttaatgaagtatgaagcaaatgttagctgtgacaagaggaccgtaacattgaggtccccgtccggagaggaggtagtggctgagctaaggatgcctaaaacagcggagggagattgccaccagatttcggttgatagtaaggaggccaacccgcttgaggctatcagggttgtgtcggactttccagatgtgtttcccgaagaactaacgggcatgccacccgaaagaaaagtcgaatttgctatagag

SEQ ID NO: 145550 - DNA, 308 bp, Zea Mays
agctagtcctcgaccacccaatcaccaagtcccctaacacctttgctttacttagtcaacacaatctacttatccatcttgtcttgcacttatcagtacccctaggtgtcacctacctcaactagtcctatggcttctctagtcccttataccaagtctcaatgtctattctttaaagctcttagtccatcaacacgagcccaatcgaccttcaacatcattgtaggtcactatctctattctccacacttgcacaacacaagccaagagacattttgcatagcaccacactcacatcatgattagtc

SEQ ID NO: 145551 - DNA, 338 bp, Zea Mays
catctgggccagcggagcccggtcccatttttagaaacgaattaccgagacatgcactcaagccgccacatactgcacaaaccctaaaccacctagtcggaccatccgcatactatgatggacaatccgcatacaacaacgaacggtccgaccatatggccggacagtctgcacacacagccgtacggtccgtgtatttaaccggacggtccaacgcagagttttttgaggaaaattgttacccaaatcctcatccatcccagctaaacttcccgtcatatcctacaacactcgagcaccataatatagcatgacaaacacataggagtgagtacttt

SEQ ID NO: 145552 - DNA, 327 bp, Zea Mays
catttcattacttcctccaccttggctggatctaccgcaattcctccattggtgataatgtgcccaagaaaaggtatcttatccaaccagaactcgcatttgctaaatttagcgtagagctggttatccctcaacttctgcaacactagcctgagatgttcctcatgttctccatcatccttggaatagattagaatgtcgtcgatgaataccacgacaaacttgtcaagatattccatgaacaccttattcatcagattcatgaagtaggctggtgcgttagtcaagccaaatgacatgaccgtgaactcatagagtccataccgg

SEQ ID NO: 145553 - DNA, 378 bp, Zea Mays
cgaagaagtacgccttccatactactataggtgtccttgaacaaagtggagcacactgtagatatttggggtcacacacgccatggaggtttggagaagtggcatgactggtacgcgatcattaatattgtctttgactacgtagctaggtgtgtgagcaccgaccaaaatgccactgagatatttttggagcatgtagtaatggatcctggtaacgaggagacggttatgggcgtctatagttgtgcccgcccagtcaggtacaacccgcatgtcttctaactctgccatccccttgatcgggtacgcagcatggtcagaagggcgtgtggctttcctggaccccattgggggcgtagggcctgacggagccaggtg

SEQ ID NO: 145554 - DNA, 451 bp, Zea Mays
gtacttgtaggtatgctgacgtttgtggccctttaggtgttcttccctcaacctatcactttccatctgaaaacctcgtgtttaccaaacatttctgcagcgctatatactgtggagttccagaaacgtggcctaccccacatccattgccttgtttggctggcaaaccgctccttcgacttagatgcctccactattgatggatttatctatgctgaggtacctgatttcatgactgacccattgggatatgcatttgttgacgaattcatgatgcacgacccatgcggtgaacacaacaaaagatgcccttgtatgaagaatgacaaatgctcaaaaaactaccctaagtccttctaggctgagactatcgttgacgattttggattcatgatctataagagacgcgatgatgatagatacattgttaagaatggagttaagctagata

SEQ ID NO: 145555 - DNA, 559 bp, Zea Mays
ataaaagctatgaagatacctggagaaggcagttagagtttaaggagggtgatcacatgtaactagaggtgtcaccgatccagggtatgaggaggtttaaagttaaagggaggttgtcccctcgctttattggacccttcatgatcctaaagcgagtggggtaggttgcctaccaactagaattacccgaccatcttgcggatgtacatgatgtcttccatgtatcctagttgaagaagtgtcttaggcccgaagagcaactgcctatggaggagcttagtgttcaagatgatctgacttacactgagtatcctatcaagatccttgatactttgacttgtgtcacgaggagtaaagtgatcaaaatgtgcaaagtgcaatggagtcatcatggtgaagatgaagctacttgtcatggaacctcccaaggtattaggcccacctacagatgtccttgtcataaggacctcagacagtcatgtaggtgtgcataatggctcgacaagttcggttatccatatctccatcgcaacgcccaagagcacttaacccatcacgc

SEQ ID NO: 145556 - DNA, 305 bp, Zea Mays
tgaatattacctctttttttatatctcaaatcatggaaaatgttaggccaagttagcatataaaaatgatattcacgtttttgccacctttacatcgcagatgcatctgaaggagttgatcttggatggcactgacatctccaaagcaataattgactatgccactagcaatgccatcacagacattgtcgtcggcgcatcaactaagaacacattcatcaggtatattacctgctcattcatcttccatggtcgcgcgcctttacatttccatgatgcctatactgaaaacaggcatgatcgct

SEQ ID NO: 145557 - DNA, 692 bp, Zea Mays
ggtttctgttagattttgtgttgtctagtactctaggccatagtcacaggaaacagggttgatgtcgtgttccgtggcttggggtcatcgtcccaaatggtgggttgagatcaccaagggtcatcatgctgaacgctagggagtcgtcgtacaagtgcaaatgggaacgatgaccggtgctcgttcgttgacagaggaagatcatgcaggttggggcagggcgccacagattaggtcaaggcaatgcagatgacgaccgagcgacgtgtatggtggtgaggacagggatccttctgtggccagcaagaggtggcgctctagcttcctgcgtcgacgcttctgcatcgtgagctctatggctcccatgtgcgtctagggcagaagtaaagggttccattgctataatgggttggtattaggctggtgttaggttgtgttaagctggtattaggctgggccactgggccatagcacatagggttcttgtgattttggaacaagaccctcgagctatggaatcgacccaggattatcgacccattagacttgggctcacgtaccaaactcacgattcacgtcccatagaggtatacctccccttgtaccatatttttttcaagtgtcgacccacgacccagtgacccgcgaccctgttccttatcccaatcgatccaggaacattgtgagtatgg

SEQ ID NO: 145558 - DNA, 999 bp, Zea Mays
gtcaggggtcttaagaagcaaatgttgcaactttagaacagctagaaggcataagttgaactgcctactaaccgtctcgccgcttcgaaagaaaaaccttacaattgttcggttcttcaaatgatgagccaatgtatacaaaaaatgagccactatctcctctagggtcatattgcgtgtggcctttagcccaccaacatctctaagcatctcacacaaaataaagaaagttcttctatccatacgaagctcactaatacattttctatcattctcatgaatgagttcatttaaattctccatcctacgctctctatttcttaaccttctttctattctcagacattttcttctatatgctaatcccatgagcaaccagacataatagtacgtgacaaggagagaactcaagatacccctaaatgccatatttcttggtcgagttcttgaggataaatctagaggtcaacaaatgagtttcatataaatctggatatcattatacacatcaaataaattaaacagagcatagaggtaaaatgaatcaaacagctgatcccacagtggaccaggagatagtaaaatttcttatattttggaacacgaaaaatataggcgaggaccagccggtcaatttcatcagcccaaccacttgtgggtgcagtgcaacatgggtttggattgacgaagtgagcttccaatccaaaagaaaagacacatcaagtagatatagatatcaatctcactgctttctcccagtttttctcaaccgtcgcatggatccgtgaaccacctccaacaaatcctcaacaaatcactgctcatccgatcgagagcttcctgctcacgccgcagagcagagttcggtagttcccttctagtggagccgtggcaacgagcctagctagtggagcctagcaatgagttcagcacgccgcagagcagagagcctagctagtggagctgtggcaacgagcagaggccagtgcctagctcatc

SEQ ID NO: 145559 - DNA, 641 bp, Zea Mays
atgagtcagaagcagtactgtccgctgatctcaagtttggggcaccaaggttggtctttgaaagcatagcagaagccgaggctactaggctggaggatgttgatgtactcaaagaagaacggctgaacacggtaattcaatcagcacggtaccagtaaactctgagacgctatcacgacaaggccatgtgatgtcgatcctttgcagtgggagatctcgtcctccgccgaattctaacgggggagggacgacacaagttgtcacccctatgggaaggaccattcatagtagcagaagtcactcggccgggatcatatcgtctcactcagatggacggcacggaaatcgggaactcatggaatatagaacatctcaggaagttttatccctagttgtatttcaaaagctatcgggacgacaatgtactctgtaaaatgggaaatatatcatcaataaaaaggcttcaagaatactcagtttgttcatgatcgacctgcattcttacttaactcgggtgaccactatgccctgctaaacggagcaatcggcttaagtcggcaacgacttaagacggtgcaacatgctcgcgcttacttaactcggggtgaccactatgccctgctaaacggagcaatcggctt

SEQ ID NO: 145560 - DNA, 375 bp, Zea Mays
gcccggcgcgaggaagcgaagccggatgcgatgcggcgccatagttcgatgatgcgacgaaagagcctgtgagcgacaacggagcaggggccagtgagcaacaagcctgacggcggtggcggtggcaggacgaggaaaagcgcgagagcgaatgagaacgcaagtgaagacgcgaaggcggcgagacgacagcaggtgcatgttggcaggttgcgtgtggagggcgaggatgcacagcagcacatccttcggcctttgtcgttttaaacacgaggaggaagggtctagactctataggaagctgcttcagcagttcaccgttgttggtgaaagcgccccttccagagaagacgagaataaagtggcagaggtgat

SEQ ID NO: 145561 - DNA, 292 bp, Zea Mays
tggatctccttttgatggccggatttggtgactatgtaacgtttcgggtagaagtgggaaccgtccgatcgggatcggatgatggtcatcaccctgggattcattaaaccgggaccgtcagatctagatccgaggggccacgctgcgtaccggttcgctcgagttacgatctaatctgggccgtcaacacttgatcggacgtccgtccgcgcaccgtaccccttcaccgagccataattgcaaaagagaccctggaaaatgtttgaatcaacccgccatcctactgcttagt

SEQ ID NO: 145562 - DNA, 739 bp, Zea Mays
ctttagttgaatgaacagataaatgaatgcataatcgaatctcttccatagaagaggggagagttcatcaggatcaaatttaatctatctctaccgaagtcctgactgttcattgtcactatgggctagacgactatttatacttaggacctgttttggtacacatggctagttattagttggggctaaaaactagcccaaataaactatggttggcaaacaactaattaaataattggctaagaaattagcccacctattagctctcctgttttggatgcactagaagtaatttgagctaaaaattagctagctaacaattagccatggtgcccagacattgttagcccgaagacccggcgctgtacgccgtcatggtccggcaaatgagatcgcgcttggaactacttgcaaaacgcacacgatcacgattggacagagagtggagaactatttttggttctgcacaaaaacctgcaacttctctgttcttccttttatacttactgaagaggtaattgattgttacaataatccagccgctaagcacgcaattgacgcgtccatccccatgtccacgctaagtagctggctcactaatctaccactactacatgcatggctcacttgaacaaccggattggcaaccaggtgacgcgactgaaaatgcaggctgacaggaacatagactgaaagttttgaaacaaatacaacaacatgatgaagagctgcagtgcaa

SEQ ID NO: 145563 - DNA, 316 bp, Zea Mays
tacaacttgacactttgagactaatgtgtctgcttaagtgattttgatgcagtctcaaaggtggattgaaagggaaaggtgaatttggacaaagaaggcttccactgcatgacggtatcaatgtactttgttccaaattaccttagttttcattgccttttgttcttcatttgctatttttggtgaggaaatgaggttaggccactagtttctccattttggtgcttaatgccaaagggagagaaattaaggccaaagcaactgggtcaaccatcacttaggattttaaaaggttttgagctttcaacttgacctt

SEQ ID NO: 145564 - DNA, 290 bp, Zea Mays
tcgttgggcacgatgcgaaaatagttggctctggacgagcgactattacgctccctatgggtacacaagtcactatcgaggatgctttattgtatcccgattcaactcgtacccttctgagttttcgagatattcggaaaagtggtttacatatttctactcatacagaaaataatgaggaatttctcctcatttccaaaccttctgaatatggcgctaacattctggaaagaataccttcacttccatccggattgtactacacatacataaaaccagtacctcatgtt

SEQ ID NO: 145565 - DNA, 788 bp, Zea Mays
agtatgttgcaccgtcttaagtcgtcgccgacttaagccgattgctccgttagtagggtatagtggtcaccctatgtcgagtaagcgcgagcatgttgcaccgtcttaagccattgctgacttaagccgattgctccgttagtagggtataatggtcacccaatgtcgagtaagttttttgattccaagtttaatcaagtcgaagtcgatggataaccaatagtttgaatgcttttgagagtgaaatattttattaaagacgtcttttccaattacagaatacaacattgctccgatagttcttgctaagggtaaaacttcctggggtgctctatattccatgaattccctacttccgtgccatccatttgagtaagccgatatgatcctggtcgagtgacctccgacaccatgaacgacccttcccataacggcgataatttgtgccatccttctcccgttagaattcggtgaaggaccaagtctcccactatgaaggattgatgtcgtatagtcttagcatgatagcgcctcagggtctgctgatatctagctgactgaattactgtattcaaccgctcttcttccagtacgtcaatatcttctagcctggtagcttccgcttcaactatgttttcgaagaccagccttggtgccccaaacctgaggtcggcaggtagcactgcctccgaaccatagaccatgaagaagggggtgtttccatgcagagctcgactgggttgagttcttaggctccaaaccacataaggtaattctctgatccactt

SEQ ID NO: 145566 - DNA, 533 bp, Zea Mays
tagcgtgcgcgttcttggttaggatctcagtttctgcggcggcggagtagtagggggcagacggtgattttctgattctctcaccttggtaagtatctagctcctctgacgatttggatctgaggggggggggggggaatggcgaacattttccttccagttattatatgctaccctttgactattgtaaattgctgtgtttaaggcttcttctctgtttgattttaggctctgtggactaaatgtgacctgcaagagctaaaagtggcagcgattgactttcagatgagtccatttgtgctggccgtggtgagcgttgcattcctcagcttgcggtttttgcaggctcatggaagcgggttgcttctgagctgtggctcgaacagcactgtcgatgctgatgggcggagatggatcggcgacataacccctgaggggaattttaccttgagcagccctgggcttgcggcgtcactggtcgggaagagcagttctgatgagatattcggaccgctttacagctctgcccgttt

SEQ ID NO: 145567 - DNA, 448 bp, Zea Mays
gccgcactaagcagggagccagggacctagggcgggctgggcgagccaggggcgctcggtttctgcctttctggcggctggtggtggcttggatgagaggctgagagagagacggtgagagaccgtgatcagtgacttagtgagtggtgactccgtgcgtgactgcttgaggtgagaggactagggttctggattattgaataaagatggacattgggccggccggtttctggtgggctgaaaagtgaaaactgaaaataatttcggatatccgccaggacccacgggtaaaagataaaactcgtacccgacctgattttatcacgggtcgggtatgggtgagacccgcgggttaaatttcgtacccgaacccgaaaccgacgggtcggatatccgtggatatccgaacccgcgggtaaaattgtcatccctatatgtggatctcaca

SEQ ID NO: 145568 - DNA, 368 bp, Zea Mays
tgaaagatgcgagcaaggcagacgatgatgttgatgagatcaagcagtatagagatgcaaggtgggtgactcctctagaagccttgtggaggatatatgactttgagcttagtcagatatctccacctgtgatgcagctgcaactccatcttccaaacatgcacatggtggcgtttcacgagcgacaaatggtcgagcgagtcgtcaaccgtccaggtgttgataggtcgatgctcacatcatattttgaggcgaataggctacacgaggaggctcgtggcatcctatatcgtgacttccctgagtggtacacttggcagagtggtaagggcaaagtatggcaacggaggaaacgcgatatagatgga

SEQ ID NO: 145569 - DNA, 561 bp, Zea Mays
aaaatctataagccgccacacataaacaacaaaggaaggtccggtgaaaagatatctcaaagggatcatggccataatcgcaaagatttggagccaatgagcgcttgaacatgaccacactctgcgatgcctcgtgctcgacgctgagcccaggcgccagagcgtgcactggcgctccccctcgctcgccccgagcgagtgtcagagcagacctgggctgagctcgcacgcgcccttaaagaccaccactagacgcgccacacttcgctccacacctacccctgctgtcccgaccccgtccttagctccgacgagctctgcgccgcccgccaagccagccgagcactcggtcgctgtgaccaggccactccagcccatctccactcgatctcgtccctcggctagcttcgccagagacccatgaagctcccaaagccctcagaactggcagagcttcaccagagaccccgaatcccccctgtcggactttttccgctcaccggcgaacgtagaccgggtaagtctctacgccatttcccaattctttccgtgtaccacctc

SEQ ID NO: 145570 - DNA, 637 bp, Zea Mays
cgacaaagagcatcatctagtgcttttggcctgttagtagcagccatggtaataactttcatgtccgagtcaaaaccatccatttcagcaattagctggtttagagtttggtccctctcatggttaaaacttctacctctatttccacccacaacatcaaggtcatcaataaaaatgatggatggagcagcttctttggcttccttgaacaattccctgacacgggcaacacctcttccaacgaaagcttcaacaaactcactagcagaaacatagaaaaatggaattctagcctttcctgcaactgcccttgctagaagagtgtttctagttcctggagggccaacaagcaggacacccctaggcaattttgttccaagtttcttggagttcagtgaaccatgcagacagctcactatctcaacaagctcctcctttgcttcatctacaccacgaacatcgccaaagtcaggaatggcagccaagcacttatctcccactcccatgtcctggcaaacatcatttacttggctctcacgaacctgaaggaactgaaatggaatcagaacctcatactcctccatgtagccccaactgagaaacaatactctcttgcttgatactgccacagagccac

SEQ ID NO: 145571 - DNA, 1990 bp, Zea Mays
aacattttaagttattattagattttttagataaaggaataaatattcggcttcatctttcaactaagaaaattagaccaattatcacaaaattttagatcaaaattctaatttattcaactcaaaacataattctatattgttcagcatccaaaagaagtaataaaaaatgttcggcagagaagaagacccccaacagcgggtattttagcacacaataaacttgaatccatctagaaatagcacaaaaatatcacattagaaggatcgataatcattttactactaaagcacatatcattcctagttttccaagtggcccaaagtacaaccagtacaaccccacatccaaacatcaccaaatcatcatgtttttactaattttctacctagtccccaaacaaggaatcagaattattcacaaggttacctaatacgctatttgttatgataatggagtccttaatgttccatcgggttcatgataacttctgttttggtggaacgtggtactacgactcttatggtgatcaaccgtgtcactaatccggttgatctcgttaagaaggctaatccatgtcagtgaatcgaaaacacaagaaagaacttgaaagtacacagctcaacaaaaatgctaacaatatatgtatgactaagatcacaaaagtggggttttataaccctataatgacaattattcaaagataatttttaaaagcaaaacttgagtcctaacatgagtagtggctactaattatatatcctaaggctatcacaccccttgaacgtgtcccctaatgggctctaagacaacacatgcctagccaaccaaaaaattgtgacacaacactaacatattttgaatgctgacttatttcgataatttcattaattccggtggaaattagaccttagatcaaaattattagttagcttatgaaaatatatttctattcatatattgatcataaaaaatggattatgtatgtcgtgtatgtctcgcacatctgttttactacaggatggtcctaaaggtccactcagactcaaactcgagttggactaatgcctttaattggtcttgggcgttctttttgatcttcacctccacaccttcaattacttcatgaccctctctaatgttatcaagcacgataacataattagataatctattcccaaaattatcgaaaggatcacttacctttgaaaatttaatcatcacatttgtgctcaagtcattggaccttatataacgatcggatgattagtaggcgcatctgaaggtgtgatgtccttatcatccttcctcaattgaaatggagtcattcttgactcaattcttcatctaaatatggctttaaatctgcaacgttaaagatggactaaccctagacatagattcttctttagaggtacttttaatcctattcccctactttagcaccactgctcagttctacccctctagtagtaatggatgaggcgtttttaatactagagaggtgcaaaactgatctatgacgctaagctaggagcatatatttaaaagtccctacctctacaagtgaatgatttcttgaaagactttgttagcaatgtgaatgtcatcgtcgcttttatgatagggaataaaagttatcacttcagataaatgatcaaccaccacaaaaatactatcccccctattagttctttgcaattccaaaacaaagttcatatatatatatccacccaagaaatagaagaaatgaaccaacatatacaaaccatatgggttcaaccgcgatttagctatttgacatgtcgtgtatcaagctacgaacctctctacatcttgcctcatccttggatagaagaagtatgtgaccaacactttatcttcttgacattaaaatgttccatcaatccacctccatgtgcctcttgcaacaacaaaagacgaacataaacaagtagaatgcattatcggttagctctaaacaaaaac

SEQ ID NO: 145572 - DNA, 814 bp, Zea Mays
aaagtaaccagcagtatgtgagcgtgcgtgcggatcagacagcaagtcgccaagaaggaaggctaggcagcaaattaccaacagtaattcagacaccagtatatttttgtttcttattgaacaaatatgctattgtttttatttatggatcaagcaaggcatgagagattggacttttagtatcaacagcgtgcataagtgggacttcagtgatcacttatacattgcgggcccaacgttattaggaatcaaaccgcagccttcaaaaccatcgtttcagggagcgattcattcacctgggtaagagcacatgacaaaatgattgatgtataattgaagtgccaccatgatatgatgctacttaatgtatagtgaacaatggtgccttgcatgataggtggcctcgcatggcccaatgcatcagagtagcatgcaacttgcaaaaaaaagaggtaccagcatctggaatttctctgtatgattcagacgactcaaagtcctagaccagatcatgaattagaagagatatatattcacagctcccttttaccaactatatcaacacaactatctgcccaagggaaattcttcaacctctacaaatagtagcttcctcaccaggtgtaactcgaatttcacccctgctcacacagctcctggaaccgggccaagctacaagaacaaactaaaggcatgattcatatgaacagatgataaaataacatgtctgtctgtccaagcgagaaattaagattcagtttcaagcaaacatgagttataatctaccacaattttgttagctaccatgtctgcc

SEQ ID NO: 145573 - DNA, 328 bp, Zea Mays
ataacctttattgtttgttcttgttttggtgtttccaatggcaggatccgatgacgagattgaggtagtcattcccacacaattttctgattgtgtcagccgcgaagactttgatgttatttgcaagcgcatggaagaaaatatggaggaaacggtccacaagtctgtccatgatgcgattattgcaatggatcttggcaaagtgctagatagagtggagagacggataaccgagcttgtcgatcgggttgccacgttggagacacgtccattacatcagcagcctcctccaccaccacaaccccagcagcatccaccacggcatcag

SEQ ID NO: 145574 - DNA, 288 bp, Zea Mays
cgggactaactcgaccgcatcattcttcgccgttggccagtaaaaacctgacctgaagaccttcccaaccagggtcctagatgctgcgtgtattccacattgcccagcatggatctcatttagacgttgctttccagtagctaagagaacacatttcatgaggactccggatgcgccccttctgtatagtgtttccccaatgagtgtatagtgagctgattgtcttgcgatgcgctcggttgtattcttgtcatctggctcctcctcattttttatatatttgatgat

SEQ ID NO: 145575 - DNA, 495 bp, Zea Mays
caaagttaaagtgcactaaataaactacaaaatatagtaagaaagtttgatcagcaaagctttgcaaaattctcaaaaaggcccctcaagctaaacttcaaaaaggaaattcacaaatttcataactgaatttcagccctttgtaaagatcagtcgtgttctctgttttccaaaactcaagtctacaaaacccaaatatgaaagtggcgccaaattaccttgaacatactctagtaaagtttgaaatcaaacaaaaactgtttgacacatgttgactcgactttagtctcgattttcagccgagcgacaaacccaaatttgccccctcgtatctcgcgattccgagatcaaatccactcgagtactgtaagagaaacaaagagtaaacgacaaagaacaaatcgtgtgctgggatttgggagagttacgagaagatcacaagccaattagtgtttgaaaatgaccagactaagcgaggccacgtgtttgatcgct

SEQ ID NO: 145576 - DNA, 1015 bp, Zea Mays
gcgaaatgagagcgacgtcgtcgttaaatacaaggcgcgtctcatggccaaggggtaggtgcagcgccccggcattgattttgaagaggtgttcgcccccgtcgcgcggctggaatcagtccggttgctacttgccattgctgcgcacttcggctggggagttcaccacatggacgtcaaatcggcatttctaaatggggagcttcaagaggaggtatacgtccagcaacctccaggtttcgtcgacagcaagaacaagcacaaagtgctgcgcctctggaaggctctgtacgggctccgtcaagcaccgcgggcctggaaccaaaagcttgacgcctccctgctcggcctcggcttcaagcgttgtgtcgacgagcacggtatgtatactcgtggcagtgggacaggacgcctgatcgtgggcgtctacgttgatgacctgatcatcaccggaggagatgcagttgatgtgaacaagttcaaggggcagatgatgaacaccttccgcatgagtgaccttgggttactctcctactacctcggcctggaagtgtcacaaggaccagccggcatcacactccggcagactgcgtacgccgccaagattcttgagaaggcgggcatgactggatgcaatcccagtgccacggctatggagctcaaactgaagctgctcaaagagggagacacaccaagtgttgatgcaacggagtaccgcagcatcatcggcagcctcaggtacttgtgcaattctaggccagacctggcttacgctgttggctatctcagccgttttatggagggaccgcgccaggaacatcttgctgcagtgaagcgtgttctgcgatatgttgctggaacacaacagtgggggctgcattaccacccaggcgagaagaactccggcgttcccaagttgctgggatactcggacagcgacctagcgggcgatgtgaacgaccggaagagtacaagtgggctgattttcttcctggcaggaggtccgattgcatgg

SEQ ID NO: 145577 - DNA, 520 bp, Zea Mays
tggctataacaatttatacttttaaaaatggatacttattgagacctgataaccacatttagctagcttagcaggagggagcatgctaactcataatgccttataattactgaatactgatgaaccagcggagccgtacttcattgacatcctcaagtagctctgacaaacaaattaggggacatgacaaacaaattaggggacactacctctgcgtatctgcacaagggcccaagagaggtggggcctggccataggaacggagctctcagctcccacaccgtgcactagtgaatgcaagcagctggtctggccttccagtaatccgatctgcatgcagtgtgatctaggattcacatggataaggatgaaatcaagagagcgctagctaggatcacacgccaatagcacaaggaaggaaggaatgagcgagcgaaccttaagaaaaacatcgccgactggcttctttgtgtggctctccgtcgttggtcgcaacccccgccaccgccctcactcgtcg

SEQ ID NO: 145578 - DNA, 473 bp, Zea Mays
gaagttttaccacgttgtctaaaaacacttgtgccacagttgctgccaaaaatgggtgtttcaaggcaaaaaaatgtgcatacttagaatatctatccaccaccaccaaaattgtatcacacccttccgacttaggcaggccttcaataaaatccatagtcaaatcttgccatgcaccctggggaacaagaaggggttggagcaatcctgggtaaaggactccttcagacttagcatgttggcacaatgcacactgctacacaaatagtttaacatccgacttcaatcctttccaccaaaatagcctcttcaccctctgataggttgccagacagcctgagtgacctactatactgtcatgtaatgccacaatgatcttagttctaagggctgagttctgagcaatccaaatctgagaacctcttctgatcacaccctgctgcacagaaaaaccttgttcattgggactgtga

SEQ ID NO: 145579 - DNA, 875 bp, Zea Mays
ccttatcaaaaatggttacaaaaatggaaactagtgcttgtgttactaacaacgtatctcttgagcttacttatgaatatctacaaaagagaaagtacacaagcctcatgggttgttcttcacccaaaagaagaaaggtaaaaacaaaggtgctcactcatatctctcaaatgaaagaggaggacatcaagaacaacaacacctacttggataataaggtctacaaaacaatcaatggtgtggttgtgagtattctaaatactttcatattgagaatactaggctcaagttgtttattacaaatttaataagccttgatcaagatgtataatgcttctctctatttgtctttaaagtaaatgcatccattcaattcattcaaatacttgatgcatatctttagggggagcctctttttatatcttgattatgttgagactattactttatcttagaaatttcatatagtctcttgcatgagaatgagtttctcatgaagtatttgctagattctcctactctaagcttaattgataatctaatgcgtatgttgttcttttgatcacataagttatttgtttgatcattgaatgaattcatgatacatttatgcaacttgtgatccattggatatatgcttgaaaagatcactagttgtagaactctctcttgtgcaaaatatttccatatattgtcattaagaataggtcttaagcatctaagactaaggacaaagtacaatgaagagagcgtccctatgtaaaggtacaaaaaggtaaaactatctcctttcatttaaacttgtacctaaatcttccttttctatactctctttacatatcttgtttaaaaggaagagaaagcatgtccatgca

SEQ ID NO: 145580 - DNA, 447 bp, Zea Mays
tgctgggaggcgtggatccggtattggacggctccgattagaagtagaaaaactattcggactcgtacgtctgggtcgtcgatcggggatcgaatggctgaggttaacttgcgatgtgggtggttttggtgcgcagatgccggatctgacggtcagggctgcgcgcggggttggcgtgcgccaaatctaatctgtgctcttagattttaatcgaacggcccgtgttctgcgataccccttcaccgtgccacaattgctaaagagcccctctgttatttattaaccaacccgccatccattggtgttgtgcgccgtgtcttagaattattaccccgagccccctgcatctctgtttaatatgcgcgcagtccagataacagagaaactagataattaatattagaaattgatttttagtataaaaataaatcttaaaacttgtttaat

SEQ ID NO: 145581 - DNA, 648 bp, Zea Mays
gcccaactatgagactctcatcgtggacgagctcttcagcaaattcaagtccacagagattgaccaccagactcaggccaagattgagaaccctggtgcacctaacatagccctggtctttggaggtggttctgcttctaacccctcacctgctatgtttgctctatcttctttgttctctatcatagaggagcaggtggagagccttggggatgaggagctagcacttgtggccagccggttcacgtggttccacaacaaccgtatgagccgacggtgtggtgggtctaaggacgaatgctacaactgtgacgatcccgagcacttcgttgccagctgccccaagaaaggcaaggcggagtccggcccacgcgatcatcactctggtcggcgccagggcaagtactcctccggaaagtacaagtccaagggaggattcgacaaggaggcgttcaagaagaagtatcttcagaaggaaaagatcaaggagcgtgccttcctcgcctccctcggcgacctcgatcatgactccgatgatgtcgtatctttgtcaagcgacgagaagactgagaggcaggttgacgacaagttgaatgggctgtgcttcatcaccgaccccgcaggaggcctctgcaccatggcacttgg

SEQ ID NO: 145582 - DNA, 294 bp, Zea Mays
ggtgttacaaagtgattgagagcagaatggcgagaaggtgaatcgttagtaggggaaacctttccctctcctatcaccaagtacgcgacttaccactagcttctgatgcaaggccaagaactgatgaaggtcagcctgcaatgacttcttgctcttgtcgctctccttgttcagctccccataaagagcctagaggtcggcacccttggcgggatagtccaaaacaaactaggcacctagtcggccgtcaaggcatggcatctccacttggggctccccattcaaggggacgag

SEQ ID NO: 145583 - DNA, 607 bp, Zea Mays
ggacactagtatgggctcttgggacaacggttgagagaaatccccaggcggagagtggcaactatggctgatttttgttgatgcgagaggataacggagatcccgaccggcggggcccagtgtctgaccaagaacaggtcttggtgttttgatgatgttcattcggcgtcggaggttgaggatgcggatgagtcggtcttgtagtagaccaccttcttcaacttctttttctccttgtcacccttcttgggcaacatgatggagccgacagattcttccttgtcctcctagtgcttgtcgccggatatcttgacctcctttgatgaagtcttctcttcttgcttctttcccgaagactcaaatatttcccgatggccacctcccttttgacatgttcacccgacaacacttcgagttgttagaatctaatgaagtattgggctttgataccaattgaaagtcacctagaagggggcgaatatgtgaaacttgaaaattataaactttgaaccgatgttagcgttagaacgagtaacaatgaaatggagtgctgaagatacttcttcttgccacgagttgcttaatcaatgcagataacttttaggag

SEQ ID NO: 145584 - DNA, 303 bp, Zea Mays
cacaagataaagggcctcacgtctgatcttgctactgctagtgctcctcttagtgatggcgacatgctcacctacctcttcattagtcttggatcaaaatatgatactttcatctctcaatgatgatcaagaggtagcctattgcttgatgatgtgtaggcacacttaatggtgcttgaagctcgcaaactaaaacatcaggcggtgctccaactcaacagcgggttctcggtaagctatgctagctgtggagaatcctcccatggtcatggttgtggtaactgtgatgacagccactcccgg

SEQ ID NO: 145585 - DNA, 757 bp, Zea Mays
gcttcattgagcaggacttcccgtgcctctcccattggtacacacaggcggttcttgaactagaggactccttgctcatctgtcctaagatccggaagttgctccttgcgagctctttccataagtctggttgtctctgcgtcctagcattgagccttgcttatgagatcttctagtattggcttgacttccaggctaccattgtctcccagacatgcatttagctgagctgattcttttttccaatcttctaaaaagttggtccctttaatcccaaaaggttttcggctgagggcgtctgctaccacgttggccttcccggggtggtagtggatttcgaggtcataatccttgatcaattcaagccatcttctttgacggaggttgaggtccggctgagtgaagatgtacttcagactcttgtgatcggtgaaaatgtggcattttttcccaattagatagtgcctccatattttcagtgcgtgtactatggctgctaactccaagtcgtgggtgggtagttctgctcatgtggcttgagtaagcgggatgcataggcaataactttctcattttgcatcaagacacaccctaagccttgccttgaagcatcacagaagatgacgaaatcctggtgtatatctggtagtgtcaaaacgggcgcggttgtaaggttttccttgatgatctggaaactttcctcacacttcggagtccacacaaacttattgtcctttttgaggagttcggtcatagg

SEQ ID NO: 145586 - DNA, 373 bp, Zea Mays
ttttgcactagccaagattgtgggctgataagagtctgaaagtctctcatccaccacctcctctggtgttctccgcaacatctcaactacggacttggctggctttggctgtgctttactacttgccttaaattgcaaggttgattgtctttttttggctgttgtaccagaactaggctgcaccttggatgcttgagactccacaacagatgtatcattcgccccatctgttgctgccacctccaccacttcatcatcttcttcatcttcatctagaaacattagtctttttctcttgtttgcctccaaataacttgtcatctccttccttaatccactgctagccttgggacataactttgcatctccatat

SEQ ID NO: 145587 - DNA, 487 bp, Zea Mays
agccagactagcataataagtacgcaaaatcgaagtattttccaaaaggttccccgcgcacaagttgcctacgggcacgaccgaatcaacgaaggcacacaacttcatataaattacggttacatacatacaagcgagggcatcacactttacattggctcaaccttcgggatgatacccatctccctgtagttgaacaacattatcctcagctcctcacactcaaaaagatttcgcaactccccctcacctacactcgccccagccggcgaggacaacaattcccgtttgctagccccgtccacacgaagacgaccaccctccacctcactcaccctccgtttcgccatcgccctttgccgcctacgcccagcactcacaccaggaagaacttcagcacctatcgcacgcggagaagtctccgccgcagccacatccagtgccgcaaaataatccaagtcctcatccgaagactcttccgtccaca

SEQ ID NO: 145588 - DNA, 340 bp, Zea Mays
gtttgcaggcatttgcgtagctgggatacgtgaaacacattgtggatgtaggacatggattccggtaattctagacggtatgctgcgggtcctaccctgccaatgatgggatagggaccgacgaatcgcggtgctagttttccttttacttggaacctcctaacaccacgcattggagaaaccttaaggtagacgaagtctccttcctgaaatatgagttccctccgcctgttgtccgcataactcttctgccgactctgagcttcaagtaaccttccgcggatcagagcaactttctcttccgcctctttgacaaaggcaggtccttctagtgcttttt

SEQ ID NO: 145589 - DNA, 552 bp, Zea Mays
cacacatttgagacgcaccaggatttgtccttaaattcgggtgtgacatctggttatttgcgtaggttttgttctaaagattaattagtggccaagattagtttgaaaaatagaagtcctaattcacccctcttcggcgtcaccgtttcgaacgaggggaagtttctggagatgtgtcttgctagttgtattgagccatttgtctatttttggagggactaactttgctctcagttttattgctactctttcgctttgttttggctctgacttttggctaaccgtgttgagcccatttctatcttttcttgagggctagccatttttgcttggttgtgttgagcccatttctatcttttcttgagggctagccatttttgcttggttgtgttgagccattacccatatctttagggaccaagctttgctaactctcgattacttgcattaggcctttgtctagcttcttatcacttgagtgagttccttcttcttacttccttcttttctacaaatatttgtgtttgtacattggtgttgacaatgcactcg

SEQ ID NO: 145590 - DNA, 517 bp, Zea Mays
gttcgctacaacccgggaaatggacaaatggattatgttcgtcacctgtgcggggatagctatccttggtcgtgtatataaggccaagaggcactcctaccattttcatctcaccccagcccaccattctcatagttcacagcttgtaatgtcatcccaataccaagatcatcgcaggacgtagggtgtcacacttctcgcgcggcccgaacctgtataagctcccgtcatgccaccgcacgaaccatcgagtcacgatcaacaacgtcgtcctgcctaaaagtatcacgagggtaaccgggtaggagatgcgacgttgatcagcgctgactccatggcagtcactttcaagagcatgatcacctttagcccagaagcagtcttctgctttggaaccatctcttgacacggagggaactttgcatcgcatatcagttccacccgggaggaaatctcccttgggatcgccaaaggaagccatatgaggagaccacaaactacaccagcgagaacctcg

SEQ ID NO: 145591 - DNA, 711 bp, Zea Mays
ttgaatggggtcccgggcaaacgttttcattgcaggcgtggggttctgcagggggatcccttgtccccccttctctttgtcttagcttctgatctgcttcaatcaattattaacaaggccaaggattgtggcatcctcaagctcccgatcctgctttcctgtgggtctaacttcccgattatccaatacgcagatgatacaattctgattctggaagcgtgccctagacaactcttctttcttaaagcgatgcttaattcatttgctgactctacagggctccatgtgaaatatataacaaatctaatatttattccatcaatgtttcaaagcagaaaatggcaatgctagcaaatacatttcactgcaaggttggggctttgcccttcacgtatcttgggcttcctttggggcttaaaaacccaatttggaagctttcattcctctcattcagaagattgaaagaagactagcttcaacttctattttcctatctcaggctggcagattacaaatggtcaacgcagtattttcttcccttccaacctattacatgtgcaccctgaagctccaaaaactgtgatcaaacaggttgacaaactttgacggcattgtctcttgagaggggcagacataaatgcaaaaaaatcctcctcaagttgcttggaaatcagtctgcaggccaaaaacccaggggggacttggagtcat

SEQ ID NO: 145592 - DNA, 415 bp, Zea Mays
gcgagaggtcgatggctttcgatgctatgtaaggccgaggtggcgtcgaggcgcacttccgttggcatcatggtggtgtggtcggctggggaggcgaccagatgtggacctcagtggtgatttgggggaggaggaagaaggtgtggtggccgtggtcatagaggagcatgttgtcgtcatggttgtcggagccgcaggtgtcgtggaggaaggtcgtgccccacggcgaggcgggctggtggagcaattcgagcacggacgacaattgcgaggtggggagacaatcagacaaggacagcgtggaagggatgggagctggacacagtgtggggtatgagagctggacacgagctagctcaaagctcagtttaaggacgagttcgcatctgtgccttcggcacagccggagcgcgtc

SEQ ID NO: 145593 - DNA, 334 bp, Zea Mays
cagtggatcatgagagttagcaaatgtcggtggcttgtggctcatgaactctcgatgcttgtcccggggtggaactggtggtggtggaggcagtggtgcttgttgctgttgttgttgtgcccttctctcctagcgtatctcctctcgctcttagcgcatctcctggcgtatatcctctcgctcttggcgcatctcctggcgttcctaccgcatctgcgcatacatctctgccatggtgtctgccatctgttgcattatccggttctgggttgtagctgcgggatcagcttcggcaggtggagactgtggaggatccatctcaggttgttgttgt

SEQ ID NO: 145594 - DNA, 388 bp, Zea Mays
caagttcaaaatttggattcaaataatcatgaaataaatcagaacctaaaagaaaaagaataaaacctacctgggctggaatccccacatttcggcccacctacggatccttcactgcgcagcccaacagcaccttccgcctgcctacgctgacaacccgaccccacttcgccagtccccagatcaaaacgccacggacaagctctcaccgacacgctgggcccctttgccagtcgcacccacctcgcatgagacctctgccgcgtgggccccgcaagtcatccccgacctccggtaaaatcgcgctgcgccacagcggaactccgattttgtcgcgcgcgttcacgatcgggcgagggtttccgggtccacggcgtctatatctatg

SEQ ID NO: 145595 - DNA, 615 bp, Zea Mays
gtgccctcctaccacaacaccgaagcatcggggatcgcaggaagaaagggctacaccgtgcgtcaaacgacatcgccgccgccaccgtcgagggctcgtcaccggttgtgtgtcgccgcgggtgaatcaccggcgctgggtccctgaaaaccggttggggagcttcgccatgttgctagaaagctgctagtatccccctctggtggtagccggctctggtgacatgccaattgctcgccgatgtgcgaatgcaatcgtgtaatccgcactctgccgtgggcaactcgcttgcgtctgcgtcggggccctggcgcgtggtctggtggtactgggccctcgggacatgcgggtggaagtcgtgccctgctattagagtttggtggtcggcgctctcagatctccccgtcaacacctgtctccaccgcagctccatgttccgtggatctgggccatgtgactcttgattcacaggtatagacctacaaactgtttctgcatagtctctgcctcgcttagctacattttacggttgggttggtctcttggttgttggggaggggcgtgtgatggcaatggcgccaccgccttgtgcctacgccgagggagccggtacca

SEQ ID NO: 145596 - DNA, 280 bp, Zea Mays
aacaaattgcctggttgcattgaaggatttattttatcatacttaactctcttctcgtcaggtaggtagtcttcacatggttggtttatattgtggtctcccgaatcaatatggtccgattcatccaaattacttgtaccacctcgtaaggcttcatctcttctattttcttcagtctcgtcctctttaataagtccaagttgagaatacatctgcatctcactaggaacatcacgtcgcccttcctcctcccaaagaccaccacgaaccacagaatccc

SEQ ID NO: 145597 - DNA, 473 bp, Zea Mays
gtggacgtcgagtgtagtggaaaagaattggaggacatggtggaagggatggtggaggtggtggtggtgatagaggaggtgatggtggaggtggaggaggtgaggaaggtggaggtgacagtgatgaaataggaataggggagaatagtggagacgagggggtaggaataggtgaaaccaagtggaggaaataaacaaattcagaggaagtgtaagaagaggacaaaacagtaggaaagaaaggacgtgactcatcaaaggtcacatcccgatatactcgaatgcgacgagcgacaggctcctaacaacgatatcccttacactcagagtcatatccaaggaaaacacaccggatagattgtgcagtgagcttggtcctctcacgaggctgaagaaggacaaatgcaagacaaccaaaagcatgaaggtgactatactgcgatagtcgactaaagagacgctcaagaggagtg

SEQ ID NO: 145598 - DNA, 352 bp, Zea Mays
gccctttaggctcaaaaccaaattccctaagagtccttgctacctgctccctaacattttcaaatgcttcaccatcataagtcacaggtgtcacaaaaggggttgaacacaatgctccctgtgcccctaccacatgcctgtttggcacagatccttgcggcactccgtttcctatgggattaatagatggtccataagccacactttggtaatatggctgctgcagattagaatttgctactgcactcccactcatacccttagccgatgcatctatggtgttgggtgcaactgctattccaaagctagatgtgcctggcgaattcgctgcacgtttaccctgattctcttc

SEQ ID NO: 145599 - DNA, 464 bp, Zea Mays
gacagccggatgttcgcactccgagttggaccgagtcccccacggatcaggaggtggctgaggcaggggctttgctggctgaagttggactgctgaaggagaggggtctgactgcagaggctgtggttgctgattttgtcttcaagaacattcaaccgttgaaggacagggcataccctgcttatctgtaccgaggtctagctgactcaacccgggttaccaacagaagaattccagctgtagacttggtgaaccggcttgaaatgattcttagaggcaaggtatcaaatgttggtgccccagtggcatactcggcctggaacctgcctccttccaaggccttcactcattttgtgtcgaatccacctgtcgctgatggcgatttgggccttagagtgcgaccctctgccgaagaagttagcgctttggttgcctcgctcggagaaattcctgatgatgaacgg

SEQ ID NO: 145600 - DNA, 465 bp, Zea Mays
acaatgaagccacacaggggtagtttattcccatctcgtcctgttaatattcgggggcccacccagttagccccgtagaggagaaaccatcctcgtaccctccctgaacaggtcagatccccgtggggaattttgctatccctaattccaaacgacacacgaagggtaatgggaaaagaaaaacgaaggttgcttcgtcgtctccacaaggagaggatgccatcaaacttaacgaaaacaatggcgggtacggtccctgacccctccactgccaccttccttgtgtgttgcatttgcctttgtctcgccgcttctcacatgtacgaactatcctcttctatcgggcttccttggattagaagtcattgtgtgttagggttgcttccttgcgttcctcttcattctcccctccatcattctagtctcatggaccacatcaacctaggtagaaacaaggcattattg

SEQ ID NO: 145601 - DNA, 316 bp, Zea Mays
tgagaaattagaagaccacatgaaaaggctggacgaggaattccaacgacaacaggctcagataagcaaggtggcgaaaaagtggttcctctcgcacttcaaggtagatcaccaccagaaggtcgtcaaaaagagggaagtaaagtacgattcattgtcagccttgctgcatcaactccccatggtaagtaacaccacgccattagccgatatagagaatatgacacatgcattagaaaatactcatacacctgatttttgtcacataaattggacactaaaataactgcgtcaaaaacatcggcgacaaatgggg

SEQ ID NO: 145602 - DNA, 861 bp, Zea Mays
ctgctagttatttttgcattaacctcttcccgttctcgatggtttgattgcacacttgtatcgaaatgagtgattgcacaggatacgccctgcctgctgcatatgtggtgtatggttgtatacatgttattatcttttccttgtacccactacaattggtagctgtagagctcctggaagaagccattcgccgctctaaattatcgagtcaatatcttcattcacttccatactataatcaccagaagattctaataccataacctcggtccatccaaccctttcttatcggcgctagtgagcaagtccgcattcttttccaggcggatacgtggttgtcgatgaaaagctgccaaggttcgcagttcctgacaatgactcatttcaaggtaactggcccctttttttctggtccacacttcacactttcacgacttcagagtttagacagcatcacaacctgttacgttggctaaggacgaggttgaggtccagtcctcgccatgaaccggatgccatgtgtgggcgattgcagctgaagccgttcgtgtcgcagtgcaccagggacctcgcagcgtcgacgacatcctcggcctctctaacttcagcacagactactgagagcaggagctgattgtcatcggactgctctagccatttgcaggaagcgagcgaccaagccttgcagtattgcggctacgttttcctggagagtgcccgtgttcagaggattagtcattagtgtcggcgtcttagcagctacaggtggtcatttcagatgtatttttctctctctctctctttatcttgtgtaagggcaaacatgtggcgtaaggccctgtcggccctgtctgttttctt

SEQ ID NO: 145603 - DNA, 431 bp, Zea Mays
atctctgcaataccatcttcaaatgatccacatgctcctcctcactttgagaatatatgagaatgtcatcaatgaataccacaacaaacttatcgagataatccatgaatacactgttcattagattcatgaagaagactggtgcattcgttaggccaaaagacataacggtgaattcatacaacccatacttgataataaatgtcgtcttcggaatgtctgaaggtcgaatcctgagctgatgataaaatgacctcagatctatatttgagaacacgctggctcctctcatctggtcgaacagatcttctattctgggcaaggggtacttgttcttgatcatgacctcattcagagctcgataaccgatgcacatcctcctagtgccatctttcttctccaagaattggacaggggcggcccaaggtgag

SEQ ID NO: 145604 - DNA, 1151 bp, Zea Mays
atcttatttcaaatccttgtcttaccaagtttcattattaaatcaaaaaataaaacaatataattgtgaactaaagtaaaaaattatgtataaaaaataacgtagtttgtgtagtcgatgtgggcgtccttgctgcaacacgtggtttaggtggccggtgcagctggtgctcagtctgctgtctttgcgtgatcaccttctctagactccggctgtggcggaggccaagtcaagtggccagcggcagccgcccagccagacgacaaatatattatcgtttactccatttgtttcactatgtttgtccatggcctttggataatacatcctacaatgtttgtcaaacgaggctatcaagagtttaagttgctgtgacattttaaatatctatcactaattaaatgctttcaaagaagagaaatagttgtgtcatgttttgtattaggccactctcaatgggagtttcataaggttttatgggcattaaataaattggcgtgatatagtataaatggaggcgataaaagtttcatgtgatgaaatgagtttcatggggatgaaactttgcactatttccaacatatcttgagtcttggaaacagggacatgaactccctatcgagactagccttacttcgattttttccttgtaattagtactgtcttgggtaatgtgcatgatgtgttatggacataataaaatggtgggagtataaacaattggcaggacgcaaggataaaaatttgttcatgccctcagagaatcagagttaatttgttgttacctgttcattctccagggaattctggtatttgttgttaaggaaatttggtctgcattctttggctcctcaaccggatgttggctcatatctgggctggtcgaaatcggcagggaatattgctaatggactcaccaaaaatgtacttgattcccttatcattctaggagcctggatcttgtggaaacatagaaacaaatgcgtctttgatggctgcagccctagtgttaccgtgagtcttagagctgtggatgaggaaagggcaaaatgggagattgctggtgccaaggggctttcccatttagcagcaccattagctgagaattaagaagggtctgatggattcatttatgtatgcttgcttctgtc

SEQ ID NO: 145605 - DNA, 652 bp, Zea Mays
gaagcagactggtgcccacgttgtggctcggtgccaggtgtggtcaatgcagccagtcatttatgttgggttagtctagagccagggcgggatccactcgagtggttccattccgacacgcacgaccttgcttgtcaggttccgtcatgcctgaccctaggctaggtgccgcgggttcgaacaggggtgggtcctttcagagttgacatatttgcctcttctaactgactaacatgccccaatgatcagggtatctttcctcagcatgctcactgaccagtgggtcttagggtccgagggtcattctctcgacagtagccccccatgtccccaggggggtatctccctctagtgtcttctcttctttctcggtttggctttgtaaagcctcaacgagtatgtcacctacccaccagtcatggtagtcctagatgtcatcagcatggttctagttgtcaaacaattggagcttctagccatcactaggccctcccaagaacactcgaggcccaacacatcttctacaatgtatgatgaatgttgagagccccatgtcccctctagggctatcaatggctccaaccctaaagtagaggtcatcatcggtcatatgtgtgagttggatgatccatggaggttgagataagattag

SEQ ID NO: 145606 - DNA, 682 bp, Zea Mays
ggaactacaattttaacatgtagctgcaatgtttagactataaagcatgtggtcaacaaaaaccaacattcttactattttcctcagacttaattcttaccgaggaaatacttgtttaacaaaacgaggcaaagtaatcgatgtctccacaaaaaagcataagcatgagaacagaggcaaagtaaccaaaacatactgatacagatttaagggataaaacatcagcatattttcacatgttataaaccagaaaactgaaaagtgaaaagtaaaatcagtgcatgggaaattttctacaggaaacactatctagatatgataaacaagagaaaatccgggataacaggggcacatggctaggaagaacagagctaaacaatcttagtaagagaaagtcatcagcgagctaatttctttgttcaactttaaaaggtacagtagaaagaatgcccttccccacaccctctacacacacaattttaattgtgttcaaccagtaacagagatcctagatttggagaattaacatgccagcccttgtgttttgcattgtgatgaactcatgaacaaccattagtttgtaccatgagcagaagaagaaattacccaggtagggatgcctcccacaatgtactaaactactaatccagtctaaacaatgcacctagaaggctcatagact

SEQ ID NO: 145607 - DNA, 315 bp, Zea Mays
gtttggtactagacatcagatcagcaagacaagtatactaatcagatatataaacaaagacaagaattttacgaggaatcctccaaattctagacagcatatcagtaatcgggggcctaggaggacaaacgagaagatctagaggggtactaacctgagaagagggagacgacacagctagggttcactcgcagctgagaaccgatcgaggtcgtaggagagcgatctaacctgaggagagggagaccacacaactagggttcacctgcggttgagaaccgatcgaggtcgtaggagagtgatccttgcgaagca

SEQ ID NO: 145608 - DNA, 403 bp, Zea Mays
gttcattgtctctagaaaataccatcgaaagaccctagtctaagaacataaaaaattacacgtttctttggattttaccattccgtttgtttttcactaacaccgttaagacccaaatagaaatacctcttcctatcttagttcgtagccaccaaatcctttgggagaactggttgcctgcttcagcgttgttggcggtggcgcggtgcagcattagcacgtaagccagctgcgctatggccgtcacggtgatggcctccagcacgtgtcagcggcaatggcccacatctccgtacacgcgaggctgagcgtgagcgtggtggcctcccatgcgacgatgcccagtgtggcgatggcgaggtcctgaggctgcctacgatgcgtgcgccgctgtggccttggc

SEQ ID NO: 145609 - DNA, 342 bp, Zea Mays
atagctccttgccaacaggagccggaatgaaatgtggaggaatttcggtggtggtggtgggcattgacaggataagatttgcatctctgagttggaaaggggttaagggaataaaggggcagtgctccgtgtaagattaagatagaaccgaataacgcaaggtttggggggaactgattggacccgtggtactaaatatcgcattgcttaatgagatactcataatttatctgatgtgatataaactaaactttagttagttgaatcgaacaccttctaactcttatgataaacataaacatggcttgtcctcctaaaaccaggttaagaaagtgaaatccc

SEQ ID NO: 145610 - DNA, 579 bp, Zea Mays
gacggaaccatcgaaccctggcagtagtggctctctaaagatcaaacaaccgaggatccgcagcaagaggtcgcacctcagtcacgtcacgctctaggaagcagggtggaggaactagtggaatggaagagggagcgggagcgggagcagtggaaccatgtgtggtggaggctgtaggtgcagtaggtgtagtggtaggctcgggagtggcagaagctggcagagtggaggaaggtggagtggtagtggtgactggggctgaaggattgaaccgagcaggagtggagcgagtctgaggcgaggggcgacggaccctgaaggcaatctgatcagaagctatcctcagctgacctccctactctgcccgatctgttgctgctgttgttcgagtagctctatccatcttcctcttcttcttgcctccctgctgctcaaggtacacatacttgcccttgcctgtctaaaggggcgaggagtgtcctggtcatctcctccccttatggtgcgacattcttcgtcctcaccatcctgcactgactactaacacgctgcacgagaaatagagaagataagcaagag

SEQ ID NO: 145611 - DNA, 547 bp, Zea Mays
tctggactgggcctcgatttccagaaaagtcagggttcacggtgaaagaattctcaagactcaaggtactagcgatggatggcgggtttattcactaaaaggtcgagggctcttatgcaactttaccagaccgaaggggtaagatctaatgtgagccgcacgatctacagtctatggcctagattggatcgcataaaaccgaaccgatatgcagccatagtcctcggatctgaatccgacggtcacggtttaatgaacccgcattcggatttctaccgtacatcgcaagatctacggtccgggttcttcctaaccgaagaggtagctaccttctaatcttggccgcccatcatcagatcaacggccaggagatcttcgcctaccaccctgtgcacgcgacgaggcagagacttcaggccacacggcggtgagctccccggcgagctccctggcgcacccgcagtcgacaacgcagagctctaaacccaaattggacggagctacacgatgcaggggtaagggtgaacgcgcgaagaaggttctcacc

SEQ ID NO: 145612 - DNA, 416 bp, Zea Mays
cctgcactggcgcgtgcagctacgcagcatgcacaacagcaacagcaacaccaaacgcagggtggtaagagccccgtggcgcggaagatgccgcctcttcttccatcgggaagttcccgaggacgagtcgtggtgctcgacgatctgtaccatcatgtcgagcaaggagaacatacaagaaatctaagcctagccccctaactggcgcgacaaatatcggagagaaaactccagcggggtggcgggatgcacccgcctaatcatgtgaactaggggagcctagggattaacctgattagttggatgaacgcgataacacaagggttagagtggttcggaccggcaaaacgtaatcccctacatccattgtgagttttattgcatgggggacgaaagtctatgtgtttccaagtgtc

SEQ ID NO: 145613 - DNA, 534 bp, Zea Mays
ataaaaaaatgcagctgactccaggtgtagctaagcttcatttggttggacatagcagcactccatgcaatccaacaagaggttagtttaagcggcattattcagaaccaacgtgccgcgctaagtcaacaatgctatagtttgtgcgagttcaaataaactgcaagcagcacgtatcatagaattgtctggttcatcgacagcgactgaagcagtagaagcgggtgtagaaaaagcaagcatgcgcatgccccgtctctggcgagtgagatcgtgctgtcgttgacatttcgataattcttaataaaaatcctcgcaagccactattttgttcttaacaattgcaaactctccgtgttgaacagatgataatttattttaacacagcgaccaagtatttttttgacatgatcgtacctttatgcaatcatgacaagttaattaaacctcttctttatacgagagaaaaaaaaggaatatccaatctaaactcaacttaacgatccaagtctgacctgacttttgagttttgac

SEQ ID NO: 145614 - DNA, 313 bp, Zea Mays
ataaccttttcaaaagcagggacgacttgaaccagccgactagaagttttagatgaattatgcttcgacgtacctgtttctagttgtcgatgcttgaaggcgcgtggacgctacgacctctggttgctgccgaaccgtctagcaaaatgagccagactatccgtgcgggttccggatcatccgcgcgtaggcgccagaccgtctgcgatgcacgggataggtagttttaatcggttggccgatctcgcttgccccctgtgcctcgggtcttgttagtccttttgtccgtagcattctaagtaataactcctgc

SEQ ID NO: 145615 - DNA, 298 bp, Zea Mays
aggctatgtgccggaaaaattggagtgttgcgcatgagttatttgtggtgcttgatataaaaggtccaacaccaaaaaaggaagaaaacctacaattaaatgatcaagctatcaattttatcggtgtcagctaaccccgataaaccccctagatttgcccctactcctgcctgtcttttatcaactagcactacatcgtccacacaaaaagcatataccaagggatatcaccaaggcaaaaaggcaagagctcaaaactaatccttgatgcaatcctattctaatcgagaagtcattt

SEQ ID NO: 145616 - DNA, 299 bp, Zea Mays
ctttcctaatctcaaaccaacccagatctacgcacacactggtcacgtatatacaatagcataaatggtctgacgtcttgatattgcatggtttatgatgttacgtttcatgttattatgcagtcgtaaacaccgaacaaacttgtaaagtcgtcccacgtgatttgcgcgtcagcagattctttttgcatggtttatgcacattattcaatctgtttatcccggtataattgctgacgcatgcataggtgaactgccttcccagattcgttgcatggtatatacaaattctataactc

SEQ ID NO: 145617 - DNA, 338 bp, Zea Mays
ggactcggctgtgtattaatgcaagaaggccgagtaattgcatatgtttcaaggtagttgcgccgacatgaggagcattacccaactcatgatctggagctagctgttgtggttcatgccctaaaaatttggcgtcactatctgctgggaaatatctgtcacatttatacagatcataaaatcttgaagtatatcttcacccagtcagaattgaatatgagacaaaggcgatggcttgagcttattaaggactatgaactggaaattcattatcacccaggcaaagccaatgttgtggcagatgcactaagccgtaaggtttcctgtcactgtcttat

SEQ ID NO: 145618 - DNA, 302 bp, Zea Mays
ccctccaacttcgctcagcgtgttcaatgctcgtgcaaagttggggtacaggtcctaggcgaggagcggattctcccgtcggagccaagcgtcttgtccagctagctcccgctcgcattcctgagtttgacgacggtcacggcgatgggagttgcgctgttctcgatgtgttctttcattaggggcctcccccatctttgaggcttcgtctcgtgagatgggttgagccggatcccattctccagcttcatgatgtcgccgcacgtttcagcctctgtttctccgtcgccgagcgtcgcgct

SEQ ID NO: 145619 - DNA, 898 bp, Zea Mays
tctggatctaagtgttttgagtctgatggtgagtctgggagttcgttttcttggacggaggagtcctcggatgaaggcttggattattttgttgcgttagatgtagccgcagcggagtcttcgccgcgtgtggaggttggcgaggctgctgatcttcctagtgcgagtactgagtataggtggcgaagggtggtgtcgaaacacagtgtgggtgagttttcgcgaagtggtaggcgccgtcgtatggggatggagcgtggccgtcttcgagtagaccggattggtaaacgagaattgttgtcctcgccgtttggggcgagcataggtgagggggatctgcgaaatctttttgagggtgaggaattgaggataatgctgttcaattatagggagatgggtatcatcccgaaggttgagccgatgtagtatatggtgccctcgccgtgtgtatgtaactgtaacttgtattgcaatgtggcctgttggccgttttcgcacgcctgtgctgatccggctgcacccgtgagcgacttttgcgcggagtgtagattgacgtacttgctgctcttgtccgtcggcacccttaggtgattttggcatgtagtgtttgttcggtgaaaagacttcgatggcgtattttattgtgcctgtccagctgcacccttaggcgtctttcgcacggagcgtctttaataaaagactttggttgacacacttgttgtgcctgtccggctgcacccttaggcaacttttgcatggagtgtctttttaataaaagacttcgattaacgcacttgttgtgctattctggctgcatacttaggcgacttttgcatggagtgtctttttaacaaaagacttcgattaacgcacttgttgtgctattccggctgcaccc

SEQ ID NO: 145620 - DNA, 589 bp, Zea Mays
caaaggatcccttcggactccctagaatagatcaggtagtcgactctactgctggttgctctgtgctctccttcctagactgttactcgagataccaccagattagtctagcgaaggaggatcaagaaaaaaactgcattcgtcacgccctttggggccttctgctacacctccatgccatttggtctcaaacacgctggagcgacttaccaaaaagctatccaaatgtgcttagccgaccattggggcaagcacatagaagcttacgttgatgatgtgctaatcgaaaccgtgaacccgcatgacttcatcaaggatctccagcaggttttcaacaacctgaggcgctgccgctggaagcttaactcggagaaatgtgtgttcggggtaccagccgggaagcttctcggattcatcgttagccatcgaggaatggaggctaacctagagaagattgaagccattatgaggatggaaccgttgcgatcacaaaagaaggtacaaaagctcattgggtgcatggcggcgctaagtcatttcatctcacgacttggcgaaaggggaatgccattctataaactgctcaaga

SEQ ID NO: 145621 - DNA, 682 bp, Zea Mays
ccctaatcaatgagaatgtgccaaacctaaataagagattatggaaactaaaagcaacccacaaaatcaaattttttatggtatattcgtacatgagtgaacctcatcaaagataatttggctaaacaaaattggaaggaaagtaaagcatgtattttctatcaagacaacaaaacgatacattacatatttttttgaatgccattttgctcatctggtttagaacatgttttgggcgttcaaaatcccaaaaccaacatccacctcaaatatgttcgagaattcgctttaacactttgacaaaaaaattaaaaatatccctactagaagtagcaaccatctgtcagtctctgtggcctagtacaaacaatctgatttttcaaaaaaaaactttgtgactcctccgcatgttattttcactactacccactagttacaatcttggatcaagttgtagagacacgaacaacattctatggtgatggaggctttaaagcatttgaagcaaatggccatgacattcttatcccaagcacatgggtggcaatctagtcatacgattgagagtattaaaagtatgcatgtcatgtttctttttttctttttacttgctttcctcggttgtgtgcatcttgttattacataggtctagagatgttcgttatttcaaaagtattcattg

SEQ ID NO: 145622 - DNA, 539 bp, Zea Mays
cttatcagttgctatctactcgtgcttagtttttcactctcctatgcagccgtcaggtcatgatggtgcgcacgaagaatgtgtcaacaccagggggaggagacgatgaggactctccttgccccttcaggcagatcaagggcaagacagtttacctcgagcagcaggaaggccgcaagaagcgacatatggatagagtagcccgagaagctcttgcagcggcagcagcagtagagcagacagagcgaggtggacaattgcagatctcatcagatcagattgcctacagggttcgtcgtctcacgtctcgacctcgctcctccgctccctctacacccgccacagctactactacacctcccacttcaccagctccagtcgctctagagccatccaccacttccgccatacccaccacctccaccacacccgcttccactgttcctcctcccgctcccattttcgctccacccattccaccagcccacttccgagagcgagacgagaccgaggtgcgaccgttagctgtcgatcctcgt

SEQ ID NO: 145623 - DNA, 481 bp, Zea Mays
caaatatctgaaagcatttatctccgaatacctaacatgcacacagattcacatcattgcatatatcttcacccacgcaatttgagcattcaatgattctaaaacaacaggtccgtgaacctttatcaaagctaaaggctctatgataaacaactgaaccataatcgcacaagaacagtaagatcaattgaagaccgttagtgggcgtgtaaaatacctatgggacgcggtggcgaaggattgacagcagcggccggctcgacaacactgtcaacggcggcgccgattagggttgagttcgcgcggaacaaatgaaggcgattcacactgccggaaggaggaaggagattaggaagttgcattgtaaagcataaatttaaaaaaccaactcgagcaccttggaatccggacgacataccgaccgtggacgtgagccaatgtgacgcggggcgcgcaagattgacaacgacagcggctcgac

SEQ ID NO: 145624 - DNA, 409 bp, Zea Mays
gcggatatttccagagcttatgtgctaccctcggcggatggcagggagcaaggagacgtggtgacaggtacgatcttagttgattcatttgtggcccatgctctttttgactctcgcgctattcgtttgtttcggaggattttgtgtcacgggctagtctttcggtgcagaggttgggtcacccaattttggttagttctgccaatgactccattagtagttgttcagtttgtcaggggtgttccgtcattcttgctggcgaggtcttttcggccaatcttgttgtgatttcattgggggcattcgatgttatcttgggtatggattggttatctcagtatcgtgcagttatatcctgtttttggaagacagtgttattgcaggcgtcgttgggtagggaggtggtatt

SEQ ID NO: 145625 - DNA, 350 bp, Zea Mays
ggggtgcgctgcacagatcaacatctctggcgtcgaaggttaacggcacatgtgaccactttgtttgcatgactgggtcggtgatgacgacgtggttgatgcttcggtagtgattcctcttttgtcgcttcttgtcgaagtcggcgctggacccccggtgatcatgtgaatgaccccgcgatacggctgatcagcaaagtcttcatgttttggtgcttgggggtgattttggtggtggatgtttggttgatgtggaggcgggagtgggggtggtacgacttgtacctcctggtggtgttgatatgcgtggttgggtagatgctgggcggggtcgtggttgtatggttgtg

SEQ ID NO: 145626 - DNA, 428 bp, Zea Mays
tccgcaacgttctcggtcaccgtggccagaacaaaccacttgatcgattgtgaaattaagttgggaaaaaggcttaggatgggtccgatttagtgtccgccgctcgggagtgccggtcatagccctaatcggccggtccaggagctcgccggacttcggccgcgctcaacgccatcggggacttgcccgtgcgaagaaatagaaaccgaaggggctttctgtaaaccattagcgacacataagaatagtaaaagaacctgtttcctgttaaccagaaccccgagggcccttctgcatgaattccaccgcgggcgcgcgcacacgctttctcctctggattgggccgcctgggctaaaaccagcccaacactgtttacccttttttctttttcttttcagtagagctttggaaatctattataaattgt

SEQ ID NO: 145627 - DNA, 482 bp, Zea Mays
tgattgggtatccatgagtttcaaggcttttacttgcggttgggttggattaatcatatatcaaaacattcttttgttccttttgttgttcttcattctaagatctgacatttgcatgggtatggaaggatggaggggaaaagattgagcaaagatagggtgcggagggcagagaaaggccaactatctaaggttttacctagtaaattaatgccattgtcgacagaagtcacacaatacaccaacaatcattacaaagaggcaaatcaaacacgggcacaaaggacaactaataggaactcaagcacacaagcacaacacagtcgatgttactcgatcaaccaaaaggggacttttctctaaggacaatagtttatcataagttattttttgaaaggcgagacaaggttagaaataagaaagagagattataaaatttaaggaatcgaatcagaaataacaaggagttagacaaagacaag

SEQ ID NO: 145628 - DNA, 664 bp, Zea Mays
atttctccctttgataaatgcagtctgatgttcactaatcaacttctgagcatagggttcaattcttatggtcaagaccttggtaatcaacttatataagcagttaagaagacagataggtctatactgttgaattttagtagcttctttggtcttaggaagcagagtaatgatgccataattaagtctactgacatccaaatgcccagcatgaaagtcctgaaaaagactaacaatgtcacttttaacaatgtcccagcaactctgataaaactcagcaggaatgctgtcaggaccagcggctttatttttttccatctgaaagagagcctctttaatctctttctcaaagaaatgagcacaaagaatatcattgtctaactcatttaactgttcaagtctgtcccaaacctccctatcaatttgaaacatatttccaggagcaggaccaaacaaaccagaatagtattctgttgcatgaagcaaaatattctcatccccaaaaattttcctatctccatcttcaaaaaaaataatattgtttttccttctacgaccattcgcaatacgatgaaaatactcatcgtattagttatgagatcaaacattattctcccctctcactgacatgagcaccgatgtccctgcctcctcccttatttac

SEQ ID NO: 145629 - DNA, 489 bp, Zea Mays
cctgtcagtccccaaggtgggtgtaattaatggtgtaacaaagaatagagccaacgtgatctgtaattaccatgttggatggtatattcgaggcatgtagtaggtaaccaagggcatagcagtattttagtcttcaccccctctgttaccctataaatacccatgtcctgtagtaggatgggccacccttgacaagacatttgtgctctcatccatccgtgttgtcgtgctactcacttagtcacttgccacctatcacattgttcccaagtgcttgggcccattgtttctagtcccaacatttggcccccaccatgcttgcttcgaagaccaacccacaatgcctcccaagaaagaaaccaccagatctaactcctcggatgaggccacgaaggcaaccctcgctgctaaaaatggtaaggtcactttcattgacaacatcccacccccacaatcaacaatgccaccaacatgacgaagagagaaaac

SEQ ID NO: 145630 - DNA, 291 bp, Zea Mays
atatcatttatgtcagcatcactggggttcagaggcacttcgaaataaacctgtcgttcatcatcaggaattgccccgagcgaagcaaccaaagcactgacttcctcggcagaaggtcgcactctaagacctaaattgctattagtcacgggtggattggacacaaagagggtgaaagctttgggagaaggaagattccaagccgagtaagccactggagcaccaacgtttgaaactttacccctgaggatcagttcgagtcggcttaccaaatcaacagaaggaattctc

SEQ ID NO: 145631 - DNA, 290 bp, Zea Mays
gcaaaagtggcagcaagagctcgagggcaaggccagcgacgccgccctcgccgaggaaaatctttaggcgaaggagcagtccttggactggcgggagacggacctcgctaggcgagagacggatcttggcttcagggaagaaatgctcacccggcgaggcgagttgatggccgagcatgagctcgaggcagaggagaaagagaggaagctggaggagcagatccgccagttcaatgtagcgcaggcggcgccgggtccccaggcgatggaggccaccaggaaggcccttg

SEQ ID NO: 145632 - DNA, 721 bp, Zea Mays
cgcaccgtcaagatcgactccggggaaacatgcaatcggggcagagtgaggtctgggtgtgggagattgacaccgccgcggtcgaatcaagcctatggtgacgagggtgtccacggaatcgggcctatatgcctcgccatgtcgtgcacgatacattcagagcatcgcttgggtggattcgtgcttggatggtgggggattgctcatcgatgttcaaaatttgtcgtcgaccgcccccactgtggccttatggttctgtgtcgccgcagtggaagtaaggtacgtacatggaattgttgtcttccccaaagtatttacagcctattagtttaagatttggggcatcggggtagctcgagcggaccactccggtgttgcgccatgggcggcgccaccgcgggattgttgtaatgctgtgtccggtcagctggagggaagaagatcccctgaccgtcgatttagtgtcgaacagatcggattggatgtaacataacgattcggtcgggtgtagcttgagccgtccgattcggatcaatcgggcgagatttggtcttagggtttttaaatctggaacgtcgattttggatcgatcggcttgtatcgcgtactgattgggtggggcaccgatataatctgggacgtcagcttgggatcggatggctgtagtttcaagatacctcttcgctatggcagattaacataagagacactacacataggc

SEQ ID NO: 145633 - DNA, 378 bp, Zea Mays
tgacggtgtcgtacccccttgaattggtctgaaccaggagaaaggtggtttttcaggcctgacctggttaaagaaatggaagaaaaggttcaatgaatcatacataacttaaaagaggcacaagctcgacaaaagagttatgcagacaaacgatgccaacccttgtactttcaagttaaagattatgtgtacctgaaagtgccaccaatgaagggtgtgactcgtttcggtgtaaaaggcaaacttgcaccccgatacattggtccattccagattcttgaacaatgtgggccaatggcatatcgactccaactacccgaaacattgtctgtggtgcgcaatgtgatatgaccacgccattaagcaacacgttacaac

SEQ ID NO: 145634 - DNA, 404 bp, Zea Mays
cgtgttccactggtccacacgcgctgccaactcgggccaacggcgagcagccgccagccatgcatgccaacgccttgctgccactgccccaccccgcatgacgtccaactccagtcggcgtggcgccgcctcaccgcatgctgcacgtgccgtcgtgctcgtgaagaaagagcaaaccgttcgtgtggtcgtgtgcgagtacgtaggctaggagaaaagaacggacgttggccccacaaacatgttgcatgcagccttcctccatgattttctggcatgcgtacaaaatgtagactctagagccaaaaggaaattgcctatcctttgcatgtcgtatttccctccccagctaggctgcatgctagagaaatagtcctcaaggattctctgtgccctcagatctg

SEQ ID NO: 145635 - DNA, 327 bp, Zea Mays
gctggaatgaacttttctgcagatacactaactatgaaatgaatagttcatgtagtcgcgtactaatgagtgaatgagtatgccaccgcttatgacgcgcatgcatcatggaattaaaaatcattctgatcatttattgcattatctccccttggaagtatggatagaggttttgtttacttcattagataactaaaattctttcccaaattctcacgagagtataaccttgtaacagatggcccgtcacaggatcaccacccgtaagtccacaggaggacgtgttcctcatcactagcttgttgcgagtgtttcccgccgtgtagc

SEQ ID NO: 145636 - DNA, 381 bp, Zea Mays
gacgaagacagggacgactgagttatgcgcagaaggagtgttgatgccccgcccagggaggttgcgcatacctgaagagctagatgctcagagataactcggatgaagggtgatcgtactccggataagaagaaatgcatgtcacgttaaaagatagatgcagatagagttagatagtcatcacgacttgtaaatggataaccctctagtcatctatataaggtcgaggggtacctattcgaaggcatctcatctcgtcacatcccatcaccacctcatagctcattagccttctcaaagcaactacgccaccagtagatcgacaggagaattcaccatccaccgtccatagctcatctgtaacccgtgtacaccagtaat

SEQ ID NO: 145637 - DNA, 423 bp, Zea Mays
gcggccggcggggatccatctccatctccatccatggctcttgacattcgatcgcagatcacagcccactcctggttggacactgtactagcttgtattgtactaccagtatgaattgctacgcagccgggcgaggtgccgtgccactcctgctctgcgtcgctggaagcctggaacggatcgtggtctcagaaaatgatgagttcccagcctttctctgccccgaccatcggcccctcccctggtcggtaggtgaacaacagactaggccacagcgctgccgctggggttcgatctcgggccaggtaggtggatgatcggactaggtcgaaccgacgagcaacgagagaacagagagcagagccggccacacgacgagcttcgagcggcgcatgcagcaaacggaacagggacgaccaccgc

SEQ ID NO: 145638 - DNA, 592 bp, Zea Mays
tgccaagttcacgaagagctctaaaattgagatgtccatacctggcatgccacttccacgcagtgtcattcagcttcattagtagacaaacaggaggtgttacagctagctttactgtgtagagtttcttatcaatgcggggtgcactgaccaacagattgtggtctgggtcaaatatttttagacacccatcaaataacctgatgtcgcaaccagcctcctctaattgtccaaaactgacaatattactttttaacttcgggatgtaatacactctggttaaaaccttgtgttgaccctatcgaccttgtatcactacagattcaagtccacatatttctactgcagatccatccccaaatctcacagagccgtggacattattattgagatgtgtcagtactgaccttgaaccagtcatgtgattactggctcctgtgtccagcacccacatcccttctggacacatttttggcaccagtttctcttcaccttcaactgtgctccatgttcagctagttcagctagcaggagtgctccatgttcttcaccttcaacaaccacatttgcttccggttgcttctgttctttc

SEQ ID NO: 145639 - DNA, 469 bp, Zea Mays
ctttgtctagggatccgttgggtcacaaggaggttcgggtcctatgtgtaggatcacagacctatagctgaagttgttaggtcctccctttatggggcttgatggagacagcgacccatcccaggaggcgagcgacctggtcatgactccatatggtgggccttagccccgtgctagaccgcattaaccacgcctggcactgagccacagcgtggttgccgatccgcttcctactcatgatctacggacccctcgagtcgcatagcactcatgacctacgagcccccagactgcgacgcattaataacccacgcgcccctcggtttgcgacgcgcttatggcctatcggactaggcctgagtacgcacacatcccgcgcggcactacacgacgagatgcgtcgagccctaggctacaaaagccaagggtcggcttaacccaaatgatggcacctgggactatcgccgcc

SEQ ID NO: 145640 - DNA, 302 bp, Zea Mays
gtggagtacatcctcactggttggatgatgaatttgacacaccggtgtctgagtgctcgcttgaaccaatccaatatcgatgagcgagctctactcttagatgcttgtctttgagaacgaggtagaactatggaacaacaaaaaacacatctagtgcgatggtgatgggtacataggacatggtggccataaaggttgcgactctagtgctctgtgacaacatggcagacactccaacaacaacttccctcaccaactcagcaggaacacgcacaacaccaacttttagggggaggtcactt

SEQ ID NO: 145641 - DNA, 561 bp, Zea Mays
gcgaggaacaaaatgtgttttgaaaacgtgctgattaaatccctgtttgagattatttgtcatgttagtgctttgatgaactactggcaggtttgagaaagaaggaatttaagacctgattcaagaaggtgctaagttgctggtgagagctgcaaaattcaagttggatgctcctacggagcaggggagatgaagatgatgaagatattaaagattaggtgccttctgtccggttgatggtcaccggagttgtgtccatctgtctgttggttgttgctgcctgaatgggtttgttttgtagtctcttttcgcttttggctcctatgtgagtccttgggtagtagctttggtgttcttctttgatggtggtctttgttcattgaacttgatgtccccatttgtcatgtgtgttggctccctaaatcaaggtttgtctggtcgcctcttggcaaacttcatgtcgctggttgccatcttttgttggaggttgtccgtctgttggtctggtaacctttggtgaactgtgatgtattttttgttatgaaagtaacaaaaattggg

SEQ ID NO: 145642 - DNA, 417 bp, Zea Mays
ttcaaatatgaaaatggaaatagataaaacaatgaatcaggcggctaaggagcatttgggtctgagtcctcacacaccaagttcgagcagcttacacatgggacccacctatcatccttttacctcctgtgcctgtttctactgttcactgatgtgcatgccgccgctaaactcgcccttgcaaggctcaaccagacttcccatctttatcaatcgaaggtggggatctcacgcacatattcaccccttatccctgctcgatcaccaccatcactgccccatccgcgctattgtcgtcgttgcttcctccctcccatcaatggccctagcatatataaggaccccctacacgttttgctcctcacccactaagcttccaaccaccataaccccctctcctcggcaccaatggattgc

SEQ ID NO: 145643 - DNA, 1060 bp, Zea Mays
ctacaattaacataaacggagttagataggactacctaaacaaagcactaaaatcatgtgctcctaaattatcaataaacaatttggaaagaaactaactacaagaaaggttggttaactactatgaagagtaattcacaatgggtgctaaacaaatgtagaacgaagtttgtgatgcactaacacaaggcattatatgaacaactgatcatggaagcaactaattcaataactaaatcacacttacatgaggcaaagtgtaggctagagctagagactaggaaatggaaactaagtgttctctacacaaatgcttaaagagatagaaaaaagttggctatccacaatagctcacccatctatttatatagggttatttcactagtctaaactacccctagatagtagatacatagagcctatccacttagccgaaggcgaaatggaccaactcctgggattttgatctgatggccacgtgctccacacgaagttgcttcgcctcaacgcatccttcgtgatgacgccatgttgtgaattctctaggcccctaagtggtgttttggtaattaatgacaaccgattacggactaatagttcctcgagtgataagattgcaggaatgaaccacaaggtacaacaaagttcttgaagaatcataaccattgattgtggatcaagtgaaggcaaaggtaaaacataggttttttcttttgccggtcagtaggtgcttagagaagaaactgactagattagtaggatatacagtcttactattaagaggggtcaatgaacttgaatggtgtataatttagtgcctcgtagagcataaacgataatatgtgtatgaggggctaacaacgctacagatttcaaaattaagtttttcttgagatagcgcaaaaatgtgcttccctgaggtcggcggaccgtctgggccagatggctggaccgtccgtgactctaccagagagggatgtccctgcctagttgtggtggaccgtccggtctcggcaggtggaccgtacacataagaaaattcaagtttgggcagggactg

SEQ ID NO: 145644 - DNA, 342 bp, Zea Mays
gctttacatattgatgcaccaaaaaccatgtcatttatttaagtattattatgacacagatactgaaagcaaacatggcttgttcagtcgggcagcggcagcagaggggatggggccaatgacggaggcggagaggagaacccatcgatttggtggtgtaagtgggagctcattgaggccggtgcgtttcggcaggtctatcgcaggatgaacctagactcgggcgatctcctagctgacaaacaggtgggggcgaggcagggggatcgacacgccgaaccattattatgttttcatcgtttatgaagttttgtggataggctcatattaaagagctcgaag

SEQ ID NO: 145645 - DNA, 320 bp, Zea Mays
acaaaacgtgtagccctactactagactagacaccccctcgcaataattgtagccgcgtcgagatgccacagctagcagttttgttaccgaccgagatgacacggttggagtcctgactgacgtctcactttttttcgtggagcatatatacacgcatatacatgggtgatggacatgccacgagaactaccaggactataaacgggtgtgcggcctgtttgtttctggtgtggcacgagtaaaagcaccgcttgaccgaggtttcagtcacttgagtgaacgcgcgacagggacgacaagagggcgtaccaaccacggg

SEQ ID NO: 145646 - DNA, 520 bp, Zea Mays
aattagaatagaataaactgccgacaatatgctgccgactgtagcggctgatgtccgcttcaagcttcgggaagccgatactcttcgataaagtaccgacaaccttcgcaccagtttggtctcgtatacagcctaacccttcatcatcaataccaccaaagagaagcgcccccggccgatatccacaagatatagcatactctttcaattcctctttttcagcttcagtcagctcctggccaactaagtttcggaagtcaaaagtttcatcttccgaggtatcttcggttattcctcctttctcgggtttggcagtcgtggtctcttcggtggctgcagcagtttcttcagcgaccatgtttagcagcattttatctatatcagcggctatgctctctaaattaataccttcggagttagcatcttcggctctggcctcttctgcggcagtctccgaaggtacagcttcagtagctgtcatgatttcaattgtcggcatcttcagagttggagctcttag

SEQ ID NO: 145647 - DNA, 557 bp, Zea Mays
ccgaagtgtcgaagcgacctgccgaaactatggaaaaacggtcgaaaaaccagaaccaaggaggtcggcagagcaacaaaaaaccctgagcccgccacaagagccggagctgccgaaggtgtccaacattcctgcaataactccaaaaagtaggggaatggccagcgtactagacggtgttatggaatcttcaaaaatacaaaccactgcttccgcgcctgatagaaagggtgaaattccaaagaaatctggtgaagctggtttgtcactagatattgtcgaagctaggccatcagctctcatcaaggcatatgcttcagaagctactcctttgaccttggaagaagaaaatgcgcccaagaaagttaagtctcctgctcccaaagtgcttgctaaagagctagactttatcgtgcgacatgcttcggggaagcagctgtcgagagagcagattgccgaagctgaacaacacgccagggatctaaagtacctagagagatccttgatattcaatggtactgacgaagacaaattttttattgccttccggatgataa

SEQ ID NO: 145648 - DNA, 495 bp, Zea Mays
tctcgaatttgtaaccattaattgatgtcttttgctctttagattagcatgacacagtttggccaacatgtcacctcttttcacgtggaacacaaaacaggtaaatgtgtatttatggtactttagaccctttcaataagataaccaaaagcactctctgtttaacccctattatttgctctgtagaattaggtcccagctccattataacatataaaacaaaaatgctaaagttcaaacttacctcttctaaggttacgtggttgatcctgatgcaccaagtccaagcaaatcaaagtacgagaatatctacacggtacgtccacacttttctttttgagtagcagcaggtacaatacgcgcgacatgcaagtttttcttcctatgtaaaacagatggccttgtgtggatgccattcatattctctggagatgtactattaaaacatatactagaaagagatcatatattctcctcaattctctctaatcctcg

SEQ ID NO: 145649 - DNA, 838 bp, Zea Mays
aggaaacgaacaagagcgggatagggaaaataacactctcgggttgaaatggaataagtgaggctaaaaaaataggtaaacatcatggtaaatatggagagaggtcaagggtcaaaggtgataataggcaaggatataaaggaagaggtaaatgtgcataaaaaactaggaatctaggtacaatcaagaatagagataagataagtcttgcaagaggtaaagtataggatataaccacgggtgagataagtaagagaccacgcttgaactaaggtgggagattggaggttttagataacgaacatagcgtaatcaccaaggtaagattgagagttgagaagggtaaaggcaataagaagcaaaagcataacaaaggatgaggttacaaactcgcgagccaaagaagagatacgaccaagagaaagaaggtatgagacggaagaggggcgaatttaaagggcaggtatgagacaaacatcaatgtaggatagagaggtgtcaagggtgcatatgataataatgaaaaagcataacaaaggatatagttaagacaagactcgcgaaacgacaaagtggagaaaacaatcaagggtaagatcagtaaggttccaaccgaagggttgaagtaaagattcattaccaagtggagttacaaggaaacaacgagattactacaggtgtgcaaaataaaatgatcactcatggatcattaggaaacaagggtggtcaagggcatgttaactaaaatatttcaaacagatattgggacataaaggtaagcataaaaataagagtatgcaagattccaatggtacgagcataccaaggccaagaaagt

SEQ ID NO: 145650 - DNA, 303 bp, Zea Mays
acttctatatcttgtttgatcaacttcagttcctcttgcaccggatgtgagctttgttcgttgttccatgggagtgtctgtaggattacatcctgtcatattacactgatcaacgatctttgctgcataagagctctggcagattgtaatctcactctccaattgtctgacctccatacctaaatagtaactgagcaagcctaagtcactcatgctgaaagtatgcttcatctgctgcttgaaaattgtgatttctgtcacagagggcccacagataataagatcatcaacataaactcctac

SEQ ID NO: 145651 - DNA, 540 bp, Zea Mays
caggacgcgagtcgaagccggtcctcggcgcagtgcggctctgcggcgtatgggaagtctggcgagcaattgcttgagtgtcggtggagttcaacttgaattgagggcaccagcagctcccccaggcgaagaagattccccttgaccaacaccgaggacagggaacccatggggaagagattcaccgacgacagaccgtgttcttgttactgcggcggcaatggagttggcgatggttgtcttggggtcggtgctagtttgttggggaggggagggagtccaggagcgtggctttatagtcggatacgaaaatctgggcacgatctggccagcagcacgcgggatcgtgcgacgaccgcgtcgtccgccatgtacggcaattctgttgggaggaagcagatcgaactgaccgccaagtcccaccacacagcgactcactcggaacacacgtgccaacgatctgactagttggccccgcttgtcggtgcgtttacaccaaagtaaggcgcacggacgagagactaatgggctgggcccggg

SEQ ID NO: 145652 - DNA, 396 bp, Zea Mays
cgttgatttccctgttaacgcgtgggaatgctccaccctctcccccttctggttgctgaggctgcctgggctctccaggccctcctcgtggtgggggaggtggtagaggctggaacggtcgaccattctcgacggagtgcttgaaatccctgcagttccgcaaggtgtggcgcatgtccttgtggtacaggcactgggcgtcgaggatgtcgtctagtgtctgctcgcctccacggggtgctcctcgggcgcgagcgatgggttgcccggcggcgtggacctcctcacgaggcctcttctcccaacgcctgtcgggttgctggttcatgtcgtggtgccggtggtgtaggttttgttcctccgatgaggtcttgggcccactcgtcagtggtgatg

SEQ ID NO: 145653 - DNA, 453 bp, Zea Mays
gacaatctccgcaaattttttgtttgactcctcagggccagctcgcccttgtaattcgcaaaacagctttattccggcccgcactcttttcctcccggggggtgaggtttttaatgaggcggagccatgtaatatacacgcaaaaaaaatcgcccgcaaaaattacaacgtcgaaaaagaccgcatcgacggtcttcggcattcgaccacaacgaagtcaccgcgagaggcagcgctggctaccctcgcgtgcgacactccacgcaaaagtcgcctaagggtgcagccggactagcacaataagtgcgaaaaatcgaagacttttccaaaagactctccgtgcaaaagtcacctaagggtgcagccggactagcataggatctgccatcctgacgaccgcccggcgcttctgcgcagcgtcttgacggtccttgttcatcactgccgacacaa

SEQ ID NO: 145654 - DNA, 847 bp, Zea Mays
ctgattatatggccgaggtaggaaatactggtttgagcaaattcacatttggacaactttactttccactgatctttccaaagcaattgaaataccgatgacaaatgagtcaaatgagaatcaaaagtggggctatatataagaatgtcatcgaagaataccagggcacatttacgtaagactggtgctaaagtggtattcatggcttccagaaaagtgttgggagctctagtgagtccgaaagccatcacccgaaactcaaattgtcccaaatgcgtttgaaaggctgtttttggttcttcgcctggtctcaaacggatttgatgataaccggccttcaattctagcttgctgaaccacttagcttgagtgagtttgtcgattaactgatcaaataccggaactggatattttccttttactgtgatagcattgagataacggtagtcgacacaaaatctccatgtccgatcctttttcttcactaataaaactggggatgagaacggactatgacttttctgaattactccttggtccagcatttgtttcacttgcgtctcaatctcatccttgagcgctggcggataacgatacggacgcacagcaaaaggattggcgcctggcaacaatggaatggcatgatcacactgtcgggtaggaggcaagccaaccgggtcatcaaaaacttctgtgaattgggagagcactgcctgcaccctgtcgtcggcaggaatttgttgctggtcactggttggtgttggagagtcagaaaacagcctcagttcaatcaccgcgcccactggtaacgtcgaccgcattccttgaagacagactgaggtgccct

SEQ ID NO: 145655 - DNA, 603 bp, Zea Mays
atcaaccccaacactttttgctagagcttccaattcttgagaactgagcaagtcttcttcactatcttcgagattcactttatcatcatcataatctgagccctccaccagaccctcggacacactagaccttatttttcctttatcatcttctggagaaaggacagttttgtcaaaatctgtcccaacctgactgtctttagtttgtaagaacacatgtttctcctcatctgtctctttccttatctttttcccattttttccttttacccaccaccccctatgctgggtatccacagaagctctctttcccaagttaccactctcttcattccaaccttcctcttcaacgccatcaattttgaaaaaatgtcaaacaggtaaggtttaccccaacttcaagcacaggggggatcatagagatgcttttgacatgcaccttgaacctcacgcaattttgcatttctaaagcttttagatccacctcctcaacagcacccaatgccgagcctagctcgcaaatagcctggaaattacgtaactcctcaggaacattttctgccaccacccatatcgtatgcagtcttgccttggcagtggctg

SEQ ID NO: 145656 - DNA, 807 bp, Zea Mays
atgagatgggctaaacctttccctgaatctagctaacctgctgcggttgccttgtaaccttgctttgctgatttttatttttactttgacatttcttttgcaatttctgctcattcaaggatgttgtgtctcttttgcaggttgtcaagtattcttggtggctatgtattgcaacaataatttaaattgatcattctggtgagttttggtgtgctcttggccttttgtcagggtggtactgtgtgtctgtgcatttaggtgagatttgctaagttgcaagtatgtcaacttgagtaggaaaatttcaattaaaagtatctgagaactggtaggaaattcgtggctgaaagacatgtacgactacctagcctcttcaacataatcttagttacagttcggtaacctgtgaacctactggtaaagataaacatgtgcttgtttaagaaccattgtattttcttctattgattttcatgatcaattgctgggttatagattaaattccatgatcaattccatgctaagttgcaatttctattgattttcatgatcaattgtcttctattgatcagcagtgctgggcggggttgacagagagttagatgacgctgacgttgtcgtggtagacaagtgtgctactggtgaggggactgtgaagctcctggaggagctgagttggtgcatccagcttgccttagccaccccattgtcgacaactaggtactcaccctcagcacactggagcgtgagaccacatgctgacactcacttggaggactaagagatgaggttggccacaagaaacac

SEQ ID NO: 145657 - DNA, 710 bp, Zea Mays
tgaaacgggggaaccgagacaccagaatgctatagcataagagccatgaatgccctactctcagcccgatcctagagaagctgctgctgaagggaatcctgtctgtcctgtatggtctgaaacatcgagagcatcctctcggataactgctgatgggctgctgcctggcggggctgctcggctgccaagtgagcctgctgctgagtgagagtctgaagaatcgaagcaagtgcggggtcaatagcacgaggggcagcaggggtagcactagaactcccagcctcatgatcatgtgagcgtggaggcataggaggcggaggcggaggaggaatcccaaaatcatcatcatcatcatcatcaactgatgcatcctgagcttcgaactgattaggagtagcatcctcgacctgagagtcaaaaactggagcagaagctggcacaggagcctcaggcacaggacggtaggacccaaagacaaggcgtgaggcctcaagtgtgccctgaaactgtggaggccgaatcagctgcgcaaaaatgtggcacaagtagtgagcatacgacagctggtgtcaagcacgcaaggagccagagctggatatgtgtggtagcctccctgtatcccatcctcggcagaagagtccgtctgataagctcaaataagaacttggctgctgtagtgaaatctgccggtgaacgtcgcgacccatctg

SEQ ID NO: 145658 - DNA, 651 bp, Zea Mays
gtcggagaaacgataaggtggaaatagctatagtcggcatctggctcgtctacaacttaattaacatagcacaatgagtacaaaagtgtacttgtgtgacttacgcgatataaataagtcaaagatcatgcatatgataatagcaaggaaataagtttaaggttaagtgaaagtttgcacaaaagccaatctcatcctatgcttagttttaataatgaaaggtgaaacatttcctatgaactctagcatcttttatttgttttgcccaaaactaccatgagttttagttggaaacaagacattaatatgtaaacacaaggcgtgaacaagtgatacaaatatcaacataaataaaaaactctacgatacatacaaaggtgtcgagcgttgctcaaaaccatgagcacgataattcggaatgattgatgaatccttgtaagcatgtgcttctttcccccacacgacaaaggaccatataactcatccacttagcctctagtgaacaaagagatgctcatgtcaatatttcctaaagagccccaaacatatgaatgcacgcctagattgtacagaggcctacctatccactaggaataactttagcattctatacctagacccatgggaccatatatctagtatcgtgtccac

SEQ ID NO: 145659 - DNA, 1669 bp, Zea Mays
gaggggcctcggggctttataccattggccaccctagggcgtaaggggccatgggggttcatactgctaggtgccctggtgcaccgggagcatataatgtcgagtgtctcagggcacgagtggccctaaagacttaatttgttgggtgcctcgttgtgtaaggagccccggggttagacaggcatgcatcctagggcgcgaggggttgtggtgcttacttatgtacgccacgccatgtggcctcacaggctaagctagtgatacccttgtataagtcgtagtcagtgtcgaagtcttccatttaggggtcgtggtgcttacttatgtacgccacgccatgtggcctcacaggctaagctagtgatacccttgtataagtcgtagtcagtgtcgaagtcttccatttcttgagatcaggagaggtcccgagagcggtgacttccatcatggaccttgaagcagtcttctggacagggattattgagcgcgtcatggtagcagtcgagggtatgttctttctgtggggaaagatacgctgttcttgtgtgttacatgcaaggggagtgggtgatggtgagttaaaaatagtgagcacacggtgatgctaataagttatttccctgctatttttcctgcaatgttttttggtggtagattatcgttacaatctccttatttccctgctatttttcctgtgattttcagcacgatgacacatcttggtggtaatgcatccaccgccagcatagacaatgatgtgctggacagaagcagaaacttttacgagagaagaagggaaggcaagaagatggtagcggtagctattgtaacccagtaagtaagcaaaaagaaaagcctggctggcctgcattccctccctgacgcttctgaaaaccagagatgaaaggctgcagttatgttctgtcgtctgtttgagttcgtcattagcctgttgttctggaattcataattagtgtgtggttcatgtttgcatgattgtaaccctagaacagcacagcatctgcaggcgtgaaccacaaacttattacgagctccaggatagcacagcttaaattcagttattctaatcatgtctgcagatgctgtacatttcctttcctgcatagcgtagtcatgttaacatgttaaaccgaacaaatttgctccttcaacaaaaaaagagagcagaacaaatttcatgacaccataacatagctttcagcagaaccaagatgtaccgtaccatgccttcgtttgccgaatccaatgagcgaaatattcggactttcatatgccactccatccgtttcaccttcatctctttgcacattctcttgaaaactcaacttgcacattctcctgaaaactcaactaggtatggtgaactggcagaaacattgaaggcgacgcccaaacagcctgtaactacagccagactggaagttcccaacaaacttccgttaatttcaaggctgccacattgaatcagtctactactactcaactcaagtaagattgtataacagatcgtgatcttaagctaacatgactacgcgagaaacatcacagccagtggctgaagttgcgtaacaggcaagcatcagaacgtgtcatgctcaggcacgtaccaaactgggtcctctattcaacagccagccttctgctgctg

SEQ ID NO: 145660 - DNA, 943 bp, Zea Mays
ctatagtgccggctgttcttgtggatcagtgggacttcctcttcttcctcctcttcgtcctcgtcaaacatgcagccagcaacctatgcacgatctcaacccttggcaccaacctcaggaatggcctttgccgggacatcatcgggagccggtacagaagggcctacatcctgatccaagcacgacagtcgccgaagtcgcctcttcttccttttctcctcgagaggtgcagttgggcggctcactcggcgtggacgctttgggcgggcaccttcgggtttctgagtttccacctcttcaccaaattcttacccagttgtaatggccatcggctcggtgtgggtagagtcggatgattccccagccagcaagctaagcacaacatctatctccgtgtcatcagtgctagccggcatctcaaagtgagtctgcctctcatcctcaggaagactccgaagtggagcaatcaaagcctcaatgttctcagaagagggtcgcactctaagacccaggctatcgtcacaagcaggaaggttggatacaaactcagagaatggcctaagtggtggcaggttccatgcagaataggccacaggagcaccagcatttgaaaccctgcccctcaggatcatgtccagttgactcagcagatcttcagtgggaattcttccgtttgtgattcgggtagaatcgttgacactgctatacaagtaagctgggtaggttctgtcctttaagggttgaatgttcttgaatacgaagtcagcaactacagcatcagcagttagacccccatccttcagcgagcagatctcggcaagcagcactttggcttctattatctccgaaggggttggagattctatccagctaggtgtgcaaacatctgactgcctccctgaccgaggagggagagatttgcagtggttctccataatgaacc

SEQ ID NO: 145661 - DNA, 639 bp, Zea Mays
gcgtgagcatgtcgcgctgactaaagtcgtcgccgacttaagccgattgctccgttagcagggtatagtggtcaccctaagtcaggtaggcatgatgatttcaagtccagccccatcgaagtcagctataagtcaagagtctgaatgcctttggaaaacgaaaactttattgatgatgaagtcctcagattatagagtacaatgttccttcaagaattttgagggctttgctaaggatagaattttctgaggtgttctatgttccacgagttccccacttctgtgtcgtccatctgagtaagccggtatgatcccgaccgtgtgatctctaatacgatgaacggtccttcccatagtagtgatagcttgtgccgcccttcccccgttagtattcaacgaaggaccaagtctcccactgcaaaagatcggtgccgcacagctttatcttggtagcgcctcaaggtctgttggtatctagccgactgaattactgtgttcaatcattcttcctccagcacgtcgatatcttctagcctggttgcttttgcttcggctatgctttcgaaagttaacctcggcaccccgaagattaggtcagcgggcaacactgcctctgatccataaaccatgaaaaacgag

SEQ ID NO: 145662 - DNA, 1079 bp, Zea Mays
ctagcatcaaagagagttggcaagcctttaaatggcttggtgcacagagatgttgctgctggattagatgtttttctggtgtgttgcccttactgccccagcaccaccacatattactccatatctcaagtaggttctcttacattaagctatttataccaacactccccctcaagtgggttaaatatattcaacattcccatcttgttacatgccaattcactatccttaggacctagatcctttgtgagactattagctaactgattacgagacttgacatatttcaacttcaaagccccgttgtcaatcttctccttgatgaagaatctatcaatctccacatgtttcatacggtcaaactggactgaattatttgctatattgagtgcagcaacattatcacaatgaagtaacattgtctcatctttcaacacccgaagctctttcagaagacctttcaaccacatcatctcacatagagctaaagccattgctctatgttcggcctcagcagtagaccgagaaaccacaacttgtttcttgcttctccacgaaacaaggttacctcccacaaacacacaatatccagatgtggatctccgatcgtctctactacttgcccaatcagcgtcacaatagccctccagattcagatgttgatttgatctaaaccacaaccctttgctaggggttcccttcaggtacctcatgatttgattgaccaactccatatgtcttgttctaggatcatgcatatacctactcaccacactcactacataagcaatatccggtcttgtatgacaaagatatatcaaccgacccactatcctctgatatctttctcgattcaccgggtcacctgactcggcacaagtttggtgattcttatcaatgggtgagccacttggacgacacccaagcattcctgtctctgtcaacagatcaagaacatacttcctttgagagagaatgattcctctagatgatctagcgatctcaatcccaagaaagtaacgaagtagtcctagatcctttacctcaaaggctctacttagctttttcttcaatttctt

SEQ ID NO: 145663 - DNA, 886 bp, Zea Mays
caactaccgtaagcttattacacgcgagtgctatcgagggtactcccgaactccttctctaaagtgtccccaaattccttgagaaggtcatcaaggctggctagggacatttcctcggtgtcggacgagtttcttatcctggtagggggtagggctggaggggcttcttccttctgctcagtctgacatccttgacttttggttttcttgcggattttcctcgtgggggcgagcttcttcagcttcttgtcgtaatccatctttagagtgcggtaggcctcatgggtgttggtttcctcgccttctgctatctcgaggctctcttgaagggacaccttttcccttgtaagttccctgactttttgctgcaggctttccacccgagagtttaggtgagtgcagtgggaggcaaggtcatcatattggttattgagggtgtgaaggtatccagccatgtagacgatggtggggtcatcctcaatagggtctcctcctgacagggcctgaagtctcttcctccaggtaggtgtatttttgttgctgggtgggaagtagcgaaggggggtttcaaagatcaccttgttgtagctctggcatagttgtcggagggctttccgggcaacattttggcaagtatttgggaagcggtattcggtgaaagtgacttggaaagaaggatggttcggatagtttcggctttctcccaggtagactgccatagagcatttttccataccgttctcgagatactccttccagacatattctggctttttgtggattcccatgcgaagcgcacaacttcgcaacagatgtgggaacccctccacctctgagcagtaggatgtcctaatgaccagagagtcttccatctggaataggaaaa

SEQ ID NO: 145664 - DNA, 866 bp, Zea Mays
agattagaatactccttaatgttttattgagatctcggagagtccgcactccccacgaatcctcgttggagcacccattcccccttagtttgagcaaagaccaagtgctccatatgggttgtcgttgctccggcacagtgaaccgcttgcaaccatatacaagctcgagttaggtcactcacaagatctttggactttgggcgatcaccgtatccccaatcaccgcctagccatctagatgatgccaactaccaagagtaacaaacactaactctcacttgacctaatcaagtctaatgagggtagggtggtggagtggatgcagacaagttactcgtaatgcgctaatgaggccattaattacaagattattagctattgagttcctcaccaggtaaagactcttcctcactcatacagatcctctaatagttgaaataggcaatagagctcaatagactgagttggggggtataagcctgcataggtgaaaaacttgacacaattagaactagttcattttgatttatgcgagatgaataaaaaaaataactaaaggtggctaggatgtttcatgattcatgatttttagatgaatatactaaacattgctatatatttgttaaaatcaaaagatcaagcattgcattctaagatgaactagtctgattggacagctagggctgacctcatttgctagctcagacatcatctaaatatataaactctgctcagacgtcatctatctaaatatataagcctgttcggtcatatgaacaaatgaggctccctccatcacattattatatgtaattattctacacccaaactacagcaatattattaactacaacaaaataaaggac

SEQ ID NO: 145665 - DNA, 430 bp, Zea Mays
gaagggggggcagcagcttgccagcttgtgttgcactcgctgtcacttttgtgcttgtggggagggtgccaactgccaaaacagctggtgctctgtttccacctccacactgtgagtgtgtttggattggaggtgctggtagcacaggtacagtacagtagcagcccagtggctggctatgaattgaaccacccagttgctgcaactgaggtgatattgttgatgtcactcacatgcatgtaccatctctgttctgttcctcctccatacaccactgtttctgatcctcatatacatacaaatacagatacaacaatgatggatgccccgctgagttctttttgtttgcacatgctgctcccggcccggatccgactgcgacgacaagcgagcgcctggccgcttgtgaaggatttctgttgtaccgctg

SEQ ID NO: 145666 - DNA, 434 bp, Zea Mays
gtcggacccaaaaattttttctttgtttcagctgagttgtgcttgtgcccgtgcggccgtgtgtcacgtccgcggtatgcccctctccccactccgatggtctgacccaccagaccatcgtcccaccgcccattcagattctgacgacgtccctcccgttgcctcatcctgagttctgacctcggtgtcgtcgctcgagctggccctgcgtcctctgcgttcgatggggcgaagctttgggacattgctggtgccaaagagtgcgtcttggatctcagcacaaagggtctcgtgtcgcgcttgctgccacccacgctgctggcgccactgcttatgcccggttgcctcgtgccaccagtcaggtaccttctaaatccctaaccttctcgagctcttggctcagtgcggcaagcaggccaatgtgctccagtgtg

SEQ ID NO: 145667 - DNA, 477 bp, Zea Mays
gtggcgcggctcatgcggacctgctcggaccctgtgctagctctattccctccctatctcctctccgcttcgtgcgctggcggttgatggacggactccgaagacctcggccgtaacaagatgccgatctcgccgctgggacttcggccgcttgaagcgggtcggtcagctcccctcccctccggtacgccggggatagcgggatcccgatccggccaggcgctcctcggtcctataagatacgtccctggctggacgaatcagaatcccctctctctcgtcatctaccttgtgccgtagcctcgttcgccccacgcagcgccaccgaaggaaagcgtcgccgtcctctctcctcgcttgccctgctgttcggaggttaggcttgggatcgggtccagggcctgcaccgagctggagcgaaaccatctgtggagctttcgggtggaatcgacgaccgcgcagccatcaattgctcac

SEQ ID NO: 145668 - DNA, 779 bp, Zea Mays
gcgaaggggtatcgggccgttctggccgtccgatccataactaacggcgaggattagatcgggtccggcccgaaccggtacacacttagagccgtcgatcaaacgatctgcggcccgaagttaatgaatggaaacttgaatcctagacgcccgccgatggatcaacggtctggatcatgtctgtctgaaagggtacgctagcctaatctgagccatccaacatccatccaacggcgcacgcatgtcttccccatcacacacacaggtgcggcggcgcaccaaatctcacggcggagccctcaccggcgagtctcaatgtgacgcatcgggcgctaatccccctacccgtggtgatcaatacgatgctgtgagtaaggcgaaatgaaatggggaggacttactgtgaatcgcgcggcacagacctctgcccacggagcacggcggattaccgacgacggcgagcgattctggacgattggacgggtcaccgagcgcaatacttcacgcagacgatccccacgcaccgatgaacactcccgacaccaccctggccacccaccggcgataccgggccgggtcaacggcggcggccacaatccttccgcgagcgtagcaatggcggcgtcgattggctcaggggaaagctaggcttgtgcgagaaggtagtagggaaaggaacgagtcacggggcgtccctttatcccccggggtctcggttcggagagtggaagagatcttccgcgtcccggccatggcggcgacatttacgctcgccaccg

SEQ ID NO: 145669 - DNA, 331 bp, Zea Mays
gagagactaggcggtggcgcaatagcgagaaaaggcaacaatcctagtttgatcagaatgtgttttgagcgtggccggcagactatctatatttgcctactttagctactatttgatatactagtgtttttggtagagaccgttaagttggattttcgcatagagcatcaagctacacccactcacaacttgagcaatggactaattgcaagtttatgcgaacgaattccactcaaattcaaaactagtacctaactgctagtagccttcgtcgtgcgtggagcatatatgttgtacttcctagtctcttcatgagcttcctagatattat

SEQ ID NO: 145670 - DNA, 488 bp, Zea Mays
gtgacacatcaggactttagaacaacagttgggaagacgagtggataaatggagcagtgggtcaatgtggaggcggtctttggcggcgcccagtgaaggcgacatgattttctaggggcttctctgtagtagcgttcaatcggttgggccggtgagcctcatggtacaaaaaggaacttagaacacacaatggagtggttggggttaccttagagagttctagccaggtgaggtgcaccacggtggcgttcatggtcgatctcagggaaaaccaaggttctcaggctataacaaaggaaaaaggtggagctgatagtggactaggttcgtaagggatgggcggagctagcgtgacactcaatttaaagggatcggcttcaagtaccgcgaattttggatgagagcgtggacgacaacgactggatatttcaccaaaaatcaatcaccgtggcgcgctacatgtggcggaaccgcctagattattcctt

SEQ ID NO: 145671 - DNA, 585 bp, Zea Mays
caggggctgttttataagaaactagggcccaaccgcaattactttatactaggataggacggcgggttgattcttatacttctcagggtctcttgtttaaaacgcctacggcgaaggggtatggttaattctgagccgcgagatcagatagcgacggtccagattagatctgcccccaacgaaccggtacgcgatcacatccgtccgatcgacgaccgacgacgcggatttaaaatactccaacccacccagaatcgcccgatcgagatcaaatggctcataaccaaactgggcgaaccggcatccatatctaatcgtggccacatgcccatgatccaacggctggctgggtttcttcctcccacgacgactccgggcggcgccactgtgtgcccacggcggtgccgttgacagcatcgggacacgacacatattttggcttacggcgcatggaactcccgcggcggatcacgacacatatttccatctgcgcgcgcgaagtgctacagccatcaacttcgatcagctctgtcgatgggacgaggagatgcacggcgctcggttttataggcacaagggtaggca

SEQ ID NO: 145672 - DNA, 2622 bp, Zea Mays
tttttttttgcctgtttaaccgggcctacatgtgggcagttggacttgcaatttggtctgttagggttagaataggagtaccagtgcacccaaaaacgccagcaagcacctgccttaaagctgcgctttcagagttggagccctgcctgccaaacaggctcttattaggctctcttaaggattttggatgcactttattaaagttgcgcgcatgacatgactccatttcactattctgtgctacaacacaaaactattgtttttttcacttgtccagtctcacagtatgcacatcagattggtaaaaggaaaatctaagcaacattattccactagtgaaagcaaagttttgaggatatggtccatgctaggtcttttggtcctctcctcttccacgcatgacactgctatctctaacatcgtggctgcttgtaagtagttgaattctccattcagtctgcagtcaacaaattccatgagccatgatggatctttggctgccaatttctctttaagaatctcagcagagcatcgaatagacatttcctccaccccctcgccttcaattacccaactggaaacccgaacccctttcactaactcgaggagcactacaccatagctgtaaacatcagccttccctgttattggaagatttagagcccactctggtgcaatgtaccctctagtcccatgcacccttgacagcatctgtgctcctgttcctcgacttagtaatttaaccaatccaaaatctgcaatttttggttcaaattctttatctaacagtatgttctctggttcgacatcacagtgcacaatccattcatgatggagatatgccagtccttttgccactccaagtgcgatattgtacctttggctccattggagcacataagttaagtcctgataatcaaccagatatctgtctaatgaaccattttcaacaaactcggaaaccaatagcttgtgagtttgctcagcacaaaacccccaaattcttaccagattcatatgatatattcttccaatgatgctgagctcagatctgaactcttgttctccttgcatcatatcacttagcttcttcactgcgacctcccttccatcatcaaggactcccttgtaaactgctcctgatgtgccacttccgagctcttcttggaaactcttggttgccctctgtaactccttgtagctgaaccttcggaactgactggaaatgatcatgtaaccttcgtccataatttctggtcttctctcccatttgtaaacaatccaactaccaactatgattaagatcacttcaataacgagcaatgtcaatgcagaagatagaaagtatccaaacttgaaactggaattggcacccacgaacatttgtgataaggggtatgcttccttttcagtaactttgcaagcatgtcttaatccaggagccaattctggtgaagaccatactgcctcttgagttttcagatagatatcattgtaaggatctgggaagtccctgccattgaaaagaaaggcctttggataacattcgcctgttcccttccggtaaccaaaagcttggcagtccgtatcgttcaagcacatgttcctgcacatcaaccatggcaccagtttggaatagtttaagtcatagccccataagtctgttccggtaagcttcctaaatgaaaagggtgtggtattagtcttgcgcctgcaccctttgctccagtcacttggttcaaccatctcaaatccttcaaggcaagaacatgactctagctctggtctgtatctgcacaggctgtttgctccacacagtccatgtattttgcacagttgagggaatgccatccaagagactgaccaattgccactggtcatgtttaggctatacaacctaaggttaccgtcatagtctagggtcaatctcctcatcgtctcatcaccaagatcagaagcttcaaacttaagctggtcacttgccacaaaccgtcctgtctggtcaagaaccccatacctggtactattataggtagtcctaccattatcccatggcatgtggaatggatctggccaatatatgctactagtctcaggaccgttgtaaataagagttaggatattgttagtggcgaagtagaaggcatagaaacctgaatagagcaaacccctagcagaagcagataccaacctagtatctctagtcatcggctgccatggtagaagtgtatcagttggtgagtcgaagcttctccagaggtgacgcccatctgtatccatgacaacaaggttgccgctatcgagaagcatcgcacgatcactgccggacgcggttgtgttggtgctccatatgaccatgccattatagtccacaaggatcaaggcccccttcttgtggaagatgagcctggagcccctgccattgagtggcgcatcacggttagccgtccaggagacagtcttgccagatgcccacgagaaccagatagaaaaggtgaaggcgttggtggccaccttgtagaagccgcaggtgaaggcaccattgggcgacactaggatgggggtggttacatcctgggtggagatggaggagcctctagcaaggtagctgtggtcgtatgc

SEQ ID NO: 145673 - DNA, 424 bp, Zea Mays
caatgggtttgaattctatccacttagtgaatttgtcaatagcatccagtacatgagtgtatcctacttgagctttcttgaatggtccaatcatatccagtccccagcacgcgaacaaccaagttacaggtatggtttgcagttgctgtgctggtagatgctgctgttttgataagtactgacaagcttcgcacctctggactaactcggctgcatcactctttgccgttggccagtagaaaccagacctgaagaccttcccaactagagtcctggatgctgcgtgtatcccgcattgcccagcatggacctcatatagcagttgcttcccagtagccgaaagaatgcatttcatgaggactcctgatgcgccccttctatatagcgtttccccaatgagagtataatgagctgactgccttgc

SEQ ID NO: 145674 - DNA, 417 bp, Zea Mays
agctagttattagtgggttgtggttagacaataaccatccatagtggacattgaatgtttaattcgtgctccaaatagaagggcaattttttgagtttatatcatggaggcaatgtggaagaagatccctatggaaatgtcaagttcattgacatgcgacacgttcccatgctattcgttggtagaccatccttaagtgatgtgtttactaaggctaaacaaaagctaggttaccatgaagatgatgacattgcggttgacagagtgcttaacattggtcatccaccaaatgtcataagacgagtcatcccaattgattctcaactggattgggagaattatgttacttcgattatgaatacccagttgcaactcatggaggttgtggtgtggcaggttgtagtagaccgccccccg

SEQ ID NO: 145675 - DNA, 331 bp, Zea Mays
atttggagagatgggcctcatcaagattttcttcttgagatccttatttttaggaaccaccaatctgctttcgaaccacaatatacgctttctatcttggcggaaacatttatacttctctgtcttctgatggaggttctccttaatgatttgcactctcttgtcactgagttgggccatgatgatctggtcttgcaaagttggctcaacggaaatgtgagacaaagcaccagaaggaatcacttggatcttcattttgctcaactcatcacatagggtgttgatgcgaggatccatcataacacagttgcattgcaattttcgactcaag

SEQ ID NO: 145676 - DNA, 273 bp, Zea Mays
cttttagaaagtgcacgcggcgaaggggtatcgttaaacctgagccatccgatcaatactggatgcctcggattagatccatatttcatcgaaccgatatcggatacggaccgtcagatcaccatccaagggtcgggatctatcgacactagcgctctcgctcacccacacacccgtagatctacgactctgatttgttttccccaaagcgataagctacaattgatctgggccactcatcaaaacatctacggttctcattcgcttaccccc

SEQ ID NO: 145677 - DNA, 1053 bp, Zea Mays
gaaatttggagaaaaacccaatcaaagatggactgtcaggctgcctgaaatctgaaatacagattaacagtgttatgacatgaagtttgagcttgattttgatttggatccagtgactttttgtgagtacacattatagcaaagatatagatggattatagctctacacctttgctgcagaaagttgatatagattccacataaaaactgaagaaaatgaagctttaatatgcggtgtcaggttcatctgactgaaactcctgatggtacagtgccctaaccggatcagatcgaccgccgtagaaaagatctcaccgccggcgacctctttgccgggattggtgccacggtcgtgtgggtgttgctcaccttgaaaagatcttcaccgcccgtgcgctggcgatctctccggtgacccccgtggccctctctccctctttgcggccgagtggattacctcgccggtgaccgccgcctcccggccatgcgctgcgtggcttagcctttccaccgcaccaccgtgacaccttaaggctgtcccatcgtcgccggtgagcttgccacgccgttggccacgaactcacgcggccagtgcttcttcttcgcctccgaccgccgcgtgtctcgtccaaattcgcggccaccgcccatcctccctataaattgagcccgtgtccagctccgtgaggtagtcagctagctaaccaccgctaatcggccacaatcatccactcgtctgctcgaattcggagtttcccccaaatccgatttccgccaccgtgaaaccaagctcaccgtcgccagcacaactccggtcagctcccgtcctttgcttccttgttttagcattctcatgcatctgcgatgctccccgacccctttaattgaactagaccgccacccatcgccaggaacacggctatcttgtcgcgatgctcacggccaccatggccagagctccatagttgattaatagccaaattagtttggggaaaaggcttagggtcgattcaattcggtgtctgttgctcggagaactcagtcgttgctccg

SEQ ID NO: 145678 - DNA, 972 bp, Zea Mays
tcaaacatctgagaaggagtcctcggctggtttttaatgggtcactgacacttgcaaataaacccccgcgcttctattccttcacaccccgaggtccacaacggggagcggcgaagaaccgagctccggcgaactcataccggccacgatacttaatgaccggtgctctaatttggctgagaccggattcaacacttaacaagtgtttcccctcaatcaatttcactagcgaagctctaaatcgtccagtccatggagacagcacaaacaacggatgaacagaagtgttcccgatgatctagggcagtgtcgctcaattgaatgggtcgagcagcattaggagaacctaaggacactaaaacggaagatgagagagtatgaacagacctggaacaagctagccacggcgaggactctttcacggtggcggaaaccgatttggggaaaaagagcaattcgtgggctctggtgagtaattgagggcacaagcggttggattggatgctggattacctaacggagtcgagggtgtgctcaatttatagtgtgcttgagcggtggctagtgaatttgatggagacgcgcggtggctggagaggaggaggggcactagcgcaaacgattagtggctttctccgtggcggactcaccggcgacgagccagtgatatagagcggcttacaacgacgtggtgaagcttcaaggcacgtggcatccgatcaacgggcggccaactccggtgaacttatctgagccggccacaaagcaaaaggggtacgacggctagcctccggtgttatcctgtggtgaagatcttttacctagaagcgttatctggtcaccggtgagcacgaatcacaacgacagtgtgaatccgggcgcacggctcaccggcggcgaggttctctgaacctgaccctatccattcacggtaccattggaaacgtccaacatagcgcctgacagagcaac

SEQ ID NO: 145679 - DNA, 761 bp, Zea Mays
ggtgcacgtcgctgggagccatcgcgtggacatcgcaccacgccaccactccgagcttcatcaagtagtcagggcgagtcaccaaatcgcccagcactggtccgtggctctcacgaacgagtttagcatccgtggcggaagaaatttctcaacggagcaacgacacaccgcgagccgcacatcttcgtggacggagcgtgtcgcggcaccattgtaggtaagaagctgtgtggtcaatttgttatattcatcgtattgcgtagcgcgtaatagtgagggtttgggtgctctgggtgccgcacgaggcttctctgggtggtagccgccgtcatggcgggtgaagatcggttaggcatgggcggctgggcgtgttgccgtagagaatgggcgcaaggttgatgacgagcgactgaccgtgatggatgcgccgccggagaacggtggtgtcgggtgttggtccgggctaggtccgccggttgaccaacgggagagagagaagatactggggagtcccgcgccactgggctcggtcgcttggggaagaagataacactgtcgccgctggatcagttttgaagggctaggattaacagggaaccctgaccattcatctgtgaacctgtgtgtacgattccacaacgattgtataggatctgaaccgttgatgctagatctcgtggctaccatggtatcctgttccatagaggtggagatctaatcccatgcgctaaacccagatccaacggcggggagtacccgat

SEQ ID NO: 145680 - DNA, 273 bp, Zea Mays
ggagcattatccaactcatgatctggagctagctgcagtggttcatgccctgaagatatggcgtcattatctactggggaatgtctgtcatatttatacagaccacaaaagtttgaagtatatctttacctagtccgagctcaatatgagacaaaggagatgactcgagcttattaaggattatgaactagaaatccattatcacccaggcaaagctaatgtagtggcagatgcaatcagtcgcaaggcctcctgccattgtttaacaatgag

SEQ ID NO: 145681 - DNA, 312 bp, Zea Mays
cgtcagaagagttatgcacacaaacggcgaatgcccttatatttccttgaatgagattgtctacctaaaggtttcgccaatgaaaggcgtatcgcgtttcggggttaaaggaaagcttgcaccacgatatattggtccttttcttattcttgaaagatatgggccagtggcataccgacttcaactacccgaaactttgtctgctgtacataatgtgttccacgtgtcccaattgaagaaatgccttcgggttcccgatcgaaccgttgaagtgacagatgttgtccttgaaccggacttgacatattctga

SEQ ID NO: 145682 - DNA, 382 bp, Zea Mays
gtggtcgtcttcgcgtggacgggactggtaaacgggaattgttgtcctcgccgattggggcgagtgtaggtgaaggggagctgcgaaatctttttgagggtgaggaattgaggataatgttgttcaactacagggagatgggtatcatcccgaaggttgagccattgtaatatatgatgccctcgctgtgtgtatgtaaccgtaatttgtatgataaagctgcgcgccttcgttgatatgagtcttttgtgaaagacttcgatctttacgtagttattgtgctgttccggctgcacccttaggcgacttttgcacggagagcattgtttggaaaagacgtcgattttgcgcgtttattattctggctgcacccttaggcgac

SEQ ID NO: 145683 - DNA, 275 bp, Zea Mays
gacggtgggagggtctatatccacagtgtagttcgaatggttcgtgattagattaatttaggctagagtccttgtcctttgcttaattattctaatgaacttcacgagaagctgttggaaatcacctaggaacgggtattgatcttatatatacacacactactatattaaggctacaagggtagcctaccactcctggttctgtctcccataaatctacacggtccatctatatccatcaaatctacaccgttcgtttgtgcgcctcgtccccc

SEQ ID NO: 145684 - DNA, 346 bp, Zea Mays
gagagatatcaggggaggagatcaggctgcaggattatctccaggtggctatggcaggggttcaggacagagggggaagaggggggagcgcggcggcaagaacaatagcggtggtaacggtcgctgcagctacagcggtggtggcatgtctggctctccttccatgggccagtccaccagctacagcagctacaattcctagacgggagccatttacatgtggctaggccagcgtcccccgtccacacctcggcctcccgctggtccagtccagtcgtcccatgccttcctggctggacctcccggccagtgggccgatcagtggggtgtcccacctgcgtcttat

SEQ ID NO: 145685 - DNA, 706 bp, Zea Mays
agttcaaggaagagaagatgcccgtgacatttggaatattcttaaaatgtcacatgaaggagaccccaaagctaagagacatagaattgaagctttggagagtgagcttgctagatatgattggactaagggtgagtcacttcaatcactctttgatcggttaatggtgttggtaaacaaaataagagtgcttggaagtgaagattggagtgactccaaggtcacgagactattcatgagagcatacaaagaaaaggacaagagtctagcaaggatgataagggaccgtgatgactatgaggaaatgacgcctcatcaattatttgcaaagattcaacaacatgaatccgaagaagcctcaatcaagacaagagactctcatgccttgatctcaaatgaacaagacacccccaagaagaacaaagaccacaaggcaaagaaagtggtcgagacatcaagtgatgaagacacagctatgttcatcaaaacattcaagaaatttgtaaggaaaaatgataagtttcaaaggaaaggaaagaagagggcatgctatgaatgtggccaaaccggtcatttaatagcggattgtcctaacaaaaaggaacaagaagccaagaaggaatacaagaaggacaagttcaaaaagggaggcaagaacaagggatatttcaagaagaaatatggtcaagcccatattggtgaagaa

SEQ ID NO: 145686 - DNA, 531 bp, Zea Mays
tacatacgttatgggaggcggcaggacaaaggagcagcagcagcagcagaagctgaaagctgaccacctctctagagaccttgcagagcggctcacatatcatcagaaggaacatggcttgcaagggcattttgaagatgatagggcagtgttgcccattgctgacaacggcagggcagttgataaccgcatagttgcactggatacgttgcacaagagattggatcatgaacaaagatctcggcacgaggaaactgtgagacagacccgataatccacaaagttttattaccagtttggtcttcattctttgtgtttatcatttctcattctccgtgcgtgcataggtttgctgcagcttggatatgattccagcagtatgtcgaaggcatgggagttactggctcgcgtggaccatgctgagaaagtgaccgcgtcgtgccggtaagagaaaagtgaaaaagcgctctcgaaacgacacttcattcgaggttgcatgacccacagacccagcactccaaactgttcgcc

SEQ ID NO: 145687 - DNA, 566 bp, Zea Mays
gaactatgtataattctcaattctcaggaaagcaacataactacatagcgacaagcatgtctcaatccttaagagaagagcacttctgccactagtctattggtaccaagtccatcgaagctcctcgtgcccctagcgaccctactctagcaaagaaacaccctaagccgaaagtgctagatgaaactttttctgggcgggcaacgtccattatagaaactgctaccactccttcaaacatggaaaagcccccaagtgaagcaatcccacccataggtgacttcctcttcttattgatatcttagagttattcttgaataattcataatcggggacccattgttggggcaaaagccgaactagacctcgatcaccctctagttcagctacggctaaccacacactaatccaatctacgaatgcaaggcttgaggactccataaacaggacccgaagacaggagcttcatcgagcacgcgctcgtcgtgcggacggagcgaaggcccctaccacgacacgagggttttgctagtcgttgaagggattagaagacatcggggacccag

SEQ ID NO: 145688 - DNA, 357 bp, Zea Mays
attcgatctggagcgtaaatcagcaatgtgcgagtaaggtttaatggagggaattttataccatggtcgtcggattttgatcgcagattgtaccataccccttcggcgtgtgcaaattaataaaaagcagccttttgtgaaataaacccgtcatccctctcatgtagaatacaattacagttcaatccctagtatttgcagattagcccttatcaattattctgtgtataaactttgaaatcaataacttcttcgatataagtccaaattaatttgttccagttgcgttagcttcgtaataacaatgtctacgcaggaacaacattatttttatcatatcgcttatcgcataatttt

SEQ ID NO: 145689 - DNA, 414 bp, Zea Mays
gaaaggcatatggacatcaaaataagaacattaccagacacacgcccatcgaacttggcaatttggtcctagagtaggctcacttcggtgtcagtcgcgtctatggccgtgcaggaggcatcaaggttctccttgagctccaaggaacaaggagagggtcccacagacccaaccatgactaccctgcagaaagaagcacctccgactattggaggttgctctacagtagaaaacaaacgtcaaagagaaaagggggagaaggaagacttcgagggctaaagaccttaccccgaccctaacatgggcacaacgtggcctcttccttgccagggtccgttaaccgacccactgcaggaacccatctgaggggtcaatgagaagcaagagtcatggtatgacaattgatgacccccg

SEQ ID NO: 145690 - DNA, 302 bp, Zea Mays
cgggcaacttggaccaacgtcttggcattgaagactgccctccaaagtcgacgaagcccgagacactactcgggatacctccaatccagcatctggaatttccgaacaaacggccatcacgtcatcgacagttggctctgacagcatatccttagggacgacctcctcaagggcctgatcaaaatctgatattgacagttcctaaagactgacaagatccgatagagctggagaaggaatatcactcccccctcactgcctctgtaatgtcggctgttcgtacggatcagctagacttcttc

SEQ ID NO: 145691 - DNA, 586 bp, Zea Mays
caccgagcactactcccggagcttgctgagcctcttgagcatcgacgtggttaactcgtgctctgccctgatactgggtcttgctctgctgactgttggaggagggtgccttggaggccggtgccgaggtattcttggggccattcaccgaattggagtaagtaggtcctggtgccttcaactggggcagttattcttgaagtgactggggtctccgtagtgccaacaggcatttgctagtggttggttgcttgcaacagagggggcctgaaaggagctctgactctgctggctgaaatgtgatggagtgggtccagctggtctattgaagcttggtcccttgggtggaaacccgaaggatcgagctctctggtgccgatcttgctgctgagctcggagaacttgaaacttcctcttgaggtgacctttttcttcttcctttgccctttccacttgtatggctttgttggagaggtgcgagaagctgaggaaatcttggctggcaaggatggtcttgagttctggtcttagccctttcagaaaatgggccatcctcttggcttctatgctgacctcgtcaggcgcg

SEQ ID NO: 145692 - DNA, 334 bp, Zea Mays
cgcgccatgctcggttgacgacagaatgcggctcgactatggtgtatccattatggcgaggaattgccgtgccctccgatcacaatcccacacgaggatacgatgcgcggcctgcctgagtgcagccgatccccaaccccatgatttgtgttggtcgccctacaacggtagagcactctgcatgacttcggcggatgccctcccccctaaacgacgatggtggtagcactcggtcgacgccacccatggacgaagagaggaggttgtgaccacgcccttatatagcccgaggaatgcatgggacccgaggatatcatgacttggttggagatta

SEQ ID NO: 145693 - DNA, 833 bp, Zea Mays
cgagcatgcagtgattgttcttttgcaaaatagattagaccctgtccgtgaacgatcatcttgcattgtattcttgtccaacaatcgtaggaccctgtcacccatctctacacatcgccaacttgcctaaacgacgaggggcccaagtacgacctcgagctatccaagaaagagcacacgaagcatgggttctgggggcttctggctcagaaagccaaggtcatgctcgacgagaatggcaccccacgcattcaggtaacaactctgaaaccaaaaggagaaggaagagccatcatcaggcgcgttgacgtgatccttttgtcagttctaatatccatggaaatttccagacctctgaatctcgctggtcctacgatcgggtccgaagctcggagagccagagccccacggcacggagaggaacgctggaaggcaggctagacatcggagggaagatcaaggacgttcttgaggtgggttcaccgatactttccactgcttcaggctctctgcgcgcgcaccacatctgctaataaattttctcgcctgatgaatgagatgagatctcgtttccttgcagaaggagggcctggcggtggccgacaacacaatgtcaggcaacagccacggcggtgtcgtcgctgctgcccggaagctgcacatcaggaggaaggcgtgcagcatggacttccgggccgcaaacctgaccccggccagccccagcatgtcgccgatgctggccgacatggaatcgcctcagctcaaggcctctcgcgacgtaaggtgccctcccgttttgcgtgttaggaggaggatgctaatgccggccgctg

SEQ ID NO: 145694 - DNA, 655 bp, Zea Mays
cgtgtgcgggcttgcaatcgggagtaggtgtcgccatggtccaacgaattcctcgtcgtcgctcctacgccgccgcgggtccgctcttcgccatggctagctctcgtcaccaaatttctagtctggtaagttgcatccctaggttcgcctttatcctgtagtcgtattgcgcgcgcatgtggttggtttgggtagcggagtgcggggttggacgttcgccggcgagtacaccgccgggcgagctctgtttctcgcgcggggtgttccgtcgatggcgtggggcgtatcctccgtcgatcagtgaacgaacggacgcgattagttcatcttactggtgcgagggggacgaagtttggtcgttggatcgtagatgaaggagtggaatcggatctcgcgcgtattaaatcgggggccttggatctagatctaatgatccctggcacatacagattcctcaatggcaggatctaatcctggccgcaggacttagatcgtgtggctcaagttatcccataccccttcggccgacgactttgcaaaagaatccctgaaccttgcataattaaacccgcagtccaccgcgggtaggttctgagtctgtggaacctttgcgttttaaccccgaactctctgcaaattatgcacgccatccagg

SEQ ID NO: 145695 - DNA, 930 bp, Zea Mays
tgcgaattcaaccgtcggatgcccgatcaacggattggattaaaaatgaccgagacgcactaacacccgaccgatccccatccgatggctctgattaacttagcgaaggggtacacatataatctaatcgcagccgtcgctggtcatccaacggaccacgatcatcgccccaacagggcacgcacgcacggcggcgccgcctggagcggcggtggttcatggccggcgttcgcccgaatctagcgctagggccactaattcaccaattaggtcgaccaacgcaatgccacaagtgcgacaaaggaggtgaacgacataccagcgcaggagacggtccgagggagactatccacggcgagaggcggattcgcggcggagctctcaccacggcgagcaattgcccgcacccggcttgatttccaggcctggagggttcgcgcccacactccgagcatcccctccccaaggaccaatcgacgatctacctcgctcctgacggtggcggcgtttagctcgtgcagcgcggtcaaacaccagggtgccaatggaagaggggcgcacgaggtaccccagttttgtactccgtagcggagtccgagcgctctgcggaacaccagaacggaatcctacaaacccgcgttgaccccaacggcttgcgacggagtgtggaatcggaacccgagttccatggacggcgagcttgggcggaaactgtggacgcggcggaggcttctctcccgcccacatcaccaggatccccgagcggtgcgccgtgtggacccggtaaacccggctggtgggtgcggaggtggtcgaggcgagttgtttgcgcgcggcgggatctgcggcgagagctccggagaagaacgtgcgacgtctgacgagatgagcccaccacgcagaggcacaagaatcacgcggtactcacgg

SEQ ID NO: 145696 - DNA, 466 bp, Zea Mays
gccgtggtagtagtagtgtaccacaaaaaggattggtttagcacatgaggtatttatgaaagcaaataaatcatcgttagattaatcgtagtatatcttttgtaataaatctatctagagacgcaaatgctaatactattgtaacaaatttactttgttcaaatctacaaacaggatatggcgacattaataacttactatacgaaaattttgcatttaatttagcacggtacaaatatttccaatatagtacaccgtattactatacttatgctcataatatatcaccacaagcatcgatatatatactagtatatagtaatctacatatagcaacatcatttagcgtggatggttatatgccaaacaatcatatatataggcatccatcacatccactcaaacagctccgatattaaaaaaagcacacataaatataaaactgaaaaaagggaaaagattaaac

SEQ ID NO: 145697 - DNA, 582 bp, Zea Mays
gcgtggaggggggggggttgacgctgcgtgtggtactaacacacgggaccagggggtccaccggtcagcaactgcgcgaggggaaaggaggggggacaagtgagattgatgggcgggttctccttgtcaaggctgccgtcttccttggctactcgctcggcgcgagcaccatggctggagctggcgactccacacatgcgaagaagggcacgtggcggttgcatttggccgggggtcttggaacgacggcgaggtgccatcaccgatgatcaccgacggctaattgatggaacagagaaaacggtggagggagaaggagaagtctggcgaggaaattcaccttgggtgaggcgcaatcgacgatggagcttcatctagcggtggcggagcacagctaggaacgatgtgtgggctttgctggtggtggattcgggcgcaggaagcctttcgacgtgggagctctggcaagcttgaagaacggccgcgcacagctcgagtgagtgcgcaggggtgaagtgaatgaggcaggggaagtggctacgtgcagtgacttgaagagggggtcgggacggcggtttcgcg

SEQ ID NO: 145698 - DNA, 568 bp, Zea Mays
gccaagctgacaagcatgacagaggccctcaaaatgtcccctattacaagaagaaactaaagtgctggaaaacttggtcatgacgtcaggtcctgggtggccgagacgacgatgccaagtggtggaggtggcggtggagaccaggacgggaggtggagacacgccggtggacgatgcccggagtgtgtagagagccccaacgctgtcacatcgggcgagtggggtcctggtggctagatccttcacagaaaaaccagtggggtcaaactcaatggaacaagaattgtcggtggtgaaccgacggacagaaaggagattgtgtgtgatgtgaggggctacgagaacgtcgttgaggtagaacggtccagggagaaccgaggcacctactgaggtgactggaagagtggatccattgccaacgacgatcaaggtagggtgtgtggaaggaggtgggtgggagtgagatagcatgcctgtagtgggagtggtgtggtaggagacaccggagtcgatgcccagtcagaggatgggggagccaacgccatggtgctgtaggcggcggcgaggg

SEQ ID NO: 145699 - DNA, 598 bp, Zea Mays
attatagggattgagtagagtcaatgacagtagtggagaaaatgtttgcatgaccatggaagaggcgacaacaaggcttccatgcgaggaccccctaacctcgtggctcggagatctgcacctcgggcccctcaatcagttccaaagccctataaccttttcaaagcccccctaggaggcttttaggtggaccttgcacctcaaggtagacaaggcttgatgtagttcccaccaaagttgtgaagatcgaagatagtgtcttccagacggcacacattgacgagaatctaggggttgaataataactcgcactcatcgccatcctctgagagcatgttagtgtatttgcttgggaaccatcaggcatgcttggggtcctagagagacaattgagaatcgcttggccattcgccctgacacctgattgatacgacaaaagcatcgaaagcacataaagacaaaaaaacttgtatagagattgagaaacttctccacaccagcttcatccacagggtctaaaaccttgtgtggttggcctggccaacaccctcgtcatcctaaaggctagcgagaagctaaggatgcacattgtgacata

SEQ ID NO: 145700 - DNA, 3013 bp, Zea Mays
gcggcagcggtggaggaggaggaggccgaggtggagaggaggttggcggccaagcgccgcaagcgctccgtcgccgagctcttcgccgcggtcccgcgggtgccccgaggcggccaggggcgtggcaaggggaaggctgccaagaggaaggcggagaaagacaagggaaagctagtgctcgctgccagtgttaagaccaacaagaagaaaaaggtcccgactgggatcgatgccagaccaaaggtatagcgcattgcatcgaccatcgacttgctttccatttctgatatcacgattttgtcggcgcagtagaatgtttgtattctcaggcaggtacaggtctgccggagcttgtatgctacaaacaagtggatcttattgttcagctgaccaatgaccatacgcacagattgctaactccttgagagttcctaaatttgtgctcatccattattcgtattcctgcttttgggtaattgctaaccagccaaaaagctttaggtgtgctttgccttcatcattagatacaaggtgtatcagatggcataaatattgccagcgtataattcggatgcatagcaatcagttgtaactaaaacttacttattgactgcttccatattatttgttgtgaatgactaaggtgtgagaaaaaattcccaccaccttctagctgttgttaatgttttggttacttgtcacgttttcccttgagttttcatctgtggtgtctactggcctcatgtgtctaatgccccttattgttcttgatcttcatgttgtttgagttagatacttagattgttttattcaatgtcactttcttagtagtttctattactatgtgatattcatgcctgctcaattgttatagggacacttgcttttgcaaagtgctgaactgctggctaaaatatcatttttgttgtttgttttgttatggaggtatgccatagtttggttgactgagtgtgaatacttaccatgtacaaaatacttgcaacgttcccaagtaatgcggtatatagtatatactgtatagaatggtgaaagtaatagaagtctctcacctcccactttgttgataggttcaaataataccttcaaatacaacttgtagcagaaatacctcaagagatgtgatacatttgtgttttttttctcatttcaggagaaaaacagtggggtaaaggtgaactcagttagcatttctaagtcatttcagcatcctataaaaaatagggaacccaagagttcttgcaagaaaaagggaaaacaagaggtctcagtcttactggataagaaaagtaagaagggaaacagaaagtcagttttggaaatacacaaaaaggatatggcaaacagtgttcaaactcaaagcatttgtaaggatcagtcaaaagcaggttctagcacagcaccgaatacaacagatatgaggtgtaaattaaattcttgttgcaaatcaaagcatgttaccttttctgatggcgctgacatatttggaaggaccgcacatctacctgcagataatacaaagcaaccacaatctgtacagacattccagcaagccactcaggaaggtcgtgaccaccgtgatagagatgatcaacagttggtttatcaacaagctgaagctatatcccggactgttgagattaccaattctttgtctgaaaatgtagtactagctggtgtttgccgtacaatcccacttaccaaaccaaaagatatcactatactgggaaactcagtggatctgaatcactgcatagaaacttgtcatggcagtaactgtttgaactccacgagtttggcaagcttatctagtaagatgccatgtcaaaaattccaaggtgtgaactctcatctgaatggcaacaatgtttcaagtcttgatgttcagtatcttggagaacaaaaccatatgatatcacaagcatcatttaatcctgttagtttggcacccaagggagtatcaggtgatatgagcccattgtcagagccttccagttgttgtttatatgataggagcagtatcacgttccacgagaaggctgatgctaattaccacttgggaaaagttagttctgagattcttagatctggtaacgtggtgagaagcataagctcttcaacaggatcaaataaaccagcacaagccatcgattgtgtatctgctgcattcaggaacatgcacagccgccgtgacgattatgtcggccttcctatcaattcacgaggtgaattcgtcaaggttcatcctggtggcacccctaattctgttgacatttttacgaggcagtgtttgggggagaattcctcatgcccctcagattatccaaccatcttcagttctattacccgcatggatcatgtacccaactatcatgctcgacaattctatacaatagaccagtctgcttttcatgcagatcctcgttttcctccagcgggcccaatggcatatgggatggatgtgaggcagtggccaagttctgaaagagcaaaagttcattactacacaattccaaacaaaaagtatccatgcgccaaacagcaagagctttcaatggatcacaattcacagcagaagctacttgggctgcgaagccgctgtcccagccagaactctgggcagggtatgcagcacaacgccgaaacgacactgcgcctcatgggaaaaacggtcacacttgggaccagcagcagcatgcactgtagaggcctgaacaacggaaccccagcttgttccagtaaacaaagccaagctgaagaccggggaacgcgtacgaaagttttcccacagctgtttcacggaggactggctctggctgatcccgctgctgcgtgtaggatatcagatggagagaggcaaccgtctggacacccgtcacgtttctctttggctccagcagctgttcgggcttttctgcctggtaccagcagtttcagaacaggtggccacaaccagcaacctgaactagcaacagccagtaagaatccttatctt

SEQ ID NO: 145701 - DNA, 920 bp, Zea Mays
attcctaatattgttatataacccttgatttcttctactcttgttttcttgccattgtattgtcatccttggacaatatctaccttgatatattgaaccctttgtctctctacttctctccttgataatgctttctccctattgaattcttatacttttgctttcgtgccattgtattgccacccttgcgcaatatctaccttgatgtatgaaacctttggctctctactccttgataatgctttctccctaactcactttatatccttggttgtatcatttatcctaactttaatagttcatgattatcttatttcactattggccaccaacaaatatatattgtctagctccttgctatttcttacctgattccttgatttttataatccctctttcttattcctatccttgtatcgtatttcaaaaaaaatgtgataaactattttccttaagaaagattcctttttagttaaatgagtaacattgagttgtgttgtgctggtttgcttgagttcctattagttgtctttgtgcccgtgcttgatttgcttctgtgtaatgattgttggtgtattgtgtgactttagtccacaatggcatcagtttgctaggtaaaaccttagtcgggttttctttgctctatgtactctatctttgctcaatcatttcccctctttccttcccatacccaaacaggagaatcaaactaagctcaactgtttaagatacatacacccaatcagtcatcacatgttgatagtcaaacaaaatttactcgcaaagaactcaaagcaagaggtgcttgctactactacaaggatgaaggacattattcgttaatgccccaagaagcgtctagaccaactaaagaagaagacggtgaagcaagacccaaacaataatccagaagaccaacc

SEQ ID NO: 145702 - DNA, 377 bp, Zea Mays
attccttctccagctttgtctgctcttgttggtctgcaagaattatccatagcaaattttgatcaggctctcgaagatgtcattcctgaagatatgttgtccgagccagcagatgatgatatgatagacgtttgttctgacatcccagaggtggggttagagttatcccaagtagtgtctcgtgcctcgtcgaccttggaaagcggtcttcggagtcaagaggttggtcatggtttctctattcccatggaggtgactgaaagtccttcagccttagaggtggctgttgcggagaacccagttcttaaggatggtgccagcggttgcccagcccccgagggtgttgccggtaatgatctggctcgggtgggtagcgc

SEQ ID NO: 145703 - DNA, 790 bp, Zea Mays
aatgatttcttattaaaaaaatatgtctacacgaaccaatacattaagatgtgattggtagatgagcggaaagccggaaataatatatgtaattggaaaaaagattattttgtccatcgagaattcgggaacatagttcctctgtgtgggttctagcattgtgactgccctaacatcatttgtgtgatgtcagttgtggaggattcagttcaattttatcgtagtttagcactttagccataaatgtaggagttctcctggctattagtagttcacagaattgtgggtgttttgcgcccaactgaacagaatggtaacctaggctgctagctttgactggaggtgttttcttcatagcttgctgtcaggtggttgatagggtgcatggattgattcggccttgcttcatgaaggaagggggatttgcattagctaacattcctgtatactgtcgcattgactgcgtttgtctgtttgcaattagatgaagaacccactgaatctgttatgtcactgtagttgcattcctaaattgtttggtgtttcatgcatgctaccaattccacttgttggttcatggcatctcttcatgaatagttacatatcaagtaaaagattccaggtctcgatatacaaatccccttaaaatcctctatgcatctgcacatgtctcatagtatgcagttgcagggttggcttgattctgtgaactgcggctattttgttacattttaactttgaaaatgctgttaacaacttaacatcaatgtgaaccctgttggattgatct

SEQ ID NO: 145704 - DNA, 503 bp, Zea Mays
tgtgtccaaccgttgataaaggtcgtcataggcttgaccccgggctctactaaccgctcgctttgcagacttcttcgctatcctgtacttctctatgttgtttgcacacttgtcatgatgtaagtgtttgtagcaatctttcttctccttgatagccttttggacatcttcgttccaccaccaagtgtctttaacttcccttctgtttccttgactcaacccaaactcttctgaagctatctttcggatgcatgtcgccatcttcctccacatgacgtttgtgtctctctcttctgcccaatggccctcctcgataactctctccttgaaagtttgggccacatcccttttaagcttccaccactttattctagtgagcttgttatgcttattccgttgtaaacaaatcttaaaacggaagtcagctacgacaagcttatgttgggttaccacacactctccacaagcttatgttgggttaccacacactctccaggtataac

SEQ ID NO: 145705 - DNA, 421 bp, Zea Mays
gcccatcgtcgatgaattgctcgccggtgtcaagaaccctcgcggagccgccaaaccccgtcgttggccctctgcaccgatctatcaccggtataatacccttaacctaactccacgtgatctcctcttcgtgcggacacttttgggctgaagtttgggcggttgtgtgcgatggtggtggtacccggctatggcgctgccgcgggctgttcaccgccgtgctgggtatcagctgagggaagaggacggtgccgtggccgcaagatccgaaatgggcggtcaagattagatcatgaaaatattaatcctcgaccgtccgatgtttgttgaacgcttgggatcgcgccgtgtataccccctacgcgcttctaatcctgaccgtggatctcagatccaacggctgtgggcctataccggttca

SEQ ID NO: 145706 - DNA, 654 bp, Zea Mays
gcgctatgattgatttgctagctgaagattcttctgatgctgctcctgctggggcgttggcagtggtgcccctcccagaggttgatacgactctggatgttcaaaaacctgttagtactcgcccgaggcgcccttcccgagccaatcagcctgatccttctgctgacgagcagaagaagaaaaggagacgcctccggcgagtatccagctttgatcaggacgctggtacctcggttcctgctactgaagaaatgcctgcgactggacttattgatgctaaccccaatgggtgtcccccatctgctgttgatcccatagtggatgccccatctgctgctgatcccaatgggggtgctgcttgtgttgccaatgtggatgatgaggaggaagaaaatgaagctcctttgactcggaaaaacagtcggcaattcatcgccagcggtggaagtagtggagttccctctcctgctttgtctgccctcattggtctgcaagaactgtccttagccaactttgatcaaactcttgaagatatggtcccagaagacttgttatcggagccagtggatgatggtgcaatggaggcttgcgttgacgtgcctgatgctgggttgaggtcatcccgtgcctcgtcgaccttagagcgcgatctcg

SEQ ID NO: 145707 - DNA, 548 bp, Zea Mays
ctatcattcccttcgaacacaaatcttattatcccctggtttacgaaaccacgacaagttctcaaactggttgtcctcggatattaagcttgtgaacagtgtggcgcctaggatcagatggtccacccgagggcttgtactgtatgtgacttaggcacagacggttcacagcctaaatacacaaaaatgcacagtccttgtccatgttcaatagatgtaccgcggacggtccgcaccctaggatcgaacggtccaccacacaaaaactatgcacaacatacaaactccaagtttatgcccatattagaagttctaactgcggatggtctgccacactggctcaaatggtctaccacctgtcctttgatccatttttgaatattgtatcattctatcttcttcccagagctccaacatcttgtaatggtcatcaagaatatatccaaacactagaatgacacaaattccaaatccttactgatttcttacttttggcttcttttatcaaagtctgcacaacaggtgagcccttcacttgaacttgtgat

SEQ ID NO: 145708 - DNA, 368 bp, Zea Mays
tgatgctttatatggcaggaagtgcaggactcctttatattgggatcagactggagaaagatagttctttgggcctgaacttattcaagaggcagaagaacaagtccgtacaatccagtagaacttgagggtagctcaaactagacaaaagagctatgctgataatcgaagaagaccactagagtttgaggagggtgatcatctgtacctcaaggtgtcaccacttcatggaatgaggagattcaaaattaagggcaagctatcccctcgctttattggacccttcagaatctttaggcgagttggggagatggcctaccaactcaagctacctgattatctatctgatgtgcatgatgtattccacg

SEQ ID NO: 145709 - DNA, 1104 bp, Zea Mays
tcaaccctggtgcaacccgtactggtcatggcgggtgttgaatactacggctagcgatcgggaaggcattagcgactaacagggacctcagaacacccaacaatttggcacgaacaccctgagaacggcttgtccatgtgcacggcggaaaccgtgatcatgggcaaacgttcccgctcatccggggccggattgagtagtcgggtgtcacggtgagcatcacaagcttatggagttgcagaaacaacactcaatttaagcagagccttaccagagcggttcggccacggtggggtgggtttcacggcggcggagaccggtttggggagaactccaaattcgcaaatctcagcgaatggtcgaggctgattcgaggtggctggttagcttactaccctacggagttggtggcgcatgcaatttatatgcgcatcgagcgctggtgacgaattcggtcgaggggtgctggcggtcggagagggaaggcgagctctgtgcggggaaaacgtggctttcatcgtggcagtggttccggtgatcgccggacatgcatccggtgagtcaccgtggtgaagaccagcacagaggcacgtggcgtgcaacggaggcagcacgacggcggtgagacttatcgggtcgaccgacggccgggggggacggcaagcgtagccgcaactcgagcgcaagtggatcggacgccgagattcttactgagtcgtgcttatccgatggccatggcgcacgaatcatggcgagcaatcgatcaacggcgatgggctaccggcgacaagcagggggtggaattgggatcttttgcagttgaacatttactgtaccatggtgatctcctattagatgaactgacagagagatttggagcatgatttactcccaattttgtgtggtgactaagctagctctttgtaccaaaattatagcctgacaaactagctacaacgttgtcacagcaatcttgatcaaattctcaacaattcaagcttgaatttacacacaaagctggctctatttcactgaaaatctgaatttcagaatggaccagccagacagccaaacttgaggcttaattatctctgactttttctt

SEQ ID NO: 145710 - DNA, 412 bp, Zea Mays
tgcaaattcaagtaaagcagtttgaaggcggagggtagctatccaccatcctcggcaaaagtgatggcaaaacaattgcctcggccatattcccaaaccttacccccaaaatattagccatatcccacattccccattgaaaagacgtgaatggcatgggacacatgactgaagggaggtctgatgatggtccgcctagcttcaagaggtcatgaggaagtgctaacctttgatacgcagacaatacgaggaagctgaagtacaagtgaaaatcgtgttgaagattcgagaagtgatgctaaacataccctttagtggcaccgttgctggctatcatataacttggtgacctaaaggaaagccaacaattttttttaaaaaaaactttgttcctttcattctttaaaattat

SEQ ID NO: 145711 - DNA, 420 bp, Zea Mays
ggcatgcctgatatcgtgtaatgactccctctagggagttgatcatgatctctaactgttgcaccatggcatggtggatgatgtagttcatttcctaggagagggcgatagtgcgcgcctctaatggtatcgagagatcaacctcctccaatagcatctccggtttcctgatgagccgaacaccaccagagtgtgtccatgtgaagcaggtgaagaggttgtcaattaggcttttgaggcttgatcatagcattcttgcatatatgtactaaagtactcaagctacggtggtccagtcttgcccactgggtagtgttgggtgtcgtcgtcggtggggagggcgtgttttctcgcttgagtcatggtggtgatgaagagctgatgtggagaagtagacgggttgatgtcaatgagccagtg

SEQ ID NO: 145712 - DNA, 1433 bp, Zea Mays
gtctaggcttgctccctgttgcttgctaggctaggctacccgcgcgtgcgaatacaccgtgccacgagctccgcgggtagaatcagctgcgatcgttccggcgagccacaagtggcgactgtggaagtgtggatcggtggaaccctgccttgcgcttcgtttgtttggtcggcgaaacgacgggaagcggtgttggtgttgggctctcacttcatttgtgcctctgacatttaactctacctccagcgttactgcgttaccagtgcgcgtccgtggggactggggactatgtgaaaccgcgttggggtagctggataaagacatacttcgtatacggtatccgaagtagtaggagtatccctcttttctgggtgggataaacaacggtgacctggtacaaactcatcgggatgtgtttggaccctacaccagagtattaaatttttccacctaggcagctccccccctagcaatgtgtgttatgcaatctgtatggagtgatttggtggtttcatatttagaaatgacggatgggttatggtggtagctttttccagggtagataaaagatcagagatgggatattgattcatgaactgaagttcttttttttttgcttgccctggcagtgtatcttcttacacaactttttttgctgctacgggggagagatatactaggatgaaacacctatttttatgtgtttatttatacaactagatgtatccttaaatgtgcaatggaccatctagagtcgtaggaaatgtgttttaacgtaaaccaaaattattttttttcacatggacagctctcaacgtgtgtgatgtgcaatttgtccgcagtgatttggtggttcgatattgtaaaatgttggatgggttatggtgtccttcagcactgtacaaagaagatcagtgatgggggttttatagtcatagactcataggtagtacttgcttgcccgttacatccttgtgatgcctcaaccgaactttctcgggctggctgcatagcttcttacacagctttattgttgctccacagctgcggggatgaggaacatactaggataaaaataactattattagtgagggagggatgtctctggatcatgatgtgtatgcaggctaggggcacatgggtttccaggtggaccgagccagcccacttcttaccccttccttcttttttcttttcttttttcctattctttctccttcacgctggtgtgttgcatttccttacgttggtacctcatgcctcacttaccgaagttgtattgagactccatgcctcgctttaccaccttgataaccatggttccgcatttctattgatatagttctacttttctgagttatgttcgtttttaaatgttgaattcttgaaagtaactgctgctgatccaatgtataatttctttcttcctgct

SEQ ID NO: 145713 - DNA, 506 bp, Zea Mays
cttcttgtgacccttgctgcccctctgcttgagctcgcttgcgtccacgacgacgctgctggtggcaccgccggcggcgccacctctcgcctgcttgtgggcggacgccatcatctaacgatctctcactctgatgtgaacgaaaccgatgggcaatacataggcagaggcagtcaccacaccactcgcccaaacaaatctgcagccttggaagcctggttacagcaagaaaagacgtgctcgttgtcctgtcatcgctgctgctcatcgtgatctcagggcagtggatcgatctcacggcggaggcgaccttcttaggcgcgccaccgccatccgagctgagccgcaacgatccagatacaggtacccccttttggaccgcccctgcccctctatccctcgccccatcggcgtccgcgtgtcctcgtcccctgagacgccaccgtcgtggagatggagtgacgatccgatcagatctgattgctcgttttctccgagaatctctc

SEQ ID NO: 145714 - DNA, 482 bp, Zea Mays
ctttggagacaaattgtggctaatccagtaagaattggtcttggaatactacaacaaagatgaagatggtatattggactacaactttgctgcagagcatcggccatgttgccatggaaatttgagagaaaattaagcccaaacattgactgtcaggtgcactgatgggagctcgcgatggtacagtaacctgaattggatcaggctgccagcgtagaactctcaccgtcaacaatccctccgccgcgattcgtgccgtcgacgtcccgattcgtgcccggagtggatagataacgtcgcggggtgaaaggtgtcgccgtcggtgagctggacgccactccggctagccgccatgcctctccccttgttcaccgatcccttggatgagattctcaccgccgttgagccaccaccgtcgtccaccgcgtgtcctgacgctttaccacatcgcagttaaccgtgcattgcctgtccgatgatca

SEQ ID NO: 145715 - DNA, 1039 bp, Zea Mays
taccttcccatggttctttcttagatcaaggaactcgaaaatatcagcatgccaaggctccaagtatacagcaaatgcacctaagttttagaagctcataagaatttctgaagacgatgttactaaaagtggaaataatgaaaaaaagcataccctttcttttcccaccaccctgatcaacataacgagcagtatcattaaagactcgtaacataggcacaattccatttgatgttccatttgttcctcgtatgtaactcccagtagcacgaatattatgaactgagacaccaattcctccagctgatttgcttattacagcacactccttcagggtttcatagattccctcaatgctgtcatctttcatgcatataagaaaacagctgcttaactgcatcacagaaaagaaacagtaagtaaacaatttcaacccacaatgacatcgtctggcaggaagcaagacagtacttggggcctcggtgtgccagcgttgaaaagtgttggtgatgcatgtgtaaaccagcgctgggacatcagatggtacgtcctaatggcagactcaatgtcttccttgtgtattcccactgaaaccctcatcagcatgtgctgaggcctttcaacgaccttcccaccaagcttcaagaggtaagacctctccagagttttgaagccaaagtagtcatagtcgaaatccctatcataaattatttcactgtccaagcgagcagcattctgaaatgtaacagcatttggagcgatatgagggccaatttacatcaaggtgagtgaagggcacaacagatttactgtatgagataaacaaccttaataaaaaaaggaatgcaacagtaaattcaactgccagaaacacatcggcattatctacacagatgctctgtcagaaatgtgccaggagcaactagaatctcacattcatgatgatttcataaacatcttcagcgaccagaggggccatcagcccagacctctcgttaaagtgcctgtacatgtccttaatcctgcatccacaacggcc

SEQ ID NO: 145716 - DNA, 986 bp, Zea Mays
agcacttagtcgtgatttacttgttcctgccactcaacacaaggtgaacataatattacttggtaatattcatggcaatataaggcatatatattcattaaaaagtgagattttggccaacaactattataataacaaattagtaataatataagtatgtatggcatcaatttgccatttggtcgaaaaacaattggtgtttgtctatatgaaaacaattgctggttgatcggtaatttaaccggtttcataattattgtacttattagcgatagaatacgatgttggtagatatttgaaatgcaaatttttaatatggtgattttcaaaaatgacggaaacgatacgattatgagacctcggttacgggttttcatccctgggtatagtggtacatacctttggtttgcatatgttttaatccttttgcggttgtactattgtaagatatacttttgtgtacaagttgtaggaaacctatttaattagctcctagtaatctaacttctagataattattgaagtgtgcctcttgtgttttggaacgtgcgggagtataatcattaatttttggaaaatacctatatatatatgtaacagtgcaatctatcacatcatttggatatgtatttgagtgtgtgactgaacttagcgtgtacgaaatcttactcaaggataaacaaagtggcattcctgaaatgattgaggccatccgagcagcccttggatcaacgggcgacggtgagatcaacatttctgcatatgacacagcatgggttgcacttgtgaagagtttgaatggagatgaggggccacagttcccatcgtgcattgattggattgcccagaatcagcttcccgatggatcatggggtgatggcatcttcttcttagtacaagatcgtattatcagcaccctagcatgcatcatcgcattgaaatcatggaaaatccacgatgatgcgtgcaaaaaaggtactctctcc

SEQ ID NO: 145717 - DNA, 876 bp, Zea Mays
ccctgatatgcaatcttcctagaattctttatgggggagacagagtttccatatgcaccttgatgggcgaattaccccactgatgttgtccaaaatcggcagtttaactcttcctcctcgatagatcctcagatgcctcagaaaagcctattaaaaataacaagataagcatgtcaggatctgaattctacaagagtaaaactgatgcggtaattcttccactgccgtggaaaacttgtttaaacgtcactttcacatggagatcaagtttagaacaaccgatatgatgaaaaacgtatattgacgaaaaaaattgcagttaagatctttgggccaacctctgtcatgttgcatatgaagttcgggatggtcggtagagccctgctcccaacatgcacgtaagcgtccactgtcacatcctcatacctcacttcgatcttggggaactctatctgcactctgcaggagcgaggagacgggaaaatcaacagagtttcagagcccaaaagcaagatcagtatagctctgtgatgcctcgatacaaattttagcatgtgcttccgaaggaagcaaattatttgacagaagcggacacgtacgtagctcgtcgtacgagtacgcacgagcaaaatctactagcgctgctgccaacaggcgatctgatgctcttcacgccgcctgctactgctggcgctctggctcctgctttcgcatccgcacccggaggcccaatcatggcctgcacgtccatgggccatgccgtggaggcctggaagcttctgaatagcccatctggagaagaaaacttcgaggcgccaatctccgcggcgactgggacgtgtgagtacgacgagatgacggcggaaagccggaaac

SEQ ID NO: 145718 - DNA, 1061 bp, Zea Mays
gaattcggcggaggaccaagtctcctactgcgaaggataggtgtcggctttatcatggtagcgcctcaaggtctgcaggtatctggccgactgaattactgtgttcaatcgctcttcttacagcacatcaatatcctctagcctggtagcttctgcttcagctatgttttcgaagaccaacctcggtgccccgaacatgaggtcggcgggtagcactgcttttgaaccataaaccatgaagaacggagtatttccatgcagagctcgactaggttgagttctcaagctccaaaccacatatagcagctctctgatctactttccttcaagcttttcatttttgtcgaacactttctttctgagtgcttccagtatcatcccattggccctgtcacctgatcattggctcttggatgcgctactgatgcgtacttgatctggatactccgttgctcgcagaaatcaaagaatttagagatggtgaagttggattccaggtcagttatgatactatttggtatcccaaacctgaatattatgtcttgtatgaactccactgtcttggctgaggttaaagaggcaatgggcttgtactctatccatttggtgaacttgttaatggcaaccagcacgtgagtatagcctccctgagccttcttgaagggtccgatcatgtccagcccccagcatgcaaatggccatgttacagggatggtctgcagctgctgtgccagtaaatgttgttgttttgataagaattgacaagcttcacatctctggactaactcggcagcatcattcttcgctgttggccaatagaaaccagatccgaaaactttcccaaccagagttctcaatgcaacatgtactccgcattgtccggcatggatttcctccaacagttgcttcccaatagccgagtcaatgcacttcatgaggactcctatcgcacctcttctgtacagtgtgtcccctacgagggtgtagtgggctgattgtcttgcaatgcgttttgctgctactttgttagccggttcctcttcattctttatgtacctgat

SEQ ID NO: 145719 - DNA, 325 bp, Zea Mays
aaatgtacatgtatacaactacattatataaattagaaagtcactacttagcacagccttaggattagggcagccaacaaccatccactaatttggcagaactgcagagaagggggagatggggggagagcaggaggaaccttgagataacgagctcatctcctcaatggtgcaggtctgctggagcttgggaagggacagggtggagactgcagctagtgaaccttaagacagttgccgcaggtggagactgcagcaggcgagcaggggaagggcagggtggtgtagccgctgatgatgtagccgccggtgagctgtaggtctg

SEQ ID NO: 145720 - DNA, 367 bp, Zea Mays
atggcctgcgccagagcaatcccacacggattggacttcccctctcgtgctaaataacatcgttgtaccgccggagcagatccatgtagactattttgcaaatggttcatgacgagtttgaagaagaccctaacacaaagacgagatcgatgtacatgtgtgctggtggaactattcgaatctggtcctataatttcacttcggttctctacggaactaagcacgttgaatttgattcatgaaaggaaggcgcatgaagttgggataatatagaagatcacggtcgcacctcaagaacggaagatttggcccgcaacacgacgaatccaagcgggcaagtccggatctgaggtagccgtcgaagctc

SEQ ID NO: 145721 - DNA, 789 bp, Zea Mays
ggattccgttctttcagtcctgatgagaacgaggttccctttttcgaactctttaggagtgatggctttgtctctccatgtcttcattgctgcttggtacttgttcaatgcatcgagggcattgacacggtctccgtcgaggaggtctttcgctactagctcgtcgatgtctggggtggcctttggttagtccggggcgagccatgcttgagctcatgtggagtcattgcctctgtcccgtacattaatctaaatggggtgaacccggtggcgcgagactcaattgtgttgagtgcccacactgcttcgggtaattgctctgcccacttgcctttttatcttctaacggtcttttttattatggtgaagattttaccgtttgcgcgctccacaactccattggattgtgggtggtagattgatgtgaagactacccgagtgccagtagaagtgcagaattccaagaaatcttggttatcaaattgtttttcattgtccactgtcaactcaaagggggctccgaagcgacaaacaatgttctgccagaaaaaattttgtgttgtcttcgttgtgaccgttgatacggctcttgcttcaatccactttgtgaaatattctactacaacaaaggcgaatttaaggttgtcttgtgttgtgtgcagtggtccgactatgttgaggccccatcgttgtaatggccaggtgtgggtgatcaactttgtgaactgtgaaggtgcccccgctaaaggtgaaaaattctggcatgcttcgcacgactggactacacgg

SEQ ID NO: 145722 - DNA, 1036 bp, Zea Mays
taccttaacatccacaggaattgcatctgaaagtgcttgtaccctcaggtacaagggatgcaaagcaaacacagacagggagctgtaattcacacatgaggggcactgctactgtttagataacgtccttactgatttcaagaaaaaccaccattacgagcaggaaacctttggtattgaatattagtcatacctgtacggataagaatcccaccacatcccatgaactgaagtatcgttgattggaaggagctgaacaagatggaagcccgaattgactgcccagtcaacaagaagtttaagatctagaaattctccaacgccaaggtcctcatctgatctgattgaaaacatgggtacagcaacacctgcacccctccatggtgcatcctggtagatgcagatgaagtattatacacaatttggctgtgtatgatgcattgatgcatactgattctctggtttgttatccgaagtgtggagttccatggttctgttatttcaaacacatgttcatgtatactgcatactattaattgattatattgcatcatagcatggtcgatggtttctagttaaaatggctaagaagttcctagaaacttctcttgcaataaacaaatgcttctttgcagataacactattgaaaacattaccctaagagcaccatcagataacacaatatatctggattgcttgggtgatgataaatcaacattaacctccctgtttgggccaagctccaatgtagagtttcctgcttgactgatttgacaatatttgtatgtggagaagatgttaaggacaatcattctcagaaaaaaaattaaggacgtgatatcggccaacagctaaaagtggcgcatccaataaaagattaagggaacaatcatttgcaaaaggatattttatagggaactcagacttccgtaaagcacagcttgctttccacaaggaatctccaacatagctcagcttgagaccatcttgagtttgccatcttcctaattgagggttacttccagtgacgatgac

SEQ ID NO: 145723 - DNA, 727 bp, Zea Mays
ggtgggcccaccctcacctgttcactttcttcctcccatctctcacgcgtttgctcctgggtacgctgcgcgacgccgggctggaaacgcagttcgggtccccgtcgaggacgttcgaagccaactcgggttggtggttgcgcgcccaaacacaccagcgcacgcccgcgtccgtttcttctcctccccgcgaccgttcgccatcctctccattacgccgcgcgagtcactgcagcgacggtttctccactgattcctccattaataacctttaaagcaattcaagtccgcccagccagtcctaagctctccctaatccggctataaaagccacgtccgtgagtctcttcccagctcgcccttgctgctctcttgctcgtacgcacacacctgctgtcgctgctgctcgccgagcacttttccggtgtgctacgccattgcctgtgccgccggagctgttcgtcgactatcgtcagaacacggtgaacccggtgccccgacgacctcccctgttggtactcgaccttgccctctcggtcgtccgcccgccagccgtgccctcatccacctctgcacaagtaacagcaaggtgaacgcgattgaatctagcccttaatactgtgtaaaaattatttagacaaatttttccagttcaaaagaaagtgaaaataagcgcctatgattttatgtgctatcacgatccaatttctatatcgttacgtaattt

SEQ ID NO: 145724 - DNA, 366 bp, Zea Mays
gttgcctccgacatgcaaatataaacccctcatgcactacgccatctcgcatatcctgtgaccatcgcatcaatccaacaaagagtcgtcatactgtgctcgtcgtcgagagaaaccgagagaggggagagaaaaacatagcgtaagccgccgtttatccccgcctctgttgccggtccggccttggaaaccaattcaagagggagtgcgagaccccaggaagatgtgcggtaggactcgtgcacgcaagagtggccagaacgtcaacgatttatcgacggagtagggactccattgtagtgacgttgcgcgaaccgggcgtgggaccacacgatcgaaggtaaagacctccccccttgcttcacc

SEQ ID NO: 145725 - DNA, 365 bp, Zea Mays
gccaaagatcccgtaagcttctggatgtccttgacaccggcgggaggcctcattatctcgatagccttgattttttctaggttagcttcaatgccccggtatgaaaccaggaaacccagcagctttcctgcggaaacgccgaagatgcatttctccaggttcagtttggtgcgggttgcccgcagcttgtcgaagaccagggttagatcttctactacagtcgacccccttctagtcttgaccacgatgtcatcgacgtaaacttccaccttgtcccggatcaggtccccaaaggtcttactcatcgcccgaacaaatgttggcagggcgtttttcagaccataaggcatcacaacataacagta

SEQ ID NO: 145726 - DNA, 691 bp, Zea Mays
ggaagagttcttaccagcagggacgaggtacagaggtctgaccaaggagaatggatggcccgcggcggaaatctggcaccggcaaggaattgggagccgaattcttggacgtgatgggggtgaacacgaaacctggtcggcggcggcgctgcttcctctctctctctctgctctccttctcgctcggcttcgatgcggcggcgcaagtacaggacgacgacgcccacaatcccacccagtgatggtgacgagatgcgcacgagacgggtacgagtcgcagagctcactgagatgagagagatgattggagaggcaacgacaacctcgatataaatacccagagtctggccggatagaggcagcgaacgaccacgccggattccgcgccagatggggagtccgcgcggggaagacgtcctggtgtttcagggcccaccaagcagtcaacgagtgcgcgagtcgagcggtacctatcccgcgacgtccgcgcgttaggtaggaagggaagtccgggtccctttgatcgccagcgattaccacgcggattccgttcaggtgcggatgagaacgatgacaagcgggacccacctgtcaaccactggatgtgtatacgcgtgaggagccagatgattttgggccggccaagcgtggttgaaggattgggcccagtttagtgtttttactttattct

SEQ ID NO: 145727 - DNA, 970 bp, Zea Mays
cgacgggagcacgctctcagacgtgttctgcggcggtgaggtaaggttcttgatgccctatcgcggtaatattcaatcggttgggtcgacaagctatgttaacattcaaggatgctagaacatggcatggaggggaaggaatgaaccttagaatggttggtcacggccgggtgcctcacggcggcgtaaatgaccacaatgggggaaaactggaatttgtgagctctagtgggtaattggaagcgaggaagggtgcactaggcgcgtaaccagaaggtggatcagggagagcctttaatttatagtagctatgtgagtgcttcgcgaatttggaatgagaagatctcacggccgaaagggaggtgagtcaccggagggcaactgtcgtggcgctcggtgaggtaaggcccctggcggtaaatgggttgtccacaacgacctattgcgacgtggtaacatctccaagcacgtggcatcctcacggcaagtgccgaatgccaacgaggacattccgaccggtcgcgaagcaagtggttacggtggccagctcataaacttatcagtagtcacgatcttttcacttgcccggtaatatccacgttgatccatgaatgaatcttcacggtgagctcgaatcgcagtgcccgatcatcggcggtgaggtacactgcaccaagaatcttcttcagtgtactgtaccatggcaatgttcattcagcgcgcctgacagagccatttgagagtcatttctcttcaactttcgttcaacaacctaccaagccgatcatagcaaagttgttatccatcatgtcagctttaattttgttatagggttcttgttcatacctccactcgatcaagcacaattcagctctcaacttgatctaatgccattgtcagtctaaccttgaggccaacccccgactaacagcccaacttccaggccattttgctccaatttttgtacaac

SEQ ID NO: 145728 - DNA, 437 bp, Zea Mays
tatagcattgatgtagggctaggaacataggagtttacgtagataatggtgcagggctagagagcaagaaaactaccgctggtctacgatggactagttgccaaggtggtggaggtgatggatgacatgatgcagtccgggatcagggctgaagtgccgacgggtttgggggcacagaggaggaggcactcgagggaggggagaatcagcgcacaggggaggcaacgccagagagggggatcaacgtttggtgggctagggcagcaggagaagaaactagactgttgataccatatagaaatgtaggtggaaaaactaaccttacgtgggggtgacccttatatatacgagagcatcgacagagaagtcggagctggggaagatgaggttgctctcctcgacggcgagcaactctgagcatgatgacgttgatccgc

SEQ ID NO: 145729 - DNA, 384 bp, Zea Mays
atgcatccatccaaataatcagtagggacagctcaagcatactttaaggtggcttcactcatacacatgaatacttgtagtagtataggagtagtttttatttagcaacttgatgagccgaaagcagagggcacgtatgcacttggcagataagcatcagatattaacgtctataatacatactttctctgttctaaaatataattcattttaaactaatcatatatttattaagtaacatatgaatccagtttatatatagattcgtattcttagcaatttagaatctggagatgatataatgtgtcctcacccatcaaataacgctaaaaacatatttaaaccgcgcaccgcaggcgatttttgcgcaaagtatttccctca

SEQ ID NO: 145730 - DNA, 393 bp, Zea Mays
ggagggaccaaataggagcggaggggaaggcatgcggtatgattgatgagtcggtgagcgcattttctatctcttaaataagcatcatcagcattatgagatggggttgaactaatcatggttctcgttgcataacttccttttttgagttttgcttatgcagctactcaaaatcttgagctcatgtacaactatttgaaggagctattgaaggagctgaagtgcaaaactgctctacaggttgtggaaaaatctctacacagtgttgctgtcatcctggccttcgccttcgccggtggcctgtacgcgtacacacgctcacggggctcatttccaaaagctgggagtcgtatgctaatactggtgtctttgcgaagcaggtaacaacgactc

SEQ ID NO: 145731 - DNA, 446 bp, Zea Mays
gtttggttagtgaaatcaaacacgtgatcatctaactgttccttctcaagaaaaggcacaagaccagatgggagaagtgcaatttcagcacggagacgggcaccgacattggagtgaagcgtagagaaagggaaaacttcttcatcaaagatgacatctcgagaaatgtatactcgcccggattgaatatcaagacacttataacccttgtgaaggttgctataaccaaggaaggcacactgcttagaacgaagttcaagtttgtggcgattgtaaggtcggagattgggccaacatgcacaactaaaggtgcgaagagagaggtagtctggtttttgttggagtaaacgctcaaagggcgtttgattatcgatgactttgctaggcaaatgatttataagaaacgtggccgccataaaagcctcatcccagaatttcaagggcat

SEQ ID NO: 145732 - DNA, 535 bp, Zea Mays
tccaaaggcacctcaaagtgaacctgccgttcatcatcacgaatttcttcaagccaagcaaccaaagcactaacttctttggcagagggtcgcactctaaggcccaaaccgccatcaccagcaggaggatttgacacaaaatgggtaaaggccttggaaggaggcaggttccaggccgagtatgcaacaggggcgctaacatttgacaccttgcctctgagtatcatttcgagccggctcaccaagtccacagcaggaattctttagttggttacccgagttgagtcagctaggcctcggtacagataggtcgggtatgccctatccttcagtggctgaatattcttgaagacaaagtcagcaaccacagcctctgcagtcagacccctctctttcaacaatccaacttcagctagcagagcccctgcttcagccacctcctagtctgtgggggactcggtccaactaggagtgcgaacatccagctgcctccctgaccgtggggggacagaattcccatgattctccacgatga

SEQ ID NO: 145733 - DNA, 488 bp, Zea Mays
caggagtttactccaaccttgtacatagtacgagatctaacatctttgtgaacccctggttgaaaatgaaaatgctgtgaatttaatcgacaaactggcctcgccagcggtggcggtcaggcaacaactccaagagcaaggattcgctgcctccatcgtcaattcatacagagcaataccaccaccattgtggcagccaagcattcgctgcctcgttccttgcagtggctcttcctgtatttgagagtgattagaaccatccaaaccacagtgggagtcgaacccacgaccttctgatccgaagttagatgcgctaatccactgcactatgcggtcatttgatgatttaacatatcttgcaggctataaataagcactcatttaaatgacactcattagatgattggacttttctagcagatatattgttttgagataatattgttgctcatgaaaacaatattccctagatcccacatagaacgtgg

SEQ ID NO: 145734 - DNA, 510 bp, Zea Mays
ttcgccttcggctcaaaagattgcaagtgttggtttcgtccatatcaaagcaatttatacaagagcgaaaaggtaaaattatattacaagatattcacaaattagtacagtattttgttcaacaaacaattacaattctttgccaaataacaaaaagagaccctaagttttctacagatagttacaaaaggaagttctaagagtcttcagcccttcggaacaagctttgactcaacaaccttcgtcgccaccatcctgcagacagatgaaagtataaggtaatcggaaatttaataaaggaaaaccaaggtaaaaagacaggtaaaagtttcatactaaattgagcagttttctagcttcatctccagccaactcacgcccgcccttagcccaaatttgtgtaatgaatctgtttcctatgctttgggatttggctgggatatcaactatatctgacatcgaaagattgaaagttggcttgttaaccgtcttggcgtgagtgcatccagc

SEQ ID NO: 145735 - DNA, 276 bp, Zea Mays
ggccactacctacggctcaagggaacctcaagttcactttcatcgccgtcgaatattttaccaagtggatcgaggctagggcagtatccacaataacgtcgaagactgcccaaaagttcttctggcaaaacattgtttgccgattcggagtcccgtccgagctcacagtcgacaatggcaaacagtttgacagccaggacttcagggacttctgcttctccatcgacaccaagcttgccttcgcctcagtataccacccgcaatccaacggcaaga

SEQ ID NO: 145736 - DNA, 790 bp, Zea Mays
tgacatcttgatactggcctgatggctgttgttatacgagaactctacataaggcaaactggactcccagtttctgtcgaacgttaacacacaggctcttaataaatcttcgagtaccttgttgaccctttctgtctgaccatctgactgggggtgataggtggtgctgaagtctagcttggtgcccatagcctgctaaaggctcatccaaaatttggaggtgaactgggttcccctgtctgacactatctttcttggaatgccatagagtctgactatctctttaagataaatccgggcaagggtggctcctccaaaggtagttttcactgggatgaagtgggctaccttggtaagacggtctattattacccagatagagtcgttccctttttgcgtccggggtagtccagttacaaaatccatgcctatttcctcccacttccattcgggcactagaaggggttgcaataggcatgcaggcttctggtgctcggctttagttcgttgacaagtgtcacgccgggccacatactgtgctatctctttcttcatccctctccaccagtatatggttttgaggtctaggtacatcttggtggttcctgggtggatggagtaggctgagttgtgagcttcatcgagcaggacttctcgtgtttccccttttggtacacacagacggttcttgaaccaaaggactccttcatttgtcctgaggtccggaagttgttctttgcgagctttttccataaatcttgctgtctccgtgtccaagcgttgagccttg

SEQ ID NO: 145737 - DNA, 858 bp, Zea Mays
gatgaatggcccttcccatagcggtgacaacttgtgtcgtccttcctccgttagaattcggcgaaggaccaagtctcccactgcaaaggaccggtgtcgcacaaatttatcatgatagcgcctcaaggtctgctggtacctagccgactaaattactatgttcaatcgttcttcctccagcacatcgatatcttctagcctggtagcttctgctttggctatgctttcgaaagtcaacctcggcgccccgaatattaggtcggcgggcagcactgcctctgacccatagaccatgaagaatggggtatttccatgtagagctcgactgggttgagttctcaggctccaaaccacgtatggcagctctctgatccattttcctgcaagcttttcactcttgtcaaatactttcttcctgagtgcttccagtatcattccgttggctctttctacttggccattggctcttgggtgcgctactgatgcatacttaatctggatgctccgctactcgcagaaatcgaagaattcagagctggtgaagttggatcccaggtcggtaatgatgctatttggtatcccaaacctgaatattatgtcttgtatgaattccactgccttggctgaggtcaaagaggcaatggacttgtactctatccattttgtgaatttgtcaatggcaaccagtacgtgagtatagcctccctgagctttcttgaaaggtctgatcatgtccagcccccaacatgcaaatgaccatgttacaggatggtctgcagctgctgtgcgggtaaatgttgttgctttgataagaattagcaagcttcacatctctggactaactcggcagcatcactc

SEQ ID NO: 145738 - DNA, 391 bp, Zea Mays
gacgacatcgccaacgggagcctccactaggcaactcgtcgccctcaaagcgataaataacaaggagtcactccccgacaaggtggcgcaaattgaggcagccgacctcaataaagatgagatggcgcttgtgatcaaggggcgcaaggacttctccaataaaggaaaatcaagggggaagcgtgcctgcttcaagtgtggtaagttaggtcattttattgcacaatatcccgataatgaaaatgactaggaacaagacaagaaagggaacacgataaaattctactagaagaagaagggtgaggcgcacattggcatggagtaagactcggattgatcatcctccgaatctgatgatgaaatacttgccgcctctgccttcaataagtca

SEQ ID NO: 145739 - DNA, 416 bp, Zea Mays
tcgttacctccaacctctcggggtcccaccgggtggccatggatcacggtaagcgtccaacttcggaatgctctcaccaaggtcagtccaagcgccacccgtcacaggaaaaggtgggtagtgaccaggcactcgcatgactcctgtccatccattgtatcagtgactagccttccttatagagtagtgggcccaagcataggaggagaagtcatatcgctttcgtcttccagctcgtcagatggggaatcgaaggctggtccttgtgacagcgagcctacatcgtcggttctgtcggccgacgctatcggcgccccggtcatcgctggtcgtcccgagacagacgtgaggtttattggcgctggctgccaaccttatcgtgttatcttatgcccgagggtcgccacttcttcctc

SEQ ID NO: 145740 - DNA, 298 bp, Zea Mays
gcaaacttctcatccgaggaggacatgagggtttgtcatgcttggctttctatgaattgtgaccccatagttaacacaggtcagaagtatcaaggtttttggaatcaaattggagaggcatgcaactcaagatgatgatcaatgccagaaaggtctatgaaatctctgatgagcaggtgggataatatcaaaacacattgctctatctatgctggttacatgagtgatgtgcttcgatagaaccctagtggccttgctaatgcagacaaggtatgacttggtaatcatgtgtttttat

SEQ ID NO: 145741 - DNA, 423 bp, Zea Mays
cagctgcaacaacagcttcaacaacagcagcaacagcagcaagtgccattgcctccaccaccaccaccagttccaccccgagacaagcatagagagttcatgagtcataagccacctacatttgcaagctcacctgatccactagacgcggatgattggctgaagtccgttgaaaagatgctgaatattgcacagtgcacggaccgggagaaggttttatatgcttctggacggctgacaggtcctgctgctgactggtgggattcttatactgctgcccacgatgctgctgatactattacttgggcagagtttagtacacagttcagaaactaccatattccagctggtatgataaagatcaagaagaaggaatttctgtcgctgaagcaaggaagtatgtcagtcagcgagtaccgcgac

SEQ ID NO: 145742 - DNA, 613 bp, Zea Mays
agacccgagacacagcgcatagtgactatggacggcgggttgatttaggccttacccaggggctcatatgcaaaaccaccacgacgaaagggtatcgcgcgcacagaaccgtaggatcggagttctgtggctgagattagatcgaccattaactatcccggtatttgatgatggccattggatcagtgatcgacgaaccgcagcgaccctcaccatcccactaccggagccttcgatttccagatcagtggtcacgatttaaagcacaaaggagtaagcgcaggatccaatcgtagccgtcgctgatcatccaacggtccacgatctccgccccaacagcgcccacacgcacggcggcgccgccccctgctccacaccaagccgaactccggcgaggtcgcccatcggtgttccccgcgtgctaagcactaaatcgactcgagatataccatgcggaaggaaagacggacacgagggacggatttcttaccgaggggttggagcacaagagcgtggtcacgacgatgggcggaagtacgacggtggcgggatcacggtgaggaattacccgcgctccccaaggtccgccttccaattaaggtcgcggacggcc

SEQ ID NO: 145743 - DNA, 337 bp, Zea Mays
gttcaagtcctatagtcgagttgtagctggtatgtagcactacaactttgatgcagagccttggatgagttgctaaggaaaatttagagaaaatgtgacttgaacttgctctgtcagtcgctctgaatagggtgttcaccatggtacagtactctgttgaagatcagaccgccagcgcccaaaagatctcgccgccggtggctgtcgccgttgattgccggtcattgcgattcgtgcgccgtggccatcggataagtcccgcccggtaaaaatcctcgccgccggtgagctggactccactccgaggacccccgtcgtactctcccccttgcccggc

SEQ ID NO: 145744 - DNA, 804 bp, Zea Mays
acgtcacaagataaaaagaagcaattccttttcatctcctataattaatgaaatcaattattataataattttaaaacacataataaaacatttgttagatagcttctctactactataaagcaacaatttaaattgtcgttcgatgtcacatacgaagcatgtaggtctattcctctcccccaaccagtggcccattaccccatagataggttataaaaatcagtcaaaccccattagtaggtcgttactccacatatgagtcgtaagaaaccacccaagctcaacatgatatgaagctgcatgtagcgtagcactcccacatagtaccacctcgctcgctaaaagagaacgagcgaccgagcgagctataaaaaaggtggtcggactccttttcaacttgtagctttctaggtcttttggctacaataaagtgtaatatttgtccttttgtgcatgccgtcgtaacacgcatgcattgtagtagcctctactactgtaaagcaccagtttcgatggtcccccgcttctcgcctaataaaccagataagataacatatatcttgcttgcatgagcacatggtgtcccgcgtcacacacgcataagtatgttcccctcttcatcttcttgcctaacaaactagatatcttatgtcttgcttgcatgcgaagcacataagtctattctcctccctcttctcgtctaacataagccttatctctcgcttgcatacatgcgtaagcaaccactacgagcacttcctcctcctcgttgtggtcattgtatattaaccccccaaacttc

SEQ ID NO: 145745 - DNA, 375 bp, Zea Mays
tacactcatgtattggaagcaatcgacaaattcactaaatggatagagttcaagcccattgcctctttgacctcagctaaggccgtggaattcatacaaggcataatattcagattcgggataccaaacagcatcgtaactgacctaggatccaacttcacaagttcagagttcttcgacttctgcgagcaaaaaagcattcagatcaaatatgcttctgtagcacacccgagagccaacgggcaggttgagcgagccaacgggatgatactggaagcactcaggaaaaaggtcttcgataagaatgaaaagttcgcgggaaaatggataagggaattgccctatgtcgtctggagcctaagaacccaacctagc

SEQ ID NO: 145746 - DNA, 517 bp, Zea Mays
gaaatctcaaattaattttagtatacaaattaattttcagaataaagaatgccaacctcaagctgagcaaggacaatgcggacatcgatgtagttaaagaagtggcttgaggttgatcattgccttctgctccagtgaaccctccccaaagactgaatgatcaccaaccacaaccataatatataagtgcggtgactatgcagtgcagttgctaaatggatcaaggaggagcaaagtagatgcagatggagagtcgagaagtgaacgattaggtacctagaacgtacatcttgctgcacctccactgggaggaggacgcgcccaacctaggcacctttgagcggaaggacggcgacactgcactccatgaccaagaagcgcacactcactctgctctagcgctcttcactgatgcaacgtggacctgaaagtatgccagataggcgtcgcgtggatataaagtcaaaaatggcgtaggagatatttgccgggtaccaggtctattcctacatataag

SEQ ID NO: 145747 - DNA, 525 bp, Zea Mays
gagggaaattgctaagtatatatctgaatgcgacacttgccaaagagtcaaggccagtcatttgaaggtagcaggtaccttacagccccttcccataccatcttggaagtgggaggatatttgcatggattttattgtggggttgcctaatacctcccggcaccacgattctatttgggtcattgtggatagattaaccaagacagctcatttcttgccggtacataccactcacaagacaaagaagtatgcagagatctatattgaccaaatagtgcatttgcatggaattccaagaactattgtatctgatagaggagcactgtttgtggcacgtttttgggagcagctccaaaggtcactgggaaccaccatgattagaagctcagcgtaccgtcctcagatagatggtcagacggagagagtgaatcaaattctcgaggacatattgcgagcctgtgtgctgcactatgggaagaattgggacaagtgcctttcgctggcagaattctcttacaacaacag

SEQ ID NO: 145748 - DNA, 442 bp, Zea Mays
actctgatgctcttctctcccgtctttattctcggatcgatgccaatgcgatcgagctccaacaacgtctcccggccgtactaggccaaagatgagattccgtgcatggatgatggatcggagagcgagagcgacggaagcgacagttttgtccacgcaccagggtaaagggaagaacattacactgaggcgacaggagaggcgagaagtagacgacggcgccgggtgaagcagatcgatggtggagctgctggtcgatgcgtgtgtacctttgctagctctgttccctgagccgctgctagctagctcggcagcagcggcttcgttcggagacgcgtctctccctctctctgtgtgcttctctgcgtcagctgctgctcctcatgcgtgcacatgaacagaccatgcatgccacgcgcgcgcgcgcgcaaaggttttccct

SEQ ID NO: 145749 - DNA, 415 bp, Zea Mays
ccgggtaccgaaggcagcagcattagctggtcctccttcttcatataattgccaagaatctcattgcacatggtttcaatcatttccagccattcattgcatggtttcttgaactgtttctcaaatttgaagcgataggggagccgaacaagctcatactttccccccttcttttttcttcggcatcccccagccgctagaagttggaaatgttctatttgacaaatattcttgcactaggtccctagtactaatctcggcagctaccactctaaattcaactttggccagctggcacggggagccaagttgcatgtggcacaagggccttgtcattctaaagcttaatctcatcggactcatgaccatagtcatcaatttttccctcttcttctcatcagcttttatatagaac

SEQ ID NO: 145750 - DNA, 483 bp, Zea Mays
gcacggcctagtactgcgtgcgacctcgggtgttcctttgcccggtgggacccacgactcatcctctctctggccatcgcgcgcaacaacccgttgaccgaccggtgggccacacttgcagtccatccggtgatatcgccctcgagttctctctgcaatggcctccccgcgtccgccgcgcgcgcacctgcggacccaactcctcctttctcccccataagaaccatggtttgcagcgccttctccccgagccggttcatcaagaagccctccattaacccacccgattcgcagagagagacgagttcaagaagcatgttggtggccgccgcctggaccgatgattggagtcaagtattggggcggggcgctccgcaggagctcgagagccccagctcgagctcttcttcacaaacaccggcgccttggagctttgaatcggctaggcacatgaccagcctctaccacggaccgctctgtgac

SEQ ID NO: 145751 - DNA, 298 bp, Zea Mays
tgccgtgacccccttggtgcagtacacacgacgtggacatggtttggtggtggtgtgtcctgttacggtcgtcgtggacccataacgttgatccaagttccctccttaccaatctgtttggttgtttgcccttcctcgcagacttgcttggcgggagcttggtcgtttgtcccgcctcgcagacttgttcaacaacgacatggtcggtatataggccagagagaggtttatgggcctcgccttgggtacccctttcctgggtacacaatagcatccccgagccttcgcgtgactcctt

SEQ ID NO: 145752 - DNA, 649 bp, Zea Mays
ggatcttcatcttagctaacttctcccactcaaagggttgaggcgaagatatagctgaggtcactgggttgtcgaggttctcattgttgtgtttgctcttgcacatcatgacttctgatgaaaccttttcctgaagacatttcaccccctgagatgtggcctgcaaaaaatgattctccatcctcatgaactattgcatcggtgattgggtatcatctgttgcacaaacatcctcagtccttctagaatctgacaactaataggtataaggaaggtggtataccaagattgagcatatggatagataggatatgggccacaagggaaacccgttgatctaatttaatcaacaactgatatcattgttaatacaaacacacaagctagatgctaaatgttgctttaaaagaaaatgttggtctctcttatgggataaaccatttctcctaggccatcatgcaattggacaagagatgataagagatcaagatggagaggtagcaaaaaggtatgataggttaactgagagtaggtcataaggcatccaccttgtagaaaaaagaagcaatggaaaacaatcaaggataaatatcacaaggtcttcacaatgttcgaagatcaaacttgagtcctctcgcttttctcaatt

SEQ ID NO: 145753 - DNA, 395 bp, Zea Mays
gacggtgcaacatgctcgctcttactcgacttagagtgaccattataccctactaacggagcaatcagcttaaatcggcaaagacttaagacggtgcaacatgctcatgtttactcgtcataaggcgatttttatgccttaccagctggtcaaatggtataaattaggaaaagattccaaaaaccagcatgccacgctcacttctgcaaatgttcacagcgactgttgaattctaacaacagaaacaaaatgttatagccttcaacgccaagaacacattctaatatcttaccgagtattcgagcgcactgatcacacacacacatatagttcacaaatgcattcagtatcttctaaacacagcaaaacttctctactcggcaatgtctttcgca

SEQ ID NO: 145754 - DNA, 353 bp, Zea Mays
ggaaactataggggctcttttgcgaagcatacaagccgaagggagtatcgctgtactggggccactagatcaattctggacggcccggattaggccgtggcttttatgaaaggggtatgttgaacccaccgtgggatcaagatcggatgctcacaattaactcgaagctcatccgaatcagtatgcaatcacgatcgtacgatctaagatctatggttaacaatgcacccagcaagattcaatctgaaccgcccatagccgatcgaatggccaggcggtttcttctacctacgcaccagcgcacgacggttgcgccgctggccacgaatcccgagcgccaccctccctcaggg

SEQ ID NO: 145755 - DNA, 419 bp, Zea Mays
gacttgggtagcaccaaaaccctaaagtgttaaaaaccctaaaaagacccttggaaaaccgtagattggaaacctagggggctaagtgtaaaatttgtacatttttggacccaagtgcaaataccaaggtagtacaacatcacaaactatgtgtttctcacatttgaggatttgcaagccaaatgatgaagtttggacttatttgcaaaaaggacaccccgtacatccctatgcctaagtctgagaaccagtgcatagagccaactttggaaccctgtatctttcagttcatgaggaatttgcctagggtcaacacatcaaacatgtagaactaatgtaggagtacaactttgcataagtgattaagccttggtgtcatgtaagatttggagataattaggtctaaagtcaagctgaca

SEQ ID NO: 145756 - DNA, 621 bp, Zea Mays
gagattgtgtgctggtcgaccattagtcggctcggcggtgcacataggggctgcacacagatggaggacggcaatggcgcagcgagagctttgactcacgtccattagatagcgtgaaactggttgtggcggagcgactagaacgcgccgggatcgaggcatacacgagcagagcagtgaccacaactagcaatggggagcggcatggtgatcgacagggaaccccagcctaggcgttgcggttgcagggagccggagatcagggaagggggcgagcacgaggaaggtgtcatggggaagaggaaagcgcgctggcgagctagagaatcgcgggggccctgggcttgtgctcgtgcgcgatcctggcgttggaggtgggaaagctcttcgacgtcttgcgggagacgttggccggcacggaggaagggagcttggtgaccggcctggatctgagggagctcgtagggggagccggctagagaccgacgcagggagcgcggggattctctatggcgctgttgctcgcctgctggagggcgccggagtggagaaactcgccgccgggagaaggaaataggggagggcgctcggcttgcatggcaggagcagggaaggggaggc

SEQ ID NO: 145757 - DNA, 511 bp, Zea Mays
ggcgggcctgggtggccagactcactgtgtgtcaccgtgacgtgggccccacgcaccagccgaaagacccgctcgcctttgtcttctccgcgcgacacctgctcctccgcgcttgccgcatcgtgccgtaagctacggagtttgttgacgccgttgcgcctacaaatattggagcccatgacctcgcccgctcgtgctcctattcctccgtcgctagttccccacacctttcactgcgtcgccccgtcccgtgcgaagaaattgagcccgccgccggtgattctcctccgtacctgcgctcgggtccgcacgtgtggtcgagggcgttctacaggaacctgtgaagctgcaggagccctcaattcaggctaagaacctcgggggactcaggaatttctcgccggagtcatgtcaccgccgtgcgccgtgagtgtgctcacccgtcgtccgtctccggtgagtaagccttgcgccgtttttactctagccctgtgatagtgtagcacctagt

SEQ ID NO: 145758 - DNA, 565 bp, Zea Mays
caaattctttgccaacaaccaatacaaaactaaaattgggatatgaagcgttgcctcctctttctcggctgtttagccacgctgcctgtagagacgcaatggcgatggaaagtaatgacagcggtttgaggcgcttgccgatgggggaggtaaaggcagtgttgcgagtgggtcacgacggcggcggctggcgagtgagagggtagcaggatggactgctcgatgttttctatggtggtgtggaagaatctgtgtgagagaggcggagatggggtaagagggaggcgcttgccgatggggaagccaaaggtgatggtggctagcgagtcggagggcatcatgatggactgctcgatgttctctatggtggcgcgaaagaatctggatgagggaggctaagacaaggtaagaggaaagttgagggttaatttacggtggcaacagtaaggaggaggaggaggaggaagtgctcacagtaagaggtaaggcttatattatctagttgttagacgagacatgaggaaaatagatctactcgcttcgcacgtgatgcaagacacacgac

SEQ ID NO: 145759 - DNA, 579 bp, Zea Mays
agggactgtagtattttcttatcaatgatactagggtttctttcacccaaccggcatacatgtatgccttacaaggcctcggactcagttaacccactcgcggcccataactctcacatttggcttgcgcttgcgacggcccagtagataatcagctccttcgcttgcttgtgctggcactgtatttcccttggtgctgacaattccctccccatgaatggccgcttgtccccaagcgggtgcagacggaaaacgctgttgcagagccacttcatcttcccatgttgctaatgcatcatcttgctcggaccaccggatcttgacttgttccaccggccggctgccacgaataattgtccgccgtgcgatgatctgactaggaatctgtaagtcagtatgtggtgatggtaatgtagagctcacccttgttgccggtttcacgctcggcttcagttgcgagacatggaaaacaggatggatgtgtgcggacggtggcaactccagtttataagccacgctgcccacccgctgcacgacacgaaagggaccaaaatatttgtaggagagcttgtggttagc

SEQ ID NO: 145760 - DNA, 858 bp, Zea Mays
tgcttttatgttctagccaatccaaagggagtgaagtgaaattgccttgagctcagtgcgtctacacctagaaagcaaaaaggcaacccaagccaagccgccagagaaaagcgaacgaacgagcatagcgactgagtctcggttaattcggttaaaacgatcgaaccatttattggttcttcttttctatatacacatttaggttctcattttctagaaatcgaattttataaaaaactgaggaaccaaaccaacctgaagaaccgaacgtccaggcctatccgtcttgccgtgtatgtgggtcacactatagatactctgatgcttaggtcctccatgactggggttgattggtctcacaaggtagagacaggaagtgccaaagacaaagaccatatgtggtgaggtgctatcatgttgacagagacttcccaacacccctttggtgtgccgcactgttggcccagatgaagttcggtgacgacgcggcctgtcgtggctaacatggatcaacaatatctacctcattttcataacagacgagtacaagcgtatgtgagtgatcattctgtgagtgataggtgggcccgagaggcagggcccacgtgcgcacgctgaattcaacctagctgggactaggtcgggacgtccacctcgctgagttgctcggcagggactaggttgggacctccgccttggtgagttgctcgatagggactttgtcgagacctccatctcgttgagttgctcggtagggacctagtcgccaggtggaccgttaagagtcacagaactactacaggtacctggttctcgggtacctgtcaccatgtcaaacgtgggcttaaggggtaagct

SEQ ID NO: 145761 - DNA, 840 bp, Zea Mays
gggtagacagacaacgtctattatctaactttgttcagacaagtgtagttctgtcagtgagttgtgcccacttcggagcttctttgtgaccaatctataaggttttggagcgtagtgtttgtagtaaagtggtagatcatggaagggttaacaagtttcttgtggagtactgagcttagtgttgtgtaaaatcttaagtaaaaggcatccaaaccttggttgttagactgttgcagtctgttgtagtttcagtcaactgaaactgggttcaatgtgtgtgctagactttggagacaccataactttgaatctatgcattgttggcctggcagtgctatagcaacctaaaagagctatgttggtgaatagttttggggtagtgaggttggcctatccttattcagagttgggagaacagaggagatgaatctaggtgattcagtcgagcactagcagttcagggcttgtccaaaagatctgaagaaaagatgtccctccactacctattcctagggattctaggtaagttgcggataagaataacttgatcatggggggaattactgtggatggtttagggtttagggaagtaaatgaagcaaacttgaagcctatctaaaaggttgacttgatgcaggatggaggcctggagaataaacttgaagcctatctataggagatccaactcaattccccacagaacagccacaaaagggtccctccactacctattccaaaagatgggaaataaacttgatgcaggatcgaggtcttcgtcttgacgggaagggaggctcgaatgggtcaatatatatagcccagttataggtcctggcggcg

SEQ ID NO: 145762 - DNA, 648 bp, Zea Mays
caaaacaataaacctcacttttatgaaagttgattttcagaccagacatcttttcaaacaaaatcaagataaattttaagttccttgcaaattcaagattgtcctgaagcaaaaaaaatgtatcatccgcatattgaagataagcacaaccattacttataatatgaggaatcaagccagcaatcagttttttttcttgtgcttttttaataagacacgcaagaccatcagctgctatgttgaagaggaggggggaaaaggggtcaccctgtctgacccctttatgagtagaaaaataggggccaatcatgccattagttctaatagcaaccttccctcctttcaccgttttcatcaccaatcactccatttgtctccaaaacctttttgttggagcatgctatataagaattgccaattgactttatcataagccttctcaaagtcaattttaagaataatcccattttgcttcttttttttacttcatgaataatttcatgaagagcaacaacacaatcaagaatatattttcctttaacaaaaccaaattgatttccactaatcaccttgttgatacacgaagataacctattattcaaagttttggtgatgattttataacaaacattcaatagacaaattggt

SEQ ID NO: 145763 - DNA, 380 bp, Zea Mays
gacttgggaaggaagaaggttctgtgtatttcttacatgcctcacgcggcagccaatccctcctgcataaacctctcggcgcccactagttaacccattccggcccgtagacgatggcattttccttcctgggccttgacgagcgacgcagcccagccgcactgctgacatcccctcctgctttgaatgctggttgtccccaaacagcggcatgcggaaactgttgttgcaaggcctgttcatcctcccaggtagccaacaccggcggcatatgggaccattgaatcagcacctgagcacacggagtagttccatgagtcacggtacgccgttgaaggatcttctctggcacactgaactggtagtatgcagttggtaat

SEQ ID NO: 145764 - DNA, 334 bp, Zea Mays
ggcgaagtgattgttgcctagaatgacacctttttggagaaagagttcatcccaaactaagccagtgggagcaaggtgcaacttgaagaaattgaagaaacactcgaaaaggtttcacccattactgatactccataggaagcacaagatgttatacaaccaattgtcaaggcaatgcccctatgtaggccggagagagcacgtcacactactgatagccactcctaatcatagggcatcttggcatattattgttggacagttatgagccctcaaactacatagaagcattgatgggaaattgactatgagaaatggcttggagccatgggat

SEQ ID NO: 145765 - DNA, 572 bp, Zea Mays
ttgatcttctttcttcgtataattgcccaagatttcattgcacatggcttcaatcatctctaaccactcttgactgggctctttgaaatgtttcttaaacttgaactgataggacagtcgaaaatgttcattctttttcttttctcctttgagcttcagcatattccattcctttaacgttgggaatactctattggctaagtattcctgaacaaaatccctagtaccgatatgctcagacacaactctaaattcgcccatagcatctgggcatgatgaccccggcgtcatgcggcactgggcctagttaacccgaaggttaggttcagtgggctctgaactagcttctcctttttctcatcaaccttaacataaaaccactcagttttccaaccggttggccatttggtgcggtagctaaccaccggagtcttcatatctttgcggtaagcaaagttgtaacagccgaagttctcgtgtagcccatcttccctagccttcgtctgatagtgaagctcgtgcacccggcaaaaagcttcggcaagcggttccactccttggcttcggagagc

SEQ ID NO: 145766 - DNA, 343 bp, Zea Mays
gacgacctggccttatcggctctgatagcgtgcctagccggatcgtatagagggatacaactgtcagtcacggttcttgtccgcccgattgcatcccgatagccttctgctcggagcctctgtccgtctgtctgtcgtgtaccagtaaaatcagtgtgtgggcgtcgcgtcctggaccctggacgtctggagtatgtgcgcgcgcgtttctgatggctgctgctgccatcgtcaaaatcggtgtgggagatgttgagcttgagcgtgcacatgcatgtccaggtccaccatgtatttattttgccatcgtcaaacaggttctagagcagttcgattctgtgta

SEQ ID NO: 145767 - DNA, 369 bp, Zea Mays
gaaaggccctccgatcggttagagccaatcctgattgaggcccatagcatcaaacatggcagagtagaggatgttgagcccgcatcccccatccatcaacacttacgacaatcacaccgatccgatgatgagattcacaatgagtgggtattgcccggggtcgggggacatgcttgggatgatcggtgcggtcggaagtaatggcgtggtcagacagttgaggaaagttggaaccgtctgccaaacttggaacacctcgcatcgctcaagctttcggtgcctctttgacgcgtagtaatcgggttcgccgaagatcaacaaacacctagtttttgtcggggaaaacatggctcttctcttcccgttcat

SEQ ID NO: 145768 - DNA, 277 bp, Zea Mays
gacgaagcctctgctggtgatggtgctgctgcggcggtgcgatatgactacgagcgagcgagcagattgctttatggcttcctgcgtagtagactgggctctaaggaggaccaatgcaatgacgtggccgtgcgtgcggtttaatataggctggcaggcgagcgccacgtgtcaccgccccaccccacttgaacgaactcacgctgacgctcggtagattcatccgggagtggcatcgttcgttggtgtagtggaagtatctctagtctgaacgctg

SEQ ID NO: 145769 - DNA, 284 bp, Zea Mays
agtgattaaggagcgtcgtcgccgactcacaagtgatatggtggagattttatcatgtataaaggactgggaattagcggactcacatatgcaacacaatgtggagaaggacaccaaagaaatggaacttatacatgaaagtatgatccttgaagatgcaacctctgtttgaaatgtttgtaatgaacacttatttgtattctgtactgtggactgtaatgaacactattactttaatttagagctagctgtactcttttttcctttctaaggttttctcatga

SEQ ID NO: 145770 - DNA, 428 bp, Zea Mays
gtatggtcctcccttttggcttttccatagaacaggaacttcttttgttctcgacttctcgcgaacctaccgttggatttgatctggctgctcccactcctagtatgcctatcctgagtcctctggaaagctctgccctgagaagaagcgaggagtggtgacgggagggcgacatcgcctcggccgcggacgacggcaggcagcctcgtgttgtggttgctttcttcctccatcgcttcctattccggtttcttccttctgaaggtgacgctcaatgctcccaccctctccctctgttatcccttctcatattcccttcccgaagtcacggaggtcttggcatcgaccttgtcgaacgccgatttgatggtcagaatatccgtcacgcaccgtccggtagtcggcgtgccacttactcccactgttcg

SEQ ID NO: 145771 - DNA, 304 bp, Zea Mays
agtggttgcaagttaattagtagactctctatgtgacgctaggtgtctatgtagaattctgaaaattatggtgccccaaattgtcgagttagaggtttaattcgatcaatgccgattaagtggttgaaaataactagtaaagaagttgtagatgtaaaactggaaacccaacccagcccaatagacccactaagaaaccctaaccctagggcttcttctacaaataggggtgctcacttggaaatctttcactcccacccctcacttttccctggccgccactttcttctccccctgtcttctt

SEQ ID NO: 145772 - DNA, 291 bp, Zea Mays
gcgcgcccctaagcgtatagggcaccaagcataagcctccgtgcaactccaaggagtcgcctgaaggctcgggagctgctgtcgaggtacctaggaacggggtacccaaggtaaggcccataacctattttcggcatgttcgatcgagcaagtccgcgaggcggagcggaccaccaagtcgccgcttaccaagtccgcgagacagagcggacgaccaagtccccaccgagcaagtctgggagcggacaaccaagttcccgccgagcaagtctgcgaagcggacgaccaagt

SEQ ID NO: 145773 - DNA, 669 bp, Zea Mays
attttctgcattctccttttgatccttgcattccctcagagagagttggtttcttccacctttttaccccatttcgatgcttgatgagtgcacttgtcaacaaggtagagagaacttcatgccaatgggggagaatttcaggcatggtacaagggggagagatttttattcttggaggaaaaccttggagatgcgcggggaagattttggggagttcttctcattcacacccttttgttgatgatgtctgaccttctatgaggtttttgagatgtgcttcagggagagacatttttgttaggggagtctttaagcctttcaaaagtttttgctagttatgttgagcctttgcctctttctggaggaattagctttgatttaacttttgtgctaattttgtgctccaacttggcattgtctgctagctagtggtgttgagcccctttctgcctatccttgaggaccagccattttctcacttggttgtgttgagtctttggggaccaagttttgctcactctggatgaccttttctggcttttaagtggcttttggttattcgagtgagtttctcttcttccttttctaatgatttatgttcatgtggtggtgttgacaatacactcatcaagggggagattgcgaacgcaatgttgacttgtcccttgt

SEQ ID NO: 145774 - DNA, 494 bp, Zea Mays
aacaccaccaccaccaacatcatggacacctccaccaccatatccatatatgtcgtatcattatgcatacccgccaccaccgtatgtccaaaatcaaatgtggggcatgccaccatatccatatgggatgccgcagtaccccgcttggggggcaccccaaacttctgtatttgatagactggcacccccactgcaagaccgattgggttcacctcaatccggtcaccaggcgcgggtcctacaagattgccggactactcggcagcaaaggccgaccaatccggcaggggggcatagagaggagatgtctacaggcaccaaaaggacgacgaaaggagatatcatcaaaataggcactgcagatgtcgtcatacaaggaaacaacgaggggccgatggtttttggtaaattggccaagacagaggtagtaagagacacaggagcgaccagcaaagcatctgacctgaagtactccatgccccgatggtgtccat

SEQ ID NO: 145775 - DNA, 1456 bp, Zea Mays
ctgatacgggagcatcggtagcagccagccccagcccctaggtcctcctactcccggcttcccgggcgagaaatttatttgtccatttgtccatagctagctggagccttgattagtcttggtctgactagctaagggagtgtgctacgccaatacacgccatcctctctccgacgacacattagatgaaggcgggtatatataattagacatcgtaatctgcatgcagagcaggcaacctcagcccatggctcttatatattaaaccataccacgtatacgttgttttctagtgatttgttcacactcgacaaagtcagatgatgtcgagatgaaacgacactaatgttctggcattagagtaccaaacaagcaatacaaactaaactcgatccagagcgtctcctcctcccctctctctcggttgtttagccacacatcactggctgcagcgcaagacggtaatgcttatcttagccaactaatgacgtgcccccactcatccactcatgctacatgcaagccgccgaagccgatcctcgtggctccctccactcacgctacatgcaagcatcgaagccgacttacccaacaactgctatcggccactatgcactaaggaacgctatgcctaatgacgtgtgaacccagccacatcctgggaccacgcgtcataaggccatacgacccgtctcttctccatggcatgtgagcaaactggcccgcgtcacgcgcgcgttctagaaggatctgcaacgcaccaagcgcttcactaacaaatggacaccgtgataccgtgcccccgttcctcgccccgtcgtcctcgcctgacgctcccatcccctcgggacgttggttggcgagagggccagtgaggcgactcgctccgttattcggtttgggagagatctggacctgatcggatcagtcagtgccactgatccctggtcaagtggtgtaaatattctaccgtcacatctgatctaccaactccttccgacaaattctgaccacccgccgtcaactctcgttttgcggtcttcacacttttgcgtctatttgcttgttcggcttgaatacgtgcttcagcttgtgcaacacaagacatgctagaaatttaactatttattgctgacattaatatttatgatacagggattgtgtggagctcatttgatttaatgatgcgattctaggaatcccttccttcaaacaataacacacacatttttgcatatatactcctagaaaatggaaatttggagacccctcaagtccaaatccttgtcgaggcaaatttttgcacgtgttcttaattaaaaaccttggtcaagtttttttaatagatatacccagtttattaggcatacttctctttgtgcacaatatatagaaaatgatgactaactatcaattaccgtcaaatgtactcaatcgtttccacaacacttttaca

SEQ ID NO: 145776 - DNA, 462 bp, Zea Mays
tctgatcctccctctgatcccgacaagatttgagttcctaaactatcctttcatttccttatccaccaaaccagacctcaaagtaaaaaaaaaacgtggcatcccaaacctgttctggttactgactgaattcaatgctgtgtttactataactatgtgcggcaacgctgattatcaaacagcccagcttagtagcttacgtcaagattcgtgaagggtatccatccgccaatgatgtgagagagagggagaaggaagcggtgaatgcaggtggacacacatgccatctgcagataacactagagttacaacacagggtttttgtgagaatgtatttctgactgaattcagtaatacacttgcactcctccattgctagctcctaataatggcatcgcgcccaacacctcgcgttgacgtggttatacaaatcaccgccgcagattagcagttgcaggaggc

SEQ ID NO: 145777 - DNA, 356 bp, Zea Mays
cagaggtagaggcaaagggcgagtcccacaacagcgaaggttctactgtcttttccatggtgaagactcggcacatcccaccaggaattgccctgaaaccaaggccaccaaaaataggatggccagaaatcaaccggctgacaaccaaagagttttcgcccacacctaccatccccaacaatatcactagcaccaattccataatgaacattaccatccccaccagcaaaaccacaacatgtaccagcaacaccaagaaatccagcccctaccgccaccgccaccacatcaccaaaatccaccaccactagcaacactcaaacaagaggacttcgtcgatcaaccttccaagggtc

SEQ ID NO: 145778 - DNA, 335 bp, Zea Mays
actacagctgacttgtttatgtaaaacaagtttaagactatgatttgtctctcttggtccaataatatctttttcatatatctatttctggagttctcatattagacctccgtggacgctatcccgaggaaaaaactgatccacggattatgccttcggctcaatcgattcagctatcaatagaagaggtgttcgtgctttcatgtgtttttccgtgccctaatctgatttcattttgtgccagcgtctcacgcgtataaaaatgtggtttgttccatgcttttctccgtgtccgtggattgctatgcgtacttcacttagatctacggcctcag

SEQ ID NO: 145779 - DNA, 679 bp, Zea Mays
tggaggaatggttggaggatgactcatgagagatgtgactacctcggttgaatttggtccgccgatgattgtaaaactgttcgtagcaggtcatatataaagtagtagatttataaagtttcaaataaaaatgagatagagaacgcgatagctgctgagtacctaatattccatcagggcggagtcgaagttcacgcgaagtttaggatttattggagatacacgcacacactacagaatcaagtaaacagaaaggttaggctcgactggagagccagaacctgaacctctggcaagtcaacctacttacttgcacgacagctagcgtctgcattcaaggtcgaaaggtcagcagtgatcgatacggtgaactaatcttggccatgagacgcagagtttcagagcctgcagagtgctagagcagagtctgcaggacgagttgaccaggcccatgacgaccaatttttagagaagaataaacaagcaaactgtgcgatgcatgctgaatctccatgagttgcaggcaagtacacacctgcagttgatcgcagatttgccggccgtgagagccagctagcgacgcctctcgccctcacgctcggagctcacggacgatggatgggaagggaagaagaccattacatggagatgggattgggacatgcatataggacagcac

SEQ ID NO: 145780 - DNA, 441 bp, Zea Mays
ttgttggcacacatcttgttcacaattgactggaacctggagaacatggaatcaatggtctctccagccaactgtgtgaagttctcgtactctcgcttgtacgtctcaaacagtctggtcttcacatgatcattgccctcatggaatctctcaaggatagaccagatctgatgagccatagtcagatgtccaactcgctcaaactcaccaagcaagagacacgagaacaaagcgtttcaagctttgttgttcgaatcatggaaatccatttgaattggagtgatccggtcacttgtagcatcgaaaatcgcatcgaggcaaatttcccaaacccggtaactgatgctctgaagatacgcagacatgcgaatcttccagtacgggtaattggtcccatcgaagaacggaggtttgccaacacctcgttccatgtcgcctacg

SEQ ID NO: 145781 - DNA, 952 bp, Zea Mays
tatgaattgaactaaaggattttatggattttaaggatatattttgatggtctacctgtttagttgagattctagatttttggcaaagaatgtggttcaaaaagctgaaccaatcacacccttagtcaccgtcttccatcgcatgtgccgctctcagccgttgcatccctaaacccatctagtgtcacatgtcccgtacatccatcaatcaccctctagcaacaacaacgccagttatcatgccagccatgaatcggacccagttaccacgctagcctcgggcataaccacaattgtcttatgcatggccacgccacccttgtggtggccttgagcagcgcaatgtcgctctcgttaggggtggcaaaattccttgtgggggtggggcctgcagagatctgacccgttcagggcaggtacgcggacgatttccccctgtggggctaacgagacagggccctaaaaattaacaaggtgaggatggggaagaaactatcccttgtggatccggtaaaaaaccctaatgcgtatctatatccataccacaatatgatccaccaatttaaactttgtaaaactcacacaactaaatcaccttatatccataatctcaactaaatccaccaacaaggcaacaaaaacatccaacatccctcccccgctctctccccctatgcccctgccaccctagcctcccctccccctccctctcactcacgttgccgccactgtcaaccctccattcgtgtcgctgccgccgtcaaccgttcgtcaggatcgtagcgttagcacatactatatgctagtctatgtataaagcatgagtttcgtgcgtcacgtgcgaagcgatggagtatatctgtaacaaacaagttgttatcctcctagatgggtcgtgagaaaacacccaacccaacatgacatgaagccacatgtagcgcatcgctcccgg

SEQ ID NO: 145782 - DNA, 535 bp, Zea Mays
ttcggtatcccaaacctgaatattatgtcttgtatgaattctactgccttggctaaagttagagaatcaatgggtttgtactctatccatttggtgaatttgtcgatggcgaccagtacgtgagtatagcctccctgaactttcttgaagggtccaatcatgtccaatctccagcacgcaaatggccatgttataggtatggtctgcagctgttgtgctggtaaatgttgttgctttgacaagaattggcaagcttcacatctctaaactaactcggttgcgtcactctttgctattggccaatagaaaccagacctgaaaactttcccgaccagagttctggatgttgcgtgtattccacactgtccggagtggatcttgtctaatagctgtttcccagtaaccgaggagacgcacttcatgaggactcctatcgcaccccttctatatagtgcaccccctatgagggtgtagtgggccgactgtctcgcgatgcgttctgctgcagccttatcatccggttcttcttcattcc

SEQ ID NO: 145783 - DNA, 412 bp, Zea Mays
gttgtaaactcgtagttggtttagacataaggacaaaaaaaactttgtgtgggagataagtgagatcctacatctattactacttattaaggctaaggggtagcctgcctctgctttgttctgtcttccgacgatctcaaccgtccaatacgctctagagtctctcccgtccgatgcgcacactctctcccccacacacacccgctcgcgacccccgttccacatcccctattccgatccaaaaccctatacgacacccgtagcccggatcccatgtcccgctccccccgtcaagcagtcgcggatgatgggcaatcgattgcggagacggtgtgcgagagctcggacgcggaaaggtctgcggcgagctgcgtgacctatgttggcgtggagctgaggcagaggagcgtct

SEQ ID NO: 145784 - DNA, 443 bp, Zea Mays
gtttggtagggctgttaacttcctggacactgtgctcggcttctgattcaaaattgataggatcagtctggttggtgacatgggtataaacggggggggggacatggagtgggtactacaaactggggttgagcaaatgatgtttgtggtggaggacccccaggattcatcataccgaaatatgggttccatgcattcctaaagggatatgaagatgtgtcattagctccctgggaccagttaggattggtcatctgggatgtaggactagtaaatgtagaaggatgggttgggtctacaccttggccctgccacaactgaggttcccacataggtgggggaaaaatctggttacctgtattggggctagcaccagtacgacgaataggtgtgtttctgttgttgtcagccattctaggaatgaaatacagcaataaattaat

SEQ ID NO: 145785 - DNA, 519 bp, Zea Mays
gtcacgtctctcgagcgggctgcgccgcagcggattgactgcgccaccgttgggagggtgcagatgacagtgtggccattggatccctagccgacggccatgattagaagcctagataccgattagaccaggtgagtttataccattagatgatgagttgacgagcacgatttgggtaagggataacgtttcacctggctgatcatgaaccgttgatccgtagatgaacgtaggacgttagatcagggcgtacccccttcaagttattaaaacaaggacctcagattaggatccaacggcttggagagaacccactttgtgtagccgagcactttgcatataagcccctggccttatttgaaactaacccgccatcccatgtatggccgtatattggaagtaattacaaaaactccctagtatttgcgatcaggtccctggcaggtgtttatagtataaaatttatatcaaaatcaacctaaaacttgtaaaacttatagcttgcacattataacttcg

SEQ ID NO: 145786 - DNA, 453 bp, Zea Mays
ggaaccagggggcagctagggtttagagggaggtgggtgcagcaccttggggaggagaggagcggctgcaatggggaagaaggggggcgactgctgcaaaaatgagggaaggagggggtgcctgctgctatgagggatggggaggggtggctagggtttttgagaagaggagggagcgatgctcccgatgcccttgatgcgaaaccgacggctcacaaccaaatcctccatccatgccccaaatttgacaagtgaatactcaaatgatatcgtttaaatgagatcttcacatctgcggactccgaacttccaacgacccacaaccattttcccacatccacgcaccgaagatcaacttatggtcaacatttttttgggatattacactatacccccttaaaaagaattcgtcctcgaattcgaccactcccagcaaaacatccaaggtacccc

SEQ ID NO: 145787 - DNA, 508 bp, Zea Mays
tgggtgatgtgaccagaagcattggttagtctcgtcggggggcactgaaggtttttgttgtgttagttagggtttgttgttcttcatcacggcggatggcgtaggtgccttgtgcaatgtgggcgaatcgaagtatttcattctgtggagggcaccggaggtggagtcagtcgacgacggggatcagtggggtagggtaggtctttgtgaaaatacactagtgttttgggggtttttgcaaagattaaaaatagtatactcatcggttgctttgtttagtacatatatttagaatttgtgtggttgttatttcttcaggtttttaggattgtttcgttcagtattttcttaagtatttttagcatctatttttctacggtttggtttagtggaaattttaaaaaaaggtggaaaactaccaccggtggttgtgctaagaaaataactagtagaaatagatttcctatgggcagaaccgtttccactagtccataacgctggcagttcc

SEQ ID NO: 145788 - DNA, 496 bp, Zea Mays
ctttgttcttaaaattagacgggtgctcttcgccaaccggctaaagttgacctcctcgggcgaccagctggagtttacctccgacagccatcataaccaactgcaaaaccagagttgcgggaggaacaaagtgatgattcgacactgtacatggttgtgggatgatagatatgcttcttttcttcccctcgaaagaaagaaacaacagtggtctaatcatggtgataacatgcatgttgcgagtatttgcgactaaaattaaagaggacaggataatagtaataaatgaattttgaccgttctccgttggtcagaggaggtttgaggaagagctcgttggtcacgtcacacgactccccacaactcttgacgtgggctgtgggcacgcatgagggaggaaaaattaactcccatataaaaggatcgtgtgagctagtagttaactataggtagcgagatatcctggatcaatttggataagagagtgagatcatac

SEQ ID NO: 145789 - DNA, 721 bp, Zea Mays
aaaaagcatcagagaattacctgaagacaagcatgaatagctgattctagaccattatgcaagcagtggtaaactgcaacctgaattggtcgtgaggcgagaaatgatttgacaaatatgttaatcagattggtagagtttgaatctgcctttgaactttgctcttgcattgaatgtatctgtcgccatgaattagctaagggaaatgaaaaatggtgtgcaccaatggacataatgtcaacagcatgagctaggtaccaaatagccttgcatgcctcacaagcagcaggtaccatgttcgtagaaccagatagtgtgtctgaacctgaagccatcagacattcacacaagagctctagtagttgtgatgtcctcgcatgatcaatgatcttgagaagactttcttccactggctttgggtcttcagatgacatgctagctttcaagccagagataacccgagataacatcaaagcaaggcaggcagttgactcacgagatattcttccagatgaatccactgtagaaaccaggatctgcatatcaaaactcataatcaagataaagaaggggaaaagtagctgacaataaaacttgtagttggcatcaaagtcttacctgtgaataaagttcatatagggataaccagtgtctgtcataagaatttaaaataacttcatcacttgtatcaagtagtttccgtgcaattgccaggcactgc

SEQ ID NO: 145790 - DNA, 770 bp, Zea Mays
attggagacccactccgcatacctgcatggccttatgaaatttgctttcaacagccgatcaacttcttccttaactctgtcatggatgtcgtggttaaatcgtctaggtggctgcttttgtggcctaaacccatgcttaattggtagcctacggtcaaccaactccctactcagccctggcatctcagtataatcccatgcaaaacagtctctaaattctctaagtaaatcacataccttttgcctctgaccagctattaatttagcacttacaaatgttggccttggcaccttaccgtctccaatgtcgacttcctctagttcatcaacagatgagaacccctgtcctaactttccaaggtcatcaaaatcatccaccacctcacccataccgtttttgtttaaacgatattcatttgtcctctcctgtaaccattctaaactattgtgttcattcatttataacactgagtcattgagtcgtgctatgtcagccgactttacatgaataggcacaaaactatctcgctctacactgatgaaatcatatcctgacaaatctcttcctgtcaaacaccgcatattaccgtgctgccattccattggcgtttccatgagtgtgatacacatagcggtgtttgcttcaatcacctccacctgatcacctacccattgaaccaaaaactgatgcaaagtagatggcacacaaccattagcatgtatccagtctcgccctagcaaaacattatacctccctttcacatccacca

SEQ ID NO: 145791 - DNA, 277 bp, Zea Mays
gaggcactcaggaaaaaagtctttgataagaatgaaaaattcgcaggaaagtggataagggaattgccttatgttgtttggagcttaagaacccaacctagccgagccctgcatgggaacacccctttcttcatggtctatgggtcggaggcagtgctacctgctgatctcaagttcggggcgccaaggttgatcttcgacagtatagcagaagctgaagccactagattagaggatattgatgtactcgaggaggaacggctaaatgcagtgatcc

SEQ ID NO: 145792 - DNA, 1089 bp, Zea Mays
attcgaacgacgtggctcaacgggggaagaagaccgtctgtgtagagttggacgcgctggccctccgtgaggcgacccgcgcgcggcagcagggcctggaaccggttggagtattcctccacggtcccggtgcggcgacactccgccaactcgaacaggggcgctgagcggaggcccaacgtcgctggaccgcggctacgcagttcgtagtcgcgctccagaccttcaccgtgaggggttcctcactggtggcttgagagaggcagaggagaagagcagttttggataattgatcttgtttgcttatttcccagtctattacacggcatatatagcctctggttcaaccaatctctcctatgattaaggcatatgaaaagaaaactaatcttaacaaatctcttctatgattaaggcatatgaaaaggaaactaatcttaaccaatccctcctatgattaaggcatgcaaaagggaaactaatccttatctttctaaacttagccactgattgtggcgcctgccttggctgcgcgatctgcagctctcctggcgtcacgacggcgcctgtaagtgtggccgtacatggcagatcttcacttgtcattttcacaaacaataaactgtcaggttttgatggaatttgagctaaattgtggcccagcatactctgcgattcgcgagactggcattcttccttgagtaacaaagctaatgttttagaaacttgcttgtaaaccttgaatgttttgtcattctccttatacataaatgttttagttttaaagcattctcttagtttctagactgttcacgacctgtagtgataaaaaatgttgatagagcttgtttgaatctaattctgtgccaaacaaagcaccataggaatatatattgtaatataaccatgctcacgctaagcgaaggatcaatacaggcatgtcatatatataacttatatacgccaaaacacccttgtgacatggacatataactgcaactatgatttagtcttaaatatgagtgcatgaaaaacaaccatttatgtgtctgaattttagcttgtgacttctgttgagttttaactcta

SEQ ID NO: 145793 - DNA, 279 bp, Zea Mays
tttatttctgatctcacgaaggagcatgctctcagttttattgctattgtagagactgaaaggaggagtttcacagatcgtttcctcaaaaacttgtgtgttggaagaaattttctttggcactgcaaggagccgaggggacggtctggtggtatcttgttaagtattgatttggatgtgtatgacataggagctattgatgagggggattttatgtgaaatttcatctgtgcaataaaaataatagttttaaatgggctttagttgcggtttatggtc

SEQ ID NO: 145794 - DNA, 428 bp, Zea Mays
ctccatatttttagggcgtgcactatggctgccaattccagatcgtgggtagggtagttctgctcgtgcggcttgagtaagcgggatgcataagcaatgactttcccattttgcattaggacacgccctaagccttgcttggaagcatcacagaagatgacaaaatcctggtgtatatctggcagagtcagaactggtgtggttgtaagcttctccttgatgatttggaaactttcctcacatttgggggtccacacaaacttattgtcctttttgagaagttcggtcatgggttttgctatgctggagaatcccttgataaagcggcggtaataccctgccattcccagaaagctttgtacttcactgacgttggatggttgcttccaatttgaaacagcttctaccttggacgggtccacttctat

SEQ ID NO: 145795 - DNA, 555 bp, Zea Mays
atttccctacatcattaaacacaaaaaggggagtgataatgtgattgctgatgctttatctagacgctatgccttgttgtctcaacttgattatcgtatttttggacttgaatcgattaaaggacaatatgcattagatgatgattttaaagatgtgttattaaattgcaaagagggacgtacatggaataaatatgtgcttaatgattgatacttatttagagctaaccgcctatgcattccggttggttccgttcgtcacttgttgttgcaggaagcgcatggtggtggtttgatgggccactttggtgctaagaagacggaggctgtgctgtccacacacttcttttggccccatttgagatgtgatgttgagcgctttgtttctagatgcacaatgtgtcaaaaggccaagtcgcggttgaacccacatggtttgtatatgcctctccctattccttcggttccatgggcggatatttcgatggactttgttttgggattgcctcgaacgaagagggggagcgatagtgtttttgtggtggttgatcgttt

SEQ ID NO: 145796 - DNA, 830 bp, Zea Mays
gtgaacggtgtaaggcattttatgagcttctctcaggatatccatcttcacctctgatttctaaggcacacaaagatggcccctgatacgaaccaaatcattctcatcaatggtgaactcccggggtttaccatcaccaaccctctttcgagcttcctgcagtaaacgatcctgctgctgagccgcatgcactctccatgagggaggattgaataagcatccgagtctcctcactagcggtgccaacataacacacagcgatccccaaacggtccagatctgcgatcaaaggcaaggccacttttagaaccccggacctgctaagggcatcagccaccacatttgccttccctaggtgataatgaatggacaaatcataatctttaatcaattcgagccaccgacgctgcctcaaattcagctccttctgagtgaaaatatacttgagacttttatgatcggtgtaaatgtcacaagactcgccataaagataatgcctccacgattttagagcaaagaccaccacggccaattcgagatcatgagttggataattcccctcatgcttcctcaactgccttgagccataagcaatcactctgccttcctgcatcaacacacaactaagaccaattcgagaagcatctgtataaactgtgaaatgcttaccactcttaggcaaagctaggataggggcatccaccaacttgttctttaatgtctgataactgacctcgcaatcgctggaccaaacgaaaagaacacccttctccaagagtctagtcaaaggcttagcaatgctggaaaaatttggtacgaagcatcgataa

SEQ ID NO: 145797 - DNA, 430 bp, Zea Mays
gagggaacgactggtggagctccctgtcgccggggtgtgcttcggtgcgtccaagcgcgccggtgtcgctgcctggtgaagacgacgcaggtgcgccgttggatgcaaaatcgaggatcaggattagaacccgtgtgacgtatcggtatgagtaaatggtagccgtcgtgattcgatcaaacgactcaggctcaagtggggcatgtgcggggctgaaccatggatctcggatccgacggtgtcgagtcagagcaggttttaatcagaccgatctaatctaggctgctcatgggtgatcggacggctgaaaaccctagataccccttcggccaggccatttcgcataagagaccctggaccttttggaaatagaacccgccgtccatcagtgattttccctgtgtctctggattcttaccccgagccccct

SEQ ID NO: 145798 - DNA, 350 bp, Zea Mays
tagatttgttcctacgtttacacctttttagccctcagatgcatgcatgaaccttaagaggtagatatattgacaagacatcattttccataggctctaaatgctttagtagtttctgctaatgattttgctttcttactagttatgatatttcaacagaccattttatttgtgctgactgcacaaaagataagatggtatctgccagctcaagacattgtttgctagtagacttcatattagttgctgactatcttgatacaactcaaggcatttttcataacaccattgttggtctatgtgaaataaagaaaacactttaggttgctacaattttcatcgacttgggc

SEQ ID NO: 145799 - DNA, 459 bp, Zea Mays
caagatttgtattgttgcaatagtttctcgaccaaggatcagtcataatttgtcttcccttcaaacgttcaatctttttctagccttttcgctaggctttaatacgtaccggctttgctgtttctacattgtttttatctttatagattacagatacagcagtctcaactgttgactttaatctaaagcgaatagccccctaacacctccatcataatcaaggctgatagatcgtcttggaatcctcgatctcgaagactactattgtgttgtggccaagttagatgatactaaaatgcacaagtgttacaaagtagtagtatgttttgttgatttaactgatatgcataagagtacacacacttttatctccatccggccctccctcgcgttgaggtacttgtgcattgaccatgtcacatagaacccgcattcgttgctgatctaggctttgcacgt

SEQ ID NO: 145800 - DNA, 443 bp, Zea Mays
cactatcagacctctgaatatccaaagctttgccagcctctgggatgggcgctgcatccagtgtttcagcaggggctgcatcagaggaatcttcagccaacatatccagcatggcacttatctcagcatcacttggattcaaaggtacctcgaaatgaacctgcctctcgtcatcagggatttcaccaagtgaggcaaccaaagcactaacctcttcgggagagggtcgcactctaaggcccaaaccgctatcaccagcaggaggatttgacacaaaatcggtaaaagccttggaaggaggcagattccaggccgagtatgcaacaggagcaccgatgttcgacaccttgcctctgagtatcatctcgagccagctgaccaaatccactgcaggaattcttctgttggtaacccgggtcgaatcagcgaggcctcgatacaga

SEQ ID NO: 145801 - DNA, 653 bp, Zea Mays
ggcgattatccctttctcacttcctagctttctcgccccttctcttaccctaatcgtctctcctgacaattttggaagtcaagctagagaaactgtgctaccatctgggttagaccctcgactacgttgaggcccatggttcctctctggtggaatgtctggataatgtcccatgtcgtatctaggacatcattgattttgacattcaccgaggagctgcagtggcgctgctcgtcggggatctctggtctagttccgcccttaaggaccttgccagccctccttcgttcctttccaacgaatggctataggacgtgttgtagggcttcaatgaggcggtcagttgcgttgtgcagaggttttctacggacgacgtcatgcgcagcgctcgttgacctcagtgtaacatgcctcggcactgcatcctgagggaaataataaaaaattagtccttgtttctcattcttcatcttttcatggttgtgtcgcagagacctaaggttttttcttcacaaaccttatcgagtgatgccctttaaaagagaaaacgaggggcgtcccatcatgtaggcaatagtgtttgctcttcacacctcgtgggcttcgttattagccagcgcctccctccggctgccctttgtccatggatcggg

SEQ ID NO: 145802 - DNA, 779 bp, Zea Mays
gaggactcgaggcatcagcgtccgaaaagccaacggcaaaaaaaaaaaaaaattgaaaatagcggctcctcggggcgggagaggccaacgcatccggcgccggaaggacgctgggaaacgaccatgcttgccgtagtatgattggttagttggacttttgcctatctctgaacaggtcatcagctagtagtttggattgacacgacgaagccttttttcttttggcactgaaacacggtgcagatatcagaggatccatgaccccttgcactgcaactgtgcaactgtctgtctgcctgtctcatactctcatgcatgagactaataaaccatgacagccgtcttcaaagcgatttatgaagcattccaaatcgtatcactttgcttgtttttttttttctcttcatctctccgcttcttcctcctacagctctccactcgccccttcctttgcctctgatggttttgtctaatctaatcatcattgcctttggttttctactcatacctgtttatatggtcattgcccgcgataacaacggcacaaaattgtcccaatctgagctcctgtctattgcccgtgaatgaagtgacagatatatactcttcttgattctaggcgtgtgatcatttgtctgtcatcatcattgcttgcttgtggcgtcaaagattacattgtcaaacaatttgctcattcgcgatcgcttttggttctcttgtttctttcagctctgcgtggaattatgcgcactgtgctgatgatataggttcagtttcgc

SEQ ID NO: 145803 - DNA, 274 bp, Zea Mays
gccacaacccctaggatagacaacgtcggatccacttcaccaatagggcaacgtcgaacagatatgtattccataaaccctgttgtcgtcatgtcgattttctccatcataagaacccccattcgaggctcatgaggggtggggtgcatcctgcaacccccacgagtcctcgcgccgtcaaggataacacaactccacaacacctttctcgaccttgatgggaaacatgaaggggtgagccccaccgagaggccatcataaatgacccactgac

SEQ ID NO: 145804 - DNA, 411 bp, Zea Mays
gcgcggtggaaagactcggacacgcggcggacacagagatggcacgacggcggcgagcaaccttatccacggcggtgagcgagtggggatgaattgcggctagccggagtgacttccaagtcaccggcggcgaagatattttgaccccgcgacgttatcgacttatcccgagcgtgaatcacgacgccgacgacgcgaatcacagcggggaggtcaccggcggtgggattcttttgctgcgtccgatctgatccgttgggggcactgtaccatcgtgaactcccatgagagcacctgacagagcattttgcagaggaatttcctcccaatttcatatggcaactcctcccaagttctgcagcaaaattgtagagctataaaccagcaataattcggctatacggcttgaac

SEQ ID NO: 145805 - DNA, 1198 bp, Zea Mays
ccaccagcatacccagcatttaagaattagaacaattaggggataacatatcttaaacatttcagctatagccatgattcagatgccaggaataccatgctatttgaaagcaattagaagctcttccaaggcataagaaattgacaacatcataactaaagcgaacaagaagatggtgataactatcacagttgacacctgaaagcttgagaggtgtaaattataatcgttcaggctaagaggaaagacaataagacagtgacagttgtcacagttgaaaaactaagaaatgttcaggctagcaagaaaactccaagctgtttattcatacatagacaccaattttattgtttctacttattagtgcacttctcttttttttaagaagaagaaaacaaatgagttcccatgaaattgtgacttagagatgaccggaaacaattactagagactagcacaaagtacgcatggagtaaaaaattctcggctctgcaaactttacacttggctggggctctatgagatggtgcacagctgcttggacccagagtgtagccagttatcacttattagtgcatatcgccaggagctcacatgttgagcaatcatttgccagagccgagcttcttttttttttgcagtgcagacagaatgcaggtagtcataaatcttctacttgccacatttgcttcttgcaaacttatcgaccaccttttgttgctatgcccaatgcttgtgtgatctcagtgtagctaatttggttcaaattttgcaggaagttgataattttgtttctgctgcagagtcagatgacggtgttcatatcttgtgtttcatcatccttgtttatctgtactttcttttgcagtacttggtcaaagagaagatggcaaaaaatgcatgccatcatatgttctgtcaaatagcatttctgtctcttgcagttaagttcgaggaaatgctagaaagttttttactccatatgctagctgataaatatcagcataagatgtgttcatactcataacagtcaaagttaagcagttgtatggttgtgctagaggaatctgaaacttgaattactggcagtctaactaagctatacctttaaattgtctgtgaccaaacaaaccaaagaattttaatcttaaaaattccagtaagcaaaccaacatcgtaaactatgcatctattgaag

SEQ ID NO: 145806 - DNA, 282 bp, Zea Mays
atttgggcttgcttcagctgagagccttctcttttgggttgttccggaactaggctaaacaaccgaatgagatgctttactttccccttctccaaatacttcatcttcatcatctttatcaccctctttatcatcatccaactcaataggcttctgtctagcattcttcttcaaataatcactcatctcattgctgattgttgatattgtcttcgggcacttagcaacatcaccatgaccaccaacaaggtgctgcttcaaccttctaacacctgcatgaac

SEQ ID NO: 145807 - DNA, 416 bp, Zea Mays
caaaatttcattgcaaattgtctcaatcatttctagccactcttggcaaggctccttgaactgttttttaaacttaaaacgataaggcaatcgcacaagctcaagtgctttctttgttccctttagcttcaacatgctccattcacttaacgtcggagatgttctgttagccaagtattcttgaactagatctctagtgctgatttgttcagccaccaccctgaattctgatacagatagttggcatgctgatcctggcttcatgttgcacaaaggtctggtcattccgaagctcaatgccaacgggcacatgaccatcgtcatcagtttcccccttttcttctcattggccttaatataaaaccattcactctttcagttggttggccacttggtgcggtggctaagagccgtag

SEQ ID NO: 145808 - DNA, 1396 bp, Zea Mays
agaaggtcaagcggatggcttgtgaactgatgtatcaagactaaggtgaataagagagtacttgcaagatatcgattgtgaaaatcatacagtgatgaagaacacaacattagaatcagattgtgaagagtcatacatctcttgcctctccaatttcaaatctttgaaaagaaatctttgggtgaatgtaacaccccaggcgtttatcatctgctcgaccactagtgcggacgttaacatgtgatagctgtgaatgtaaaggtcactaatttttaatcaacctcgtttatcacgattttgatatcgtgtctgcctccgtctgtctaaatttttccaaatctatttcttttaaaattcagcctttagtaatcttcggaacatcgaatccagtatcgtttgggttgagccctcgacgtcttgcctaaactataatttttgaaatcaaatgtagcttcttaaacttcatttgaaattctttcacgcttgcgttgcacgtgtctctctgtggcctgacatcgtgacgcatgtggcgggtgctaaccgacgtctggacagcgcccagtctcttgccccgtgaacgatgcgtgacgtcgctaccgaaagaatcacactttcgatgtcgcattgatctcgcttatttatttcgcgatatgtcgagtcttgtgcctgtttaaaatttatagattaagagaatacgaattcggaagcccgacccacactgatgatttttatcccgaacaaactaaacagaactcgacgactaaagtttttagatataaagtaatttagtcccttctcgtcaagcgagacatagtgtctgaaatcatggttggtttccagcaaattatcctcgacggaaggattaggtgtcgagttgcagatgaagttatctgattttaagtcgtatgaaatatagtttaaaatatcggtctcaatctcatttggctcagtctgtttgcatcttattcgaacacgatattatctgagacagagagatgaacgtttgattttattgtagataatactagatccaaaattataatccaataatattttagtttagtccattctcattgtgtcgacaccctaattccaaaaccatatgaaccagatttgtaaagatgtttattgtaaaaaataatggagaagataaatccaattgttgattaaaccaacgtgtgaccctcacctctatccccatcgccagcactactgctgcgtggctcaaattccagaatcgagatcgtcatcctcccacgcgtctctctctcccaggcttcaatcttcagccgccgcttttctattggatatttttactcacaccgttcaacaggtgcctgaaaatcagcctcacgtctctttctcccagtctgtttctcccagtctgtagcagcca

SEQ ID NO: 145809 - DNA, 558 bp, Zea Mays
ccagctggcgcgaagacacagtgcgagcactacgtacgtacagttaggagaatatatctgccgcaggattagctgagagatgggattgtcattgtcaacaggttggtgtcgtgcagttatgatgcaagcacgcacgtacgcaccagtagcagcagtactccatatggtgccgccatgcatgttgatctctgtgattcgaccgaccctcaagtagctgcaaaccacacatccaacaactgcggccgctataaaggcgcgacgacgacgtgacaaagccatgcgatcgacatgtgcatgccacgcgcgccgagcagcggcccgttcttctcctcttccaacgcaagcactgccaccccttcaactcggcacacccgagccagtgctttgcatactaatcttcaattttccacacatcaaccgtacgtgctacgtaggagccatggtcgttgcggtttcttcacgacttgagccgagagatctaattaaaatgaagacgacgacagcaagggccccattgcacggggtgtgatgagtgacctccatggatctacatacaaa

SEQ ID NO: 145810 - DNA, 481 bp, Zea Mays
taggaaccgactattcatgtgtgtttgtagcttgctagaaattcaactcgacggaccttaaaatctctgctagtgtgccattttctacccacgtgtctgccactttgcttgaaatttcaaaacgcttgactgatctacatacaaatcaacgtcatttgttatggatggccggtgacttcacatttcatggccccctccttttcagaagtcacatcgaccatgcccaaaattgaaggaaaaagacctgcacttcttatacgtggctggaggagtaggggaccgacggagcgaaggagaccaagtagatggagcgccacatgtgaattttgcatattctctcatggcatttatcatcatcttcatagctccaccaatactttattcttaataaaatgacaggggctaagacagggaggcgcacagaggcaatgtccccttataggcttgttcggttagagttagattaagagtgacaaattta

SEQ ID NO: 145811 - DNA, 379 bp, Zea Mays
ctcctattacatacaatacacatgtttccttgtcataaactacattatttagtttttggtagacaccttttatcaatcaaaaattcttatgtgttagccttcgatattagtgaaaactcatgctttggttgttctcttccaaaaaatattggtcatatgcccattgatcatatgtgagtcacctattacttacgccacacatatttgcatgacataaaccacgttatttggtttttggtggagactatttaccggtctaaaattcatacgtgttagccttcgatattaaagaaaattcacgctttgctcgtttttggccagaaatgatggccttgtacctattgatcgtacctactgattgtgaatgagagtctcctat

SEQ ID NO: 145812 - DNA, 410 bp, Zea Mays
gtcgtgacagggcattagcgacgccgttctccgcacctttttgtagaggattttgtaatggagtcccaaaagtttagtgaatacccgttgttgtcatgcgtgtgcaggcgctgttctgacagatgaccaaggctgcactgatatgtaaaaatcgtgaactctgaatgctgcaagtaagatcgccattagtccactgcaaggatgacaacgagatactccttctcataagttgaaaggccctggtttttgaccccaagagcgcggctgacaaaggccaaggggtgaccatcttgagacaacactgctccaatgcccgttccggaggcatccgtttccacagcaaaggggcggtcaaagttgggcagtgcgaggactggagccaaaaccaatgacgatttgagagtgtcaaa

SEQ ID NO: 145813 - DNA, 550 bp, Zea Mays
agctttgcatctttcaaattatagggtttttgccctaggtcaccacatcaaaattgtagcccaattataggagaacaactttgctaaagagtgtgagctcagttgttaagaaaaatttggagataatcatgcttaaactttggctgtcaggctggattcattctgaaattcagcttttcagtgtaacagggtcaactttgagtatgaattcaaccttgatccagtgctcaaataagtttaaaccctatagtcgagttgtagctggtatgtagcacgacaactttgatgcagagacttggacctgttgccacatggaattaagagaaattggagctccaaagtactctgtcagctgctctgaattggtgttcgccattgtacagtagctaaaacagataaggtcgccagcgcggctgtcttcaccgccggtggctttccaccatgattcacgtcgccggcgtcacgattcgcgctcgggtatgtggataacttcgcggcgtcaaaagatcgtccccgcccatgacctggacaccacaccgactagccgtag

SEQ ID NO: 145814 - DNA, 492 bp, Zea Mays
gccgaagcttcgccacgggggagaacggaggggaaactcgccgtccagacttcgagaaccagtcggggtcggtttgggcgttcaccagcgatcgtagatcgtgggcaggcaagcaatcgggcgtgggcgtcacctgggcccagcgtattgctcgtcggagatcaccgtggcaccaccatccgcatcgtcgcgtggccaacgtcacgcgagctccaatacgtggtaagaaagcaaccgccaagttcgccgtgaccttctccctgcgtaggtagttcctgtgttcatattcgggtagccggaagggtaggagagggggcttgccggcgagcttccgccgtgggtgcaccatctccgccgctctggtggtcgtgaggtggatgacctcccatggtcgttagattcagatggagggtggagattagatgggcgataacggttcgatcatggcgtgcgtagatcgctggatcgtgagccgacggctatgatcggatc

SEQ ID NO: 145815 - DNA, 363 bp, Zea Mays
ccttccaaattttccttcatcaactgacccccgaagctatattgaggatgggagtcttcgtttgggcaacaaggagccaaggtataaacccaagcgcaaaatgcttttgcagcatgcatgaacttatgtatgaaacgaaggctactggaaaagaacagtatcacaacaactttggttgttatggatttatcgcccgtcccaactcaagctacccagtgccagcatttcggaaaagatgaccgggaaattggatggaggaatggtttcatgtgaagaacgatttggtagcgagggaggatgttaaggaggttattatgcgccccatttggtcccgcttcggcctccgaaggccgaaggttgaga

SEQ ID NO: 145816 - DNA, 980 bp, Zea Mays
taagcacaaagttcttacgtctgaataaccaggggaaactgcaggatctcctactgaaagtagtgttcaatgttcatgacaagaaatcaatcagggggcatctaatatgagaatgagcaagtagtcctaaccaatctcatgtaagatgatactggtttctttcattatcaactcaaaatcctcagaaatggagggtacagaactcgtgtggaaaacacggcacaaatttttaaccacaaaccataagacaataggcgtaaccatttaatctagcggtctggtcttctaggttcttcaagggcgaatgctctttgatctacagataaactgtgagactttcaggttctggtctgaaacattactcccaattgccgactccagtaagtcctcgcagaaatcattgaacatagcagtcagccagtcacattgtttagtcaggactaaggactacataacaatcatgggtgtaaagcctaaatgaaaaaaaaaagaagtgtatccgcatagatcattgagcaaataagcttacgtaatgtaaacatcctcaagaatatcaggtgctgagttaaatcttctgctattcctcagattttggttctactaaccgtgtcattgtaagtttttttttcctcaaacatgcctcgttgtaagtaaattgttacagtggaagaatggtggtaacctgcaaggctttgttttttggttatatggatatcctgacaacttaccctgaactaattttgttcgaggaaaacctgaactaactattcaaagtaacctcctgaagtaactattcatcatttctctcaacacctcctgaactatctagtctaacaaaaccaggtgctatagtaagatgaattaatcatatgacttaagtactgaacttatgaaaagagatccagcatgttgagacaataagaccttagtactttaaagttggtttcacataccatgatacatcaatattcaataccaat

SEQ ID NO: 145817 - DNA, 512 bp, Zea Mays
tcttgaaacactttcgagttactaagttctctatactttcagagttgcggctcgagaccctaagcctttacctgtgcactgaccatgccaagggattcctctgcacccgaggtagggataatgacttacgccttctcaacattcctaacggcgtccgcgaggcggtggagttcgggattcatcgaggcacaatcatggtattggttattgtgcaattgcatactggaagcgaccttcacaacactatatatcagcctaccggagggttcatcggcggaaggcctagactgtttggcgggcgaattcgatgttgtcacaaatgttgtacttggtgaggtgtctgtggaagagataatccatagccttccataactttgcttatgacccttttggcttggacactttgttatcatggttcgtttggattgttaacatgtgtggggttcgggtcccccaaatcttggattgtcccatgtttttcctttttgaggggaacacttttcttgcgattt

SEQ ID NO: 145818 - DNA, 304 bp, Zea Mays
agcaggggtagcactagaactcccagcctcatgatcatgtgagcatggaggcattggaggcggaggcggaggtggaaccccatagtcatcatcatcatgggctgctgcgccctgagtctcaaactgatggaaagtggtatcctcggcctgagtatcaatcactggagcaagtgccggcacaggatcctctggagctggacggtaggacccaaagaggaggcgagaggcctcaagagtaccctggaactgtgggggccgaatcagctgagcaaagatgtgacacagatagtgagcataaggcagc

SEQ ID NO: 145819 - DNA, 558 bp, Zea Mays
ggtagttcaccttgtttacctgtgactgacacttagttgatttcttgcttactatatgcttagtgttgtctttatggtgaacacctctttgaaatgcttaaaactgaatcaaaatgcttacacttcacatatcttgtgcatatgatcagtttgagcatatgctagcatgtgcatttattgctatacacttagcacaacaccacttataacatttttacactctgactggtatactcctgaagctccaatattttctccatttcctagtctatgttgcaattcttcgttttctcaaggggagttctcttgtcgaagggaagtttttctttctacccttgtttatgcttgatgagttcacttgtcaacaagggggagagattttgagatttctcggttcctctatcaagggggatgtgttatttgaagctgttggtctcaaggagagattgttgggagtattgaaacagggggaggaaaattgagccttttggagcttttgctagttgtgttaagttgtttgcctctttctggaggaactagctttgattttagcttttg

SEQ ID NO: 145820 - DNA, 454 bp, Zea Mays
caaacactcgggagtaggtgagagcaattgtgctcgacaaaatgggaagtgtgttggctcaattgtcttatcaagcgtatcctatccgagagttggacaagagtatttataaggtaaccaagggtttggggccaaagtatgtttaaggccttggttacagtgccaccataaaccttgttacaccgcatgttacactctcgctgggggctggcatttaggtttgtgtggcccaccacattgcagggaccgcctcacctcgacccatgttgtgcgcacttttgtctcgatggtctttgtcttgtggtcttcgtctctgatccccccaatgtccttactgacaattcggccactccttgactccagcataaggggagtgttgtcagtcttcgtgcttccttgggaccatctagagtgaatgtgtcttcacttggtggttaggcctttgcaacaaact

SEQ ID NO: 145821 - DNA, 447 bp, Zea Mays
ctcctaatttttagttgctatgagcagcatagaggataccaagtagggcatgtttggatccatgttgctaatagctagcaactaaaaattagtagaccaagatccaaataggtgtgctagctaatagaaagaattagcaagatcgatgttgctagcaagtgctaaaagagttatgaatagcacactaattttggcaggatccataaataccctagtacgacctattaactgctaattccttcaactttgtaactcatttaatacaggcaaagctcatccactttcataacagccaaatatgcatttctcctttctaaattttacaaaactttagacaaagttgttgaggtgtgttagcaactacatgccagttgccatacaatgctaccagccgtgcaattcttagatttcagagttcaagctctaatttggctaatgtaaatttag

SEQ ID NO: 145822 - DNA, 551 bp, Zea Mays
gtgagcagaggctcccttatccacccccttttgcatcacttccaaaatcttgtgaattcctgtgaaatccagtgcaatcaagttgtgttttgtgttcccctgtattccttgaacactcctgcaggttcttagctccttcgggagggatttcccacctcaaatggctatttcaccgaaaacctaattcctcgcacgccacgtgcccggtgaaatgcctaaaccagccaaaaatgctcaaattgaacccaaatttttcaggcaccttcccaacacttccagtaacactcttgtcaaatttcacgccaatccgagattccaggcttaaatttcaccaaattccccgttttcgagcgatcgtttccgagccgagtgcccaaatctctttttcttcgcctaaattcaaaccaagcacacacttcactcatattcacctacataaacctattcgtgaagtttcggctcaattccatgtcgttttgtgcctcaattctaaatccaaacctcctatggcactatttatcgttcaaacgtcgttttcacgccgtttgacc

SEQ ID NO: 145823 - DNA, 687 bp, Zea Mays
ctcggagaataagctccaggaatcaatgcagccctgctgctgtagaagtagaacttgatgggtatttttctttctattctgtttctcccccctccaagaactgcaggcactgttttttttttaggtcacgacggcagaatagcatgctatcttctctctgttgcgtatgcataacaaacatctagatgaattttaatctaaagcttgtgtcgacgcaagaagctggcacggagtagatgtacctgtttgcataaacaaagacaatgctagctatatacatggggatgtcgcctgtcatgccagagggtgcaattagttggatatgtccgtcgttctgggcccatgctccgtagtaccattctcctccccagtgctgcctctcctctacttttgatgccaccgctgccggctgttctattattggcgcctccattacgatcgcctgctgctgtcactctcactgccgcaacacacttttcttctgatgagcgagaagaaaccacacactattctaaatacaaagaaaatgcacataaatatgaagactgctgatggctacaggcttaactgtgggcagtcttggagatggttatctctttctaatccaaccacaggagttcattatatgaaggctcatggtgaaattcagtagccccttcagattccataagtaaatgcatgtctttc

SEQ ID NO: 145824 - DNA, 461 bp, Zea Mays
ggtggtacaataaacgaaggaaaaaaggaaaaaggtggcacacttccgttagcgctaatgtttgacaaaagctttacaccaaatcatgccaagctccaaaggctccttttctctcttgctcactcacttgggcaccaaacgctgacagacttaacgagctgcaatggaaagtccctttttcgtcctccctttggaccgtcatgcagactgcagagcatgtcggtggaacagaggtgcggtgccaaacagaaaagcagaggcctttctgagcctgacgaaacctttgtcgttctgatgatgccctaacagcatgaatattctctccgaactcgtgctaatttaatctacaaatataaatgcgtaaaggatgtgatgattgagcatgggcaacgctgcataggcacgcctgggtaatgcatcattggaatcccttacttttcaacgtgcttaatgatgggtgt

SEQ ID NO: 145825 - DNA, 750 bp, Zea Mays
cacacttgtgggcatagagttattgatgtttcatgggaaaaatccaaatttccccctttttcaattttctatgaattaactgaattatcttgctcccggtgcaaaaaaagaaaaataccaaatggggcccgaaaggcatgaaacttgacatggtgtcataataccatgattgtagccctacaaaaatgttaacccaaggtttcgaggattttggatagaaagtgttcacaagtagcatacatcggagtagaggttcatgaactttgaagcacaacaactcacctccctggcatgttgaaacatttttgttgttttcgtgtgtcctttggcacacttgtgggcatagagttattattgatgtttcacgataaaatccaatttcccccctttttcctattttctatgagttacaacatcgcgtggacaaagtccaaatttcgacatggtcctcttttcttcatccttaggaatgcccgaaacctagctctgaggggcctctgcgggcgctctagacgaaaagggaggaggaccatggtcgacaacgagtgaagacccatgtttgcggaggtaaaaccattggtcatgttagccctaattggacgagcacaatcgtagtgggatgtaccccctcgatcatgcccctcgaaggtgaatagccacacagtcaatatgtgtcgcctccaacgcttatggataagctcagtcaggaagaaatggcactataggaaaaagtggaggccatcctcagat

SEQ ID NO: 145826 - DNA, 419 bp, Zea Mays
ggtgtatcggttgctaaggcgcagcgtctttggaaggctgtagtcgggccgtgaacgtcgtctcctccaccaatcgagttatttcacaccctctcatcgaaatatcgggcattcacccaatgggtgcacatcatctgttatcagagctagggcccattttaagaaggtgggaatgatgcggacatcctccactattacccgttggcaaagacgcaattggccctgttggcccaattgtagtcgaacgacaaccgtgtgagcctcagaattatccgacctcgcttaacttgggaggaggaagccactttaaaagggagagccacccttcctccattggactagtcttttggggcgattgggccttttcctgagttgggtgtgcttaatgaactgttgggccctaggcaaccctaatttat

SEQ ID NO: 145827 - DNA, 429 bp, Zea Mays
gagaaggtgggaatggactggctaccttgcctacctattgctggactatggtctatggagtttggagtatggacatttgcagcctccgcatagcctggtgattgggaatggacatgttttttaaagatgtgtcttgtatcgattatttttcttctaaaatgaaggtgatatcattttattctgaattgaacgtcaagacatctatatttgtgaccaatgcccgggtgtgattgcagttgatggtgttgaaattgcttcatcgactttggaatagcagaggctgtgggctgtggctagaccacaaggaatggggaggaagcttcttgtcagctctccctttcttcgcagacaaggagttatgtatcgtgtattcatgactgattgagcatgacagcatctgaagtttctttgttcgttgtgtagatctga

SEQ ID NO: 145828 - DNA, 650 bp, Zea Mays
taatggtagctgacccatttagccggctaaacatgtttccctaacttaatattatcatattactaccacaaaaccgaagtcgactgtcacagaacagaactacaaccgctcaaagtaactccgacctcctctctaccagcttccgctaaactaagtcagaataaaaatctgacacaagtaacttaggaccagattatttttcactttataccataccagcccacccccatcaagggaacctgctctctattcccagggctagctatttgctacaaaagtctcaacccgactctccatgaattagccgctacaggtgcctgaacagagcaaaatactactaaaattcagtacttagccattgggttaaatctgaaactggaacctgatgatccacttttggacacccttcccttctaatttcccataaggacagaccttgcccattacaccaaacttgttcaccaagtattggtcttccacttttctgtaaacttatagcatcaatagtgcacagatctccatttatgctactccaaagtgaggcacatctcataggagccataatttcagttagctgaaataaactctgaacgcaaatactgacaggatgactttcagacagctttccctttactttttgtgttggatca

SEQ ID NO: 145829 - DNA, 394 bp, Zea Mays
atgagatgtttggaggttggttcgttggcgttggggatggctgttaggtttgttcgagggatccatgctttaactcttgcggtgtcattgcttcggatccatacatcaggcggaaaggtgtgaacccggttgctcggcattctgtcatgttcagtgcccatatgactttgggtaattggtctgcccatttgccctttttgtcgtcgaggagccttttcttgatagcgctgaagatcttgccattggcgcgttcgacaatgccgttggattgtgggtggtagacagaggagaacactaccttggtgccgatggaattgcaaaattcccagaaatcctgattatcgaactgtttgccgttgtcgactgttagctcggacgggactccgaactggca

SEQ ID NO: 145830 - DNA, 281 bp, Zea Mays
acactggaacgccaccaagagtcgatctaagaggctccaccacccagggagtcagtctaaaaagatacatgtcaacaagggtcgatggaggaggagcaaaggcaacgacaaaaaaggatcgatcttttggggccaaatagcgactacatacaactcttcgctaccgtaccccaaatagctaaagaattgatggtccataagaaattgcaaggtcaccctcttcaatggtatctacaaccaattgtccacatcccgaccgaggggagtaggtgatgctatgc

SEQ ID NO: 145831 - DNA, 411 bp, Zea Mays
atgcactccaatggcttcgccatatcccccggcactgcatcgaccactaggcttttcgaccacttcattgccaactatcaatcactcttcgacaagctcgcgcagccgtaggacctgaaatcgattaggcacaacaacgacgaggccctccgctcgttcctcgagcatttccagtccatgagaaactgcatccctggcatcacccaaacgtcattgatcaaggacttctatcggggtcccgtgatggggcgtttgtcaaggctatccttcaaaaagcctcgacgacctccgagcaacttttcgggaggccgacgtctacatcacctctgacgagcgagctcgcgacctcatcaagcagggctccgccacagaagaaggagcgggctcctgacctcatcgttgaatacatat

SEQ ID NO: 145832 - DNA, 453 bp, Zea Mays
accaacataataaacgtactagaccaagtgcgcaacgcctttatgaacatagccagatgcgtgaaggcgcacagcctcatcatacaaactatagtaacatacttacagcgagggcaccacacctcacatcggttcaaccttcggaatgattcccatctccctatagttaaataacattattctaagctcctcaccctcaaaaagacttcgcaactccccctcacctgcactcgccccagccggcgaggacaacaattcctgcttgccagccctgcccacacgaagtcgaccgccatccacctcattcactctatgcttcgcaaccgcccttcgccgcctacgcccagcgctcggaccaggcacaactccagcatccgcagcacacggtgaagcctccgccgctgccacatccaaggccgcaaagtaatccaagtcctcgtccgacgactcttc

SEQ ID NO: 145833 - DNA, 312 bp, Zea Mays
agcaaagggggtcgcataggtcttcgtccggtcgacgccctcggcttgttctggcgtgttctgtggatgtagccttcgtctgcgcgacgagtagatgaggtcgtagagcgaagggtggtgtgttcgcctttgccccaacagggtgattcgctagatcttgcggagtttgggtgcggagtattcaggctcggtggaggaccatggcgccgaccaattgcttattaggtttccttcgatcccggcattgcatgggatcgctggggtaggcgcgcggggtataggttcatcgagccggctgttgtaacacccctg

SEQ ID NO: 145834 - DNA, 423 bp, Zea Mays
gggtactaaaagtgtagaagaatattatcaggaattacaaatgggtatgttgcgttgtaacatagagaagggtgaagaatctgctatggctagatttttgggcgggttaaatagggaaattcaggacatccttgcttataaagattatgctaacgtaacccgattgtttcatcttgcttgcaaagctgaaagggaagtgcagggacgacgtgatagtgcaaggtctaatgtttctgtaggaaaatctacacaatggcagcagcgcacgactacgtcctgacgtccatgaccagccgtacaccagcaccaactccctcaccgagttgaccagcaccaccgccttcctccggcgacaaaccacgttcatcttccacaaattcagcaaccaaatctgcccagaaaccagcaagtagtgcctcttga

SEQ ID NO: 145835 - DNA, 1036 bp, Zea Mays
ggaagaggctggaaaaagagcaatgattcgtggtgataagaaagaagaggatccactaatcacaaaaagtgagatgagaaatgagatgaggagtctgattcaggaactcatggggctaggtatgattggtcccaagactttgcctatctcatctgaaataaagttggaactcgttccaaatgatgtgaagctagaagggagcaagaattacttgagttggtctaggagagtgcgagtgctcttaggagataaaggagtggagcactatttggaagagggttgtgttgaacatgttgataggctcagccctgaatggagggtttggtataccaccaactcggttattgtggcatggttgttagcatccatgtatttgtctgtgagtaagatggttgaagccatgcgcactgctgcacaaatttggaagaccttgagcaatatgtattcaagaaaggggaatgtgatgatgatgatggaaatccaaagtaaggcagatgcagtgaaacagacagggagaccagtggaacaatatgctagtgaacttcagtacttgtggggtgaactagatcattacgctcctctacaaatggtttgtcctcaggatgcacaggttgtccacaagtggatagaggacaggagagtgactcactttctaaagaatctggatccagagtttgagagcaggagagctgccttttgtcaccaagagagtcttcctaccatggatgaggctgtgtcagcaatgattaatgaggaaagcaggctccaggtaatgacaactaatgatcctgtgaaatcagcctatactgtaaatgatgatagagactgctataattgtggtgataagggacacttgagctacaattgtcctcatcctcgtggcagtggtgaacgaggtggtggaactcgtggagccacttgtagtacctatggaagaggtcatggagactatggaagggggcgtggtggccgtgccaggggtagaggtcgtggtggccctcgtgttaatgttgtggtcactgaagacacccactca

SEQ ID NO: 145836 - DNA, 463 bp, Zea Mays
cctcttttttccttgccctcgcagtgggaagcgataatcggggtatatgaagccaatcacatcaaagaccctgtttagtcttttcttcccctagcctccgaaggctgcggacaaagcattatcttcagccttggagtaagctccaagtacctcatcactggtagcttcaatacacttcagccagacgtcgtttgactcataaaacttctccctaaatctgaaggtataattcagtcggaccagaccaccatcactagagtcggtggtggtctccttcgacatttcccagctttccacagtggccataccctgaaggatatatgctcttgaatcaaatcccttgtgccaatgaaggaacaaacagtgctaaaagccctctgacatgcttcaacagcgtcatcaatttccaccttcggccttcgaaggccgaagcgagaccaaatgggtcgttgtatgatttctt

SEQ ID NO: 145837 - DNA, 575 bp, Zea Mays
ttgggagtctcctcggatgttgaggcgtctgactcctagctcgatggcgatgcacaggtaattaaccaaggctttgtattcggccatgttgttggatgcagcgtagtgggagcacatgatatagcgcaactgtactccgaggggtgagatgaagagttggcctgcacccgctctcattttcattagccacctgtacaagtacataatccatagcttggcctgtattggagccatcggcagctgagtgttggtccattcagccatgaagtctgccaagatctaagacttgatagcctttctcaggtcgaatgagagtgttttttccatgagttcgaccgcccatttggctaccctgcccaagacctccctattctaaatgatccccctagagggaaggatgacactactttcaccgagtgagacttaaagtaatgtcgcagcttgcgccgagccaggactactgtgtacaacaatttctggacttgtgggtagcgagtctttgtttcagacaatacctcgctaatgaagtacacttcctttgaacaggcaaggtatgtccttcctcttgcctttcg

SEQ ID NO: 145838 - DNA, 665 bp, Zea Mays
gtttccatgtagagctcggctaggttgagttctcaggctccagacaacatacggcaactctctaatccactttcctgcaaacttttcattcttctcgaacactttctttcttagtgcttccagtatcattccgttggctctttctacctgcccgttggctcttgggtgtgccactgatgcatatttgatctggatgcatttttgttcgcagaaatcaaagaactccgagctagtaaaattggatcccaggtcggttatgatgctgttcggtatcccgaacctgaatattaagtcatgtatgaattccactgccttagctgaagttagataggcaatgggcttgaactctatccacttagtgaatttgtcgatagcaaccagtacatgagtgtatcctccttgagccttcttgaagggtccaatcatatccagtccccagcacgcgaacgaccaagttataggtatggtttgcagttgttgtgctggtaaatgttgatgttttgataagtactgacaagtctcgcacctttggactaactcgactgcatcactctttgccgttggccagtagaaaccagacctgaagaccttcccaaccagagtcctggatgctgcatgtatcctgcattgcccagcatggacctcgtctagcagttgcttcccgg

SEQ ID NO: 145839 - DNA, 755 bp, Zea Mays
tggccaacgcgactgcagataatacccgctttttacgtgaaatggcgggtaaccaattccagcagcaaggcggaagggctcctccccagggaccgcgtgaaacctcatacttggacttctcttaaatgtctcccccactcgttaaagctgaagatcctcttgaagctgatgagtggatcagggtaatggagtagaagttcggattaatccgctgcaccgaaacacagaagtcgttgtttgccgcccaacaactaacaggtcctgcagtatcctggtggggaaattttgtggcgattcaacaagccggacatcaggtcacttgggatgaatttaaattggcattccgtgagcactatattccagaaggagtgcttcacatgaaacaagaggaattcattcgactaaaacaaggagggtatactgtgatgcagtatctcaacaagtttaatcatttatcccatatccgattgatcaagtaaacactgacctgaaaaagaagaattgcttcatgagaggactcaatgaccggctccaaaggaaaatggccacctacctagatcttacatacaacagggctgtcagcacggcgttggcagtagaagctaagaatacatgccaagaaaaatccatgggatttggaggtgacaggtccaatcagggacctgagaagcgaacaaggttggtaatccaacctttcaatcagaatcattcttcgccttgaccaccctcctatccgtttaaacaccctgttttca

SEQ ID NO: 145840 - DNA, 1704 bp, Zea Mays
tttccttctaccttaacaactaagatctcaatccatcttaatttgtccaaccgaactctgaatgaaaaaaggaatcgcatttcaggaatgattgacgagttagcacaatgcaggttcagaacctttggttatttccaaaataaagactcgcatgtatggctataacaatttatacttttaaaaatggatacttattgagacctgataaccacatttagctagcttagcaggagggagcatgctaactcataatgccttgtaattactgaatactgatgaaccagcggagccatacctcattgacatcctcaagtagctctgacaaacaaattaggggatatgacaaataaattaggggacactacctctgcgtatctgcacaagggcccaagagagatggggcccgaccataggaacagagctctcagctcccataccgtgcaccagtgaatgcgagcagctggtctggccttccagtaatccgatctgcatgcagtgtgatccaggattcacgtggataaggatgaaatcaagagagcgctagctaggatcacacgccaatagcacaaggaaggaaggaatgagcgaacgaaccttgaggaaaacatcgccgacgggcttctttgtgtggctctctgtcgttggtcgcaacccccgccactgccctcactcgtcgcacatcgcgttgtggtcacggtcggggctgcccttccgtccggtcgaccgatcgagcatgggacgatcaagcaggactcgaggaggaggtagcggatttatggcgacggatcggggtagcggggccgagtgtgggttgttggcttgttgcgcccatgggcgtggtaggcggggggtgggggcgggcggagggatcatgagctagagggggagatcgtggagggagttggcagtttggagggagatcatgggggattcctttgcgcgggcgtctaggagtgagcgggtgctcctgagatggctgagatcgacgatgaacaggagagcacgggacggagacgacgctagcaggaagagctagagggcgagagctcgctgggcagataaagcaagggagactgaccctaaagccaagctgggtcagggtaagaatcgtgcggcctcctggcagctacttgggccgcaccaaagaaacacagcccacgcgacctatgtcgtcatcacggcttgcacatttttatgaccatactggccagccaacatagcttctaccggcttataagccttccttctttagagaaagcaatcatggtcaaatgctcctgctagtgtcaaattgaggtaactttttgcgcgagcagacgtgggtccggtgtgtgcaaaactaatggtggttgtcacgtgggcgtccgtagtctgcaatgtgggcccaacgtccagagtgtgtgatggcttgcacgatagaaatggctgaatgggaatgggggattttgtcatatgggaccggagtgccccaagtcaggagttgctcgacgtctcgcgtcacagaatgtgatggtttgccagacaacagcggtggaggagccattatggcttagtgtggcatcagccataccttacttttaataactctcatatcttctactataacatcaaaataagatgtggtgtggtggatatgatgtctctaatagatgttttcttaacatatagttgatggagatacaattcattcatcaaatgaatata

SEQ ID NO: 145841 - DNA, 426 bp, Zea Mays
gtccacgaccagatcgagctaattcgggcacaaacccgtcgaggagagagagagtgagtgagtgagtcatgcgtcgccgggagtgccctagaccgtgtattggttgttcaagcgggggagccgcacaggaactcccacgtcgcattggacaagctattcgtggcatcatcagtcgagggacggtgatcgagcggtgggatttctcgccgggcagtggtggttggcgcggggttcccctcattggaggcagtagagtctacgcatccgatctaggtgaggactcctccctctaattcgttacggcctcctccatgaatagtgcgcatctagcgaatgttaggaagcgaggatgatcactggggcatcgctagtaatgtcgcagttgtgggtgaaagggccggcactgcttggcctaccgcgtaggaa

SEQ ID NO: 145842 - DNA, 627 bp, Zea Mays
aaccggacactaatcgtgcgccagtaactccttgtccctccggccgccgcgcgtcgtcgctcaaattcccggccaccgctcatgcttactataaattgaagccgccatgagctccgtaggatcaccacgcacccagccaccaagtattgtcctcaatcgatcaccagagagctccaatttcatacttcccccaatcagttcaaaaacaccgcaagaacaccctcaccacgaccaacttcttccaggtcagtcctagcgccttgatcatttgttctagcgttcttaggttctcctcaagctcttcgacccctctgattgaactagatcgccatgaatcaccgggaacacgttgttctttgggttgtccgcgctgtcaccgtggccagagacatttgggtagccattcatgaaattgaatgaggggaaacactcctcagggctggaattaggtttaaaccaaagattagcaccggtcttagggtaatccgaccagtaatagctcaccggagctcagctccccgccggtcaccgtcgtgggcagagtctggtgaagaaaagaaaacgcagggatgtctttgtaaagtgtcagtgagactgtggaatagtgcaagagattctttaaagaat

SEQ ID NO: 145843 - DNA, 419 bp, Zea Mays
atgctaggcacaattagaccagaggttaatagttcagagacctgcttctctatctctgttttgtgcaatggtgagtacctgtagggccttgagatcataggtatatgtcctggtaccaaagaaatatgatgatcataatctctggaaggaggcaaaccagtagggacagcaaaaaaatcctcaaactccaccagcaacctttgtaactgcttagggactactgcttctttcttatccaccacttgctccagcataaccaaagcccaaacctcattgcctttcaaccatttattcacttgtagaatggaaatttgtcgaacctccttctgctgacccgcatctcctcttagttgaacagtcactcccttgtccacaaatgtgagcacattctgtagccaatcacattgcataggactatg

SEQ ID NO: 145844 - DNA, 300 bp, Zea Mays
tctcaatccatgaactaaaacactcggctagattattgttcacataatcacattttgttttggtggaaaacatggacctgctctataagtggttgtgatgctcgttcaagtaatctacaacatccggagcggctttcataacttgactaaaatggaaaacaaacgtgtcacgtctgtatgccctaacaaccgaccacatgttcttgtcaaaaacttcaccacgatacttcctaaaatttgtctagagatgcctcatgcactccatgtgctcaatgctaggaaataccatcttgactgcac

SEQ ID NO: 145845 - DNA, 476 bp, Zea Mays
gtagcactaagatgtatcaggatctgaagcaaaagtgctggtggtatgggctaaaaagagatgtggctgcacacgtggttgtctgtgatgtatgtcaaagagtcaaagctgaacatcaaagaccagctagactactgcacccgttaaaggtactcgaatggaagtgagaagaaattggtatggatttcattaccgggtggcctcacacaccgaagatttatgattccatatggatgattgtggacagattgaccaaagtggctcacttcattccggtcaatactacttataaaggttctcaactggcagagttatacatggctcaaattgtgtgcttacacggtgtaccgaagaagattatttctgatcgtgggtcccaatttacctcaaggttttggaagagccttcatgagaacataggtactaagttgaaattcagttcagcctatcatcctcaaactgatggccaaactgag

SEQ ID NO: 145846 - DNA, 1768 bp, Zea Mays
ttcggcagctgcagttgcacagcaaaagcatttaggttgcatgagaactgagaaccgcatttcaaacagacatcagccgtaaggaacttccccaaacgcattaacaaagtaagcattcttgaatcttgatgcattgtcttgaagtttaacaaaagacggatctttgttggatgtgttggtgacggtacctcagctaatgtttggagtgactaatgggaaccaacttgtacctggctgcaaacacattactgatcacaggatgtataaattataattatggaatgcaaagtcgagcgtactttgtggctgacagagcttctgggttgcagttgcaagtagtgactgggtgagggataggttttttttttttttgacatagcttctgatgtgttggcaaatgacaagaaaggatagagcacagagcggcgtccaagaggctgctgtatgatgaacagaaatacttaaagcaaagcacaagggagtttctcgccctctctcgattatgcccaaactgcatttgctcttttgtcctacagcctgaactggaaatcagttgacaagcacaagggagtctgagctattgtgaaatcggacatgtgattgtggccgaagttagggatacaagaagttaactcagggcagaaatctctccgatacaggcaaagaagagcttctctactgaagtctggacattgttttgtctcttttagtatgcgactctgcacttcgatggtccatggggtccaaaaggaaatacaagcttttgctcataggaggttcacagatcgagtcaacatttcaagtgaacccacatcttagccaacagcaggtagactctttaagaatctggagtagcttttgctggtgagccgaagtgatagactcaaagatgtttagatcagattgtcaagtgctccgaaattagtcagttctattctatcatctcaggccagagatgtttttccctttgctgctaaggctcttctgttgaagcagtatggtttccttcggcctttccctcgccagctgcaagcacagtggtcaaccctttgtacttgctgtgcgtccgacgatgccaatggctgccgccaagcaagaaggcagaaaagaaggatgctgccatggaggagggagaaaaggggactgaatcactgaactgagtttcaatctggtaatgtcgactaggtacccgcgatgaggatgatagcaggaagcagcccccatcttttacagcttggaacttcatgagcagctatcggatggctctgagcagttggcgtcttggcgagatgggttccgtaccagtggggttaaaaaaaacaaaaatgaagcaagtatgatgtagcacggcagtgacggcacggcacggatgaaaagcgaacgtgggagagcagtagcaccaacaggataacttggacagcaaactgccacatcacaggtgttgttcacacctcagccttcgccatcatcgtcatggatcacaatacaaagatacccgtaccatcacaaatcttgaaggacaaaagcgttacctgttcatgttctaaaccacgtgtattttcattagtaatcagcaatccacctagcaggtggtataaatagctgtgtaaaatactgttttataatgtggattacaatgtttgtagagttaagtttaaaacataacttagatgtttgtagagtgaagtttaaaacataacttaggagaggtggtgggatagcaagtctgctggatatagtgtaagactaacgggttgtttggtttgct

SEQ ID NO: 145847 - DNA, 544 bp, Zea Mays
aaagtgactaaaatgataacaaaataacaatttagtcatttttagatcttcttgtttagatcttttagttcataagtgactaaactttagtcactttttttaatcctcgaatccaaatatgccctgatttaggaattaggatgacattttttttgtccccaaccgtccattggattgtttcatttctggtgcttttttcttcagcacaacggaactaggaagtgcctacccagtacccacagagtacacacgccgcatgatgccgccttgacatataagcccctgctaccattgacctctagcgccacacacaggtagaccatggccgctgctgccttgcgttgaatgtcgccttgggtccacgtgctggctttaaatatcttgtgccttggatacgaacgcggaacgccataggagcactggaactgtgcaagcttggaagattttttaccataatgttgtacagaatccatatcctgtccctgatggacccatcctggggaaaccaacgacgtgagccaagtgaaagctgcgttactcatct

SEQ ID NO: 145848 - DNA, 305 bp, Zea Mays
gtgtacacccatgtcctttactgggtccaccccttgttctcgtatcatttgaaacatcttgtattttgtcccactgtcaagagcgtgtctttttgggactgctggagcaagaccttgtgctgcaaacttagttttcttaactcctggagcaccagtgcctgttgaaatgtttttttagtgcttgaggacgtgtttttctattgggttgtcagtaaacaagggaaaatcagctgttctcagaaaggatattattacctgtgataaaaagggtttaccctgcttaatgtcagtttattctagctacc

SEQ ID NO: 145849 - DNA, 430 bp, Zea Mays
ggaggatgttaaggaggttgttatgcgtcccatatggtcccgcttcggccttcgaaagctgaaggttgaaatcgatgaagccgtcgaagcatgccagaaggcctttggtattgtatgcttcttcattggtacaagagacttgattcaagaacatatagcattcagagtatggccgcttgtagagaaatgggaaatgccaaaggagactgtcaccgagtctagttaaggtgacctggttcgactgaaatatacattcagatatggagataaatttgatgaaccaaatgacgactggctgaaatgtatcaaagctacaagtgatgaactgcttgggccatattccaaagcaggatataatgcattatccacatccttcgggggctggggaaaaaagagattgaacagagtttttgatgccattggttttgtt

SEQ ID NO: 145850 - DNA, 298 bp, Zea Mays
gcaccatctgaccattacttgcggctggcgtggcaaatagtcgttggttgtcttcacaccggactgtccgacgcttcgcgtggactctctggtgatttttagttgatgaaacctggccgagcccgagagtggcatgtttgcctggacggtcaccggaccgtccgatgcaccccaatttgtccggtgggtggcacagaaccatccggtgtagcccatttcagcccaacttgtttctttttgtgccaactttcttttgctccttttggctcgacttcacattgtccctagtaatgtgccc

SEQ ID NO: 145851 - DNA, 581 bp, Zea Mays
ggaggatggagtcactctagttcggaagaatagccgatgctacatagccagtggggaaagcagtggtgttccttctccgaccttgtctgctctcattggtctgcaagaattgtctctagcaaactttgatcagactcttgaagacatggtcctagaagatctgttgtcggagccgacagatggtggaatggtggatatttgtgctgatgtgcctgatgtcgggctagagttatcttgagcagcgtcccgtgcctcatcgaccttaaagcgtggtcttaagggtcaggaggctagtctggattgttctgctcacatggaagtgggtgaaggtccttcagccttagaggtggctgttacggagagctcggccctcaaggatggcactagcgtttacccagcccccgagggtgttgccggggatgatccggctcggatgggtagcgcgagctatgacccagcccccgagggtgtccgagtcggttctccctctcacacttccatggacgttcatgtagggtcttcttctccgcattctggttgcatggcagcagctcactcttcgggtcaggaagtcgccttgg

SEQ ID NO: 145852 - DNA, 529 bp, Zea Mays
gtcacggccacaggccttcctcttcttggccgtcggcggcttggacgaggaggcattctcgttctggccggaggaggaggaggacggcaacgatgacttccctttcgggagagccgttcgatacactttgcagagcacgtagttgctgacggcgtcggcctcggccaagtcatcatactctaccatcttccagcccattcgattgacgacgacgaccgatctagtggagcgctcctccgtcttgtgcttgcgggcgtagctgaaggtgcagaatgtgccgccaccggatccctggacgttcttgcggcctatctccgggtgccaggacgcgccgccaccaccggtgatagcgcgctgcctgtacccgctgagctggcctcgcttgttcgtgtatttcttggcacagtagaggtaccagacgctgctgtagcccggcaccggttccaggttcgcgacgagaatctctggagcagcatcgcatacgtccacgccatggacgaagtccacgtgctctccggcacggatgcgg

SEQ ID NO: 145853 - DNA, 279 bp, Zea Mays
atagagtcactgaaattgctcaaaaagtaattagtctgacacaaactgccttcttgccgggcagaaatatcatggaaggagtgatagttttacatgaaacaattcttgagatgcataggaagaaacaaaatggagtcattctaaaaatcgattttgagaaggcatatgacaagataaattggtcttttgtacaacaggccctaagaatgaaaggcttcactcaaaaatggcgacaatgggtagcatctttcatgcaaggagggcatgcggctataaaaa

SEQ ID NO: 145854 - DNA, 680 bp, Zea Mays
tagaggcagcagcgggcgccatggccatgtgcgcggtgcagcgctgcgcgcggcagatcacgccggcaataactagtaggaggccaggaccaggaccaggacccgggaccaggacgagcggcagccggcaggggatccagtccaggcgggcacgcacgtcgatggcgcgctcacggttcgtttcgcaggcaacagccaacaacagcgcatccacgtgtcatgatgtgaggaagcgaatgggattctggagctccgaaagctgaatgaacggatggtcgattgttgagaggggggttggtgctgattgctcgtcaaatgttgatttggatgttgagagctactaagtgtatagcaagcattgagcgagccagagactgcgactgacagtccatgccatgagccatatcgtcgccaacgatcggaatccgatcccgcctgtacgtggcatcattgtcaaaactgtgtctgcaatcaaaactcactgagattttccatgcagatgcagttgagttgtgctccaaacactccgactgatgaggttctgctagcgtactattttagttcactgagaatctgatatccatccatccatgatgataaggatgacgccacgccatcgccatgaccatgggatggggcccatgtccatgaaggattgctacctttgaccatgcttagtt

SEQ ID NO: 145855 - DNA, 600 bp, Zea Mays
aggaatatgaaatagaaatataaagtagttgtaatcgaatatttctcaaattggatcgaagtatgaactttagcattgataactttagctacaatatagaaactctactagcaaagcatcatttgccacttcaaagtacctagatccctaatagtagacaataacacacagtttgactcctatgcatttaggaatttttgtgctcaagagggaacaaaattgcacttcgcatccatgagacaactagagtccaacggactggtagaaagtataaactgaatcattctattgggcatatcaaattcactggttgtattgctaaaggggatgggccaaaatacaaggtgatatgcaatcacaacacttcagtctctcggtctactaacctcatgagcgttcaacctgctctttgaagccgaagtaatgtctcatgaagagataaaaaggaaatcaacatatgccatgtgcgaagctaaaagcaatgaggatcaagaaatttcaaaagatgtggtcgaacaaataagactagaagcaactgagccacttgataaatatcaaagtgaaacaataaatggatggacaataaagctaaactaaaac

SEQ ID NO: 145856 - DNA, 290 bp, Zea Mays
caagagttcaagatgtgagaaggataaggacaacattgtcctcgataatgtatgacaatttaaatgtatatgttctaggacatgattgtaaattcgctaaacctatactgcacgcctataaatagatgaacagtgtcatgcattagagacatgattttccttacctcgataagaaccagacatatttctcttcataaaaagttgtacctttctctctctatattgtaatcttacgaagcataaggcacttgtgcagacctttgattgatatgagaaagaggaaattttgc

SEQ ID NO: 145857 - DNA, 383 bp, Zea Mays
tgttaaagaagccgaagagaaggttgccttgatccgcaagaggttacttgaagctcagagtcgatagaaaagttacgcagacaacagacgaagagaactcagatttgaggaaggagatttcgtttatctcaaggtctcccccatgcgtggtgtcaaaaggttccaaatgaaaggaaaactagcaccgcgtttcgttagcccctaccccgtcattagccaagtgggacccgcagcataccgccttgagctaccagaatccatgtcagacattcacaatgtgttccatgtgtcccagctccgcaaatgcctgcaagtaccagaaaaccacatcgaggcagaggcaattcagattcaaaaggacctccagtaccgagaaaagccag

SEQ ID NO: 145858 - DNA, 950 bp, Zea Mays
gcttggtgacacgtggataacgcctctgggtgaaaacatcttcgccgcggatgcggtcggggcactgtggccgccttctgtcgtagccccttgcgtcacgatgtggccgcgcaaccgtcgcggtgatgatcaccgttaacccgagcatgccacgctcctaccctgttaccacgtcgcaatagatcgctatagatagcctgtctatcggctgagtcattgctccggtgaatgccacggtaactcgtgccagtgacctccctctctctttggccgcccgcgtgtcctcaccaaaattgggcgccactgctgataagcactataaaattgatcgttcggctagctccgtaaggttgttacgcgcccagtgcaccagccctcgcctccaattagccagcgtagcttgcgaatttcaaactttccccaaatcggtcggaacgccgcttgagacatctcgccgtggccagccctcgacaggttagttcaagcttctccgcttgattttctagactcccttaagtctcatgttgcttgtagacccgtttgattgagctagaccgccctaaatcaccaagaacatctcgatttctcctcgggtttcgccgtcgtcgtgggcagaaaggctctgggccgaaattttgcaattgatggtcggattagagtcgccaagagtagaaattggtgtcgatcgagttagggcatcagttgttgcgtatcccagccggtacttgctcgccggagggcgtgctcaccgccgttcgccgtcggggacctgggtctgcgaagaaacagaagtgcaggggcttaggtgaggatgtcagggagatagtgaatagtggctagggattctttactagttatttgaacaaccagggtcctctgtgcaaagttgccagcgcaggcacgcgcgcgggcacgtttcccccgttcgtgggtcggctcgtgctggtttg

SEQ ID NO: 145859 - DNA, 978 bp, Zea Mays
ctgggatcgaatggacatcatctgttggatctccgacaccatctctctaggttgtgtcaggtggctagggagcgcaatggcacgacatgccatctttggctcactctcaagaatcagtttcttgggaatcgtgagatcgacaccctctagctcgacactaacttccacaccttcatccagggcgacctactcgtgggtgactactgttgcaagatgaagatgtttgactttcttgccgacttgggcgcccccgtcaacaaatggatcctcatcctcaatattctttgaggcctaaacaagaagtttgagtgcattggggccatcatccgacgctactccccctgttgcaagctaaggaaatggcagactccctagctggcttgggcgccgctgtcaacaaccagattcttttcctcaacattctccgaggcctgaccaagaagtttgagcatgtcagggccatcatccgacactacttacccttctcgtcctttctcaaggtctaggacgatcttgttctagaagagctcaacatgactgccattggcactgctattgcttcgataaccttcatggccactcctctgccagtcccccccactagcttccctagccccttactctactctggcacactcctctaggaccaggaggaagcccactcccacctagaatatggcaagaagaaagggaacagtcagggtaatgcttcctagctgactttctacaacccatggacgagcatcatcaccatgtggcccagctcggctcctggtcacccgactttcttggctccgacattccttgttgcgtctacctagcatcgacgtcttggtcaccctggctcggatgtgttatctagtttgtctaatgcttcaactatgccatgtaataaaagcacacatgatatttgtcacacctgtcaggtaggaaaatcatacccgtttacctttctctagttctttcagtcaagcttcg

SEQ ID NO: 145860 - DNA, 671 bp, Zea Mays
ccctgaccataaccttattgtcttttgggattcttttctcgtttgtcattaaattgctaccatttgaccatctctgtcccttggcattaacatgcacgtacccctagattctccaatactcttgtttcaaatatttacctctaaaaaaactctactacccatttaaacatttcagtttatatgaccatgaccttcctgtcttctgagaccctctcatgttccgttgataagtcgctatctttttggcaatttgtactctcttggtcttaattattctcgtaccattggaatcttgcatactcttatttttatatatgcttacctttatatcccaatatctgtttgagacatttcagttaacatgcccttgaccacccttgtttcttaatgatccatgagcggtcattctactttgcatatccttggtgatctcgttgtctccttgtaactccactcggtaatgaatctttacttcaacccttctgttggaaccttacctatcttacccttgattgttttctccactttgtcgtttcgcgagtctcgccttaactatatcctttgttatgcttttaattattatcatatgcacccttgacacctctatatcctacatcgatgtttgtctcatacctgtcctttaaaatcgcccctcttccgtctcatacctt

SEQ ID NO: 145861 - DNA, 402 bp, Zea Mays
ctggcccttaagcttgcacctagtgacaccagcataccaaatcaaatacctgcggaagtggtagttcatgtgcggctggtcattgtgtagtttaggtcggcctcctgaacccattcattaatataatcttggtggtgggcctcaaagtcggtgaccttcttctgcctctgtctgtcgaacctacaaaaggtagacacctcttttaagaattgcatatttgtaataatagttagactaacaataggacaaagtcactaacttgtggagttctattgaagtagagaagggctccaccgaaaactcctttcgcagtccaaacttttgagccactttgtgaggcaagtgtactccacggcatagaagcaaatgaggggacaccacattaagtaaatgtcctcgtct

SEQ ID NO: 145862 - DNA, 390 bp, Zea Mays
ggttgacgtgaacattgtccacgacggtgttcccgatgacaactcgacgttcttagagctatagcgtggtagtgttcaattgtccgagagagagagcatctagaggtcaaagaggtactaaaaagagaaccagatggacacgaactgacccggggaaggctggccacggcgagaggtctcacgacggcgatagcgaccgatttgggggaaatccggaattctcgggctatggtggatgaactgaagtgaggggtggttcgctgggtgcataacaagagggcaaagcagggagggcactcaatttatagtgatcaatcgtgtgcttcgagaacttgggatgagaacgttcatggcggtggtgggataattccatcgagacccacccgtcat

SEQ ID NO: 145863 - DNA, 365 bp, Zea Mays
taattatggaaattctctcccttcccggtcgggaagacagccagacgttcgcactccgagttggactgagtctcccacagatcaggaagtggctgaggcaggtgtgttgctggctgaagttggactgctgaaagagagaggtctaactgctgaagcagtggtcactgactttgtttttaagagcattcagccattgaaagatagggcctatccggcatatctgtatcgagggctggccgactcaactcgggttaccaataggagaattccttctgcagacttggtaagccgacttgaaatgatcctcaggggtaaggtttcaaatgttggtgctccagtggcatactcggcctggaacctacctc

SEQ ID NO: 145864 - DNA, 291 bp, Zea Mays
attctatttttaatccgagtttaaggtctttctctattatatcacaaccgtgtagacccctgatctgatatgaccataaccttacaagcacattatattctaacacttaatgcaagccagaaagagaagtaccttgtgagcaggaagatcaagatccttgttctctcggataactttccaaatctgttgtgaactaaacagaaaacctgaagcaggaactactcctcttctatcacctgcaagacctcctggtgcaattgaatttgaaaatctctgcctaagttgttgaac

SEQ ID NO: 145865 - DNA, 488 bp, Zea Mays
ccaattcctccagcaggcgcgctctcgcgttttagcggtcaccgacgcgtggggccgcgttggcagacccgtcttcttcaccggtccggtctttgcggcagcaaaatcgcgcgcgccgaagctggagaacgcaaatcgcgggggtagctcgggtcgtgcaatcgcttggaccctcccctccgtgtataagtaccagcgcacctctttaacttcttatccctgttgaactagcgtccatatcccaagccctcaccaccgacgcagataatggcatattgccgtcgccgccagtgttctcaatcgtgagtgactctgcgaccccgaagagtgaacgaggtgggtcgtggagtcttcgcctttcgtgcaagtcgcatcgtcgtgagggatcggtaccgggtgatcggcaattgctcgccgtcgtagggcactgccgcgaaaaccgcctatcgccgtggaccggcttcaactctcggccagtgacggtaaag

SEQ ID NO: 145866 - DNA, 809 bp, Zea Mays
gcattgtcgtcgtagtctcggggaattgtcggaaatgttctggtgctttaccgatgggtttgaatgtacttgtgacgtattacaatagttgtgtgtcgcgcaagtacccaaaaatggtaaaatgtggtgtatgttggtaattacaaaaaagtcacgtcattaaccaactcgtgttcagcaggagtcgatcgcgttaagtgattgcgatatacatattgtgtctcggagtgctataataatgagttagcagacttgttagatggttttgggttaagttcgaggtcacgatgaattgcttgttgtagtctaaatgcgtgtggttatggtagcaggtaaaaatttagtagtgctcatgtggtgtctaagttaaaaggcgaactagtgggtgaaaagcacttcgatatacatatatgtcggatgatgattgtggtgaatgcattgattaattgtgtatggtagttctagagcgcgaaataacttgtataaaaattagtaagtctacttgttaattctcacttggttattttaactctaacaattgtcaaagtgttagaataattcaagtatttagaacgcgacaattcttgaattgtataggagctgcaatttattaattgctgttttggactgcacgcagtgatttccccgtgttgtatgtttgatgaactaaattgtgttttctgtagatatgtgctatagaaaagtggtatataactttattatcttgctggttttaaaatttgacaaccataagtctgattggttaggagctatactttttacaaattcagtaactgaatctgtccaaa

SEQ ID NO: 145867 - DNA, 317 bp, Zea Mays
gatacatgtggaccacattgtctgtctggggagataaatttaagagagagcacgtggttgcgaaacaacttttctgcctagctgggtgaacatgccaaatttgattaactttcaccgacacgtgggcctgggttgtattgcggcttggattgtactgaagcctgaaggtgtagtagtcaagtactccagcgttcccgaaatagaatgcaattacacgcttgagattagtcattttttaaatatcagcatttatgtctttaagaccgtgtccaacaattcacacatatgatcacctgaaacactattttacattgtcg

SEQ ID NO: 145868 - DNA, 596 bp, Zea Mays
gttgggttgtcagtcggtttgctgactaaaatatggtcaccagtggtagtggtcgaacttgtgatcagatttgagttaaatccagtaggaattcgactaggattgctataacaaagataaagaggatctataggactacaacattgctacagagcctcggatgagttgtcaagtaaaaattagagaaaatctggccccaaatcgctctgtcagtccaactgaatcaggttcgccatggtacagtgcctagacagatcagatcaaccgctcccctcaccgccgatgacttcgcgtcgggatcgtcgccgccgttaagattcgcactcactggtaaccggatagcactcggggtcgcgtaaatatcctcgccgtggatagactccggccattaaacaactccggccaccgtaccatgttcactgcagcggaatccgataacttcgccggtgaccgccgcctctcggccttgtgccgcgtggctctacctttccaccgcatcgtcgtgactctctatggtcgtctaatcgtcgccggtgaggtcaccacgacggtagacacgaatccactgcgccaaggttcttctctatctccggccg

SEQ ID NO: 145869 - DNA, 327 bp, Zea Mays
ggtgaatctgggagttcgttttcttggacggaggagtccttggatgaaggcttggattattttgatgcgttagatgtggctgcagcggagacttcgccgcgtgtggagggttccgaggatcttcctagtgcgagtactgggtataggcggcgaagggtggtggcgaaacacagtgtgggtgaattttcgcgaagtggtaggcgccgtcgtatggggatggagcgtggccatcttcgagtggaccggattggtaaacaagaattgttgtcctcgccgattggggcgagcataggtgaaggggatctgtgaaatctttttgagggtgag

SEQ ID NO: 145870 - DNA, 324 bp, Zea Mays
ggggggcatgcacaaaggcactgggccccgacatgtgggcccaggaacataaagaatatagtgcttggatcccctaatgtctgttgttgagacaatcttcttgtgccctgacgcccgagatccgcgtatccttggcgtataggggaagcttcttgcggaagagaagatgggtgcagtgctccgctccgaaccggctcacaatccaccaacagactggtcaggcacgccgtctgctggacgaccctgacgccgcctgccaatggattggacaaggcgcatttaatgtcaagagggcttgtcgcatgtcagtgtagtggtaggcgg

SEQ ID NO: 145871 - DNA, 342 bp, Zea Mays
ctttgctatgtcagcagctcagcttaagcctgaacctgaacccgcttgtgcttgctcatgctgccacctaatctgccatttctcgctgggttcctgctccatctgaccatctatctcgctctccttatctgcatataacaattgcatctcatcctggtgtggctcatggccatggaggcaattgcatgcgacctttgcgtcgactaaacctgttgtcagtgaggcttagcctaaacctagccaccaatccacctactcctggctttgcaaagctgcagatccaccttctctgctgctttcggcacaagcaacgacacagatttgcaagtgacaccagctgca

SEQ ID NO: 145872 - DNA, 703 bp, Zea Mays
caaggcatgactcgtggcgaaaggatatgtgcagcgcgccggcattgatttcgacgaagtctttgcgccggtttcacgcctggagtcggtgcggttcatcctcgccatcgccgcacattatgggtggatggtgcaccacctcgacgtgaagtctgcgttcctgaatggggacttggtagaggaagtctacgtcgagcagccaccgggattcatcagccgaggcagagaaggcaaggtgtacaagctgcacaaggcactgtacgggctttgccaagcgcctagggcctggaatgccaagctcgacagctcattgctgtcgcttggattcaggtgcagcaaggaggagcacgctgtgtacgtgcgaggcaccagcgatgatttgctgatcgtcggagtctatgtggacgacctcgtcgtagtgggagcaaaccaggcagaagttgtcaagttcaaggacgagatggtgaggctcttcaacatgagcgatctcggaccactccactactacctgggcatagaggtcagccagagcgcaaggggcattacattgtgccagagtacctacgcacgcaagatcattgagaaggcagggcttacgggatgtaactcatgcaacactccgatggagccacgcctcaagctgagcaaggcgagctcaaatccaccagtggacaagactttgtaccgcagcatcgtcgggagt

SEQ ID NO: 145873 - DNA, 395 bp, Zea Mays
cgccggcgacgtagccaagtgaccgtcgttgaggtatacgtcgcctgccgtgatcgcaacacaccctgaccctttaaccacgtcatagtgagtcgccttagcccacccgttcatcgccggtggtcttgccacggtaaagtccacaaatcgcttgcgccagtagcttcttccctctccgaccgccagtgcaatctcttcaaattaaatgccaccgccctcggatcctaaaattgagcgtgccacatcagccccgctatgtagtcaagcacccaacgcacccactcgtgcctccgattatccaccagagagccccaatttgagacttcccctaaatcgatccagaacaccgtactgagtgagctcgtcgtggccagcgcgttacaggtccgttcaca

SEQ ID NO: 145874 - DNA, 987 bp, Zea Mays
ggcctgccgaccataaggcaaaccctaggatctttcatccctgatagggtcccttccgggggtgagatctaggtgctataggcgatcatcgtcgcccttacgcacgcacggaccgtccagcctcaggagcagaccgtctactcaacgcagggaagaaccgctcctattgtagggtcacgaaccgtctagctccgtgccaccgctgagagccctccaaacggaacaaaacctattatttgaccccgattcgaagccaacacactttttggcaactctgctgaggacaagaggtgtgacttagcaaatatatggccggttcaatgaatcactccaacatctcccctagcaacatcattgagccggctatagagaactgaagaattccagaaaatgaaggacattaggaaaaagctgttggttgaaatcaatgcaaagttcttggctgatttcaaggttgaccgacaccagaagctcatccgacggagggaatgtgacttgtcatctcttcgacccgctgcactcacgcccaatgtaagtaaattcgacgaggttcacgctcttggggtttatgtagatgaacaacgggagtaattttaacaattagttgagggtatgcaaaaatgattttaaacgaatgacgcgcatatttgagaaatttgttgctcccaacttcccatcacacgacattgatgccacacaagattcattggtcgcaaataggcacccacaatcagtcaatcacagccaatttatggaatgctgatggattcctatactagacaaccacaacctccaccaactgcatgggaaaaacccacgcccctgcgcacggttggacagttcgggcctgaggctagacagtccggcctagcgacggtcagtgctgtccttcgcgatgaaccactaaaactcgcgctagggatggctatcatgcttgcaccatcaggccctatgctcggaccgtccgagtatgtcaatggatcgtcc

SEQ ID NO: 145875 - DNA, 369 bp, Zea Mays
cttccatacatggctcgccccgcagaggcaggggggccttccaacgatggagcacctcgccccgcacaggcagggggcccttccatccatgagagcacgcaagcagctctcccccttcctccgcgcaaggcagtccactcggattatccgcaaatcgtgcctgccccacggcgcccttccatctacggtgaaatcctctccctccgcgccagctcggcagatccgcaaaccgcgtctgcaaccacggcgcacttccatccacggttcgttcctcctccaccacaacttctccccctgcgccccatcgctggaggcgcgatcctatcctcgaaatcctctccctccgagccagatctttgttcccatcca

SEQ ID NO: 145876 - DNA, 735 bp, Zea Mays
gttcttcaatactttatctgacttgctatcaatgtgctcccaatcaacatacttcactcaaagcactatgtcatgctttgcattgtagggcacagagagatagaaatatgagtgaaatccattccagaagcgataatcaatgcttctttccctgggcacaacataaggcatcctcatacgagcttatctgacagtacagaactgattctgatagatcaccctatgtctgtcctgggtgtcatgtggccttctttcttggacttcctcactataatgaaccatataagaggagtcatactcattgatactcgctggagtgccaggacaagcatcctcctggatcaatcgcccatacatctcaattcacatctcttgctgagcctgctctcggagctttgccactgcccactgttgcttctcccaccatgacgggcaggctgcttcatccatccacggtgctctgtccacatcttggtgcggtgctctccatcatctcccgaagcaatctgtttgcaccagagagaatggatcagagaagtatgtgtcagagaatatatggcgccatgtatctatgcgtggaggagagaatcgaggattgaaacagtcatagcgtggcccgacactgtcacctagaggcccgacactgccgcgtgcaccaatatgtcgtttcaactatagagtctcagatccatgtaacttatcatatgattacacctatttgatcaatagctaaac

SEQ ID NO: 145877 - DNA, 588 bp, Zea Mays
aaactcatcttcgtgtagatcgaggtagtcaacgcgacttgctgtcgtcatcgtttgggatgagtattggtgagggggacctgtggaatctgtttgagggtgaggaattgaaaatgatgttgtttaattaacgggaggcgggcattattccgaaggtggagccgatgtaaagtgtgtgatgccctcgcttgtcgtgcggtagtaaagggagaacacaattgtatttatgtgcggtgggtctggagatccttcgctgtgagtatgtaatttgcggcttgtattgaaatgagccttgttgcccttcgcttgccggtgtgatgttgtaactgtgtggtggcacccttgggcgactttttgtgcggagttgtcttgtgtgaaagactacgtaacgcgcaaagttgtttatagtaaaaggcttcgtaacacgcggagttgtctatagtaaaagacttcgtaacgcgcttgttgtgcttatccggctgcacctttgggcgacttttgcatggagatgtcttttagtataagactttgtatcgcgcacttattgtgcttgtccagctgcacccttgggcgacctttgcacggaga

SEQ ID NO: 145878 - DNA, 873 bp, Zea Mays
tcatgttgaatgtgtgcgtcatctgcccctttcatctgtgtgtgtcatctgtgtaccagcaatgtaccagcaatgtatcttacctgacatagctcccagtaaagataattctgttcctcctcctttcttcagactttcagttcttgtactgtctgtgtgcgtcatttgtccataggagtatcacagggattacatcctttcatctgacatagctctactatttttgcagcataagcactttgatagacaattagttcctttcttgtagacagcattcccagccaccaacagtgagtcattagttcctttcttgtagagtcattacatcctttcatctgacatccacataaacccctaccatcaacagtgaatcattagttcctttcttgtagacaacatcctccacactgcacttatcaaaacccagagtgactaacacagaatctttgtgcttcaatacattcccagctgcttcaatacattcccagcttcaatacattcccagctgcttatgacaattccaccttttaattattgacacttcactgcctggacgaacccactgtcttgtagcagtaatgtgcaatacaggatgattctcacatactccatgatcaagaacaccatgtttccatgttaaagtggcctccagcattgtttcggtgatttgaatccatggaccgaatccaccttgtagacaagatgatactgcacctagaaataaacaaccagcttctactctatacatcccagagctaatgtcacttatccatggtgggatcgaattgaagacctgtgtagtggcagtgaacacttgcttgacaacccaaacgatacaactcttaccaaccatatttcttagaagctgacaaa

SEQ ID NO: 145879 - DNA, 482 bp, Zea Mays
cggcatggcgccatgcggcggaaggaaacgtggccgcttcctgtacatagccatcggcgtcgtcgtcgccgttgctgtcggcttgttggccatggtgtgcgctgttgttgatcactacctgatgaggtcgtccaggtcgaggttggcaatggcagccccatctagtctactaccacgtttctccacgacaggattggtcaaggccaccggcgacggcgagaaggagagcggcgagcacccaaggatctcgtactgggagcttgccgacgcgaccgacggcttttcagaagtgaatctgatcgggaaaggaggatacgggcatgtctacaggggtgtcctccatggcgagagcgagacggtgatcgccgtgaaggtcctgcgccaggaccaggccgctggtggcgaggtggtcgccggcagcttcgagagggaatgccgggtgctcaggagcatccggcaccggaacctcatccgcgtggtca

SEQ ID NO: 145880 - DNA, 427 bp, Zea Mays
gtggtagagtttgagctgatagtgtttgcttgaatataagtgtggaaataagggggatagagtttctcgctaacctcatagtaatgggtactcagggaatagatgttatcctagggataaattggctagataagtactaggcagttatcagctgtgataagaggacaattaagttgatgtccccactaggagaggaagtggtgaccgagttagtcccacccgagccaaggaaagggagttgtcatcagatggctattgatagcagtgaagcagatccactcgagattatcaaagtggtgtcagaatttccggatgtgttcccaaaagacttaccaggtatgccacctgagcggaaagttgattttgccatagagcttcttcctggaaccgcccccatctttaaaagagcctacagagtatctggacc

SEQ ID NO: 145881 - DNA, 368 bp, Zea Mays
gggaaaaatacaaaatattaatatggaccaattaacaaagttatagtgcattaaataaactacaaaatgtggtaagaaagattgatcatttggatttttcaaaattcccaaaacagcccatgaagtaaagcctctagggaaaattcagataattcagaacctgaatttcaacctcttcccaaagatcagttgtgttctctatttttcaaaactcaaatccacaaagtccaaatatcaaagtggcgccaaaataccctaggcacactctggtgaagtttgaaatcaaaccaaaatcgtttgacacgatttggcattggttttgtttcgggctgaacaatgcagacagagctgacttcacaccaccatat

SEQ ID NO: 145882 - DNA, 412 bp, Zea Mays
aacaaatttcatgggaactacaaatgtttagtcccaagtttacttgatagagtttaggctcatattatgaagaaaatgatataagtgacaaatgagtccaaaataagtaaaatagaatgcataaatgacaaacatgtgaaataaatgttgaaagaggcttcaattgttggatatctattggtctctcatgagaagcttagacatgttatgcaatatggactttggttttatgaattgatgaatggataagcatatgtgttgaataaagatgaggcataagtgattttttttcttatggaatggtcttactcaaaaagattgtaactaaaaccaagaatgttgaaaatggtttccatggtaatggatagttttcgaatcttgaatgatctaaagaaggaaactcagaaacaat

SEQ ID NO: 145883 - DNA, 591 bp, Zea Mays
gcaatatgcacaaggggttcaaatgtctcgatccaaaggaagggcgagtttatatatcccgagatgttgtcttcgatgaagaggtttttccttttgcctctttacatcccaatgcaggtgcacggcttcgagctgaactcgatctcctcccagatatcctcaaaaacccatcctcagaatttgagaatgcaaaaattggtgatcaacatttatcttctcctgcctttactaaccggtcatcaagccatgcaccttgtgttgatgatgcaggaacaaaaacgggtgcaaacgctgcaggaatccatgaacaagctgctggtggcgcgcattatcggctgtgtcacctgaccggggacagtgtggaggccgatgccgattcgcctgttacaactgcgatcgtgtcgggcagcccgacgcgacctccttcggtattggaacctgggatctcgtcacctcctccccaggttggatcgtctgcgacaacgtcttcgaccacaccgcttgaatcagcacctccgatgccgcatgctgatcccaacgagggggcgctggattcaacggtgatcctgccgggtggatcatcttctgtgg

SEQ ID NO: 145884 - DNA, 691 bp, Zea Mays
tgctgctgacaaattggtcccgcgcgtcatccgctgttttgcacccacgttgaaccggcccctcactgcgcccggggacccactgtcagactcgtcttcaaacgcagtaaacctcgggctaactcgcgccgcggactccgtcctccgcacccgccggccggatttaccggttccgcactgcgaattctgttgggacctcggcctatatgggggggggggaaggatagaggaggtccggctacgccgcagaaacaccaccgcgcttctcttgtgtaccactcccagccgcctacagtgaagccgccgcgggttcatcagggcgtcagggccacgggggaaagttgaggattgggtcgggagtcgtctggtgacgcggtagtgcggttcgtcagcgtgctaggagggatcggacggcgtggcaacacagattcctcgccggaggttctgtcgccgcaagaagccgcccttcgtcgcgtccgggtttggtcattcttcaatactcggtgagataaccaaacctagcttcgcaattacctctatttcggtttgcgcctatcggatcgagatatcggagcaggattcggatagttgagtggccggcgttgatctccgccgtgggtttttggacagcgtcgccgttctagtcgctgggagaaggaagaaggtttggtgaccgttggtttagtagtga

SEQ ID NO: 145885 - DNA, 302 bp, Zea Mays
gggcgcggcaccgccgctactgctcggcgatggcggatggccgtcagccgttggatggtggctggccggctaggatttgatgctgcgtaccctttcgcccggttaaatccatgtcgttgaatcgcagatcgaacggtagtaatcagatagggttttataaattttgggcctctagatctcgatccaacggttcatagggcgtaccggttcgttctgcgcctgatctaatctcgcgtgtccgtttggatcggacggctcacgggagccgataccgtttcgcccgagcacatttgctaaagaac

SEQ ID NO: 145886 - DNA, 555 bp, Zea Mays
tctctctcacgccgtgtcgctctcgtcgcaaccgagccttccttctctcccgtcgttaggcccccgcgacctaaacgtcagcccttgccaccaccgctgcgtcgccacactcagagaccactcctcctacgtctcggctctcgccgtcgacggccactcgctgtacagcgcctcgtcggacggccgcatcagagtgtggccgatgggcgacgcgagcgggaggcaggatgacgacgacgacgacagcggcggcggcggcggcggcggttgcgggtctgctacggtcgttgccgcgtgcgacagctccgtgaagtgtcttctcgccacggcgggcagcaacggacacggtctcctcctcagctcccaccaggacggcaagatcatggcgtggcggaccgggagcggcaggaaggacgggaccccgagcctcgtcctgcgcgccgtcctgccgacctgcgtggaccggctacggacgttcctgctcccctggagctacgtgcaggtccggcggcaccggtggcgcacctgggtgcaccacgtggacgcggtcgccgc

SEQ ID NO: 145887 - DNA, 332 bp, Zea Mays
ggttgtgcggacttcgacagaagtgcagcatgttccatccatgtccaggaacctcatctctttgagtactttggacatgaaaggttacaagtataccaccgatgatggtatcttgaaggtaacaaaaggctctcttgtggttattaaaggtgatttgaaagctgaaaacttatatgtgctacgaggtatttctggctctgctaatgttgttgctgcttctgatcctgagactactaaaatttggcctatgcgccttggccatatgagtgcacttggtttagcagaattaagcaagagaggtcttcttgatggttgccatcctgatacccttg

SEQ ID NO: 145888 - DNA, 2531 bp, Zea Mays
gaagctcgggaagaagggtgacatggcagagttcagggcgcagctggactcccttgggctgaagatagtccaagtcacggcagatgggaactgcttcttcaggttcaggactggcttcttttggcttctaatgtgcatgtccttgtcgatgagaagaagaaacatttgattttgaacaaaatgagttttgtttttcccgaaagcaattctcaggagcttatgccttttcaaatttttaagcaggagagaagtgttaaaaaacgttttaagagtttttgaacaaaacgctagggcgccttttgagttatatgactactcattgtagtatgcagggcaatgggtgaccagcttgagggcgatgaggaagagcacatgaagtaccgagatatggttgtggattacattgtggtatgtgggataactttttgtaattggtgaactgtagttgtcctcatgatgtcatgaattagaggagggctttagattttaattcaacatgctaaaattgttggtgctccatgaaggcattggactatctatgcttttctaatccttcttgtgcacatctgcagaaacaccgtgaggagtttgagccatttatcgaggatgaagttccgtttgaagaatattgcaactctatgctaaaggatgggacttgggctggccacatggagctgcaagccgcttctctgctgacaagaagaaatatatgcattcacatggtgagttagcgatgcaagcctagattttttgtttatttgatttatttgtactagcacacttcatgcagttaagaacaccatgtcttgtatggattatgttgctaacagaacagttgatgctccgtggttctggttatcattgactgcatattgcaaatattattagcagctgtgcttctgatctactatttgatttgcagcttaattcaccacgttggtacataaacaacttttctggccgtgaagctactaacatggttcacttgtaagttagagtatcctttaactgtttgtacaagtcgaatgatggtagcacaaatctaattttataccaatgcaggtcttatcatcatggtgagcattacaacagtgtcaggctgagagaagatccatgtcaaggtcctgcaatgccagttgtcatcaaggttttttgttgtgtgatttgtaaaatggttcagttctgtttgtgtcctggaaaagctctgaaaaatagagctgagggaacaatgacgacactgccacttactttggcctatttccttttgttatcgagttacagactgattccaatatatccaacacaaacaataacgctcaaacaaaagcaaaggaggtgaagaaatcttcacacaggtcaacctatgacgacacatcagttaaattggtcatggctggaactggatgttctgacattgccatagctgagcatgtatgaactatatgattgatcacatttttttgcagttcagttgtgtgtttaatttagattcttgttattagccatttttcttctagtgtcaaatttgctattatcatacaggttctcggagaaatggatggtgatgttgatgctgctattgagtacctgatagcggagcgacttgcagtcagtactgatgatgcggaggtagacctttatataaaccatgcatttaacggtgagtgtgccaaactatcttgacttctgaggctctgtgaatgttgtttttctgagtatgatctttgttccagtagcgtttttgctaaaatatggatgttggagcaagaaaattccttggttgtacagagtatggtgagagctctctgtgtatgattcaagggcatttttgttatcactggcatacattcagctgttagttaccatatgaaattcagtgacatacatagtcatctcgaacaatgtactttgctttctgtcttgggtatgcctcactcaccgatgaatttgtggaaaagtataattggtaggtagttcagtttctatatacaagctgttctggtttcatgaatattaattaacagatttactatactttggtcatcatgatgtttatcatttcgaataagcttgagcagatatttgataagcttggttttgttgctgggctatttctgttgtgcccaatggacaatagatttctgattatatggaacttctgtcgatctcagagaaaacattttgaagtatatttcttctagttgctgttagactgatttggggaagtatgtctagatgtttaggaaagtgagggcattgacaattttggattctgtttgatttttaaatccttgttgattaagattcagctctttaaaatgaccaggacttgattccttttctgtacattttttggtcgaaaatggtcagagtacatgtttttttttatctgtatggccaaagcttattattatttcataggagatgaacctaccaagaggcaagaggataataacatgatcgagcacaaggatgaagcaaattgttccaacgaagatgaaactgtcgagaaaccaaagcattcaaacgct

SEQ ID NO: 145889 - DNA, 533 bp, Zea Mays
ccacccgagaaggctacaagaatgttcctgacgacagggcgaaactccttggtcagccagcggggcaccaacggtggtggtggcatgttaccccgacggcggcatccattttctctccctcttctcgctcttggtgctcggttacggcagcgcgatgccagagcacaagcatcgacgcccaagctctccatgcttctgctgcgcgagtacttttatagaggcgtggggaagaaaattgcgccgaggagctcggtggttgaggtgcggaatttgggtgagcacggagttctctgccgcgcgaggtccgtggattccgttgctagccgcgagtccgagtcgcaaccaggaggtaggatacgcccgcggcccggagttcacccagcttttcagggaaccgctgagactggaacaccaggatttggtggcgcgcggcggcaaacgcggaggagttgttacggtgaaggagacgcatcagacaatcgggccccatatgtcattgtcttcgcgcgcacaacgtcaagcgcccgacccgc

SEQ ID NO: 145890 - DNA, 2056 bp, Zea Mays
ggcagccgaagggattttttaaacgggtacatatttagtgcaaccatacaaattggcgcaaccatacaaccaagacacaaacatggaagtgggaaggccttcttttttttctcgaactcgcaagaggattgcgtgttatattaataagagaagaagaaaagatacaaagaactaggggggtggggaaaaccccagcaacccccctaggaactaaacaacatcagcctgcgccaaaacagacaacacaaggagccctctgcctcctgcagcaccccatgtttgtgtcttggttgcatggttgcaccaatatgtatgattgcattagatatgttcccttttttagacctagcctgaaattcgctcctagaagagccaaacttagaatctgaagagtgctagtcacaccacctaaccaactcagccctttcgcaagtaccagtggtaataaaaaataaaaaaaatgaagcaagcacatccagcctaagattttacctctgcagaaagtggatcgactaaatcaacaccagcgcaatcctttgaatggcatgttcctaataggccaccacagccagcatgaaccatagaaggatcacaagaaaatccacgtctcttttgctcatccagggaaagccagaaaaaagaaccgtccccgtcatccatatcaagtgacatatcaacaaacgaagtagattgttgaacaagcagagtcatggcacagagaagatctacaacaggttgtctttgtatagacagacttgggcttgcaccagttaatgtgttagcagacaaagactcaagagatttaggccctttaggtgtaacaacaggcctccaaactcccacattgtccattaaggatctgtcaaacatttcatgatcaatatcactagataaccttacagtcataatttctttttttctcatgtcatacctgggggtgagatctgatttgttgctgacatttgtctgtatgaagctggatgttgcactgttaaactcggcagatgctttgcttctcagagacaatagtgtatgcctaattctgcacatggcagcctggaacgtgatgcattcaatttcagttgccaaagcagtcttcatagacagcagaaaatagccagcattgaacatgttgccactcttcttttgtgaaacaagagaaaaattaaatgaagtcacaccagaaataggtggtgacaattctcccttagagggctgtgtatcagtactctttaagatcttatcactccctttattcccaccttggacaagtgtgtacaagtttgatgaactaatatcatgtaaatgattaccagatattagtttagaagtcttatctggcttgtctcctgtggattcaatttgagagctttgtgcaacatcatatgaataaactcttgcactaaaactagaactgcctggtttctttgatctaggaaagtatggatttgtaaacaatggtgttggggcctcagcaatcaaaatttcaacagctgcatattctggagcaaatgtgagctttgcttcagctttggtaagataatcaaatcttccagatgataaaacttgcgagtgggactgtgcaggtgttgcagtatcattatgaggttcttgaactttagcaacaacatcttgagctggggccataatttgatggtcaaatgcatccaaagttgtgaaaccaacaggagaaagtctttgttcagggatatccattgctgttgatggactatctgtgaatgtgacatctccacagtctgaagcaggaattactagagcatgtgattcagcagtacctggaggctatatgaaatggaattttcagttacatgaattaatactacaggtaaatcacaaagatgccactctaaacagccatgtaatcatagagggatgtatttccccatcatcaaaggtagcatgctaactccttaaataaaacttatatgatgacagtttccccatcatcaaaagtagcatggtaaatcttcaaataaatccaaggagcagataattcaatagtcatttcacaactagttaaagtaaaagttaaata

SEQ ID NO: 145891 - DNA, 303 bp, Zea Mays
cttcgaattagctcgagttaatctctttgtcgcgttactgtgatcgacgggagagggattatcatgttcgggatcgctggggctatgtttaggtggcattaggattaggatccgagcattgaatcagcaatttgtgtgcaccggcgtgttctctgggcgaagctctgtgcggtcgtcgggtctcagcggcataagcttgaagatgtgcctaggccgttgagctccccgtgttcggctcagattggatggccgatgttccttcgtcccgatccgatctgaaccgtggatcttaggttgtgtggc

SEQ ID NO: 145892 - DNA, 448 bp, Zea Mays
catatatttttgggtgcaaggaacatgttctattctgtgaaatacctaggggaccatatttggttgattcctgtcaaactctgggcacatttgtctccattcctttcatgtatgccatgggagatcttgactttacaagtatgccagtcatgctgacactcctgcttgtcattgtacacttaatatctgtttgactatctgtagttggcatcagtgcttacaatcataagctttgagtgaacatgcgtgctgggaaggaatgctgatatgcttagctgtgcatgagtattgctgttgcaagctttagatatgcagtgttgtagtctttagtgcatgtattttctagaatagcaacacttctatattgcagaatgcaatctgatagtttatataggaacaaataaagttgattgctctttggcattatagtacagcaagtgcaacacct

SEQ ID NO: 145893 - DNA, 973 bp, Zea Mays
caaagatgaaacttggtcggggacaggagcaccgcaggatctcagttgggcagatacaccaccaagaacatcctatgattatgaaaagataagcaaaaagctagtttgccagtgggaacagtaaaaaagcaaaaattgactcacctaaagattggagaggaacaaaggaagacccaacgcaggaggagatgatatattgcttgatgaggggaggtcagcgggaatgatatcaaaggcatgactcggaggaacctcagctccatcagcaggcggcagactcctggcatctggttcactggcctctaaagtaactagaacagcaagagccttagatagatgtgtcattgcagcctcctcagattgaactagcggcgacctaacgtggacatccatggaagcagcagaaggggagcctgccccaacaccctcgggggctgggtcgctcccagcaccaccctcgggggctgggtcctccatggcagccacctctaaggctgaagatcccacagccacgtccttaggagccaagtgactcggatcagcgtcttcactaggtagaccgccctccaaggtcgacgaagcacgagaaactacccgggttatctcttgcctggcaggatcacgcggcagaagaccatcatctcggacctctgaacagagagtgggattgtcacattcaggaggctctgatagaaggtcctcagggatgatctcttgcagcgcttggtcataatcagatattgacaacccctggaggctgacaagagctaacaaggcttgtatgggaatgtcgctgaccctgtggtgacgactattcttatggatcagcggaatttcttcttcttcctcctcctcttcctcatcaggcgcaccgctagtaacctcaacatcatcacaacctctgacattgtcctcgaggatggtgctcgccggaccatcaccgagggatagtgtggagaggccagcatcctgc

SEQ ID NO: 145894 - DNA, 391 bp, Zea Mays
cttagtatttaattactttgcacaacaatgaaagggtgagaaggagcttcatacggtatatatgctatcactcttattacttagttccacgagtagatatgatttctaaaggtttgccagaccaacgccaacggtggtgacatcaagtgggcattggttccacattagtatgactggttgaagatatgtgaatatgtcagatggttgaacattcatccttggtgatggaagcagtgatttgttgaattgcatcatgcctggccatcaagggtgttaagttacaaccagggacttcggtgcgatatctactttcttcaccagttcactaatggagcattatatcagttgttgctgatgcatacggtttacttaactgttcaagtaattaatt

SEQ ID NO: 145895 - DNA, 300 bp, Zea Mays
ctagtttcctcaatactcttgtttcaaatgcttacatcataatttgtattgcctacttgaacacttcagtttatatgtccatgaacttcttgtcttctgagattccttcccattccgttgctaagtcgttatcctttggctctttctattcccttatcttagtatgcacatatccttggaatcttgcatactcttatattcttatgtatgattattttcataccccaatgactgttcaaaacatttcagcttacatgcccttgaccacccttgtttctcaatgatccatgagcattcatc

SEQ ID NO: 145896 - DNA, 490 bp, Zea Mays
cgaaggcgcgcagccttatcacataaattacggttacatacacacagcgagggcatcatacatcacattggctcagccttcgggatgatacccatctccctatagttgaacaacattatcctcaattcctcactctcaaaaagatttcgcagctccccctcacctagactcaccccaatcggcgaggacaacaattctcgcttaccaatcccgtccacacgaagacaaccactctccatctcactacgatgatgcctaccgcttcgcgacaatccacccactctccgctttcacaccacccttcgccgcctatgcctagtactcgcgcccgggagctcctcgtagccctccgcgcgcggcgaaggctccgctgcagccacatctaacactgcaaagtaatccaagtcctcgactgaagacttctccgtccacgcaatcaaactcccagaaacatcagactcaaaacacttagacatagtgccaaatgaat

SEQ ID NO: 145897 - DNA, 486 bp, Zea Mays
gcaagacttgccaagatcctgtgcgaaccggtgaactcccaaacttgcatcgctctccgatcccaatggccacgaaggcgagtgaaaactgcggtggcaagggtgtggcaggcgccgatggatgcgcaggtgctcggtgatgcggcgtccaattttataggggcaagcaaaacagactcggcggaatccgcgtggggaaaatcgggtcggcgaaggcagcgacgagaatctcgtgatttgttagcgcccgcggaaccatagcagaatacgagagggagaagaagaccctggctttctgggcccagctgttagtgaacccgagcggcggacgcgtcagtggggtgagggacttatagacggggcccaccagaccttgactgacgacgtggggagggggaaaaatgggctacgcgggagtgtggtacaggtgcacttgttgggccgggaaatggagattcggcccagactcaggtttccttctctttt

SEQ ID NO: 145898 - DNA, 1142 bp, Zea Mays
acaggtatgtttgtctacttaacaatggccattgatattcctccttgggctttacatgctattgacaagatccgaaggggatttctttagagaggtcgcaaagatgccaaaggtggacgttgcttgatagcctggggaagggttgtcggcctctacatttaggaggaattggaatttctagcttaaaggagttgtgttgggcccttcgcatgagatggctttggttgcataaatctgatccaggacgttcttaggcaaacctccctttccaagttccaagaaaggcaaaggcttttttcgacactgttctgatttcagaagtggggaatggaacccgcactctgttctggacagacaagtggctcttgggtcagagagtaagtgatctggctcctaggttgtttgcaattataccaaaaagaactgtaaagtgtaaacaatagatctatgctagaggctttaaccgatagaaaatggatatttgacatcaaaggggctctttcagttggagccatagtggactacttgcagctatgagatttgctatcagaagtggtgctacaacctgaagtagaccataaacatattttcagtttagctagagacggcaaatactcgtccaaaacaacatatgaaggtttctttacaggttctttacggttttggccattatcctctggtatgggaaacttgcccccccccctccaaagtgccgtttctcttcctttggctggttgcccacaggagatgttggtctgcggactgacttgctaagagagggatggatcactcgacaagatgcctcttatgtgaccaggaagaagaaaccctggaccatctccttgtctcttgtgtgtttacaagagagttttggtttcatcttctgagaccttttggcttggaaagcctggctccacaaccagggatgccttcgttcatgaattggtgggagcagatctcaggagtcacggctggtttacttggaaaaggcctcaactctttaattgccttgggagcctggacaatttggaagcttcgaaacagatgtgtattcgatggatggactctaagtttggccttatctcttaggttagcagggaaggagagattgttttgggaggtggcaggggctaaagggcttt

SEQ ID NO: 145899 - DNA, 416 bp, Zea Mays
cgatatcaaggccccatcattgtagcaaccaggtgtgggcgataagctttgtgaattgtgagggggcacccgttctaggtgagattttttggcacgcttcgcatgagccgacaactcggtttgctgcgcatatgataactagccagtagaaaccttggccatgaccttggcggcgagggctctaggtctcgagtgtgaaccgcatgttcctctatggacttcgcgaaggacttcaatgccctcgaccgcagcgatgcatttgagcataggttgacttattcccttcttgtatagttgtccatctactgttgtgaagtcatgacttctgtgcttcaatctcttggcctcagcctggtcagcgagttgatagtgaccttggagatataaggttatgggtgcgcgctagtcttcggtca

SEQ ID NO: 145900 - DNA, 371 bp, Zea Mays
gtcggaacaatgccgcgacatgggctgtagctggagcaactccgccgtgagggcgccgaggaggatcagaagtaccataacacaagctgtgaaggcgagtcgatgactcggtgaatccaaacagctggcgaatctggctagcatgcagagtaacatcctctcactcaaagcggaacgtcatcctttagtgatcagggtcgatccatacagaagcatagaaaactcagacccactcctcaacatatctgccgctggtagtcaaaagagtgagaagtccaggcaaatatgagaggtgtaccttagagtccgcaccggctgctagcaggaaagcagggagatctaatagccggtgcgctcgcagagcaatctgg

SEQ ID NO: 145901 - DNA, 1040 bp, Zea Mays
tgtgtgtaggtcgaaatctaaaatcactatttttggatatccgtcgggtacccgcgggtaagaaattaaataaatacccgacccgatttaattacgggtcgggttcgggtaagacccgtagatcaaatttcgtgcccgaacccgtacccgacgggtcagatatccgaatccacgggtaaaattgccatccctacctacgagccatatgacgttaccggaccccaacctgagcggagtgagggaccaaggtcgtatgctagcttgaagacttggtttcacctgccaggggtctagatgtcagacggagaggtccgagactcttgtgcggaggtccgaacgacacacgtagaggttcgggacccatccatggggtccagactgcatacgcgggagtccaggacccacccatgggggttcagacgatacacgtggtggtctaggacctgcccataggggctcggaaggcatacgcgggggtctagtccccgcccatggtggtccggatctgttggtgtagttcctaagcatttcccctttcaaaacacgtcacaacactggatctactcttaagccaggagcaggtctcgaggtcagcaatcctgccaaacgggtccaatcctgcgggcctggctgctcagttccttagtgcgcggttagagctcaccacacatgtatctgtcttgacgtagtaggagaggataccctagttatggggcactgacactatgattatctatagggcatatttctaactgtttttactggtggtttataaagggtagagataaaaagaagagcggagcaatacaaatgaggcagaaaaaagggatcatacacatgcattttggatcatccatataatctgatggtgtgatgcatacaagggcatacataaaggtgatctagcgactaacagacttgaacggttaccataaccaaatagatagggagagctcgaaatcgtgattatcgttagttagtgcatgtttggaaaggctcccaaatcggtaggggtggaaacgagccgagctcggctcggg

SEQ ID NO: 145902 - DNA, 319 bp, Zea Mays
aaaggaagttccaggttctccgggcacaacagcaggaccggcaccagaagactcgatcatttgggtttccacccaaggggcccaacttcagtagaccagctggacccactctgtcacgattcagccagcagagtcagagctctttccattctccctcagtggcaagcaaccaacctccggcaaatgcatgttggcactgcggtgatccaagtcacttcaagaacaactgtccgcagctgaagccacagggacccgcctactccaactcggtgaatggccccaagaatacctcggcaaccgccccaaggcgccctccgcc

SEQ ID NO: 145903 - DNA, 381 bp, Zea Mays
ttctcaaaaaggataataagtttgtgtggactccaaaatgtgagggaagtttccagatcatcaaggagaagctcacgaccgcgcccattttgacactaccagatatacaccaggattttgtcatcttctgtgatgcttcaaggcaaggcttagggtgtgtcttaatgcaaaatgagaaaattattgcttatgcatcccgcttactcaagccgcatgagcagaattaccccacccacgacttggagttggcagccatagtgcacgccctaaaaatatggaggcactatctgattgggaacaaatgccacatcttcaccgatcacaagagtctgaggtacatcttcactcagccagacctcaacctctgtcaaagaagatggc

SEQ ID NO: 145904 - DNA, 443 bp, Zea Mays
caggtattcatggcagctgtgtatcgacttcatggtatgccagaatcgattgtgtcggatcgcgacagaattttcactagcaacttatggaaagaattatttcacctatcaggcacccagttgcagatgagttcgacgtaccaccctcagacggacggacagacagagcgcgtcaatcaatgtcttgagacgtatttgcgcagctttgttcaggcttgcccttctaagtggaattcatggttgtcagttgctgaatattggtataattgttgtttccattcttcattgggtaaatctccttttgaggtattgtatggaaggcagcctcgccatttcggtttgactattgatgattcagtctctcattcggatttgagtgcttggttgtcgcaacgtgagcttatgatgcgtgtggttcagcacaatctgctccgggctcaaca

SEQ ID NO: 145905 - DNA, 517 bp, Zea Mays
cgggggtcccggttctgtgatgatggagtgttggcaaggcactggtgggggtaggggatcacggtggtagggccaatttggccggagagcgcttgggatggccggtccacggtgaggtggcgggcgcccgcggcgggggagatcaccggtgaggctgctgggcgcaataggagaagggggtaggtgcgttgtgctcgcgaggacatggtgaagctcaagagctacaacaatttgactagaattcaatggagagggggaggcgggactcaccgaagcggaggaagggtgcggcgacgctggctcaattgagctcggggaagggaagagggagtggccgaggccggtgtggagaaggagggaactcaggcggtccttttataggtgcccggggcggggaagagggcgagaggtggcgagcaccggcgagcttgccacggcggggatggtgacgcacagtggtggcgacgggatggctcgggcagacgcaaggcgccaaaccgagctggtgagcgcgata

SEQ ID NO: 145906 - DNA, 271 bp, Zea Mays
cagagtccgcgcggagctcacgcaggcggccaacggaatccgcgggtgaacgccgtgatcgtcgggttctggatcttcctcgcttgggataaatacagaacgcctacgccgttgcccatccaacgagttgccgtgggattccaaatttcgcctccgtgtgatccatgcgggcagatggtggagcaaggcagatctcgccgcagtctacctccgtccatattgtcggtcaggcctcggtgggcgaccctggaggatcatcggcgcacgagga

SEQ ID NO: 145907 - DNA, 1186 bp, Zea Mays
gataaatattcttcaagttatgaatttcctaagttctctgttccttaaaagaataatcagaaatggttaaattaaaactacctttgcatcggggtccttggcgaatgtttttaggtttccttacagactagtcctcgggtcacaattcaaatgtgccactgacagttcagaaacccccctggggttttgctaaacctaaccagaggttcttctcccaattaaacagtacccacgcgacggaggaaagggcggcggggcttaccggcagcgagattgctccggtgaggtgcccgagggtgtaggggaggtcatgacggtcacgccgatgtgcggatcgtctccggggatggtcagagtaggccgatccacgtgcgcaggcgggggagcttgttggcggcgagggctccggcctatccagggcgataaagtttaattgaactggttagtgagcttcactcggtgctcgagaaggcatgggtgcgaggaattgaagaatggctcaccggatagctcgacctacgcgcggtggcgggcggccgaagtccggcgttgatgatcttgctgttctggtgaggcagggcttcgattcttgcttggagaagcttcacggctcctcggggaaactttcaaagggttcggttgaggctgagggtctccggaaatggctggacacggtggccggtgctcgggtggctcgggcgggtggcgtagagctcaccggagctaaggatggtgtctgtccagcgaagatcagtgcggagtgaggtatggcgcgtttggggtggtcttaaaggcgcgggcgagcatgactgaggggtcgctctgacacgcgctcagggtgtgcgcgggcgagcgccagtgcgcgatctggcgcctagatacgacgtcgagcacgaggcagtgcaaagagaggtcaagttcaagcgcagattggctccaaatcttcacgattatggccatgatcccgttgagagatctcttcccctaacattcctttgtcgtttgtgtgtggaggcttatgggtttagctgactggatcaaaagatatggagggatgaagtttggtttgtcccactgctgaactctgagaggaaatcctagatttgacgtgtctagggcacgaatctcgatgccaacttcacacacgttgtagaggggttagtttagaacaattttttcaatgggg

SEQ ID NO: 145908 - DNA, 453 bp, Zea Mays
caagagtactagagaaactatagttaggggagtagagagtgagtcctaacatcgtagagtatgtacatcggtcataacaagagcctaatagacatgggttttatagaggtttgggccagagagtgtgaatactatatgtcctcttgctgatcacggattacagtatgcaatagatctacgatgttacaaactttaccaccatgaaccccttaataattatgttatatgactcaagtaaagtggagagctagcctcacaccaactgtagctaacaccgtgtgatcaaactgaactctcttagcctgagtttgttggagcctggtctgtgtgaagagtgaacctaaatcaaatgctactctaccacaccccatatatagtccaaagaagcatcaagcttcatgcatatgctttccacaagccctacttgatgttggactaactgttctcgtctcg

SEQ ID NO: 145909 - DNA, 504 bp, Zea Mays
cagagtgatggtcgcgcgggccagactccgatttgcccttcttggggtagctggcaacgaaggggtcagggtcgccatagttgtagcatctgtccttggacccaccacgccgccggcacatacagttgttgtggaaccgcgtgaaccgactggccacaagtgccagttcctcatccccaaggctctccacttgctcctctataatagacaacaaagaagatagagcaaacatagcaggtgatgagttagaagcagaaccacctccagagactagggccatggtgggtgcactagggttctcaatcttggcccgagtctggtggtcaatctctatggacttgagcttgctgaagagctcgtccactatgagattttcgtagttgggcgattcaacgatcgtcgagaccttcacctcccaaaccttctgatctagagcatgtagtaatttcagcgctctctcatgatcactatagggtagctgtgccttgttggcatgcatcttgt

SEQ ID NO: 145910 - DNA, 914 bp, Zea Mays
agtaactaaaactgaatttcagtgttttgatagcagttttgaagtctatttgtggctattctatagggttttaggctatggtgtttgtagatgaaataaagaccatatgatagtgaataattttcagtaagtgggtataacatgattctacacgaaaagtggagtaaaactggctcaaagttggattgtcaggtgactgaaactgagttatattcagtgtactgaagactgaatttcagtgttgggttatctgtttggagctctgtggtaattaatccatggagtatgagccctactatatgtagcaaagttaaagatcatctgaagtatagcaagtttcatgtagagagttggcttgatatggtgtaggatttagagaaaaaggggtggcaaaaccctctgtcagactcagtgtagtgttgttcaaacttctcaaactgaattttcagtgaatttgctcctttttggtgcttcataaatattgttctgagtatattcagccaaggagtgttatactaaatagggagagctataattggagagtaattttggttaagaaaggtgggcttgttgttgaaaggaattgtgagatactagtgactgaaccgagaagagtgggatggaacagcaggactgatgaagttggattcagtgcctgggttggtaactgaaggagaatctcactgctgtggttgcacttgtgtgtatagttggagatatggatggagtacaatgataaggcctagaggcctcacttccaacagaaattatttactttggatctctttgagcctatccacaaccacaagtggagtccacatttgttttattcgctatccgcagaattagaccgcacaggtttttgtggtctcactccttcaaaaatatcatgttttggactatctatcggcagt

SEQ ID NO: 145911 - DNA, 288 bp, Zea Mays
caaggtgaagaacagttttgattgaaaggtcggatcaccaacctttgtcgcttttcaagcccttggttggacctgtcacctccatagccctttgtctttcctgggcctgaatacttggtttcaactgccagcgtcgtgctgacagccctgctataggagaggtcgaggaaggtggccatcttccactgcagccggtcattgaggcctctcataaagcaatttctcttcttcaggtcagtgttgacctgatcaatgtcgtactgggacaaatgattgaacttgttgaga

SEQ ID NO: 145912 - DNA, 664 bp, Zea Mays
ttggcgttggcgagggacttggcgacggagaagcgcccgtaggtgtagaggctgctggtgccgttcgacgggagcacgctccggcagaagttggggtccgtcgtcccgttgcacgccgtggacggcgtcaccggcgtggccgccgtgtcggagcggaccacggcgacgaacagggagagcagcaggatgacggagagcgcggtggtggtggggaaggacgctgccatgtttggtggtaatcagtgtgaatgaagctgcttgtgttaagtgatcgagtgtgtgttgatgtttgagagaggtggtgagcaaccaaggatttgatcacggtgtccttttataatgtggatccgagggcttcatggtaattttgaaaagttggcaggtcaaacatgggttgactactcgtgaggtccatgtggctgttcatggcgaggaaagcgcgtgtgcaccatgacggtggcgacgccaaaccggcggcatatgtccacccttcgagcttggattattgcatgggggaggtcacatttgtctcggttgggttggtcgggttcaaatacactagttgctctattcgttctctctctctcttagcatatgggcatacagtattataccacaacaacacaaagacattaatatggttgtttgtgttctaacttcccac

SEQ ID NO: 145913 - DNA, 1075 bp, Zea Mays
tcatgtgcagagtctgttaaacaaaggtccatttgactttgtcatatgtcttttcaaaatcaattttgaaaataacccactctttttccttctgtgaagctcatgtatcgtctcatgcaacactaccaccccctctatgatatttaccagggatgaaagctatctaggtcagactaattatttttgaagcaacagaagaaatcctatttgtaatgacatttgtaaagattttgaaacttacattgagtaaacaaaaaggtctaaactgttgaattgtttcagcgtccttacttttttggtaaaaggatgattgtgccaaaattcaaactatatagagggaggtcgcctctatgaaagtcttgaaatagagagactaaatcatccttgataatggaccaaaacacttgaaaacattccgcaaaaaaaccatccggcccaagcgctttgttatgttccatatggaatagtgctgcccaaatttcttcctcagaaaaaggcgagaccaacaatgcgttttcaacatccgaaacctaaggaatgtcatgtatttgggactcatctagagcaacatatgttgcatcaggtggcccaaataagcatttgtaatatgaagttatatgcttcattaaagttgcatccccatgtatcactttatttccatcacgtagttgaaaaatcctagatttcccactggcaactagatggaaatacttagtgttggagtccacatgtaatagatctttagtttttgctctttgataccatttaatttccttttctcgaagcagttgggctaagttatgttggaggacttgtttcaaatcaaaattttctactgacaaataggtcccctctgcctttttatccaaaaatccagcttctttaggatttctttattttcttttttgtatgctccactaaaatttttagaccaacccttaagatattgacgtaaacgcctaattttggcctgccaacactctatcagagtgtttccctccgtaacagcacttattagtatacaactagaggaagtagcgatgttgtcgtattgggtttgccaatcaattgcaaa

SEQ ID NO: 145914 - DNA, 715 bp, Zea Mays
gagactctcttggagggacgccttttcccttgtaagttccctgaattattgctccaggctttccacccgggattttaggtgagtgcagtgggaggcaaggtcatcatattggttatcgagagtgtggaggtatccaaccatgtagacgatggtggggtcatcctcggtgggatctctccttgacagggcctaaagtcttttcctccaggcgggggtatttttgttgctgggtggaaactagcgaaggggggtttcaaagactactctgctgtagttctggcataggtgtcggagggcttttcgggcaacattttggcaagtatctgggaagcggtgtccggtgaaagtgacttggaaagaagggtggtttgggtagtttcggctttctcccaggtagactgccatagagcacttctccattccattctcgagatattccttccagacatattctggcttcttgcggatccccatgtgaagtgacttcgcaatagatgtgggaacccctccacttctgagcagtaggatgtcctaatgaccagagagtcttccatctggaataggaaaagaagggtctgttaatatcgggggaaaggagagaagatttttcttagggtaagaggtattttcttttaaggcaaacttttaaggtcagggctgcgacctacggccagtcctatggctctgataccacctgaagcgtcccgatcctttg

SEQ ID NO: 145915 - DNA, 550 bp, Zea Mays
cataaggggagccgcggtggtggtggcaatgggcgtcgatatggtgttgtgggcaggtcttaggaatctggcatcttgagatcccaatccatgaatgcaacacaacatgatgggtgaagcgagctccaccctttcccgtcggtgactgagggcaatgaagtgcacatatttgaagaaacagtcgacgacgatgaggatgacaaacttcctgtggaccttgtgaaggccctcaatgaaatcaatcaagatatctgcctacacctaagatggtacgtcgagtgcttgtaggagatcgtccaactacagggtcaatgtcttgttgcattgacacatgtctcacatgcgattgaagtcgcaaatgagtactctatcgcctggaggtcagcgttgacccaatagtagcaccccctaggatgattgtagaacaccgtacctagattacctcatccgcgatacactcttgacggacaagactggggctcgacgactcgcacgacgcatcaagtctttcgtaatcatcaacggagagttgtatacacggagcttgacc

SEQ ID NO: 145916 - DNA, 380 bp, Zea Mays
cgagagtctaattagatttcgctcgaaaataattccctacgcgtgatttgaaaatgaatcgtcctgagatttgatcggctttggatttttagccggagaaggcgaatcgtgatattttaaaattgccgtcgatacggggttttgaattcggttcggacatgggatatttggccgagttggataaattgatttagaggacgacatattgagtattccgtttgagagtacagagtcagattaatttttggacatagatcgaacatcgagaaatcggagtcggacacagctcgactagcagctgccgagcgtttgattaaatgagctttagacgagatttataaatcgagattgagtatcgagttttgcatccgtgccaagaa

SEQ ID NO: 145917 - DNA, 821 bp, Zea Mays
gtgggttgttcaagccccctaaagtcacattatacgcaaccttcgtaaacaatttagtttagccctatattttatttgactgtgttgtgtggcattatatatttatatatcgccaagtggccataacaactatatcaagctctataatgcttggaaatctgggaaattaaattgaaatacaatgaaacacagataagttaaatctctgctctctcctcgtgcataaagttttacccgaagtaacctgaagaaattcaatattaatgcatgaaagcctttttggcacagaaaacatcacaaattgggattttattagtaagcaataagaccttgttagatgaataaatgctagaatctcagtcatacattgctcaaccagatgttggcacattgctctttgtcgctgaacggcatgaagcgaactttgagataaatggctagtaccttagcaacacgaagttgcgagtacatcgaaagataattctgagaatgttttcacaacgttggtgtaaaaaaacattgtgtgttctcgtcgaaccactttactcggcctatctaggacctctatgcttgtgttgcatacatctctcagaatttaaatacttatagccgttgaattgacttaggatagtcctttgactggtatggtatatactataaaccaaatggtaaaggtcgactccgaatatacatatgtctggggtttatgtagcagaactacattgtattccaccccttggcatgcttaccataatctatatccgatctactagaagtgagaagagtagacaaataactataaaatcccacatcaccacaga

SEQ ID NO: 145918 - DNA, 330 bp, Zea Mays
tgcagtggagccttcgccgcgcgaggagggttccgaggcgctcccaggcgcgagtactgggtataggcggcgaagggcggtggagaaacggagagtgagtggattgtcgtgaagcggtaggcgtcatcatagtgagatggagagtcgacgtcttcgcgtggacgggactggtaagcgagaattgttgtcctcgccgattggggtgagtgtaggtgagggggagctgcgaaatctttttgagggtgaggaattgaggataatgctgttcaactatagggagatgggtatcatcccgaaagttgagccaatgtaatatatgatgccctcact

SEQ ID NO: 145919 - DNA, 472 bp, Zea Mays
agtttatattgtataggacaaagtggaagtataagaactaaaaagtcaatgtgttatagcatctagttccgaatgggtttggactctactgaggctggttcaaaatgggttacttggcccacacgtggagttgtagttggtgggtatagtaccactgcaccttataagtttatgagggtcagcttataatccttgtcgcactaaacgtgacacctccatattaaccctttacatgaaccgagaataaaagtttaatagaggttctatgcgtatgcgggccagttctacctaaggagattttggaggcataggcttgttcaaactgggttccggccgactggttggaactaatttaggcactactgtggattgtgctttgtcatggctgggagtggttctactggtttgactatgtctggccacaactaggacttgtgcgaactgattttgacgggtttcggttaggtcgatc

SEQ ID NO: 145920 - DNA, 483 bp, Zea Mays
ttagagccctgggctctctctaactaatggaagccccgaccagaaaccgaccaggtgcgctgaccggcgcgcacgcttttttggctgactgtaatatctagttatgtcaattataactacgtgttatgctcaatcttgttacgatttacactcttttggtgtgcgcacgtctcgcggcatccgggcccacgaaaagatcgtgtccccgcaatctgggcagcttacgtctatcgggcccacgaatcaaggaaccgagctctcattttttagctcatctctcccgtaactctcgcggcggccgaaccctagccaaatccgccgccgtatgctgcttctcctccgcgcccgtcgaaccctagactaatcgccgccgtgagcttcttgtccaccgcgcccgccgtgagcattaagattctccccccgttgttccaccgccgtcgcattctccttcaccaccgcagagacccagactcgccttctccg

SEQ ID NO: 145921 - DNA, 416 bp, Zea Mays
tgcgaggcttcgattgacgacccgctggaggcccaaaactgtacttcgggtgcgactcactggaggcccaaaactgcactgtgggtgcggcttcatggggctgttcgcaaatacgtggagcagccgctagggatgacagcggatcgtgtaaagtacgagtaagtcatttacccgctcgccaacatatccgcgcatctagtgcttacccgtgcccgcgagagcttacgggtaaaattttcgacccgtgcctgtacccgcaggatatacgcggatatcgggcaacccgttacccgtcagaaaataccatatgagtatgtggtcatgttcatttcaccaagaacatcaacaacttgacagacgtaatataatggcaaggaacatagttcaaatttcaaagtccacaaacatgatcgatc

SEQ ID NO: 145922 - DNA, 430 bp, Zea Mays
ggcgggcaccctccttacgggtggagtaccacgagtccacgacgtgagaagcggacgggagtctgttgtggagtgggcgggtgggacgcaacaactgacatggcatggaggttgcggatggcgtgaagacgcggagggtgcgggaggcgacgcgggtgttggtgagcgtgtgcgagcctggggaggatggagtcatggtctgcttgtgtacggtaggggtgagttggtgtgcgttttggtgtgagtgtgtgcatacatgaacagatactacaactgtacttgtaagttagaggcaataaaagccattgcgctgcttgggagacttgtcgccaactatacactgctggggctggggttgtttctgcgcttaaactcaactgtcgcttctacgtgcatgtagctgttgctaattgttgccagactgtcgagc

SEQ ID NO: 145923 - DNA, 359 bp, Zea Mays
gagctggacaagtttgtggtggtcttcattgatgacattctggtttattccaaaaatgaagctgagcatactgagcatctacacatcgtacttcagcgactgcgcgatcaccgtctatatactaagctgtccaaatgtgatttctggctgaaggagataaaatttttgggtcacaccatttctcaggatggggtatcagttgaccctgggaaagtgcaagaagtgatgaattggaaacctcctaccacagtacggtagatccggagtttcctaggattgcagggtattatcgacgatttattccggatttctccaggattgccaagccaatgactgaattgttaaagaaaggagtaaag

SEQ ID NO: 145924 - DNA, 566 bp, Zea Mays
cactctgccttcctgcatcaacacacaaccaagtccaattcacgaagcatccatataaattgtgaaacgcttatcgctctcaggcaaagctaggataggggcgtccaccaacttgctcttcaatgcctgataactgacctcgcaatcgctggaccagacgaagagaacacccttctccaaaagtctagtcaaaggcttagcaatgctggaaaaatttggtacgaaacgccgataatatccagcgagccccaagaaactttgaatttcagagacactagagggtctcttccagtccaccacagccgcaacattcttgggatcaaccgcaatgccctgctgattaatcacatgccccaggaaagccacttcggacagccaaaatgcacacttcttcaacttgccatagaactgattctcccttagggaacccggaatgagacggagatgctgctcatgctcagcctcggtcttagaataaatcagaatgtcatccaagaacatgaccacaaagtcgtccaagaactcatgcaacatcctattcattgcttccataaaagcagcaggag

SEQ ID NO: 145925 - DNA, 387 bp, Zea Mays
cctagggagacgatgcgcgcggtcaccggtgctctcgctatggaacccaaagctgccggaggatggctgaacaatggtcgcgagcagcacggacaggaggaagtgagaggagcgcctggtgtgggtgagatgactcggcaccatggagcggagactgggaaaaaggcacctgcgccccgggattttatccccaggtcgaggggcaacgaccatgccgcattccctggcgagatccggattccacggcgatggactcgcggcgaagacgaccgtgagcaagggaggacccaccagcagtgatggagaaaggggcgttcgtgcgcaaagggactggcgcgtgggcccgctgcgacggcatccggcgcgcacacagagtttggggccgcc

SEQ ID NO: 145926 - DNA, 393 bp, Zea Mays
gctcgtacctacattagttgggctgggtcgagtcaatcgggtcaggtggcttgtgcttagatctgtcctatactatactaataggggtggaacaaattcgagactatactattgcacgattaggtggaacaaatatatctgtgtgactataaaaagtaacaaagaggcccaaggggccaggacatgggaagagcatatccttttgctgtataggtaggttaggattggcaggcattaggaactccattatacctgcgttgtagcttcgtacccgctttgtacccatcaattcacatacaacgttgatgaagggcccaagaattcacaagatcagatccaagaatcggatagacaaatacacaactcagtgccatagtgtcatccaatccaact

SEQ ID NO: 145927 - DNA, 451 bp, Zea Mays
ttataaaaataatttgtccggggtcatcccatcaagcctaggtaacatcaccaatttatctgtaatcactctttcagaaaatcaactcaatggacccattcccactgagttatggcaaatgccacacatagcatctttgtacctgttttataataatctatccggtgaaatcccacaaactatatctaatttaacttctcttcaagagctatccttggcagccaatatgctgagcaacactttgccatccaacttcggccatgccctccctaatctcaagttcctgtacttggcagccaacttgtttgaaggacaaattccagattctctagacaatgtttcaggtctagtatatttggatatgtcgtctaataagttcactagcaaaattcctagcatatttggaaaactttcagggttgtcttttctaaacctcgagagaaatatgctt

SEQ ID NO: 145928 - DNA, 289 bp, Zea Mays
cagtaccacacgcgtggcttttgggtgggaaaaaatagcaacgatgtgctgcgctgcggcacgccccgcggttgttttgccgccgcggcccccggcctaactcatctaccgttgacgacttcctcagaaacgatgtgcagtgcaggttggttttctccgctaacttgagcagacaaacgtgtaaagcgtatgctaagcttagcttggaagaggcgttaaacgggatggccatggatttgcttatccagaaacctgcaccacgaacgcaagccatgccgtccgatttatc

SEQ ID NO: 145929 - DNA, 364 bp, Zea Mays
gtccacagcgcctcgcggcaccgcgatggtgagtaggagaaccggacgaacgagggggcggaatcgagcatagatgggttctacacgtggagcgggtagaggcgaactcggaggaggtttgcttacccaacttgtagcgcagagcaccctggccacggtgaagtgctgctttgctctgacgtgcggcatcggcgagctctcccttgatctccgactgcttcccccgattaaggaggccatccccacacgcggagcactccagcgaagcttctggcgccatcagaaaccccgccgtcatgaattccctcaatctgccaatctcctctcccttccaactctgcacgccatggctaccggattggca

SEQ ID NO: 145930 - DNA, 671 bp, Zea Mays
tttcacatagcccatttgaacttgtgcgacacaagctgcattatcttcataaatgattgtgggtgtttgctcaatattcaacccacatgcagattggatatggttgatcattcttcgaagccatgcacattcacgcgaggcttcatataatgcaataatttctgagtggttcgttgaagtcgataacaaagtttgttttgacgacttccatgaaattgtagttcctccacaaagaaatacatatccagtttgagatttgcctgaatgtggatcagacaggtatccagcatcagcgtacccgataatatttagattttgattttttcaataaaacaaaccaagatccttgcttccttgtaggtaacggaagatgtccttgatccctttccaatgccttttggtgggttccgcactgtatcttgctagtaagttcacagcaaatgcaatatctggtcttgtgctatttgccagatacatcaacgctccaattgcgcttaggtatggatattcagctccaaggacttcctccccctcttccctaggtctgtatgggtctttgtctacctgtaatgaccttccaatcataggggttttggcaggatatgccttctcaagaccaaatctttctaatactttttgagtgtaagttgattggtggattaatatgccac

SEQ ID NO: 145931 - DNA, 334 bp, Zea Mays
gtggatacctcagaggtgctgcatctggagcactaggacgaaccactcgaggatgtgaaggtcaatggcgatagcacaacactgctcgacgcgttcgtctacgtcgagatgtcttccgctgccctacgcgtctaatggtaattccatgacctataaccgcagtagttcttggtgttatggggtcaaaaattttgtttttggtgttatgatgtcttccgctccccataatccttcaagtacaagatcacacaagaactactcaaaactggtgctcaaatctctctaaaatcactagaaggcgtggttccgaagtttcagagtgttggtatgccct

SEQ ID NO: 145932 - DNA, 336 bp, Zea Mays
tggaatcttgttgaattttgactattccaagattagaatatgttcgtctcgtcacttgagggtcaaaccaatgacatttgaatatcactggagtaaaaggtttggaaccatgaaaattgagttcatatatttcttcgattcgtccaaaacaatcgacctcgtcaaggtcgggtgtaaagactccagaacacgttgttttcgattgggccgactttggtcgtagcttgttgtgcaaaaacgatatccattgatgtcatacccagaatatttcttgaccatataagcaaatccattggctacttgcctcaacttggcactcatagacggatctctttg

SEQ ID NO: 145933 - DNA, 593 bp, Zea Mays
gtttgtgagcactttagtaagaatctttaaactaacattaagcaaacaaataggtctataatcctggattttcatagcgatctctttcttaggaattaacgtaatgactccgaagttaaggctatacaccagaagggagttattatggaagtcggcaaacagagccattaaatcatttttaattacttcctagaatacttgatagaattctacaggaaatctgtctggtcccggggctttattatgcttcatttggaagaccgcctttctaacttcctccataacaaacggcgcagttaaaatttcattctctgcatctgaaacttgggggatatcgtgagtaaaagattcctccaattcaacagaagtttggtttggtttaccaaataggcctttatagtagctagtaatgtgttttttgagttcctcctcgtccactatacttggcctgttatcatcttctaggctatagattctctctttacggtgtttaccattagccactaactggaaatatttcgtattatcgtcaccttccagtagatgtttgactttggctctttggaagagtcgaatttcctcctctcttagaa

SEQ ID NO: 145934 - DNA, 480 bp, Zea Mays
gcttcaggttgcgacgaggactccgctgcgaccaaatccaacgcaacaaaatagtctaaatcttcctcagaagactcctcagtccatgaaagcgggctcccaaaatcattcccgttcgatgaccacgactcagtttcagaaccagatgcatttccattaaaggcaattgcattcgtagccgccaaaaaactagtatcaacattagcgggggttgcttgcgcaggcccggacgtcgaaacctacgcagcaaccgaccttcagtatcacaaaaagaaaccttaaacccaatgaccctaacgcgaccccgccacctgtgaaggagcaaccgccgctgcagagtcttcgccagccggagcagccgtcgtagtagggtcttcgccagggccggcttgaggcgctgagtgcccttcaacccccgtctccgcgccctctgtccgggtcatcgagctttcaaggccaccaaagtcctcgacttcttca

SEQ ID NO: 145935 - DNA, 393 bp, Zea Mays
gaggacgtatcgtatgagttgaacataaactcgtcgaattggtgtgggagttgaacagaacctcgctcgggtacatgccatgcggttgtcttcatccttttaatagcagtcggttgatgggggtgtggatgggtacattccatgcatactgtggaaggtcaaccgtcgatggaagggagagatccgtgggcgtgaccatcgattttgcaatggtagccttaatgggggcactgctggggacttgagagatccatggacgctgacacgacgagggaagggagagagcctactgggcgtggggcggagcatgggatccatggctgctcaggagtgggggcagagatagaggacgagatcctcgcccaatgtgatatgcgagatccccgctcggcg

SEQ ID NO: 145936 - DNA, 932 bp, Zea Mays
aaaaattaaaagaaaaagagaaaagaaccccaactgggctcactcttgcgatttctgcccaacttcgccctcccctccgcgcggccaggtgaatgcaacgcgcgcgctttgggccgctggccggtgggtccgggtggactcacaacccgcatactcgggcatgggagttgtctcactaaagcgtgggtccgaagggcggaacggtaactcgcgtgctctgcggactcgtggggacgctgcacaatgggacccatgcatcagcgctccttcttcctcggatcgtgacgacgggcatggctttcgagcgagctgaacggatctcaccgccacgactggcgtagggttcactcggactgttgggatgttgaccgtataagtgcgtgcgctcggtgccgagaccactcctcgccccacctagccacatccacgccgccgtcgagattctcagtgcgccgccaccagagcgtaagggagagtcgctgctgttgcattttccggccacaatcgtagaagctgtcgggctgtgaagctttgtagtaccctctggcggacacccattgcaactggtggcggatttagccatcagggcggccccgattgctcgtcgtcgttcaaatccagccacgggctgccattaaccgcggggcatcctctctccatctcctttcctggtaagaattcctctctagggttcgctattcactctgcaatgcgtaggagcttttggattgggagattgggtcgtgcgcgcgcggaatggttatcttgccggtgtgggcgcgccgcgggctacgggggattggtcgggtcgcttggtggccattggatccaccaaggatggctcagattagaatcaggacaccgtttcacgtaattgtgatctgggccgtagatgccaaattggacgagtgaagctgggactcggttatgag

SEQ ID NO: 145937 - DNA, 629 bp, Zea Mays
cagcaactatggtcttcttagtttgactttgatatcaagtgacgattgtggctttcaatacataaccatggaccaaaactaactgcctgatacctcaccatgtcgcctaaatttccctccatacctcacctcgtcgctcgccggaggagaaaacacaaacaaataagcgcagacaagagggcgaccaatctggcgaagctgctggagcctgctgctgtgactgcatggtgaggtagacggaactgccaaaacctgttgctgtgaccatacggacgggcgagagaccaagacgcgtcgagtggtgatgcggttctgagcccgtggttcagggcagctggaggagaggcagcgctccgctgcaggagacggcgcgtgcaggcggaggatggtcgacatgggcacaacggcggtgtttgtgggggagggggatgggattcctggctgcggcaacgacgagggggaagaggatggcactggggctctagcagttgctgttactcatcattgtcgacgccgacgacaaaaagaaaaggaaaaaaatgctttggatggttaggtcattgccttgttgctagatttttcctcgacgacctgactgaacggcggcaggaacggtgacggtgccctcc

SEQ ID NO: 145938 - DNA, 415 bp, Zea Mays
agaaagtgtactgggtggccggcgcacgtgcctgggaggctggaggaggaagaaggatggcggatcgtcgatctcatcttcaacggtttggattagatctgagtaacgtttcgcgttaaaccgatctggagcgttgatcggagatcgggtggaggctgagcgttccgcggtatttaaaaccttggccgttggatctagatccaaggatctgcgtagcgtaccgattcagggtaattgagatctattctgggcccttaaattttgatccgacggccagatctggctgatacccctttagctgataaattcgcataagagaccccgcagatattagttatcaacccgccgtccctcgcaactgtacgctgagtcttaagaagttttgcaccgaggaccccgctcttttcagaattca

SEQ ID NO: 145939 - DNA, 593 bp, Zea Mays
gccttccttcttcaagtggctcgtgggcaagtaccccaacatcgtcgtcccggccaaggaagacgatggtggcgctggcgccggcgcgtcgtcgccgtcgtcaccgtgggacgaaccagccgccggccctaatggcgtctaccacaacctgtacctggacatgaacgccatcatccacccctgcttccacccggaggacgaggtacgcatatgtctctgactctctgtaacgcagcagatgttacacacacccatcacatcttgctcaacctgaatccctcgacgaactgaactggtaaatgccgtggatacgcaatgcaggtgtgcccgccgacgacgttcgacgaggtgttcgcggccatgttcgagtacatagatcgcctgttccgcatcgtcaggcctaccaagctgctctacttggcagttggtactgtatactagctagcacatgtttaatttcaaccgttctttttcctcccggcccattctcttcggcgtttgatcgacagagtatacaatgcaatgcaacacgcgcgccttgtttgaactgcagatggtgtagctccccgcgccaaaatgaaccagcagaggtc

SEQ ID NO: 145940 - DNA, 443 bp, Zea Mays
tgttgtttcgacagctctgtgcacttgtgaaactcaccgtggcgtctgattactcaatccggctctggttatgcgggaacgcgtgcccatggtcgcggtttccgccgtgcacatggacagaccattctcatggcgttcctgtcaaattgatgtgtgttccgaggccatcttagatcggtgaagcctcctgttagttattccgagcagtcatcgccggccatggccggtacggaccacgtttgggatgctctgcgagcgcgccgccgtcggggagttccttggagaagaaatagagttgtgaggatgtttttgcaaacggtcagcgacgtaaggtaatagtgattgacgcccgttctgattagccgaaaccctaagggtctctgcgcaaaatggcctgagcgcgcgggcgcgggcgctcccctgtttcctgtgtggttgggctg

SEQ ID NO: 145941 - DNA, 531 bp, Zea Mays
tatcaccttcatccttgtgactagcagttgaacactgcggaaattctaatcattgaggctgcattctcagactaaacatctctttttgcttttagtctgtcagtgacctgctacctttctcatcgtcttttcctttgagaccactttgtgaagtttacgacctctctttcgagaatctctttgctcaaaataagggaaaagcttaagatgaacggaaagaaatccctgtacagccagaagcccataatgttcgcagtattgatgtactatcaacattcagtattgctttatttttattatatctacagttaacacttgcatgcctattattttattgtagcatcaaatccggcaatgtcccaagcccatgtaattattgtcgtggactggcgtatggatgcataaagtatcaaaaagaaaagaattattgataagatcgggggcgtaggcgaagttcgggttgtagaagttacggtttaggggccctcaatagagcaaggggctccaatggtgcttgtttggtccctggct

SEQ ID NO: 145942 - DNA, 848 bp, Zea Mays
cacggagtaagttttccgtgacacagtgaatagtaataggtggacggcgggtttatttctttagaactcagggactctttagcaattgtgacacggcgaaggggtatcgtgatctcagggccgcccgatcttgaatcaagggaccagattagatcttccccccgaccgaaccggtacgcgccgtgagtcgcacgattagagatcaacggcccacgaatgcccacgatccaaactaccccgaaccacacgattgaagttcgacggctcggatttaaaatgacgaaggggtacgccccgatctaatcgtggccgttgaataagatccaacggtcacaagtgatcgtctatcctttgatccccccgacggcacaccgtgccttgccgcggcgagccatcaccggagcggccccgaatccgcccacccgagagctgattcgccaaattagtcggtgcaaaatggaattggggagatgacaaatacagaggtgggattcttaccgaggattaggtcaccgggaggcctgcccacggcgcacggcggaggtcgaagtgcgacgagcaattgctcgagtcccggcggcgttcgacacaaatcaatggcacagacggctttcccaggtagaagcgacactccacgacccgatttcgagagccgaggccccccgacgacggctgtcctcggcggcggcgcttctcggtgtttttcgttcgatgctatggacgagaggagatggctggtcttataggcagtcccgcgaagatctcggcggggttggagtcttggaggtcgggtcgcggactccgttgcccgagatccccggcggcgggtgcggaggagctgttgtctc

SEQ ID NO: 145943 - DNA, 275 bp, Zea Mays
atctgcctccaaagcttcggccacctcttcctccccttggagctagtgggcaaaagttgccctatgaggattgttgttgtgtgcctgattcctggggttggctttgctgaccctaagactgaccagtcttttcttcgttctggcttgggttgtgtatgcttcggatatgccttggatgaaaccttcctctgaagcccttgaccgtctctgcatatctatgtgcttcttgccttctttagagaaaatcattgtctgccctagtgtactcatccatc

SEQ ID NO: 145944 - DNA, 618 bp, Zea Mays
cttggcatcacagcaccacccgccctcgctatctcacaagggtcccatcgcaccgtcgtaacgcgataatggctattgcttgctgccaccgcctttcgtctcatcgtcgccatctaccgtcgcatcgtcgcctaccctcgctatcccatgcctattgtcacctcaccgtcgtcattttgcggtggagtcgctgactctccacaccgacgtgctaatgcgcccgcttcgccctaacgtctagtccccgctagtccacccctttgttctctccaactctcctttagggtggccaaaataaagtttcgatattcatgttattttagaacactactcatactatcacttaatctctaggttattatcatggaactatttttatcaaatggtctagtatattgatttgtctcctacgttatcgcctcacctaaaattttgtcctacgtccgccactggttgctggtggagtttgaggatatttttgctgtccctactggtttgcctccttccagagattatgatcatcatatttctttggtaccaggacatatacctgtgaactcaaggccctacaggtactcaccattgcacaaaacagagatagagaagcaggtctctgaa

SEQ ID NO: 145945 - DNA, 315 bp, Zea Mays
tttggcaagggaccattgccactgcccttgcctccacgaccagcgcagcaagtgacggtgactgaagacaacaaacgtgccgaggttcctcgtcagcgtgggatggatgacaagttggctgcattacgtgcttacaggcgagcaaagggattgtgtcagcgttgtgcggagaaatggtcgcgagatcatcagtgtccgccgactgtgcagcttcaagcattgcaggaagtctgggatttatattagtgtgaagatgatgacagtttcaccccaccggaaacggctcattctggggaggagcagttatttctcgca

SEQ ID NO: 145946 - DNA, 604 bp, Zea Mays
cctcagtctcgtcacgctccctgaagcgaggtggtggaatgggagcgggagggggaacagtggaagctggagtggtggaggtggtgggtatagcggaagtggtggatggctctggagcgataggagctggtgaagtgggaggtggagaagacattgtggcggaaggtgtggagggagcagtggagcgaggccgagatgcgaggcgacgaactctgtaggctatctgatcagaagagatctgcaactgtcctccccgctctgcctgctctgatgccgctgccgctgcaaatgctgcacgagctgctctgtccatacatcgcttcttcctgccctcctgctgctcaagataaattgtctttcccttgactcgcctgaaggggcgaggagggtcctcgtcgtctcctcccctgatgatgagacattctttgcctgcaccatcctgaccagactgctgcacgatagagtgaaaagctaagtaggagtagagagcagctagtaggatctcaaatggagtgaaggctacctggaaatctcacgggagagagagaatccaggcaggacaagagatgggcacgcaggcagacgagatcactgaaatgacaaa

SEQ ID NO: 145947 - DNA, 1393 bp, Zea Mays
gtgaccttgcattgcaacagatccctgctacgctgccttccatgaccaagagtggggagctccagtacatgacgacatgtatgctctaaacctgctcagatcagctaattttttttttattattttctgagacgtatgatcagcagtggattgaaaaagttacgatttttagtcctaaaccgcaggaaactgttcgaaatgctgactctgtctggtgcactggctgagatggcatggcctgcgattctcagcaagagggacaccttcaggtaaagcagccacagactcacagtatagtcgtagtcgatattttaactgctcaccaaaacatctcagatgtcctaaaacaaactcaaaagcgattacactgcacagggaagtgttcatgaactttgaccctcagttggtggcaaagctgaacgagaagaagttcttggcgccaagcagccccgctagctccctgctgtcgcaacacaggctgcgcataatcattgaaaacgcacgtgagttgctgaaggtaaggtgatcatgcacgcagcacgccattctatcctatccatctgccccgcacctaaattttgatgagccgaaacattattaccaataatttgcaagtgttaatattgatcgatttctgcaactactacatacgctgctgctgacaggtcatcgacgagttcggatcgttcgacagctactgctggagcttcctgagcaacaagccaacggtcggcagataccggcacacgcgggaggtgccgctgcggacggccaaggccgacgccatcagccaggacctgatgcggcgggggttcctcggcgtcgggccgacggtggtctacgccttcatgcaggccgtcggcatggccaatgaccacctcgttacctgctaccgcttcgaggagtgctgcgacctcgaatcttgcgcggcgcctgagggctacggcggtgacaattgcaagaagccgccggcggcggcgagcgaccaggagttgagcatgctctgtgggctggtgcagtgcgtcgccttggagccatcgagagccgccaccgccactgtgatcagcatctcgtagcagggaatttcagttacctgcatgctatgctggtgactaacgaacgagaacatgtttgtcattttagtgtctgcgagtggtttaatgcttacatgtacagtagctattatcaaccatggatatcattttagtattgccattgtgttgctatttaatacagcatgatttcacacccacaagcaaccaaatagcacaaatgttcgtactataattgtacagaactctctttcactctgaagcaaacaaagagcctccctgtcattcttttttcatagttacataaaacaagaaaaggcaagaaaatgctagtttaagat

SEQ ID NO: 145948 - DNA, 985 bp, Zea Mays
taatttttcaaatattatacaacacgtatagtctagttttgttcgtaaaattttgaggatcatgaatataaaattgatttgatgattaaatcttttaattaaaaaatctaataaaaaaacaatcttaaaagctttctcgttttgcgtgcaaatacatgaagttgcatggcctgtgcctgcttgcgcggagatgcccaccggctgcgtatgccggaagcctggctgcacccctagttttgtatctattcagcatgtacgtgatgggaagccaaccaaacgtcacttgctttgagactccgcggctgcaggtgcacgctcctgtcctctaaccaaacagatggtctatgtctaaagtccgatcctgccacagtgcttgtgcagaatgcgcattgccacactctttgtaataaaaaatcgagtttctcgcacttcattaagtaattatacatagttaactgtaaattagacaattctagtacgctcagctaaggcgtgtcctgtatggtacaatatcactataccattcaattcaaatttgtgcgcatatgtatggatcttagtttaattcattatgacacttcctctgttggccgttctggattgatgccttccttctgtaaaacaattcccctgtagactctaaacaattgatcttttggacatgaatcccttccattcactgttggtagtatccgtatctgatgctttttactttacaatataaaacaattccataatttaccagccatttgcaaatgatttaaattttaatgagatggcgtgatgaactgtacaacagagacgtgggcacacatgtgccatatacaaccaactagaactaactctttcagtgcccgatctgaaattcgattctaatttgcaccttcagttctccaaaacactttttttggaagttgtcaaacaacgaaaacacttatggtcctatgttccaaaactagctgctattgctttgcctgtaagaaat

SEQ ID NO: 145949 - DNA, 333 bp, Zea Mays
tgaaaaacgcagtgtatcaatccattgagaagaaaaacagagataatacaaaacatccacctcacgggggccaagtacaggcatactaatactcatccatgaataaaacacccaaagctacaaactctaacacaaagcctacaaactcgggatgtgactagttagcaatgatagctttcttgccccagccaactcccacttctcttgctattgatcaaccatcctaatagtagcaagatccacattaggtctgtttctgtcgaagacatagctattccgatgtttccacagagtccatgctcctaaaattaccagggagtttactgcttcccc

SEQ ID NO: 145950 - DNA, 388 bp, Zea Mays
aattagtcaaccgcgactaggacgtgtgtgtatcccacgggtgcctttataaggggtccgactagatcaagcccatagaccacgaaagtccaggtgactgagatcatttgaagcacttgcgctggcaagtggctttgtcgtgcatagtcttgtccttcacaagtacaaccatctggtgtgtgttagacaccacggtgggccaatagaaaccctgtcgaaaggcgtttcctatgaggcttcgtggagcgacatggtgcccacaagtcccaatgtgaatatcctctaggagtcgtatcccctgcttgttggggatgcaccatttctttattcctatatgccccttgttgtacaggtcctttccaattagaacaaaagactttgctcaccg

SEQ ID NO: 145951 - DNA, 713 bp, Zea Mays
cgagattgtcaaatgaatatgattatgtttagacaagtactttaatctataactgcttaacataatcgcctttcgaccgtagcctcgaccgttgttttctctttctcgcttagtcgtaggtgtgagccctgcgccaagcgtctgcttatttgttatattctactgcgtggtgtctgttcattttctattatatttgtggaatatatgtttgaactcgtattgataatggtcagttggcgaagtccgaaggagttgcaggtgaagaccagagcagtcaagcagccccagtgcaaggaggaggcagagcatgttttcattgtggagagcaaggtcattaggtgatgcattgtccaaagaaggtagctcaacagcagctaggctctagtgtcccaacaaatcagaatgtgtctcagccaggagcagacaattgcgcccaaacacgttacaactatggaagattgaaccatttggaggctgaagcagtccaagaaacaccaggtatgatagtatgtatgtatccagtcaaattccatattgcaaaagtgttatttgatactggagcaacacattcattcattactgcatcatggttagaagcgcataatcttccaataaccaccatgtcaacaccccttcaaatcgattcaaccgatggtaaagttcgagccgatagtgtttgcttgaatgtaagtgtggaaataagggggatagag

SEQ ID NO: 145952 - DNA, 425 bp, Zea Mays
gtctaatctagttatacagatctaacctagatcccatctactctaatatgatccaatctaaagtgagttatctaacatgttagttaatcttggtgaaatagattagactctacttctatagtcatgttttaacctaaaattggtgccctgtactaacttggtcgtatacaaccaacctgacctacatgttgggttgcataacctacctaacccgacctagaagcaaaacaacaagacaaattctgcttaaacttagttaactcatagacacctactaaactagcggctctacctatttgtcacctacaaatctgccttaactacatgtccctaattcagataacaacttcaagaacaaagatcaaagatgttcgccatcatcaaatcaaggaaggataagattcaaggcggatcctcaaaggaat

SEQ ID NO: 145953 - DNA, 354 bp, Zea Mays
ctcgctggaccatgggttgtttctctaaaaacataggggccaatgtgtaaactatacccacgaagggatatcctcagatcctagccgtccgatccacaacagacgcactagattagatttaggcgagttactcatccgcgctcacccccgaccgtcagatctaagatcaacggatgaaggacgctcctgccccgatctgacctaaaccgttcattactgaatcgacaccatagatctattctcgcgaatcggtacaaagtcgtctaatctccaccgcaggggccaatccaacggccaggaggcctccttctccccacgaacccgagccgggcggcactacacccaatccgcggc

SEQ ID NO: 145954 - DNA, 554 bp, Zea Mays
tggccaaggcaagagcaggctcggacaagtgactacacacgcaacaccaccacgtgttcgaccatggtcggtaggccagagctcgcccaacccacgcgcgcactcattttcgcgcacagtcagtccacccgcgcaccctcactgcacccgcgcctttataagccgcccggacccttgaacatccttccccgtagcccccttactctcgcttgcgctcggccaccggagaatcgcctaaaaacatagagctccgccgcccgccagagccgcccgaactcgaccactgtagatcggctgctcctgcccatccccgcccaagccagctactcggccagtttccccagagtccggtgaaacttcccgagccctcaaacggagagctaccccaccggagacaaccgatcgtcctcgccggacttccttcgcctaccagagtacgtggcccaggtaagctggcgcaccattctttgattctttgcgtgcacaacctctacatcacctagtgaagctctcgaagtagtccaatcaaagtctaccgccgtgtacaggacaag

SEQ ID NO: 145955 - DNA, 560 bp, Zea Mays
gttggagttcccttggtgtgacttcttgctagatgagtagcaaccaaccttgatagatcaatgcgtgccatctataatgtcttgcaagctggattgaccttagtttaggaccataaggatgtttgagcttgccgtagaaatcttgaatgctcgattgcagatccaccaccttagagtggacttgaggctcctagttcaatagatcttaaagcactgatgtgtttgccaccatggtcttcattggtgaattatgttgttggtccatttgattatgcatcccgttgagttacttgatgagggaactgatatgatcctccatcatgattagattcttttgctctcttctaggtactaagtacgaaggaggtaactctttggcatgatcaactcactagatccgctcaactattgccgttgttaagtatctcactgcttcaataccaaattgttacaatcctcaactcaaatttcacgctatcaccttctctttagtttgatagcaagaatttaaaggctaatatgtgttcctaggttctaattacaagagcggagctctcgtc

SEQ ID NO: 145956 - DNA, 667 bp, Zea Mays
tcactcctctaagaagttcactttctaaccaatcagatggtgaacgctcgttcagaatccaacaacaataggaaccagcgtggtcaacagatatcaccaccaccaccgaaccctaacatggagcagtttatcgccgctcagatgcagcttcttcagggactcactgcatctgttcaacagattcagcagaaccaacagcaccagcagcaacagcagaatgcgcccccgactagagataaactcaacccaacccatcttttccagggtgatattgtatttccagggtgatattgtatttccaaatcataatctttgatcaactcaacccatcttctctgtcttagattgagttctttctgagtgaatatgtatttcaagcttttgtagtccgtgaagattttgcacttgtttccaatcatatagtgtctccaaatattcaaagcatgcactatggcagctagttccaaatcatgtgtaggataatccttctcatgctttctcaactgccttgaggcataagctattactttttcttcttgtattagcacacacgtccaaggtgtgatgcatcgcaatacacatcaaatcccttgtgaatgtttggcattaccaatattggtgcagtggttaaccttttcttgagttcttcaaaacatttctggcatgc

SEQ ID NO: 145957 - DNA, 604 bp, Zea Mays
catttcggtaatgtaatatgatggtgtatgttggcatgttatattttttccaaatgtttctttgcctcagatgccatcacggactcgcgcacatgatggtgcggggacttcccgcggtggggaggatactcccaacccgccaccagtaccaccgactttggccgaggctatcgctgccctgatcaatgccactgctgataatacgcgcttcttgcacgaaatggcgggcaaccaattccaacagcacggaggaagagcgcctcctcaaggaccacgtgatactacttatttggaattctctgagatcgacccccgctctaaatcaaagcagaagaacctttagaagatgacgaatgggtgagagttatggaacaaaagtttgggttaatttgatgcacagagacgcaaaagccaatgtttgccgcacaacagctaagagggcctgccagcacctggtgggtaaatttttcagcaatccaacctgatgggcatcagattacctgggaggaattcaagctagcgttccgggagcattatgttccatagggagtgctccatatgcaacaagaagagtttatccggttaaagcaaggatgagatattg

SEQ ID NO: 145958 - DNA, 1609 bp, Zea Mays
atgtttcttagagcgatcaacactgagggaatatccaagaccaaggagtatattgcagagaagatgttagcagtaattgatgaggttggggcacaaaatgttgtgcaagtgatcactgacaatgctgccaattgcagagccgctgccgtcataattgagcagaagcaccctcatattttttggaccccttgtgttgtgcatactttgaaatcttgctttgaagaacatatgtgctgctagggaaattgaagatgtgctttatacttaattccagtggattagcgaagtcattggagatgccagcatgattaaaaattccatcatgaatcactccatgaggttggctatgttcaatgagcaaagcaacctgaaattccttgcaattgctgacacaagatttgcctctgctattgtgatgttgaagagatttattgctataaaagatgctctttcagtgatggtagtaagtgaaaagtggagtgcatatagggaagcggcccccgcggcgggagcaggcgcgatgggcgcagtcgcgccatggggaatgtagaacgccgccgaggcagggagagagggccgcacgggtgcacccgtgccgtctgcgagcaccagggcgctgtgcagtcacgcagaggagagggagggaggggtagaggaagggagaaagggcaggggagggaaggccggcaacgttgatgagcggcgccggcgacgttgatgagcggcgctggcgacgtttatgagtggctgcctatgacagctgctagtggcggttacagggagaggggaggaagaactaggctctggtaccatgttggagagtgaaaccccaaccctaatttagggttgggtgtatattgtatagacgagttaggtgggccaagcccattacaagagaaccctaacctaaccctagacaagattctaacatatatatgcactatggttgtgcaccatttcaaaaattttgagaatttctaggtatgtgtttcaagggatttttcatgattgcattgcaccagacagggcggttggcactttgcaccaaatatttggcctatttttcattccttcaatctaaacaggtcacacagctaatgaatggattgctaaaacagttaaacaagcttaggatacaatgaatcttacagtatcattgtcctgttagctcctaatacaggcaacacggatacatgtatgatcttacctggaatagtttcctaagtatattaaatctgcttaactaccctagagcttagaaggtcttaatggttattcagctgagtcttacttaaggcccaatctgaaaaaagggaactgacacaggaattgtgaagagaatacactgcctgcaacattcgtctgttcccaacagacctaaaaagaagcttggaggttcggatatcacatctatgttgttcaatatctctatgaaaatattggctgttgaatcagttattttttctgggagttgatttaatagttctactcattcccacaagcttgttgggtattgaattgagttactaatttgtttgtctttccttgaattcctacctgattaaagaaaatcactagtggtgccactccctctaaaaggatgtacttt

SEQ ID NO: 145959 - DNA, 402 bp, Zea Mays
atgaggcacatgcaagatatgttcaggacaaaatggcgacggtggagctgatgtaggaggaggaggacgacacatctagattgagtgagcttatcgctctcgcagaggcaggattacatggggaagaggaggacgacacatcaaggttgagtgagctcatcacactagctgaggcaggattatgtgctcaagaggaggatgacgagtttatgtctcaggccaccgaagaggtagagacggcttattacaagcagaagtctgatgaggctgaggctgaggatgagctattctcccaagctgcagatgaagcagaaaccaattattacaagagaactgatgacaagtgtgatgcaggacaatgcagcaagtggaacgaggttgtcgttgaggattacgcgacgg

SEQ ID NO: 145960 - DNA, 562 bp, Zea Mays
ggcgccgccactaccctccatcaccaccattgcagcctgcccctatcctggcctcctccgtccccaatctgtcccacagtccgcgcacgcgaatctgaggccatttcccacatttttatgttaggaggataagaggtgtttggttgctgacgatggcggcatcgatggcgcaaccggccactagctcgaccatgattttgagcttgatcatgtcgtcggctaatgccaggtacaaccgtatctccctcggtgccgacactctaaccaccggcatatgcaccccacgcggcaagagaggcttctagccatcgcgtccagcatggcgtccaagtcggcacattagtagttggtactaaatgtgtccacatggctgaaaaaggggttggcgtcgaagacgtcagcgctggtgctccctaaggttcagcatgatttccgatgcaaaccaaccgagagagaaaactactagattagatcgataggaaagaactccccgtccacctccgtgttagtctccaacaacttctatatttgtgcatccaatatctctataatgagccactcc

SEQ ID NO: 145961 - DNA, 328 bp, Zea Mays
attagctaggcgcttcgcggtcatggtccgacgagggtccaccggtcctttcccgataggtgagagatagtatcgagtactgaaaagatgggttgagtcatcttacccggtgttggcttggcatcattggacatcggtgtcacttgctacgttatgcggccatctccccggtccactggtcgatcttgtgggttgtgcgaccccaaggcgcacgttatgtctgtcctaattctgcaaatcaaaaatgatgatacatcagttactatctctcactgcttaccagtatggaccattggtcgggcggctgtagcttggtgtgttagtcggt

SEQ ID NO: 145962 - DNA, 709 bp, Zea Mays
cctgtttctatcgattgtaagagtgaatgtcagatgatcctgtctgcaggcatatgctccaaagacaactacacaaaactggttttttctcctacacatggcaactctgcgggacatttgattatctcttgaaggggaagtctaaaatcgaaattgaatgtactggaccattttgtatgctaactttgacaaatttgtttgctgttaaggaggctcttcagacagagaaggcaccgacgctccacttggtcctaattctcaggccatcaaagcaaacactgtccagttaactgatcatagcacttttttttctttagttgatctgctgcacttcactgatcacacttgctcttatatttttttgcttgagtaatgatgcttacttgcttagtactctttcagttccaaattatatttcacgtgcatgtcgctagccggaatagcagaaataataaagaaaagaggttttgaatgctgttggtgaatctgctgcctaggtttgagtggaactctttaattgttttcgtgcattttccatcttctgttttgattatgcaccatcataaaagaacagaaccttgtgatctaactagatagaagaaatcatgtaatcttagtcacttcactagatagaagaaatcttgtaatcttagtcacttcaggaatgtatgttgttattctccattactcctcctagggtcccgcctct

SEQ ID NO: 145963 - DNA, 355 bp, Zea Mays
cggctgttcagagagttggtggacatgtgcatcatgttgcaagctggtaagattgtacaaatagttactgctgaaaattcgatcaggccaggttatttaaatccatagtctctacctagtggtggtggcagaatccttgatcctatcacggttgcaaagtgactagtaatgtggcattgggggtctgggttagaatttctggcttcgggaaggcaccgtggtggtgtgggtgcagagtggcggcatgtcagtgagcgagggagggagagaatgtgtaagggccattgaggccaggcaagatgtttgccttgcttgctttaaaacggttacataacccttacagatttggactctt

SEQ ID NO: 145964 - DNA, 911 bp, Zea Mays
ggggttctggcgtaagtttaccgagacacaatgaatagtactctgaggactgcgggttgtttccaaagtttggtggggtctcttctgcaaaccggtaaagtgaaggggtacgggcgaaactgagccgcccgatcagaaacggagggcttagattagatctaggttccgcgtgaaccgatacgcaacgcaggccctcggatccaagatccatggccagggaatacacaccctctcacccatccgatcccgatcggatggccctcgcgaatttggccgaatcgttatctcgcttctaatcaggaccgttcgccgtgcatccaacggcgcccggacaccccctttctcctcctaccccgcgacggcggcgcataccacccgctcggtggagcatcgccggaggaacacaatccccggcaatatcgcaccaaattcccgaacccgaggttctaagcgtaactaaattgatgatgaatcgaagggagcaattcttacaggcgcggacaactcacactgatcgataggcgttgtggtgcggacgaacggctgtgctcccgctccggtgagagattcccggactttcggtgcgcagcgcaccacgattccgagggatataccctcccggacgtccctcctcttgcctggatggcctcatggggtcacgccgacgacgcacaccggaattgactgcggcggcggtggaacaatggtgcatcgatgcttgattatggctacgcgggttctaggtcacggagaccaaggcgaccgagcggggcactatatgggcgcgacgtggccgaggtgtttcaatggccgaagccagaatccgcggagtagggcgcggtcaacagccatggcggaagaatcggtcggttcggccatgaccagctgaggcaacgatgacaggccggtcc

SEQ ID NO: 145965 - DNA, 381 bp, Zea Mays
cgagggagtagtaaaggtaacttaaaatatgatatacaacatctgttggagatagtctagggagacagtttcaaataagaaaccgcttgaacttctaatgacaaataaaagaattttctccatcagtaccgggatgcaagaaaatgcaaataatacaaaccgcagactgtgaagtcgaagagaaaaacaaatgatccacatgttatgagtgaacctgcaaaagcacaatttcgacggtgcaacttgtacatgttttgtttaaaaaatacaataagatacgtaaggttgaagctgtagttgcgctgctatactgcacaaagcatgttgcaacaaattcaccttttgcatagtactcacttcgtccaaaatattgcatctctc

SEQ ID NO: 145966 - DNA, 510 bp, Zea Mays
ctggcatacagtttaaactaactctgacgtatgtagataacgacagtggttggtcactctaatctggtgactgcactactgcatgtaagcaacaatttcaaggttttttttgtgtgtttggtgagcgtgagagagggtgtcggcctggcgggggagctagtgggcagcaggcagcagcggcaggtggcggccggttgggtggggatccggagcggggagtagaatccagaagcactagcgtcggggtcggacgttcaccttctatggtagttgagttgaggccctcttttggtgggttccagatgttggtgtctgatctgaactgatgtggtgcctgccatcgtttctgaccgacccccacggcactcgcgtcgatgaacgcttttctccttcccaggctcccagcccagcccggtctggtctggtcttctgctgtggcctgctctgtccgagctgattgtcagcaaccggctgggtcgtgggtactgagtactgacccccgaatgtttg

SEQ ID NO: 145967 - DNA, 337 bp, Zea Mays
tggggagggacgctagccgagccttaactacattcaggggaactataggataccttgcgcctgaatggatcactggagtggctatcacaccaaaagttgatgtttatgcctatggaatggttctattggaaatcatttctggacagaggaatgcatctgtttcatgttcttccagtattagcgatcatgacatctattaccctgtgcatgtcgcacgtgtgattgttgagggagatgtaatgagcttgttggaccacagattgaacggcgacgccgattccaagcaggtcgaaatagcttgcaaggttgcatgttggtgtattcaggatgatgagtc

SEQ ID NO: 145968 - DNA, 380 bp, Zea Mays
cggatgggcaaggggatgaacgtgttccgaccaaacgacgacgtggataaccaaattgaggctggggaaaggttcacggattcgccagaggttaggtacacacttggatttgggtgaaataggaatcaaagagtgggtcgacagaggggtagtcatggcggcgttttacagagcaagggtgcattccggtgatgggcttcggccgaccttcaattcgccgctttcgagagcaataagagatcaaagactaactaaaacagggagcaatttgataaatactaacccgaggagcgctggccacgggtgttgcttcacggcggagcaagaacagaggagagagggatttgtggtttcttcggtgaaattgagccgagtgctcg

SEQ ID NO: 145969 - DNA, 343 bp, Zea Mays
ccaagagtagcatcattatttgttgcaactgtcatgggtatgattgcggactattattatcgaaaaagacctagacatcttatggattcctctgagatgatagagagaaatgtagctggtcggaaacaaatgctaaggaatctatatcaaggatcaaatgtttattgttatgacagtttgcgtctaactaagaaatccttttcggacctatgcaccatcttacgtgagaggtgcggtatgtgtgacaccttgaatgtgtcggtagaagaaaaggttgctatctttttgcttgtagtgggtcatggcactaagatgaggatgattcgtagctcatacgggtggt

SEQ ID NO: 145970 - DNA, 994 bp, Zea Mays
cagaagggaaggaaaaagggcgaggttgtagccgcgcgccagcgaaaaactttgggctagaccaaagtttgttagaccgtgtccaacattttatccatatggtcacccaaaacactgttttacactttagattgcattactcatatagttgagtttggatatagggatatgaatgggtaagctgctggagatagtcttagaatccaaataacatggtattggtgaaactgtgacttaaaatacagagtttttctagatgtactgagacacattttcatctaaaataccacgatacgctcaaatattacaatattgttttaagattagaaaaatattgtattgctaaacaagccctcatgttaggtttatatcatcttctagtaccgctgcatgtggttgacgacagaactcaccccactcatatgaggggtcacatgtgaaccaggagagcaggaacaaatatttctctctctctctccatacattatgataactttatttattcaagaattttaaggtgagagatgtgacagattgattttatataacttcattcgagagttttaagatgcatgattgcgacatcttttattcttgaatttcatctatatctatccccgtcctcggacaatgaaattaattaaaaggaagaagattcaaatttacgtgaaagcgatggccggcggatatgaatccaagacagccatctgatatgaattcaagacagatgtacggtcaatatgtataaaatttataacacggaattaattgttactgatcgaaatggccagctaaagtttgttttaattagttgatcgaaatggccatttgattgtactatatattagataggtcgatgctttctgtatatatatccaacgacgagttgttggtaacgtgcacgccactatgatacgatgacgatcggccagatcatcatgtcattgtcgttgaaaacacaaagtctaatcaggttgatggaacacagatcatg

SEQ ID NO: 145971 - DNA, 639 bp, Zea Mays
gggtttggaggaggccttggtagtgggtttggtgttggatcaggcatcggtggtggcggtggatcagggggaggccttggaataggacatggaggaggctttggtggtggaggcggaggtggaggcggagggggagggggactcgacggtggccatggtggtggtttcggtagcggaggtggagttggaagtggtgtttacggcagtggaggagggtttggaggcggcggcggaggaggccttggtagtgggcatggtggaggctttggctctggactgggtgtaggaagtggtagtacacatgaaggtcttgatggtgttggaggcatcgggggtggcggaggacttggtgccgggtatggtggaggttttagcgcaggagcgggtataggaggtggcattggaaaaggtcttggaggtggaggtgggtatggcggcggcttcagagctagtgctagtttcgaaggcagtgttggtggaggcggcggtcattgatagggcagacaaacaagcatggtgttttgtcttgttgtgtttcatgacgtacgtggatcgattgcatgcttgcatgtaatctccagggttcatctctaatttgtctattagtccgtgtttgatatgagatttgttcgtttagag

SEQ ID NO: 145972 - DNA, 698 bp, Zea Mays
atattgcaaggtagtacagcgtcgctgtccccatagaataactcagcatctgaaacagatgcatctacaaggtcggtccttttatgtaggaaatttgatgcagtatcaaaagcaatcacctgaaacataacatatttgcaaacagaaacaaaggttatgaggaatagaaggtgaacggatacaaccccaaacatagaatcagcaagacttttgggaaagcaagtattcttgcttctgttagagaaaaaatcagacaagtcgaagttggagataaaatgcagagtgtaattcagttaatgtgactagacctcaacattagagaaaaaatgttggagcttctccatcatcaacttgtacatagcatcccttttgcatgttaatgcctctatagcactttttgaaaatgtaaatgaattcattgaagactcaattggtgtatcaaaccacgggagaaccccctccatatgaatgatattacgagagggataaacatctccttcagtagcagccagattgcaatactttagaaggttcatgagcacttgaagctgctgcccagtacgcaaaagaggatgacatatctcctttagaaaacatggagcagatacatggtttcttccctgctgacagcagatatgataaaatagccttagacataattcaaaacaagtataataaattaaataacagtaattatg

SEQ ID NO: 145973 - DNA, 540 bp, Zea Mays
caagaacatagcgggaaggagagtgtggtggcttatttaagtcgtcgcttgctggacagcgaaagcaggtatgcgtttatcgaaaaactttgtttatccttatatttcgcatgcaccaagtttagacactatttactcttaagtacttgtatcgtagtgtgtcaaatagacgtgattaaatatatgttacaaaagtcgattcttagtggtcgggtcagaaagtgggcatatgctttgatagagtacgatctaatttatgagtctttatcttctatgaaagggcaagttatagctgattttataactgatcatagggttgatgtagagcaggaaatctcatgtcctaatacttgcccttggcaattattttttgatggttctgtgtgcaagaatggcagggaatcggctatgttttggtgtcaccaaatggtctagtacatgaaacatcaattaggattgaatactgctgcactaacaatcagattgagtatgaggctttgctgtttgggttaatgcatttagatggtatgggaataaaag

SEQ ID NO: 145974 - DNA, 1057 bp, Zea Mays
aaagagaaaaggaattaaggagaaaaggaaaagagaaaataaaaaaggaaaaccctttcccccctcctcagctgggccgattccagcccacaccttctcgcgcccgcgtctccccccctccgctctcggcccaaccgtcgcgtccgctcccgctcgtgtcgcgcctcccccccgctgaccggccggccccacccattagccacactgccccgctcgctcgcgactgctctccctcaggcagatggaccccacccgtcagcccttttgtccccgtccgtgacttcaccggcgcgatccccgccaaccgcccccctctctctcaccaccattactcctgcgctagtgaagttaggcactgctccacccccaattcactgtgctcgcatcccttcacggcagtctgcccgaacagtctcgtccctggcgctgtgcgccctcatcgccgccgatgtgcccctcgccggcgccagctggtctttggccgcttccctccctgggcgcctataaaagggccacccgagctccacctttcctcacaccggcctcggccacctctctcccccttccccgagctcaatcgagccagcgccgccgctctctccctccacttcggtgagctctccctcccttctccagtggcctagagtcgaattgacttggttcacaagtttcaccatttcaccacgaacacggcgcaccctcctccctcacctatcacgcccataggcctagccggcgacctcaccaccgcgggcacccgccacttcaccgtggaccgactgtcctaagcccccaccagccaaattgaccccaccaccatgaccccttacctccatccatgctaggccaccatcccaactacccagaaccggaccaccggcgaagaatcaccgtcgaaatcacctgcgaccggttctcaccgccgcaggcggaccgtcgtcaccatcaccctgacgtcgttcccctcccctcactggcatgtgggcccacgcccatggtgtcacccctcgcgtcgtgccccgtagcgggcctagctaggccaaccgccctcgcaggc

SEQ ID NO: 145975 - DNA, 605 bp, Zea Mays
tccagtttaattaccatgcatcctggaaaataaactaatctccttgaaccgaccagaagccaataatcaaaagtagagatatatcctcatactattgttactacttctctttggtgatttgaccaaacgcacggcgtaactcctctaacaatgggctgttccctgaaagtagcagtaacacctcctctaatatttggctattctctgagagtagcagaactgtacagattatttaacttgatgcagagatattaaagactcctctagtactgctgcatcataggagtttctgtttgcaaaccatttttaaaaataaaacagtagtaatctaggaataattcatgatgcactaggtcaccagcaaaaagaaagaaaaaaaaggattcttcactctacccatgtttggatcttgaatcgagagtcaagacacatacaacaaaacttgaaaaaaaaataacacagaacacacacatatcaaagccaagtttcgatcctgggacgcttccgctgcgccactttgatgtttatttttactaagattagcaagtgttatataactaaactgacaagataaaacctcagctagattacctccacttcggaag

SEQ ID NO: 145976 - DNA, 308 bp, Zea Mays
tgagattggctaggtcggcgttggtgggattagccatgggtgtcgctgatgatgaacttggagatggagtgctagaagtggagtggtggtcagaggtggaagaggatcgccgagatctagataccaagttgtcaagggcctcggcccctaagctgggaggtccctgactacatagttcgtagatgggtagaggtggtgccagggcttgttacctggtcaccgaagcaagggggatgagattgaaggcttgaacaggtgagaggtttagataatacttctttcttgatttctccttgcatactgcttac

SEQ ID NO: 145977 - DNA, 683 bp, Zea Mays
tgcaaaagtcgcccaagggtgcagccggactagcacaacaagtgcgtaaattcgaagtcttctcaaaaagactatccgtgcaaaagtcgcctaagggtgcagccggactagcacaacaagtgcgtaaatacgaagtcttctccaaaagacaattcgcgcaaaagtctcctaagggtgcagccggactagcacagcaagtgcgcaaattccaagtcttctccaaaagactacccgtgcaaaagtcgcctaagggtgcagccggactagcataacgagtgtaaaaatcgaaggcgcattacatcagtccgaaagcctacaggcgcagccggaccgacacaataatgtaccagaccgggtgcgcaacaccttacgaacacacccagacgcgcgaaggcagtcaaccttatcatacaaactacagttacatgcgtacagcgagggcgccacaccttacataggctcaatcttcggaatgatccccatctccatatagttaaatagcattatcctcagctcctcaccctcaaaaagccttcgcaactccccttcacccacactcgccccaaccggcgaggacaacaattcttgcctaccagccctgcccacacgaagccgaccaccatcaaacccgctcactctacgcttcgccaccgcccttcgccgcctgcgcccaacactcggac

SEQ ID NO: 145978 - DNA, 414 bp, Zea Mays
ctaaaacataattttctgggctcgactgaatttgttttggcttaggatggatggcgagttggttttttataaacagagggtcttattcgcaaggtggcgcgaccgaaggggtatgcaagcgcgccagccgttggatctcaacctgacggttgcgattagatcggtccatataatgaaccggtatgcgattgcggccacaggattctaaatctacggtcagcatttaatgggacgcgattcaataaggaccatccgatccgcccaacggctcggatcaaatcaccgaaagggtacactctgctcttaatcggagccattacttccccgatcaacggctcaaaatccaccgtggaaccatctactcttagccctccgataatgatcctatggcacagaagccatcttctacttcca

SEQ ID NO: 145979 - DNA, 557 bp, Zea Mays
atcttggtggtagggatacaagcctaattattctttagccaaactatttatggcttcgccaaacttatagagaaacatcaatgtatttgacatcaaatgtattatatatgtaacaataaatctaatgagacataattggtagtacaaatattacctaattttacataagttacacaaactcaatatggttagagttgttattatgctcggattgcattctttttatgtccaaatcaatctggttttatgtttatctaccatccatgcacatgtgcgacaaccttgcatagttcctcctatgtttgtgtatggtgcaatcatgaagaatcttattgtgacatcgaccatgcccaccaccaggacctagaggttgtttcgttactagttataaatctttatctctatgccctacacttgtacaacaatcttaatttggtatacttgagtaagtggaagtcgatcacctacaaattctgtaggtggaccatctccaaatctccatccgaccctgaattattgggttgtccatacaaactagccaatttggggtatgtgat

SEQ ID NO: 145980 - DNA, 711 bp, Zea Mays
gaaatgcttcacatttttatttcttgagttttggtacaaggcaggggtggggttgggctcacttctttattacaacaatgttgtacactttacaaattacaagaggctaaaaaaacctgggaaattcctgtctaagaagtctcgagtttcccaagtagcctcatcttcagcatgttggttccactatattttgtaaaacttgagagtttttcttcgggtaaccttgtccttttgatccaagactcgtatagggtgctcagaatacgtcaagtctggctttaggacaacatctgtcacttcaatggttcgatttggaacccgaagacatttcttcaactgggatacgtggaacacattgtgtacagcagaaaaggtttcgggtagttgaagtcgatatgccactggtccacattgctcaagtatagggaaaggaccaatgtatcggggtgcaagcttccctttaaccccaaaacgtgatatgccctttattggtgaaattttcaggtagacataatctccaatcagaaagtgtaagggcatccgtcgtttgtctgcgtaacttttctaacgagcttgagctttcttcagattatgaattattcgctgaactttttcttcagtttcctttaccatatctggcctgaagaaacttctttcccctggttcagaccaatttagcggagtacgacatcgtcgtccatataaagcctc

SEQ ID NO: 145981 - DNA, 477 bp, Zea Mays
tctaattcggaagaacagccggcgttacatagctagtggggaaagtagtggtgttcctctcttgccttgtctgccctcattggtttgcaagaattatctctggcgaactttgatcaaactcttgaagacatggttccataagatctattgtcagagccggcagatggtggcgcgacggatgtttgtgctgatgtgctcgatgccgggttggggtcatccttggcagcgtcccgtgcctcattgaccttggagcgcggtcttgagggtcaggaagctggtctggattgccttgctcccatggaagtgattgagggaccttcagccttagaggtggttggtgcagagaactcggccctcaaggatggtgctagcgcttacccagcccccgagggtgttgccggagatgatccagctcggatgggtagcgcaagctgtgacccagcccccgagggtgtccgagtgggttctccctcccac

SEQ ID NO: 145982 - DNA, 468 bp, Zea Mays
cagacttgggctgcggcgagatgttgaggacgcagatcgaggccgagttgcttgtcaccgcagtggagctccggcgtcgatggcacgaacggaaatggagaagcagcagcaggcacgcagtgggatggtgagtgcgggcactggatcggctgtatgcagagcacgagagcaagcaacgggaggaaggaaggggctctaaggcagcttttataggccgagtgagggagagaaattagtgccagattgtttgtgatttgaatgccgttgaagcgtcttgatttcgtgggagaacagtagctttcattgccattcacggtggctgtggaaacgacgactcagtaggcgcgattgtggctaacgcggcggaggctgggcatgggcaggtgcaggcacgaactggccaagcggtaacgcgcgtacgagcgatttagtttccactggtaacggcaagcatcaattccattaatg

SEQ ID NO: 145983 - DNA, 378 bp, Zea Mays
aagataggttagggcaagaatagcgtggggtgagaaagtttacggtgagaaagaactccttgttgggtggtaatgtctttgaagatcgattttgacttctctccttccttgacgaggttgatctcctccttcttgctctttggtgtctccatccgggtttgggacaagaggctaagatagatctgttatgtaggtcaagttgttgggtatggccgagttgatctaggtcaccagtttaagcttaggtggatttggagtatggcttaatcctttgtaccagcattaagtaacttactctagattatatcataatagattagatagaatctagattaggttggtacgactagattgaactagttaagatctcattatttt

SEQ ID NO: 145984 - DNA, 362 bp, Zea Mays
atttgatcggcgacagattggacgtctggtagatggctcttggctggtcttcatttcgctttgtgcttcaatgcttctgttgattagacttgtacttcagtagctatatttggctttcctctgatctccatcgatagctttcttcattgcgtatactgtatggatgtgactgcttgggaaaatctattgaaaattcttggatgtcccctccccaatgggtgtaaccgagggacggcttggtacgccgagcatttagcaaactgtccttgagtagtaacttgacgtgaccgcggggtgtaatcatatcgtccaagcagttgacctcagtccaaatggtgtcgtgttacgtgaaacggcgtctg

SEQ ID NO: 145985 - DNA, 384 bp, Zea Mays
gaagcgtcgcttaggcgacgcttaggcggtaaggtgtgcagcagtggcaaggcgtccctctcgccttagaccgtagactaagacatcatggcgccttgagcccttgaagcttgctaagacatcgatttgaagacgccttgaaggtctgcagggatgggtaaagggcctgctgcaacctgacccgagcacaaagcgagtgggatctgtagcgttgtcgttggtctgcggcggatctacagctgtgggggtgttggtctcttggcgccggcggcgcccctcccctccgtgagctctccaggcagaatagaggaaggagggaagaggaggggggcacgcccatagcagatttggtggcggcgactgggtgctggcagtggcagtgag

SEQ ID NO: 145986 - DNA, 602 bp, Zea Mays
ccagaggcctctttcttttcccagccagccgccagcctctctgttcttggcgatttctttccccgccggcgaccacttctctccggcggcctccatctccggcggcctccatctccggcgtcctgcgcacccctcctgcttcccctcggtaagcagccctctgtcttccccctctgactcttttctcagtcagttaggcaagaacaccccttttgcaaatctcttccaaatctgtgaattcctgtgaatccaattgatggaatgagttcatgtacctccattgtgtatccctgcaaacttttagctccttcgggagggcatttccacctccaatggccatttccctaaaaccctagctccccgcacaccacgtgttcgatgaaatgcccaaaccagccaaacttgctccaattgaacccaaatttttcaggcaccttcaccacacttccagtaacctacttgccaaatttcacaccaatccgagatcccaggctcaaatttcaccaaaattcccgttttgcacgatcatttccaagccgagtgccctaatttctttttcttcgcctaaattcaaaccaagcacacacttcactcatattgac

SEQ ID NO: 145987 - DNA, 349 bp, Zea Mays
tggaagtgtcgctcgctttgggaaggttggtgagtgcagtggtttgacaccttcaaagaaaccttcacccactcccaagcttatcaaaaccacccctgctaagcctatcacccatgtgagagatggtgtgattaatgaacctttgagagctcctcctcagaaacaagtgtggcttccaaaacctaaccatcttagtaacacacttgatgcctttcttgacatctctatcgatccccttcctagagcccctcacccatccaaaaagaaagccccctcccacaaacaaaatccacccaagagagaggttaggtaccattgtgagtattatgagagggatgggcatctagat

SEQ ID NO: 145988 - DNA, 522 bp, Zea Mays
caaataggtgctcgacgcccctgaacaacccaggccaccctaaccaagaatatgtgtgtcgcctagattgcagccattaagagagagaaaccaagggaaaatggtgagagggcgaacaattcgttgttgtgctatcgatcgagctaaggaaaagggtcctggggcttcggttggtgacgtgggagtttgtggtgggctcgaagggaattgctcaccagagtaggagggccgctgcggatcgcgcctctccgtgggctggaactggcatcgcttaatcgcctgtaagtcatcctcggctgaattcggatggatctccttaatctcctgcacctgtcggcgttaggttaggtgtgtctggaccggggtgtgcggcttgccggcgttggtaccgttgttggccgtcgtgcaccacctcgcggtattgaccggtgtgggggaagagtgcctgcgacgcccgggccgtcgactccgcgatgtagtgcccggattagatggtgacataacgtttcgccgagtggtttg

SEQ ID NO: 145989 - DNA, 359 bp, Zea Mays
gtagcgggagcgtaatcatgctattgcatctagacatgaccattgtcttgttagtcactgtgctcatatgcctctgtgtggggtaggtgtgcgcattaaatgcgagtgtcccctattagtcttcagatgcctttatcctatcttcctgggatcggcttgggcgagacagacagagtggtggtggcttcgggcgagacggagatttgcatgaggtgggagaccctcggggaggggccctggtgtctgtagggaagaccttcatggtagtcctcgggctaggaggtgtctcgcctgatttcctttagggcttatgtcttaacctcttctgagtgcgttttttggagtacccctaattatca

SEQ ID NO: 145990 - DNA, 554 bp, Zea Mays
ggagagttggtgtgcgttttggtgtgagtgtgtgcgtacatgaacagatactacaactgtacttgtaagtgagaggcaataaaaaatccattgcactgctcgggagacttgccgccagctacacactactggggttgggttgtttttgcacttaaactcaactgccacttctacgtgtatgtcgttgttgctaattgttgtcgggctgtcgagctaccaagtgtaccgaactgaagctagttgtgttgggcttgggcctccgatgaaaggccgccatgcttgggcctcgagaccggaatggccaatagaggccgcgacgggccgcatatctgccggtggggtctgggaagggtgaagtcatgttagtgtcgtggtctacactattgacttaatagatagtagagatagagattagaaaccaaacggctctgtcccacagtacgcttgaacggaacactacctaaacaatcgatagagagctggttctgttggagatcgaccggccacgcatgggccattgctatgggtagagagccggtggtccactcggccat

SEQ ID NO: 145991 - DNA, 281 bp, Zea Mays
gaaagtgactggagtcgggcggcctggggtcaccgggaatgggtccctaacccgggtaggaaggaggaggagctgaagtatagaaggagttatcaaactcctcgatctcatcctcaggggtaacaaatgacacaccatactcctgttagtgccactcgttgaggttttcgtggtaggtgggggtcggaggcggaggagagcctggaggcatgggatgacccgtggaggcgatgtaacgatgaaagtcctcatgcagcgccacagtctggcacctatgcata

SEQ ID NO: 145992 - DNA, 560 bp, Zea Mays
attctcgcgaacggcatgctgcttgcgtcgactatcctcgtctatccccgtctatccctcttacatctacctcgacattctagacccgcagactagctccgactatctccgtctaattttatctaaccttgtctaccacccgtctaactccatctccgtcttacacggtctcgcgcaatccgcagcacaactgcctatccccacacccattcatctcattgtcatctcggacccatgcgtcaccttcatcttctcaaaccgtcgcccgtttcacgtgtgcgtgtctgactcggatgccaccacaactacgtcgcccccgttctcgaatcacctcacccatgttctcccgcgaatcattttgcgtgcgcccgacttatcgcgtacctgctttcccgtgccccttctctctctatatatatatgcacctcccaccgatgcgaacccgcttccctctctcttttcgcaaacagtagtacccagcgccttgaaagactcatgcgtcgtggtgtccctgcgcacaagcagcagaaccgtcgtagcctgctccatcttcggcgaac

SEQ ID NO: 145993 - DNA, 486 bp, Zea Mays
tgcaattcgagttagctcgtgtcttccacttcctcgtttgagtattttcaggtacccgtgatgcttcccgacctatccaattgaattataccgtcgttaatcgctcggaacatgcggttcctttaagattctccgctgtcgccgtgggcagagagttgtagagctccaattctgaaattgagtgaggggaaatgcgcgggtagagtccgatttggggtccgctactcgggagcaccggtcctggctccctccggccagtccagctcgccggagctcggccccatgtttggtgcgcggtcgtggagctccttggagaagagatagaaatcaagggtcttatctgcaatttgtcagcggcacacaggaatagtacaggaactattttccagttacccagaaccccagggacctttccgcaagatcgccagcgcgggcgcgcgcgcgggcgctttctccctctgagctgggccactgggctgaaatcag

SEQ ID NO: 145994 - DNA, 930 bp, Zea Mays
ggcctaatgggccttaacacgtaggatgtcggacaatcctccccaaccttctgttcccccagcgacgagccccatccctgtgacctctagggcagcagctgccacaagcacgtcgcccgctgcgcccgtgtcacaggactccttcattgtgttccagcagcaggtgttggactcccagacattgatcatcaaccacctgtcggcgttgaccgcccggttggggcaatcgaggtgcaatccgcgtcggcctcgtccatgattgatccttcatcatcgtcccacgtcttcccctcgactgcgcaagattaacctatggccctcccgactatgggggcatccaaaccgcacccgatgcgacgtcctccctgtcacttagaggtcaagtaaccctttctatataaggagaaggattatatcaattgaaggtaagcagaagattagaaagaaatcctttctctcttgccgacagtgggcaaagccctgcgaccgacctccccagcgccccatccttaatcgttgcgccacgtccccaataggatctgcaatcctatgaacccaccaaatccggatccctaacagtctcactggggcatgcccccaaaataaattttgttgcatcctcacgtgatgccacgatgggtcagaacaggatgcttgtcatctatggagccctgtgtgactaacaacctcactagggatgttgtcaagctgtgtgtagttgtaggtcttgatatgagtgtgtgtgcacatgttcagatactacaactgtacccaattagaaggtatcaaaaaatggttcactgcaacctcatctatagatagttcaattatagataactaaaattaaatatctctgatatttagtattatccctattcaaaattgtaagccatttaagctatgtcccaagtatatcattttgggatcctt

SEQ ID NO: 145995 - DNA, 590 bp, Zea Mays
ttgcatcccatgtgaaggctgttttcagcaactgtgtgtgtgatcagtctattagacaaaagttcaaaataaaattttggtaatagccaatgaggccaagaaacccgcgagacctttcactgttgtaggtcatggtcaagcttggactaactccatcttgtaggagtccattgtgacactgttgtttggagatgatgtggcctagataggatatcaattgttcccagaaggagcacttgctttgcttcatcggcagcttatggtgttgtagaacttgaaggactagccgaacatgtagcaaatgctcggcccatgtgctgttgtaaattagaatgtcatcaaaaaatataaggacaaaccaacagaggtagtcacacagaatttatcaatgcctaaaagttggatgggtgccttagcaagatcgaatgccataaccaagaactttgaaatggccatggtgtgccggaatgtcgttttagacacattcatcgggtgtatcgacacatggtggtaaccactacagaggtctagcttcatgaagatgcacatcccctaagttcgtctagcagagcctggactatcgggatggg

SEQ ID NO: 145996 - DNA, 415 bp, Zea Mays
ggaatctagtgccagctgtcggtcggttcttctagatggatcaaactatcaagggcctgtggaacctggagtgccgtggtggtacaaacatctcacgtttccttctgtcttcgttgtagatgtatatatatagtactcgtagttgaattttctgtaaaaaaaccgtgcatgtgaaacaagttgcttggtgcttgcccttccaattggctgaccagcccggccatatcggtcatctgcagattaaactgcagatgagcattgacaaaatttgagcagctagcggccgtcgttttcaaacgaagcgtgatgctcttgccctctgtgtctatatataatctatcttgttataatatagtattccacccgttcataaatatatgatatcgttaattttttaaaatattttcaccactcg

SEQ ID NO: 145997 - DNA, 391 bp, Zea Mays
tttgtcgatcgctaccaatacatgagtgtatcctccttgagctttcttgaaaggtccaatcatatccagtccccagcatgcgaaaggccaagttactggtatggtctgcagttgctgtgctggcagatgttgttgttttgacaagtattggcaagcttcgcacctctgaactaactcggctgcatcactcttcgctgttggccaatagaatcctgacctgaagaccttcctgactagtgttctggatgctgcatgtattccacattgcccagcatggacctcctccagaagtcgtttcccagtagatgagagaatgcacttcatgaggacgcctgatgcacctcttctgtacaacgtctccccaatgagcgtgtaatgagccgactgtctg

SEQ ID NO: 145998 - DNA, 288 bp, Zea Mays
gttggcacgtcatcgataggacgatcaaagtcttcaaggggacggtctactacaaccagacgcaccacaacctccatgagttgcaaatgggtcttcatagccgaagtaccataattatcccaatccagttgacaatcaattgggatgacccgtcttatgacatggatgaccaatgttaagcactccgtcaaccgcaatgtcatcatcttcatggtaacctagcttttgtttagcctttgtaaacacatcactcaaggagggtctaccatcgaatagtaccggcacgtg

SEQ ID NO: 145999 - DNA, 309 bp, Zea Mays
atcacctgtcgtcgtcgtttagtgattgcaaaacacatacacttggtttccgtattaaattaatcagctagctagctagatgatcgttctctgctctatgatctgttagttctgaagcatgttgttgttttcgtctgtgctcgataaattaagctatgttatgtggtcgacgagcgagccttccaggcagctaccgtaccgtcttccaaggagtatatgcgtgtgagcgtgtcacggttcgtaggaaggagtgcgtcagtcatgacacatctctaccaccctttaattcctttcccacgcaaagcatgc

SEQ ID NO: 146000 - DNA, 567 bp, Zea Mays
cttgagtcgagtaagtgtgagcatgtcacaccgccttaagtcatcgctgacttaagtcgactgctccgttagtagggtatagtggtcaccctgagtcgagtaagcgtgagcatatagtttgacaataaacggttcgaatgcctttgagaatgaagtctttttattgatgttgtattttccaattacggaatacaatactgtcccaatagcttttgaaatctagctaggggtaaaacttcctgagatgctctatattccatgagttccctatttccatgccatccatttgagtaagacgatatgatccaggccgagtgacttctgttactatgaatggtccttcccattgtggtgaaaatttgtgtcgtccctcccccgttagaattcggcggaggacaagatctcccactgtgaaggatcgatgacgtatgaccttatcatgataacgcctcagagtttgctggtacctggctgactgaatcactgtattcaatcgttcttcttctagtatatcaacatcttccagtctagtagcctcagcttcggctatgttttcgaagatcaatc

SEQ ID NO: 146001 - DNA, 563 bp, Zea Mays
tgaagggcggaaatccatcactattttcataatcttctgacatgccagtcctgtcctcaattcccacgatatttcttttccctggaagaactatgtggcgctttcgctcattgtctgagacgttgtcggttttccctttattcttcggtttggtggacatgtctttcacatagaacacttgattcacatccttggctaagatgaatggatcgtctctgtacctaagattattgaggttaactgttgtcattccgtattgatggtcaaccgttaccccgcctcctatcttcttcacccattggcaccaaaacaaagggaccttaaaacggggtccatggtctaattctcatatctcctctatgcggccacaatatgtttccttattcccatttaggtttgtggcatctatgctgacaccactgttatggttggtgctccttttatcttgggctatcatgtaaaatgtattgccatttatcttgtaccctttgaatgtcaggacattccaagatggttccctgcagttgctcatcaataccctcgtcaccctggcatcttttttg

SEQ ID NO: 146002 - DNA, 532 bp, Zea Mays
ggttattgttcccccagtgcgagcagctggagcccgatcacccgtctttcaaagctgaccaggaccatcccctttaagatcatcgccatcttcatcccccaacaggtcatcttcatcatcattgaaccctctctcatcattatcagtctcagacagaagccccccattcccatcttcaacgcggaaggacagaaggtatacttcctccccaatgaccacgtccaccgtgctgggaataagattagcatcaagaatcataacttgaactctaccaacctcaaattgcctggtgtgtttcatgtccacatcaatagatgtacccagcaaactgcccactgcccaaattgttgggaaagtacgatacaccaacggtatacccaacacctgcacccagtagctgttcaccaccttgcacggtttttccgattgcttttcctcaaaatgaaaaagaacccctttcttctttgagtgaaccgttccccattccaccagacgctgtagctcagttgtggaaggaaaagctgtccggaac

SEQ ID NO: 146003 - DNA, 495 bp, Zea Mays
gcatcagtcgggtcacacccattggggtcagcatcatcaaggccacacccattggggtcagcatcagtcaggtcacacccattgggttcggcttaagtaaaaattggcactggcacttccccggcagcaggagcagaagggccggcatcctgattcaagcatgacactcgccgaagacgtctctttttctttttcttcccctcagcaggagaagttggatggttggttcggcgagggtgcttcaggcgaatactatcagatctttgaatgtccaaagcttttccagactctgggacgggtgccacagccagtgtttcagcagggaccgaatcagaggaatcctcagccaacatgtccagcatgacacttatttctgcgtcactcggattcaaaggcatctcaaaatgaacctgcctctcatcatcggggatttcaccaagcgaaacaaccaaagcctcaacctcttcgggagaaggtcgcactctaaggcccaag

SEQ ID NO: 146004 - DNA, 525 bp, Zea Mays
atcctatgtgttcccatgccactagaactttggtagtagtatgcaacatgtgctataaggtttatctatagtgtcctacccatcacaaagagctttgccacctaaatgacagttctacgagcaataactagactatcaaagtactgtaggaatgcaagtgaataaacttgagcaagtgcaaaaacaaaattgtggtaagtaaatgagatgagaaaaaagtgtgcaaacactcatcatgatggtttaccccatgttattggtgggcaaaaccctgcctctagccaaagttgaacctccaccaaggacattctccaattaccaaggttctcctagtccaaaccttagactatacactataaatacttcgccatgactaatgatccacttactacaaaagcaagcctcactactagcctcttatcctgaaccctatgaattttaacctagcaacaaatgacaaggtctttttgctactccatataagaggacaaaaggtcaccaaggatgtcagcgagccacaaaggc

SEQ ID NO: 146005 - DNA, 404 bp, Zea Mays
gaggaagaagagttcctggccgtaggatctatcgaggggcgttctggattgatcgtgactaggatcaatccggaccgttgaaacatcaacgcacggataagattaactgggggcgtccactttcaggtgtttaaatctgggcggccgggtgtcgatcggatggatcagaatagatctcgggcatgttggttatgaaccgggggatcgtgatctgacggtccatgttggataccgattcgatgccgtcccgatgtgatctgggtcctccatctctaatcgggtggtctgagcttatctgtaccccttcgccgtgacttttagctaaagagccccttggtaacttcaaaataaacccgccgtccaactcggggatttctgagtctacgtaaatcttacggtttagc

SEQ ID NO: 146006 - DNA, 507 bp, Zea Mays
gaaattgttggtaagcctaacaaacccgcgcatagaacccggaaccacccctcggccatctgcaagcataaatacagggcccagctaccccctcctcaaccatcatagcacatgtatcaccattgtgtgcggtcaaagacggagagaaagtgatgagaccgtcggggaaaagttctagccaccatcatccaccagcgaggtaagagtcccttccaaggtttcgatgtgttccccgccctcataacagcgttttggatggtgttggctccctgggcgtggtcagggatcccatccatggcgcccctaaggtgggttggccaccgccgtcttggcctggggtctgatgatggaggggaaacaacggtgaccgtagatctgtggatgaacgcgcgggattaggatttcatcttaccccttcgactggatggaaccccatccgtcgatctcagatccaacgactatcatcgcgtaccagtcactttaagggaggcctaatctacacccttg

SEQ ID NO: 146007 - DNA, 585 bp, Zea Mays
ctgaaccgttcaccacgtggggatgctgatggggtggacccctggtgtcagaatcatctccttgcccagagtttgttagagacaacagaattcatgtacccactgccgggcatctcgggcatgatttggtcgtcgccctggctataaaactctacaccgaaggggggggggggctaagttctaaggtcgtgaccctctcccacctcatctgcctgcttagcttagatccgcgtatgctcccccatcgagaaagaagcgtgtgttgccgtggtcgagatcgaacaagagagttgtcattgcaggggtaattccgatatgctcgtgctgacacctcgagatgatgctacgaagaaccgccgaagtatatgggacccgggcgtagaagtgacaaagctcaaagagtcttgctatagctctacttgttttttgggttaatactacttatgaatcacactcatgttccattattatttattattgttggctttattataatacatgataaaatcatattgtttaattagaacatggagtgaccacacgagacaactgtgtaaccacaagaactatatggctctggtcttg

SEQ ID NO: 146008 - DNA, 568 bp, Zea Mays
gttaaagcggtccgctggggcgctttacgacaggatgtggggccctcacggccgtgacactgtccgggagagggctgaccgagcattggcgcaggtatgttgtctctgcattttttcatcatcattcttttttttgaaattttttgttgtcttcgtagatgatgaatgatgaagaagtcgaggacttcggtgccttgaaagcttgatgacccggacagagggcgtggagacgggggctgaagggcacttagcgcctcaagccagccctgactaaaactctgtagcgacggctgctcgggcgtaggtggtagggtcgcattagggttgttaggttttgggtttctttttgtgatactgaaggtcgattgctgcgtaggttccgacgtctgggcctgcacaagcaacccccctaacgttgatactagtattttggcggctgcgaatgcaatgccctttaatggaaatgtgtatgagggttctgaaactgagtcgtggtcctcggacgaggatgattttgggagccctctttcgtggattgaggagtcctctgaggaagatttagactact

SEQ ID NO: 146009 - DNA, 484 bp, Zea Mays
caataatcaaatttggtatacatgtatgtcgaaacgcttttcacccactagttcacattttaacttagacaccacatgagcactactaatttttacccgcgaccagaaccacacgcatttcaactacaacaagcaattcatcgtgaccacgaacttaacccaaaaccatctaacaagtctgctaactcattattatagcactccgagacacaatatgtatatagcaatcacttaacgcaatcgactcctgctgaacacgagttggctaatgacgtgactatttcctaattaccaacatataccatattttaccatttttggatacttgcacgacacacagctattgtaatacatcccagtacattcaaccccatcagtaaagcaccagaacatttccgaaaattccccgagactacgacgacaaggcatcgatccaccatacgacaaaaatcatgacgaagctgataggtgctatcaactaatc

SEQ ID NO: 146010 - DNA, 470 bp, Zea Mays
cgttggatagctagctttttattcttgctgttttctttagtggatagctagttagaaaagagagaagaaagaacagaaacaaccacaagcaaatgtggctgttgcaggcgaagaccaataagaacgatccattcttggatcccctgcaagcacgtgcccatcagaattgaaatcattatacatccatggcgtctttgtgctgaaccatagcaggttgatttgggtccatggactgaacgcatccatttgcgtctttgtgctatgatagaggaactgcagtctataaaggagaacaagacttggtcacttgtaacattgccaaagggacataggccaataggtctaaaatgggtttacaacctgaagcatgacgaaaaaggagacataatcaagcataaagctagattggtggcaaaagggtatgttcaaaggcatggagtggactttgatgaagtttttgctccagttgc

SEQ ID NO: 146011 - DNA, 697 bp, Zea Mays
gtttatatgggtaaatatgagtgaagtgtgcgcttggtttgattttaggcgaagaaagtggaatttgggcactcggctcggaatcaatgcctataaaggggaatttgtggaaatttggagcctggaatgttggattggcgtgaaatttggcgaatatgttactggaggtgtcatgaagttgcctgaaaaatttgggatcgattggagcatttttggctgatttggccatttcaccgagcacgtggcgtgcggtgttctagggttttggtgaaatagctattttaggtggtgaaaccctccctaaggagctaggaacctgcatggggaagcacaaaggcacaatggtacacatccatgcacagggattcacaaattgactcagttttggtttgaggatcaaaaggggtggaacacaagctcactgaccagagagaatggggagagagggaggaaaggagagccagggctactcaccaaagaagggaagaggccgagcacgggcattggaggtcgccagagcatagccgaagacggtggacgccggtgagggagagggaaggagtgaatcacagagaggcgagacagctagagaagtgtcgtctctagccccgaggtcgggctggaggccttttttttaaaacgagttatggacgcaccagacagtctacagtgcctgtccggtgcacatcgaacagcg

SEQ ID NO: 146012 - DNA, 510 bp, Zea Mays
gatagatcgagtcaccgttattgacgcctcgtgtgcgcgtcatgcttcggaggccgcgaagggattaaggaggatgactgcaacctggggatcgtgtgcgcaatgtcgtcatctacggaggggcatccgacatcggggaattgctcgctgaagcaggatccccaccgcagaaccgtgcctcgccgtggtcgatgtcctctactgtaaaatcgtcagtaaaactcataccatgaagttcaccttggcctcctctttgtgtatacgccatcagttctcgcatccgggttcgtggggtcagggttggtccgcgccgacgggttgggccaccgcggagagctctactctaccgtgcttcagcagcataggagaagcgtgcgacggtcgttgatctagtgagaaacggttgtgattaagagcagaggataccccttcgatgcttaagatctgtgtcgttgaaatcgtcagggacaatagagatcagatgtttgttgttttgaatcatggttgtta

SEQ ID NO: 146013 - DNA, 283 bp, Zea Mays
gaacctcctcagcgagaagctcgccgatggaggaaccgacgccaaaatattcggcaacatcacgaagcaggggaacgggacccagcgcagcctgtatcccgagatgaaatctcggaggtgggagaaactcctgacgaacgagtcttcagagaaaaaaggaactctcgccaacgagatcgccgaaaggcttaagagcaagctgaacaggatgtgaggctacgctaagagaaccctctcttcacgcgaaaccagaatcctgacttcgcccgagcgatgaacacac

SEQ ID NO: 146014 - DNA, 869 bp, Zea Mays
ccaaacatggccttaaccgcgaccaatgaatggttaagttgtcgattttggcataatgaactagtaaaaagcataataattttctaccataagaaaaattgaccgccacgggttgtgcacttgtattaattgttttttctgttcacttctaagaattcaaggaccaaagcatcacctcttctttagccaccctaagggttgtgaccaagctaggattacatccatcaaagatacatctattcttatgttttcatatggttcaagcatctagaataactaaggaattgaagcactttctcatttgatcagttgaccaagaactactagtcctccaccatgactcgaaggagtcctcttgagtgggacacagcttatgtatcccccctatcttaaggaaaccgaaccataacttcttgacaaacacacacttgaccaacaagtggttcatggattcatcctcctgatcgcacaagggacaaagctctggttggtctagccctctttttctgagtccgtcagctatccaacacctatcatgctccacaagccaaataaagaacttgcacttactaggagcacaaaatttccacacccgctctgctggttcaaactgaaccgaaccatggaagagagcttttattatgcttttatactgggttctctgtccttttcttctcttcttaatataaagatgcacaacatacgtcttctagaaaaaaacttctaagagttccaacggaagaacctcaacctgggagattaaaaatctcttgactataaccgtttacatttaatgtacaacactgagcacgctatggtttactcacttcttgaacacgtaggcgtagcaatgtgccatgggcatgacg

SEQ ID NO: 146015 - DNA, 278 bp, Zea Mays
ggccgagggaaaaaggtgaagatccggtctgacgaaggcacctcaaaggggaaggcggtgattgcggtgacttggaagaggaaaatggaggcaaaaggtatgaagagggcaatggtggggccaagggcttctaggtgttttgttgaggaattggtggagacatgtgctgggcctggggagattatgacttcacccgatctccgggaaacatcttcgcgaatgttgaaggtgaccgggggtcaatggcataggaaataccctgttccccgggccaccgg

SEQ ID NO: 146016 - DNA, 342 bp, Zea Mays
ttggtaccatctttcttctctacaaacaacactggagcggcccaaggcgaggtgctgggcctgatgtaacccttctctaacatctcatctagatgcttcttgagttccaccaattctggtccagacactcgataggctcttttggaaatgggggcggtaccagggataagctctatggcaaattcaacctttctctcgggtggcatgcccgttaactctttcgggaaacacgtccggaaagtcggacacaaccttgatagcctcgagcgggttgggctccttactatcaactgaaatctgatggcagactccttctgatttaggcatccttagctcggccac

SEQ ID NO: 146017 - DNA, 599 bp, Zea Mays
tgtcgtcgtgccatcgccgttgtccaccgcgtgtctcaaccgcgccaccgcatcgccatgacttcctctagcctctccgttgatcgccggaatgaccgccacggtaggggccacgaatcccttgcgccagtaaagtttcctctcctccagccgccgtgtgtctcgtccaaattcgcgaccaccgctcgctcctcctataaattgaaggccgggccggctgcgttaggtcattacccacccagctacgaagaatcgttagccatcgtccactagtgagtcccaatttccaacttcccccaaattgactctccgccaccgtaaaccacccatcaccgcggccagccctttccaggtcagttcatccctcactctcctttgtttgagcactctggttgctctgtgatgcttgccgagccatcaattcaaattaagagaccaccaatcgctgggaacacaacgatctagccgccatgctctcggtcaccgtggccagagctccttagttggtcattagtgcaattaagttaggggaaaagcttaggataggtccgatttggtgtctgtcgctcgggagcgccggtcatcgcctcaatcggcca

SEQ ID NO: 146018 - DNA, 349 bp, Zea Mays
atacccgtgcattgcaacggggtaaaaatagtgcaactataacatatgtatggacatgtgttgtgcagaaaacaagcaaatcactgtgataaactcataatgacttgtcaccttgttcgaagggggaaaaggtgatccttagtcttacagctttaagaagagaaccatacatgtatcaccgcattactccaataataaaacaggtgtaggattatgttgtctctgtctaggaaaggcatgtgcaaagattaaaaacttcagttcatcactaagaaaaagcataaaagtgattaagaacactaccatcatagatctcttgaatttcaggatcactgaggacctcataagc

SEQ ID NO: 146019 - DNA, 324 bp, Zea Mays
gaggaaggccatgggtcgcgtggtggaacaacggtcaccttctcagccatcgccaaacgaaggtgatggaggcagaggggatgaggtgcgcggttttcttttccccggctattctcttaggttgcggaaaccaaagcaaaaggcgagcacaaatggcagggtaaagaaccgccgccgatccctcttctgggtatataaaggcctaggcgagttccgttcaaaactttgcccgaactcgccgcgaaattcaaactcaaaggcgaaacacccgtgttccgttcctcgaatgactcgagcacacgcaactgccgccccgcgaaccgc

SEQ ID NO: 146020 - DNA, 394 bp, Zea Mays
agcacaaggaggaagaagatgtgatcactgaagaggtagttaattttattcttttccttgttctatgttggccccgttgtttaggatcccagccctcacaggcccaatgtgattgtgctgtgcgttatgatttacaaaacttgaacttagtgaagtctgttgaattttgatgggatccccagaatgtagtggagtcaacacaaaactgatcatggtgttaaatcaggaacattactgttcaaccatattagcaccattgtcgtcaactcgtcaagaccgtgttttggacacagaaaaataagtcaaccttgtttttttctggcttcaagattactaaaacatggatatggataaagtaaggagtagactgagaagacagtgaggtgtagcatgg

SEQ ID NO: 146021 - DNA, 582 bp, Zea Mays
cactaacttcttcggcagagggtcgcactataaggcccaaaccgccatcagcaggaggaggattcgacacaaaatgagtaaaggccttggaaggaggcaggttccagaccgagtatgcaataggggcgccaacatttgataccttgcctctaagtatcatttcaagccggtttaccaagtctacagcaggaattcttctgttagtgacccgggttgagtcagctagacctcggtacaaataggtcgggtatgccctgtccttcaaaggctgaatgttcttgaagacaaaatcagcaaccacagcctctgcagtcagacccctctccttcagtagtccaacttcagccagcaaaacccctgcctcagccacctcctggtccgtgggggactcggtccaactcggagtacgaacatccggctgtctccctgaccgtggggggagagaatttccgtggttctcaacaataaaccactccaagcgccatcctttgatactatccttgagtgggatttcaaggtagtcagtcttcctcccacggcgcatctccaaactcgcaccccaccagctgatgctgccgccca

SEQ ID NO: 146022 - DNA, 565 bp, Zea Mays
ctgcgtaggtcagagttcgccgccgtcgcgatccttcgatgtccggccaagcggagcctccccgtgccacgccaagtcaccccgagccccgtcccgaggtgagaagtatgttcccacgctcaatttctcccaatgctgccctgttcttggccaatttggcttcgccggtgatggtcgtgccggtttgccgcacccgtgcggtgaccagctgatttagcccagtcttgtgcccctgtgttagcccgtagtgttccccttaccctgccgtagctagcccaggccttagcgcgccatagacctcctctccctggccggaattcctcgccggagttgcccgacccgctcggagcgcctgcccttcgtcattctcccgtttccgttcccgttcttgcggccggtagtctgccagtgagttcgccaagccctcttgacccgttctagccctccccgacgaccccagactccccggtggtcgcgtctgcctcgtctccggcgacctcgccaccacggaggaggtaattccagccaccaagttgtaaagcctcgtgcgtcccatcgcaacagt

SEQ ID NO: 146023 - DNA, 657 bp, Zea Mays
caatacagaaaatgcctcctcctaaaaatttaagtggcctcaaatctttgcagggtcatttggcatacatacgacgcttcatatctaatctctctgggcgtactcaaccattcacgagattaatgaggaaaggtgtgccattccattgggatgagcaatgccaaaatgcgcttgatagtctaaagaggtacttacttaatcctccagtattggctgcacctgtaaaaggtcgcccccttattttatatattgccacgcagccagcctcaatcgacgcgcttctcgcacaacataacgatgaagggaaggaggtggcttgttactacttgagtcgtaccttggtggcagctgagaacaattactctccaatagagaagttgtgcttggccctagtcttttccttaaagaagttgcgacactatatgttgtcacatccaatacagctcgtggcaagagcagaccctgtaaggtatgtgctaaatcaaccggccctcatgggacgccttggtaaatgggcagtaatcatgatggaatttgacattacttatgtgccacaaaaagcaattaaaggtcaagccttggctgattttcttgctgctcatcctgtgccagatgattcgccgttggtgatagacttgcccgacgaggatgttttta

SEQ ID NO: 146024 - DNA, 405 bp, Zea Mays
atgcctttcctattgtagtccctagtggtcctaactaaaaactgaaggatggtgcactttgtgcgtctctatggtggtaccaacaagctttgcacctgttagctgtcatcttttcttgaattgtttgggaaagtgtccaactattttagtgtcaccctttattgtgctacactgctactgttatccttgttccaaaaatctctctgctggatttgttaaacgatttaattgtcatcaccctatatggtgtcatgacctcatgactattccattgtactgcttgagttaaacaaatctgaatgactgaaactgaacgagtacctgtttttagtgaggatcagtcgttttagacttttagttgcatgtctgcttacaaggaattatagtcaagtttttatatacgct

SEQ ID NO: 146025 - DNA, 509 bp, Zea Mays
tcctcagcagcaggagcagaagggccggcatcttgattcaagcatgacactcgacaaagacgtctctttttctttttcttcccctcagcaggagaagttggatgattggttcggcgaggacgcttcgggcgaatactatcagacctctgagtatccacagctttgccagactcggggatgggtgctacagccagtgtttcagcaggggctgcatcagaggaatctttagccaacatgtccagcatggcacttatttctgcatcactcggattcaaaggcacctcgaaatgaacccgcctctcgtcgtcggggatttcgccaagtgaagcaaccaaagcctcaacctcttcgggagaaggtcgcactctaaggcccaaaccgctataaccagtagcaatatttgacacaaaactgatgaaggccttggaaggaggcagattccaggctgagtatgcaacaggagcaccaatattagacaccttgcctctgagtatcatctcaagccggct

SEQ ID NO: 146026 - DNA, 535 bp, Zea Mays
tgcatcgaggagtctaggctaagtttcattattaaactactgcatataaaagtgtacaaccggataccaaattctgggttcgatgcaatccttgagttgctttcgtcatctttgaagaatgtgaccggcctccctaagtcctataatgaactgaaatctctacttcggaagcttggttttggttatgaatctattcatgtgtgcaagtatgactgtgctctattttggaaagatcatgaagaggatgaccattgcccaatttgtgggtacacaagatggaaagtgaacaaggagagcagaaagaaagtgcctcacaaggtcctccgttactttccaataattccacgcctccaaaggctctttatctcaaagcagcgggcacagtatgcaagatggcacaaggaaaagagggtatcagttgagaatgaaatgagacatcctgctgatggagaagcttggaaagaatttgatgatagtttcaagtcttttgcagatgatccccgcagtttgaggttagccattgctactgatggat

SEQ ID NO: 146027 - DNA, 372 bp, Zea Mays
caggctcgtctagagtggccgaagcagcaggtttcctcttctttccctggcctcgcagtggataacggtagtccgggtaaacaaagccaatagcgtcaaaaactctgttcaatctcttctttccccggcctccgaaggttgtggataatgcattatcttccgccttggaatacgacccaagcagctcatcactagtaacttcaatgcattttagccagtcatcgtttggttcatcgaatttatccccgtatctgaatgtgtactttagccggaccagatcaccttcactagatttgatgatggtttccttcggcatttcccagctctctataagcggccatactctgtatgctatgtgctcttgtaccaaat

SEQ ID NO: 146028 - DNA, 2815 bp, Zea Mays
ggagtaattatcaaaaagtctacctaggtaccccttccataaatcggccatccatcatccgcggcgagagttgcgaccccgaggggtggacgcctggtttctctcaaacaccgttgagccccctctgtgcgtgcctacctgacgtccgatctagcgcgtgcggcccagatcgttgcatcgcaggagagagctctcgggacctccgctccgccgccagcccgttgcccggctcgtttctctgggtttcctctctggctggctcctgcagcacgcgccatgtccacaactcacgcgcgctacacctatctacgctctctcgagaggcggaacagacgaccccacgactgcgagcctgcaaggtacataacacatcgctggaaggggagagcgcgaacagtggtcacggagacgccgtgattttcctagggtgctttggccgtgcctgtcagagccacgtagcaggtgccggtgtgccgtgtaactggcgtgtactgggcagcgagcccaaggtgtttgcggaaatgccgcggccagtgagatccttcctctgcgctacctgcgcctctcagcttgcagtcctgtacgtaccttctttcacatttgcaaaaagaaaaaaagttatataagcacctattgaagatgtttattgcttgcgtccaaactcagctcctttactgttttgctgatcactattactacttcacatatatttgcctgtaaagctttatttaaatatgcttcgcgttgtacaacagcatattcttgctcttgtttagcttcgcgttgcacaatggtatcttcttgctttgttattttcaataggtaaagtaaaacaaatgctagattttggaaccattagccaagcaacattggaaaaatcgctagccatcatctccgctatccatgcagcattggaactgttggaaccattgaccaaattagaagtcctctcttcatcttggctactgaaccactgactgcactacatttgatcaccatggccaccacacctgaggaattcttcagcaagggtctcatggagcagtcaccaccatccccacctgtcttccctgaccttctcgagaagcccaatgacagcagcgagggccagcaccatgtccctaatgagatgatgctctcttacgtctcacacgtgctcatggaggacaatgattttgatgataagttcagtgatcaccctgcgctactccaggtgcagcagccctttgctcagattctctcttccccttcctctggcactgacactggcaacagggaggggtgcaacgagttcttgcatgaagtcaatgttgataaaagcatgctcagttcggctttatccaagggcacagatgctgcggggacattcttgaaaggcatggaagaggccaacgtgctcctgcccaaagacaacaacttcagaagggatgagctggtgaatcagacggtcagggaaaacagcagtcacagcggcgtcaagaagagacatagcagggatgatcatctacaaatggagataagaaccagaaaagctgctatgacggtgatcgaggagccacaggagaacttggccaatgagacgcttgatgaaatgatgctgcttggctataaggaatgcatcagggacatggacaagctccgtgtcaccacagacaataataaagttgtaaagcaaaacaggaatagcaaggagacgagggacaacaatgtggtggacatacgcaggttgatgatctcttgtgcgcaggaggtgtcagtgaacaatcactcgagggcacgggagctgctgaagcagatcattcagcacgcatcagagacgggggatgccacacaacggttggcccaatgtttcaccaagggactggaggcacggctcgtgggcacgggcagtctgctttgggagttgctaatggcagagcgaccttctgtcgtggagttcaccaaggcctccaacctttactttgaagcctgctgcttcaacaaggtggcactttctttctccgagatgactatcatgcaggccatggtgggtaagaataagctacacatcgttgattatggtatgcagttcggataccaatgggtaagcttgttccgctcgttggcgagtagagaaggtgccctgccagaggtgaagatcacagccataggtctccccaagcctaagtcctacccaactgagaacattgaggaaatacggtgccgactcggcagatctgcccatgagtttggtctgcccttgttcaagttccacgctatcaagacaaactgggaggacgcttgcatcgaggacctgaacctagaagccgatgaagtgcttgtcgtgaatgatctctttagtttcagcaccttgatggacgagggcatatcctttgatgacctaagccccagggatatagtcctttgtaacatcagcaagatgagaccacatgttttcatccagagcgtgtacaattgttcgtatggttcatccttcctgtcacgttttcgagagatgttgttctattacatggcgctgtttgacatattcgatgcaacaatcccaagggagagtaaatctcgaatggtgctggagcaggtcgtgcttggacgttctgcgctgaatgccctcagctgcgaaggcgtggacctggtggaacgccctgagaggtacagacaatggcacacgagaaaccaacgggctggcctgaggcagctctcactgaagatgagcactgtagagctagtgagagatatggtcaagaagcatcaccacaaggacttcctgatctcccaggatgggcaatggcttctgcaaggatggagggggcgtgtc

SEQ ID NO: 146029 - DNA, 631 bp, Zea Mays
gcaaagggcatacccatggtggaagcttgatgacgaagattgtcgtcagtctcccgctgacgccttgccagctcatgtacatcagcagaaatgttccggcacatagagaaaaatgccgcaatcccatgggccaagcgagcacccatccctcggccacgacctcaaccacgaccacgaccacgaggcaccggcagcagcagcaggaccagcaaacggaccagcagaggtatgtgcacgggagctggaaggggctttccttaagcgccctgctggattgttgggatcaatccagaaagggtatatgattgatgtcttgtacttttatcatatcgaaactgcgtcacaacttcaatcatcttcatgataaaaggtgcatgaagacatcccttcagtggaaagcaggctgcatgaatgatttcctgccagatcatatcaaagacgttgatattctctgagctgcatgaatgagagcaaaacctttctctctccaaggatattcatctgattacccccttttggaatgagggtcatcctgctgagggagttgatgtatctgtaatacttgtgtttgttggtggactcccaaaatttcctagactcagagagatgaaggtctctggcttcatcacta

SEQ ID NO: 146030 - DNA, 460 bp, Zea Mays
tgcaaatacagggaccagacatcctcctcctggttcaagtcaatagatagtacgaaggccatactgtcgaccatatagactacagaggctcagactcgtctcctctcccatacacgacaaaccggggtgctcctaggaaccctccttgaggctataaaagggggagtccagggcttcattcggtgaggggaacacttcaccagtttccaccctccacagtgatattggcactcgcctcaatcacctgggacttgggagcctctccctctcctgaccagcttgtacccactactaaaagcacttaagtgcaagataatataagtctcatccctctctgctagaaatatggtcttctcttgcccgaaccaggataaaggcttgtgtcttcttgcatcacccatctggatctgggcacacaacactaattcagtagttggtaagaccctcgggtcaaaacatc

SEQ ID NO: 146031 - DNA, 346 bp, Zea Mays
cagtgtagaacaatcttgaagatacagagttcatcaacctagaaatccctaacttcaatgtatatgttgtttggtggtggtgtgctacatggtagaagaaaacatcgtcggccattgtggtgaccttttcatgggagatcatgggtggatacgaaaaaagcgggcattgtagcgagctcatctagaggaaacaaaaatatacacaacaacactaatgtgacaactgactacaatgatgacattgattctacgccattgccccctcgccttccacccctaatatgacagctgaggactataatgttgatgatgattttatgccaatgcccttaacatccaaccccca

SEQ ID NO: 146032 - DNA, 445 bp, Zea Mays
aggaaatcttggctggcaaggatagtcttgagttctggtcttagccctttcaaaaagtgggccatcttcttggcttctatgctgacgtcctcaagcgcgtagcgagccagttctgtgaatttatgcacgtactcactgacagatcttccgccttgagttaattcccggaattcatcttccttgagctgaacgatcccttggggcacaagatgttctcagaaagcagcttcaaattctgcccaggtagcatctctgacggcagtgctgaaggtatcccaccaggatagggccatcccggaaagttgatgagcagccagatggacacgctggttctcagggcatccgatggcttctaacttcctttttttatcgtgcgcagccagtcatcagcgtcgagcggattgctggatccagcgaatgtgggaggcttgagtcttagaaaatc

SEQ ID NO: 146033 - DNA, 1589 bp, Zea Mays
gcagcagcgcgctcactgttcttgtgccgaggaattgattgccacgtgccaccacaccgagattcatagtacggcgaaattgattgctcattcccctctgcgtcctccatccaccccctgacccccatgtcgttgaatttcttggaatactttcctccgctcagcgccggggcagcatttgctcgcgattaaccgccccgcttttgccgcttatttcagcttgtccttttcccccagtggggaaggttagcatccagcacaagcaaccgccggttcttgccgcagtttctgcgcgctcgctttttgtccgcaagaccgaggagagcgagagcggagaggttcctgtgtggaattcttcagcgatgaggcccggcgcccgtctggactcggtggtcttccagctcactcccacccggaccaggtgagatcatcctgtagatctgctcatgaagcggccttgattcgggggatcgatcgttccttgggtttcggtttctggaatggtagcaagaacagatttttaagaatgaatattttcgcggttagataatttggtctttgcgacggttcatgtgccgtgcattttgcagttgcagtgtcctaagatgcttttgtccatgtcaggactggagttgcataatctcggtgcagtttgcccaatcaaatgatttcatctttgttattattgttttgttgggattggtggtcttctgttagctgtaaacttataataagagaaccggcgattattgcatactgttaaaaaaactataactattagacggagtagactagttctctttcaggttgtcatggaatctactgttttgtcgaaggtcactgacggaagctgtcctggtcctgttttcgcttttcaggttcgacttggtcctcatagcgaatggccggaaggagaagtttgcatctggtttgttgaaacccttcctggctcacctgaaggccgcccaggatcagattgcgaagggagggtactcgatcacacttgaaccaatctcagagttcgacgtgtcattgttcacgagaggcgccgtggagaggtccgcttctagatttcgatactactctagtacagttatttctggcattgcctatttgcctcttgggtcaattcttgtgtcagttctttgcaggtttgtgcgtttcgtgagtactacggaggtccttgagcgagtcacaacactggagtctgagatcctgcagctcgaggatgccattgctatccagaggaacgatagtcttagattaaaatgtgtaagcgcggaagatttctctaccttatggctaggttgctttgtgtttttgtagagagatcacatattcttgctttgccatttaaaaggtcggagaccatggaagaaagttgactgaaagcaatgaaagtagtatgacgctgcaccaacctgattgctttctgagagcatgttgtatagaatagtgcatgcctttgaggattgtctgaatcacattgtttcgttgggctaccaaaaagaaaagcaaggtgcaatccactactattgttttagaatctagtcatcatggagtttgatgcgacatcacatcaagggcca

SEQ ID NO: 146034 - DNA, 587 bp, Zea Mays
gacctcggaagaaatcttcgcctcgcccaagcttgacctcggccaactgccccaacagggaagcacgcgcaataagaccaccttctctcccatgaacctctctgaagatcggaaggctacaccggtgtccaatctactttcaaccgcctaggatgacatccagaacaaattaccacacaatttttcaccatgccaagcactgtttcaaccactccgactcgacacacttggaaacgtctcatccgcacctctgtacaggccaggctcggacacacacccatgctctcgaacccgacctcgactatctacttagtaaaaggaacatgctataggggttgggcgtccttctcctgacaaaagacggcagcaagaacgagggccatcccaccggccataccactatagggctcggacacacctcctctgactacaacaatggcatagaaacacttgtatacctgggcctcctccttgggactattaaaggaggagccatgggccttctataggaggtggaggacaacactttaccatttactccacacctcactcctgatatagacacctgtgtcaatcatactcagact

SEQ ID NO: 146035 - DNA, 284 bp, Zea Mays
gactcgaccggaagcagtggagggccaagccatccctggcgccggagttccagttcgtactggacaggatcaagagcttggcggcgggcggcctgacgtcgatgcacgtggtcggagacttcctgaagcgccggatcgcgccgctgcagcagagggcgcgtctatgttgctggttcaccggctcaaacgacatcggccggatccagcgcgggccggggaccgacctgtcctgggaggagctggaggttctggtgaaggggattactggtgagtccttcgtccct

SEQ ID NO: 146036 - DNA, 453 bp, Zea Mays
atatcgagcagacatgaatgaatgtgtagcaccagaatcaaataatatggttgccagaatggcattaatgtaaaacataccgagtacgatgtcagcaccatcaggagtatcatcaacactgacttgattcaccctagctatagaatatcccatgccaggagtctgttgcttgttcttagctggtgtaccagaatttcccatcagacaagcattagcatagtgcccaatctgaccgcacttgaagcatgtagggccggtcttctgtcctgcaggcctcgtcggggtgccagtgggagtatcctgacaagtaggaggtgtccgtggagacccctgtggagcatactgaactgggcgtggtcctcctggtcgagtcggtgtactctgtggcaaaacgtagcggggacgaacactgctgctaccctgtccttgtgagatagccttcctcttcaaatc

SEQ ID NO: 146037 - DNA, 439 bp, Zea Mays
tgacaacctctccaagacagcgtgttctgccacactctgcacgtcgggcacacgtgatagctccacacgtctctctcatgcaaaaaaatcgtctagagtagagactggcaagagcatttaagcacgattgtttccactaaaggagcacagcttataagctggtactgcaattgttggctgcccagtatggtactataatttacaagccaacaaccgatgacgacaggccgcgtgggctgtgttatttggtgcggcccacgtagcatgcccagcacgtcgcaagctctcgggccaacctggcgttcgggtccccactccctctatctctgattctctgcccagctttctcctcccttcctctatcgcttcgcccaccccacccaaccgccccgtgacgcctgcccacaccctacaccaccgaccaccgtctgcgcttcgc

SEQ ID NO: 146038 - DNA, 572 bp, Zea Mays
acgaccccctcgcaggtgatgagggaggcaaaggacatgaggcccgtcacaattgtcggtagcacccccagctcctcctgtagccactcaaggaagcgaaggccaacctcttggccgggcgcttcgaaggcggcggtccacacacccagctcctgatacgcatccacgtgctgcgcatgcgttcgctcaacctccgcgcgcgtctaggcctcggctttatccacgcggttgcgtaggccaccgagccgtgcttctagctcctaagcgcattgtcgggcgagactggcctccacccgtgcaagtttagcatcggcttgagcagcctgcgcatcggtgatgaccttgtttgcgtccctcctctcctccgccaactgacgctggagttcccccttctcggccttcgcagcgatcaacctctccgtcagcctgcggcttttgttttctgtagccaacttctctggaatagcatccgtatgctgcgctcggagaagctcgacttcggcagcaaactccgaagtcaaggcgccagacgcaacatggtcgacgaaggcggccgcctaccacaaaaaccc

SEQ ID NO: 146039 - DNA, 324 bp, Zea Mays
cctataaacctaagtggggtagtcttccttactgacttagtggtgcttgactctaaagggatagatgttattctcggtatggattggctcaccaagcaccaaggcaacatagcttctactgagagggtagtaacggttaccaaccaccaaggaataacaatcagatgtaagatctaccctagattgttaaactatatggtgtataacctcctaatagaatcagtagaagatgtgtcaatcgtttaagaattccccgaggcgttcccagatgaactgcctggtatgcctccagaacgagatgtggagttcaccattgatctggtc

SEQ ID NO: 146040 - DNA, 316 bp, Zea Mays
tgcagggtacacttgtaagaatacacctatgtgagtttgactatgaggtcgtagtctatgagatgtgggtaatctcaaataaattcactaaaagacacgggagcatgatcggaacgctccaatcagaggcatgactttaggcggcctagtatcagtgatgcctataggtgaaaccatcttacacaagactagaaattcaaggctttgcccattgcaaagtcgtgaggaggtgaatcctgtactgcaaggtgtagctcaacccgtatcgggtctgcactgtaaagctggtatatgaaagcgtagagattaagtcaat

SEQ ID NO: 146041 - DNA, 587 bp, Zea Mays
gaaacacaagatgagacgatcgagaagtcaaacgacttgaaaacgacgtttgaaggataaataatgtcataggatgtttggaattcgaattgaggcacaaaacgatatggaattgagccgatacttcacgaataggtttatataggtgaatatgagtgaagtgtgtgcttggtttgaatttaggcgaagaaaaaaggatttgggcactcggctcggaaacgatcgctcaaaacgggaaatttggtgaaatttaagcctggaatctcggattggcgtgaaatttggcaagagtgtcactggaagtgttgtgaaggtgcctgaaacatttgggttcaattggagcatttttggctggtttgggcattttaccgaacacgtggtgggcgagatattagggtttcggagaaatggccatatgaggagtgaaaaccctcccgaaggagccaagaatctgcagggatacacaatagggacaattgaacacattccaccaactggattcacaagatttcacaagaatttgaaatgatgcacaaggggtggaaaaggagaagcttaactgcctcagacagagcactgagagggag

SEQ ID NO: 146042 - DNA, 547 bp, Zea Mays
tacatgggtcccctctcgtgatgtgctgctggtgtaccacctcgtcgccatccatcgagacccccgccacatccacccaatggtcatgtggcggtcggccgatattcttggtttcgttgactggctggtgttcatggcccccaccactttgtctccctcacctgtaccatcctgcagtgtgcttgctgacccgcattggtgttgcgctatggaggacgaatatgaggcccgattggacgaccacatgtgagacctagtgtcgtgtcccctggcaccaacgtggtcacctacaagtggatcttctagcataagctcaaggttgatgataccttggattagtataaggcttgttgggtccatcggtgctttactcaatgtctcgaagtggactacaactagacctctagcccccattatgaatcttgccactgtccagaccatcctcaccctcgctctcccaggactaggtggtctaccatctggacataaagaatgtctttcttcacggcactctgaccgagatggtgtactacagctagcccatcag

SEQ ID NO: 146043 - DNA, 484 bp, Zea Mays
tggcagtctacctgggagaaagccgaaactatccgaaccatccctctttccaagtcactttcaccggataccgcttcccagatacttgccaaaatgttgcccgaaaagccctccgacaactatgccagagctacagcagagtaatctttgaaacccccctccgctacttcccacctagcaacaaaaatacacccgcctagaggaaaagacttcaggctgtcagggggagaccctatcgaggatgacagcaccatcgtctacatggctggatacctccacaccctcgataaccaatatgatgaccttgcctcccactgcactcacctaaactcccgggtggaaaccctagagcaacaagtcaggtaatttacaagggaaaaggtgtcccttcaagagagcctcgagatagcagaaggcgaggaaaccaacacccgtgaggcctaccgcactctgaagatggattacgacaagaagctgaagaagc

SEQ ID NO: 146044 - DNA, 550 bp, Zea Mays
tgtggaacggagggagtaaacagtgtaatctatcgtacaaattcgctattttacacgatctgccgcggacagcctaaggctgactcaagcaactccaaacatgactgcggatacgcaaaaaggtataaggaaaaactattatttactagtccagcatatcacggatgtgattgcgtaaaatgttagaccttgtctctcattgcggatattcactggtacacatctcttccgcaaatcattgttttcagtcgttgcctccttttccccttccagtcgaaccctaggaccgccaccaaaattcaacctcgtagacgcggcttcgccatcaaccattcgctccgccttctaggatgggcggagcagctctgaagcgccaccgagagagttcagaggctagacgttcgaaaaagagaagcaccccatcagatttggggaaggactcgactttcgttaatactccccctctaccaaattagtagtcgttttagatcatattttttatgtctatattaaaaataaatgataataaatttagacacatatacaaaac

SEQ ID NO: 146045 - DNA, 702 bp, Zea Mays
tacgcaccaaaaggacgaaagaaaagatcaaaggtcgtcccagaacagatcagagcctcaagtaaagcgagggcctgtttcggatgcatggccagcccaggttgcttgggatggctaatcaggctgtgatcattcttttggctgcaaaagtaacggaacgcaacgcagtctgtgctgtgttcattgtcttccaaccggccagcgtgctgctccactctgctttcatgtttgcctccattaagagcgactgaatatctgtataagttgcgcgtacatccagctgcctggagaggaaagcgaagcctacactaacgagtaagtctcacgtgtttgcactttgcaggatgtaattggatacctttatctggaggacgcccattggatgtctcgtttggcatgtgaatgtggggtttaaagcttcaaaacttgtaccagatctcatgaaaaatattgcagagtttagatatataataataataaagtacaaaagtcgaacaaacatgcctctttttgcaaatgaaaatgcggttggtagcctgatctcaactactgccacaggcactaccaaaagccagaccagaccagacagagttgttcatagtatagaccaaagtagtggtgcttgggtgcaaactcttttcttccagaaaatgcattgtgtatagcgacagttggattgagcaaaggcttagctctcagtcc

SEQ ID NO: 146046 - DNA, 398 bp, Zea Mays
ttgggcgcagctagatgcgtcgtctggcatgattgcttgcgatgagcaccttcaggtttctgaatttctttgtcttcaccaaggttctacccaatcgcaacagccatcgactcagtatgggcagagtcggatgattccccagccagcattctgagaacagcgttcatctcagcttcgtcagtactggtcggcatctcgaactaggtctacctctctgcctcaggaagaccctggaatggagcgacgaaagccttgatgtcatctaatgagggtcgcactctatgacccggactgccatctcaaacaggagggttggaaatgaaatcagaaaagggactctgtggaggtagattctaggcagaataagacaaggggcaccagcatttgaaaccctgccc

SEQ ID NO: 146047 - DNA, 293 bp, Zea Mays
ttcaggcaagtcattgcgctgaattatccctgcaggcggcatcttttgcaggagcaatagaggaagatggacggcttgcggcgtcaggcgcggccatgacatcagtgatgatatcatcatgcaccatgacaccgggtctcctcatcaagatccgcccagcgcgaacgtgcttatccatggccttgtcgcgctgagccttcaagatgacacagtcatcctccaaggccttgacagtgagacgggcggcctccagctcctgcatgacaagcttcttggaagcacgcagctccttg

SEQ ID NO: 146048 - DNA, 499 bp, Zea Mays
ataaaagcaagagaaataaaaattacattgagtgtgtatgaaagtttcttgattgagcccctatgttgctttagtaaatgtgtctcgactctggtacagtgttgttgactgtccgagcttcagactcttcgcgtgtgtcgcgctgttgttgaacttggcggtgtccttctggccattgattatgagatgaagttggagccatgagtggtggtggtggtggcagggcccatgtagctagggagtggcttgacgaagctactgatattgtgggttgttgattgcccacatatgaagcggtatgcaggacctgctttggctaattctatcatgcttcagcttcttctatttccttgttgtatgccccttatcttctccacagaatagacaaaacaaccttcttggttgcgagctgaatcttcctccgaagcttctacctcctctgcctcttggggctagtggcctgaaggaactctactgtgttcctaatgattgagagttg

SEQ ID NO: 146049 - DNA, 273 bp, Zea Mays
ctccagcacatcaagtacactagccatcctttttctcttaggggtcgctgctagacctttttgtgtctttggcacctccactcctgccgaagggcttagaatttctaatgttttcgtcccttcaattctaggatcttcaattttgtcagtcttcggcattgcagccggctcttcaatcctctgtgtaagagcaggtcctttggcttcaatagctgaagaagtctcaccgccaaattcaggcactgtggccggttcaatgtagcgcggtcggtg

SEQ ID NO: 146050 - DNA, 335 bp, Zea Mays
gctggaatatgtaaatgtggcagtgtcatatgggcatagattcgaatatgttttttggtagtgtacatggttggatctcttcgctgctgctgctatgctctgtactgcctaggtctgattaatatgactagcttatatgcagatatgttgtcaaggtgttaatacagtttgcactgtttcttcattaggtacttttagttgaagggtggttgatgtatattatgttctacacgggtagtgggacctgtctttattacattgaaggctcataaaccattttatcttgtctgaatagctattgagttttaaccactgtgttagattgagtgcaccat

SEQ ID NO: 146051 - DNA, 557 bp, Zea Mays
ttggatccaaggttgtccctggttctgcagtaatttcagttagttttcaaccccccagaaggtttgccaccatcccgtgcttgtgatcataccattccacagctagtgtttatccatccttaccggtatgcacctgctatcaaggatgagatcgaagcccaggttatggagatgctccagtcagggataattcagcccagtaccagtccattttcaagcccagtgttgatggttcgcaaaaaggatcagacctagcgtttttgcgttgactttcgccacctcaatgctctcacaatcaaacggaaatacccagtcacaatcattgatgagtttttggacgagctgcgcggggctagctagttctccagtcttgatctgcgagctgggttccaccagatattactcaaggagggtgaagagttcaaaacagcctttcagacacatagtggtcactacgaattctgtgttatggcttttgagttgacaggcgcaccagcaactttccagagtgcaatgaacaacaccttgttgccggttttacgcaagtttgctctagt

SEQ ID NO: 146052 - DNA, 453 bp, Zea Mays
aagatttcctggagagaggcgtttccagagtatgcggcgtcatataggaaacacgagaagtcgaaaaggacccttgaagagactattgatgaaagggtacaaaaggttattaatgacgtgatgaagaaaatgaagaaaacagaatgcatatcatgtgaactcaagccaggccacatgagtccacctctagtccctagcagcgtaggatctgtgcaagacttcgtatcgggcaccaagtaacctgtagacgatattgttgaggacaagccttgctttcttcatattccaatcaatcgatctgggacaaaaacaaaacaagctgctactggtttggtaaaaccaggacttgttaactaccaggataatcctgtcccgccacactatgctgtggtccaagttctagagatcacagacagtggttgtgaagattgggagatagactttccagttgag

SEQ ID NO: 146053 - DNA, 1015 bp, Zea Mays
tgactctgggagttcggttgagtggacgaaagagtcttcggatgaggacttggattactttgcggccttggatgtggcagcggcggaggcttctccgcgtgttgcggatgctgaagttgtgcctagtccgagtgctgggcgtaggcggcgaagggcggtggcgaagcgtagagtgagtgaggtggatggtggtcggcttcgtgtgggcagggctggcaagcaggaattgttgtcctcgccggctggggcgagtgtaggtgagggggagttgcgaagtctatttgagggtgaggagcttaggataatgctatttaactataaggagatgggaatcattctgaaggttgaaccgatgtaaggtgtgatgccctcgctgtaagtgtgttactatagtttgtatgatgaggctgtgtgccttcgcgtatccggctatgtctataggggcgttgcgcgcttagtctggcgcatttattatgttggtctggctgcgcctgtagttggtctgtgcgcagatagtttcttggtgtagatttgtgcttggatgtaatgcgcttgcgttttggcgcgcttgttgaattagtccggctgcaccctcaggcgacttttgcacggatagtcttttgaggaagacttcgattttgcgcacttgttgtgctagtccggctgcacccttaggcgacttttgcacggatagtcttttgaagaagacttcgattttgcgcacttgttgtgctagtccggttgcacccttaggcgacttttgcacggatagtcttttggaaaagacttcgattttgcgcacttgttgtgctagtccggctgcacccttaggcaacttttgcgcggagtgtcgcacgcgagggtagctagcgctgcccctcgcggtgactttgtattggtcgaatgtcgaagaccgtcgacgcggtcttttttcgacgtagatttttgcgggggatttttcgcttgtatattacatggctccgcctcgttaaaaacctcaccccccaggaggaaa

SEQ ID NO: 146054 - DNA, 635 bp, Zea Mays
gacactttgagactgcttcaacattcgataacatgaccgaactgagaacacaccattttcctcatgcgcccaccccatcacatcagcatccatccgagtgccaggcctcagcttcagaatttcctcagcatccatagcaatgaaagacttcctcaccaaatcaacattccagcatctagtacctggcagaaaaagttcgtccacagattgcacttggactccttcaagatggacagtgggcttcaactgcctaagacttggaatccagttgtcctcccaaatacttattgaggatccagggcctactcttttaatcaaaccctgccataaggcttcacgtcccaacaacaccgccttccagatttctgaactttgcttctttttatttgctttcaaaaattcattattggggtaatatttccctttaatgatcctcgcacaaagagaattaggccttgtcattagtctccatccctgctttgcaagcatcgccttgttaaacagaggtaagtctctaaagcccatgcccccacttattttaggcattgtcagcttggaccagctttgccaatgaattttgtgactgtctactgcacttccccaccaaaaatttgaaatataagtctgcatctttt

SEQ ID NO: 146055 - DNA, 283 bp, Zea Mays
cacatatggccacttcaacgctgggggctggatattgtcggaccattacctacggctcaagggaacctgaaattcaccttcatcgtcgtcgagtacttcaccaagtggatcgaggccagggcagtatccacaataacgtcgaagaccgcccaaaagttcttctggcaaaacattgtttgccgattcagagtcccgtctgagctcacagtcgacaacgacaaacagtttgacaaccaggacttcagggatttctgcctctccatcggcaccaagcctgccttcg

SEQ ID NO: 146056 - DNA, 428 bp, Zea Mays
ctgcgccgcgggccatccatggatctgccttcctaagctctccgctacacgaacttccagggagcctcttcgtacgaaggcaagagctcagatgcagatgcagatgcagtggagaagatgcagatgcagtggaaggcgaaggaaacagcgcagatgcagtggggaccagcagcactcaaggacgaggcagcgcaggtgtgtttgggggaagagagggcagtggttaccggtgagaagccaacggggagagttgtcgtcgtcgctgcgctgtgtcgccaagccgtcacttcgcgccgccacgccgtcacttggcggcggcgtctcctcgcctcgttcgtcgtcagcgttgcccagtgcctgttcctccgagattggatccgcagggtagcacacccggattcctaccggaccacggtgttcagaaaaac

SEQ ID NO: 146057 - DNA, 433 bp, Zea Mays
tcataaccaaattcaaattcatgtttgaatttaaaaaggcaataaagaggaaaataaaatcaggaaaaggaaataaaaaaaagagaaagactggcggcctcgacctgggccgattctcctccccctcggcccattccacttttgcctgctgcccatcattcccgcgtcttcctctgtgtctgcggtatatggcgcatgggccccgatcgcctgcctctgatgcgcgccatagactctaccgccacgagggacccgggtgtcagctcgcaatgaaacagactcctgagtctcggttgcgcctatagtcaccgccttgtggacccacggggtcaggccgcgttccctgcgccattgccgcaaccttcgcgggactggtagatttccctggcgccgaatcctaacagaaggactccttagggttcgggtaccgcat

SEQ ID NO: 146058 - DNA, 943 bp, Zea Mays
cgcgcggggaacgaactccggcgaggttatactggcggatttacattatgatcagtgccttcgagctacatacaccagattgaacctccactgatcattttccccaagttaatttcaagattgacgagctaattgggtctggccacggtaaccgtgcggatgaattcaagaactacgcgttcccggtgatgggtggtcacacagttcaaattgatgacttgataagcatcacgaagctatgcaagtgcttaaacaagaaggcaggggacgggggctgaccggagaggggctggccgcggtgaggtgttcttgcggggtgttcgacccgatttgggggaagtcccaaattcgcgttctccggtgaacgattgaggacaatattcggtggctgggtgggtgattaggttacacagctaggggagggctcaatttataggcggcttagacggtggccgtgaattttgcggaggacgcgcggcggccggagaggaggaagaagcactggcttcgcgggtacgtggccaacgacgtggcagtaactccggtgaaccatggagggttcagagaaggtcatggcgacgctgtaaaacggctaggccacgcggcgcacggtcgggaagcggcggtcgacggcgagcctatcgggtttccaccgcggcaactctgtgcggtggtcgggtttacttttccggccggacttatccacggcaacgcgcaccaggtgttatccacttaccccaagctcaagttggaccggcggcggcacgaatcgcggcggaaatcggtcgccggcggtaagagcagtcgcactggcgtcctgatccattccagtctactgtaccatggcaagccttatgcagagcacctgaccgagcgagttgagagccatttttctctcaattttccatagtgacacaggttaagctctgcagcaaacttgtag

SEQ ID NO: 146059 - DNA, 300 bp, Zea Mays
gctgtcgcaggatttcgttctgttgagccattaattcctgtatcgttggagctgggggcggtggtgggggaacctgctcgttttgccctacggcggggtctagctgccatctgaaaaataggaatttgtcgatgtcacttaagcccaaagatttcaagtagtgacttcatatcatgaggagatagcaacacaaaattatatcgaaccaaaagaagataatcattcattcatcttgcattgctcatacaggtttttccgggttacaacatattaggagatccaccctatatcctagttcaa

SEQ ID NO: 146060 - DNA, 609 bp, Zea Mays
tacagtgcctgaactggatcagaccgccagcgcggcagactcaccgccggcgaccgatttccgctccgattcgtgccgccgccggtccaacttgtgctcggggtaagtggataacacctggtgtacgtcgccggggataaactccggccgataaacaattccggtcgccgtaccctatttatcgcggtggaatccgatagctcgccggtgaaccaccgcctcccggccttgcgccgcgtgtctaaccctttccaccgcatcaccacaacctgctctcgctctccgttgatcaccagagcgattgctatggcgttggacaccaagccattgcgccagtgacctctccctcctccgaccgccgcgcgtcgtcgcccaaattcgcggccaccgctcgcgggctctataaattgaccgcgccctcagctccgtcatgtaatcaagcagcttctgcacctacctgtaccccaaaccctccaccagcgagctctaattccggatttcccctaattcgggtttccgccaccgtgaaacgaacttcaccgcggccagccctttcccggtcagttcatactcctctctccctcttttaagctttctcttacgactacg

SEQ ID NO: 146061 - DNA, 727 bp, Zea Mays
ggaggatggggcggtgccgaactcttcctgtgcggcgaggggacggtgatggaggggacggcggtgaagggacggcggagcgtcgtacgtggggaagacgacgcggctgaccggtggggccggtctgccagagagggaaaacgcgcgagcgagaggggctggcgggtggggctggcgtgtcagcgagagcgggtgaggggagcgcgcgggcggcttcgcgcgtgagcaggccggctaatgagctgagggagaggaatgcgcgggcgcgcgagaggggaggcggctgcgccatgggcctgaattggcccagcagagggggggaattcttttcctttttctttttaccttctcaactcatttcttatttgtttctttttctttttgcacaaaattatttggtggatattctaggtgttggaaaataaaatctaagtgaggtgcttgtgatcaaacaaagtgtatgcatatgatgaaagaaaatctaagggagtttttggaattagaggatgaaaagaggggaggggtagattagggtttcaaacctaggttaggattttgggatgttacaaacctaccccacttaaaggaatctcgccctcgagattcagacggggctcgagagaagataagggtattccttcctcagagattcctcactttcccaggtggcttcctcttctccatctctgctccactaaaccttacagagtctcacttccgagttgcg

SEQ ID NO: 146062 - DNA, 961 bp, Zea Mays
agtcgggacaacctcacaacaagcacagcacgcggtatcatcatagtttacatacacacaacgaggggcccgtcggccacattacataaataatacaaatcacttcttgttgctctgcctctctattgcgagccaggggagggcagcgttttcactcactaccgcaacacgagagcgagggcagcagacatgctacatcggctcagccttcagaataaggtctgcctctcgaaagttaaacaacatcatcttcagctcctcgccctcaaaaagattccgcaaatccccctccccaatacacgtcccggacatcgaggatagcaaatctcgttggccgtcccgatccagtcgaagacgggatcgttccatccccatccgttaacgcatcccacttcgtgacatctcaacaacattgtgcttcgacaccacctttcaccggcagtgctcttcggctatcgccccagccggggagcagacccttcgcgcacttcaggctgcggcaaggactccgccgcgaccacatccaacgcagcaaaataatctaaatcttcatcagaagactcctcaatccacgaaaacggactcccaaaatcacccccgtctgatgaccaagactgtgtttcagaaccagacgaatttccattaacaggcgctgcatttgcaaatgccacaaaattaatatcaacatcagtaggggttgcttgcgcaggcctagacgtcaaaatctgtgcagtaaccgactttcagtatcacaaaaataaaaccataaacccaacgcctctaacacgacccctccacttgcgaaggagtagacaccgatgttgggtcttcgctagccggcgcagccgctgctgcagggtctccgctagccggcccagccgccgttgtagggtctccgccagccgacacagtcgccgctgcaaggtctccaccaaagacggcttatggcaccggttgttcc

SEQ ID NO: 146063 - DNA, 299 bp, Zea Mays
caaaaagatggttgaactcgaatcatatcatgacatacgatacacagtcggcgtcgaccatcaacgtgcgtaagtcaatgatcggtaccaaccagctagtatcgatgccaatcatttcagcccccatttgggagggctctcccacagctccgtctccagctcctacccagagccctcccaaacgcatctcagtgaaacggctctcatcagagagtaggagccaaaacagcccatggagccggagcccaaatttctggctccagactgctcccacacgcagccctctcccacccgcagcc

SEQ ID NO: 146064 - DNA, 453 bp, Zea Mays
gtttattatagaggtcacgagctcataaattcatcgtagtttcatcaaacataagttcagtctgcattatattttacgaactgatgaggtgcttcaggatgcattatgcacgatcgtgactcaactttgaaaggatccaaatggctgaaaattgacgatggtagaatagaatcagctgtaaacaatcgtatttctagagctgtctgcaagcacaatccatgccatctgtagatttgtctgaatcatggtggaagtcagagtccaggaaccagtccagagattgaccccgactagtctccttaatccgttgcaggccctttttgactgtatcaacccggatacagttgacaactttggctggtagaagaagagacggagcagcctcaagttgttcttcttgaggacactagcctgcgtgccggttaaacacaagatctgcttgttgcgcagtgc

SEQ ID NO: 146065 - DNA, 613 bp, Zea Mays
aagatatagaggtgaaaaggataaaggtgataatgatgaaaagcataaccatggacagagttaaggcaagactgacgatgtggagaaaacaagcaatggtaagataggtaagattccaacaaaatggttgaagtatccgaaattattaccgagggaagttataaagaaatgatgagatcatcaaggatgtgcgaaatagaatggacgttcatggatcaccaagaaataagggtggtcaaaagcatgttaaccggaatgtcttaaacaagcattgagatataaaggtaagcatgtataaaaataatagtatgcaagattcaaatggtacgagcgtaccaagaccaagagaatagaaaaagccaacaggtgacggcttcacaacggaataggaaggggtctcaaaagacgggaaggtcatgaaaatataaactggaatgtttaaataggcaacaaagtttttcagagttaagtatttgaattaaggggtatggaagaatctaaaagatgtagcatgtcaataccaatgtaataaatattgtcaatggttgggaatttaacgatagaaaaggaaagaatcccgaaagacaagaaagtcatggtcaggggcacctac

SEQ ID NO: 146066 - DNA, 390 bp, Zea Mays
cgcgctgcgaaggttgacgtctcttgcgtcgaaggttaatggtacgtgagaccactttgtctaaacgacgggtcctgtgactgcgacatgattgaccctttggcagtgatcccttttttgttgtttgttctcgaagtcggagctggaccctccagtgatcatgtgaatcactcccttgaagggtgggtatgtgaagtcttcttgctttggtggtgggggtggtaggtgttggtttggatgatgtggcggtggaggtggcagcgctaacatttcttggtgttgaagacactattgttgtggaaagagattggggggttttgctgctgggggtaataggggtgttcgttttgatattgatgatggttgtactgttggggttgataggtatga

SEQ ID NO: 146067 - DNA, 433 bp, Zea Mays
catcagcacaaatatccatcattccaccatctgccagctccgacaatagatcttctgggaccatgtcttcaagagtctgaccaaagtttgccagagacaattcttgcagaccaatgagggcagacaaagccggagaaggaacaccactactttccccgctgactatgtagcgtcggctgttcttccgaactagagagatttcatcctcctcttcctcatcttcatcaacaatgtggacggtacacccattgggatcagcttcagccggatcgcacccattggggtcagcatcatctaggtcacacccattgggttcagcatcagtcgggtaacacccattgggatcagcttcagcaaaaactggcacgggcacttcttcagcagcaggagcagaaggaccagcatcctgatccaagcttgacactcggtgaag

SEQ ID NO: 146068 - DNA, 372 bp, Zea Mays
gccaaccagcaccctgctggtgaggcccctcgccgtcaggagtatccccccagggccgcggaaacggaactcgtggtcggggccggggacgtgcgcagcagccgcgcagattttactacttgttccacggcgaagactgcgtgcaccctacaagagattgcccagagacgaaggccaccagagacaggatggcacgggcgcaaccagccgacaaccctagagttgtcgcgcacacatatcaacaaccccctcagccatacatccacggccccgctccgcatccaccgcaccacgcataccaacaccaccaggaggtacaaatcgtacctcccccacccccacctccacacccgcaatagcaaaacatccacc

SEQ ID NO: 146069 - DNA, 767 bp, Zea Mays
gactgcataaacacgcgatctactatgaagatgataacataaattattgacaacatatttaattactcaaagcgcgcagcatcacaattttttatcagattctagcactatcagtgcactgaccatttttgtatgttgttttcgcattttgtagcttgacatatgttaaatattttgagaattttcacctagacgatgtagaagcaaatgggttatgtggatttgagtatataattagtggcaacaaagagatatatggttgttttgctgatggccagatggcgagtcaagatcacatagacttttatgctatatgccttgattataatgacaagcttttcaggatgaaagctcacggatacagaatattcctacccacagcactacctgtcagtatttttaagttgtgttggcatttttaacactcttttttatatgtttttattcacatggaattttacatgcgaaccttatgtccgtttttcgtcacagttactgctgacagctcctagagaggaagagtttgatattgggatggcattgaaatatgtatgaatgttttgttcaaaagagtagttgttgtgtgcatcagttgtaagtatcttttttgaaaaacagttttttctcgtatgtttagttttctgtattgtaatttgcagttgtggtttgtttttattattgcgttttctgttttttatcatcttacgcaggtgtttgttcccatcgtgtatcggccacactgagtggtatattgcatcaacatggtt

SEQ ID NO: 146070 - DNA, 388 bp, Zea Mays
caaacatgtagctaatgatgctggaaccaagtaaaaccaaatagaataagggaaggagggggcgtgtaagggaggtgtgcaaaaggtggagaaggtgtaccaaaaccctggctggaaaaagtggcgtccaagatggcttcccaaaatgtctgggcacaccaaatccctaaacgaggaaacatggtttgctttccaaaatcgaatggcctgaattggaaagcttgggcgcaccaaatatggaggtgccgcttaccaaaaataaaaagtgttggccaaggaaatgggcgcacccgaatccctgaataaggaaaggagggggcgtgtaaggtaaagtgggttgcttgccaaaaacaaagatggtaggcgcccaaatctgattgcaggttcg

SEQ ID NO: 146071 - DNA, 436 bp, Zea Mays
tcagcctggaatctgcctccttccaaggccttcatcagttttgtgtcaaatcctcctactagtgatagcggtttgggccatagagtgcgaccttttcccgaagaggttgaggctttggttgcttcacttggcaaaatccccgacgacaagaggcaggttcatttcgaggtgcctttgaatccgagtgacgcagaaataagtgtcatgctggacatgttggctgaagattcctttgatgcagcccctgctgaaacactggttgtagcacccatcaccgagtctggcaaagctttagatactcagaggtctgatagtattcgcccgaagcgtcctcgccgaaccaatcatccaacttctcctgctgaggggaagaaaaagaaaaagagacgtcttcgtcgagtgtcatgcttgaatcaggatgccagcccttctgctc

SEQ ID NO: 146072 - DNA, 554 bp, Zea Mays
tcggtgtagcgaaagtcgacgacggggcagaggaggctccgaggaggatttcgacgagctgcttcgccggcggcgggactgaaatcggcacggaggcggctgtgcgcggctagacgcgagaagcacgggagagggtgaaaggaggctgggaaggagtttggcgagagcaggcacgcgatttatatccggggaggaggaacgggcgctgggatggcactaatggagaagaaactgtcgccattaacggggaagaaacggatgactctaatggacagggatatggacagtaaagaagaggagaggagagggcgcgacagttggggaggagaacgggacagacgcggtgctgatggtctccactacgggttggcggccgtgggaggcgaggcgacatccgttggtggcttcaactgacggcggcgacaattcagtgcgcagcaacgaacgggagaagaggcaggtagaagagatacgatgaatggggttgggcccacctggaagggagagaggtgagggagagagcatatacgggcgtgggattcggttttttttgt

SEQ ID NO: 146073 - DNA, 407 bp, Zea Mays
tagtgacagtggcttgggtcttagagtgcgaccctctcccgaagaagtcgaggctctggttgcttcacttggtgatctccccaatgatgagaggcaagttcactttgagatgcctagaaacccaagcgatgcagagataagtgctatgctggacatgttggctgaggattcttatgactccgtccctgctgaaaccatagctgttgcaactatcccagagcccaaaaaaaccttaaatgctaaaaaatctgatggtgctcgcccaaaacgccttcgcccggccagtcatccaactgctcctactgaggggaagaagaagaaaaagaggaggcttcgacgagtgtcatgtttgaatcaggatgcggcccttctgttcctgctgctgaagaagtaccagtggaactttt

SEQ ID NO: 146074 - DNA, 1470 bp, Zea Mays
atttttctgtcacaaccaaagccaatttagacattacctttgatttagtttaaaccaatcaaaacaaatgaatttgaatcccaaacttatgcttcgggcacttgtagaatatctttccttgattttcatgctcctcattcctaaccttgagctacaaaacaatgtgtcgaccgcaatcaaggcacaagacaagaggaatagaaggattaccctagcgcttggatgaccctgaccagctcgagctgccttccatggcgtcagggacaagggggaaggaggggatgtggccgactctagcgagaatggctccagacacaaggagggcggtgacagtgtaggcaccgacaacatcggcggtggactgagctaagacctaaatcaaaaggcacctaaaatgttggttcacatgtaatatgctcgtttgtccttaagtgagacctaaacaacgattaagggcttaagagacatactttaaaagtttgtggatagggatgacacagggcgacaagtttaaggaccggaaatatatttctcttttggttccatatcagcaaagctatcagacttggtcctattctgacaatggctgatgttgtggtttctataattccaaatttctcatgtcagcgtgtatacgtatcctccatccatctatttgttctattctacatggtgatagaggaggcatgcgagggattggggtttggaaactggcgatactagactagatttttggaatcaacgagcgatagaataaaggggaccgagaagaagaattgaacgaggagatagtctacgatggtcagaatcaacgacaaatcgattggtcgatgaagatggagaggaggaaggaaaaaatggaacatccgttcagaggaagatgggatgtgttatgctatctccagcagctgtcgcaaacggcctcgcgtacacttttttcgtgacagcattcaactattcacctttccatcagagtgtgcatgaggacaaaagacacgctcgagctccacgtgcctcccataacctaaatccatggtttctctcctccgcaggtctataaacgcatccatatgtgcgctctactggaaacactctcacattggcattgtaactacacaaaatacacatccgcatacggggaccgctgaaaatagcttgccttagtccgtgcccaacagatcgtgtatatggctgtacaaaacattattttgcactgaatgtactatttatagagtggagattgaaataggaggtgagaccagcagagcacgtatgaggacaaaagacacgttcgagctccccatatctcatataatctaaatccacggtttctctctcctctgcaggtctataaacacatccatatgcgtgttccactgaaaacactcgaacgtttgcacgctcacaatgacattgtaaccacacaaaatacgcatgcatacaaggaccgctgaagatagtttgcctttc

SEQ ID NO: 146075 - DNA, 345 bp, Zea Mays
ccaacacttggtaaaacactttttttacctagttcatgctagatggcttgcatatttcgtccaagtcgatttaccaggtttgaggagcagttgtgcaacagagatgtcctaatcatcctacacaaggtgtcgcatgttgttgtattttacaaacttcataggctaaccatcaaaacgcatggctcctttcaataagcaataggccaacaagcgaggagacctcctattaagttagaaaaaaaccatgaaatcacatattatcagtgagcagtaaacctaagttattaataaggtgtttggtttgaggaatgggtttgtgcatcatcttcttatttctcacttttt

SEQ ID NO: 146076 - DNA, 668 bp, Zea Mays
attgactttagcacttgttactgatttcgtatcaataacacgagtcaaaggacataattcttctatgatgagaaagaagacaaggaacaatatagcgacatggggctctccttaccttgtagtagacctttccgataggccacaacgacgtatatgcccttgcagtgtgatctctctcaagggtatgcccttgagattgtgtataatccggcgacgcgatcttcctcaagggtatgcccttgaggtctttggaaccagtttctctctaaggtatgccttagagagaggtgattgctgaagaatttgttgttgatgaaacgctacagcaggttgatggagctcttctcgcgatgtgacgatgcccttttttttagctggagaacgcagctgcctgagcggaaacgatgtgagcagcagactagtctatcagcctgacgtcgattcctgatctcagcagtctagcggtcctttttctgtctgccttcctgtagcctgacagtgacatcttatttataggcgcaggcgtgctgcagaggtcgtggccgtgcagtgcagttggcgtgcggcgtgcacggagacgtgcagttaaatcgcggtcgtgtcttcgtgacttgagcggaagaaaggaatatataaatttaaattttatctggtgtgcatgcggagtg

SEQ ID NO: 146077 - DNA, 559 bp, Zea Mays
atttgatgtgttagcataacaaattcacataccacatacctgttagcataactctcggtacctcgcatcccatacatgttttgaatgaattgaaagctcattcaaaagtctgaactgtttcatctcccaacaacacaaatccaaacactgtacactgcagatggatgttagctccaataaacatgcccagtggtttatcatatatattggtcttgtgtgttgtatcaaaggtcacagcatcaccataatctgcatattccccctgcatacttgcgtgtgaccaaaaaatactcactattttcccatctttgtctagctgaaaatcacaaaaaattgtggattctgtttcttgcattccgtaaagaaagacagaagtttggctacatcatttgcgcagttttctcgtctcattgctgccctcttacaattgttgtacaaaaaatgaacatgcaaacatttactatagtaatatctatggcactcaatatatacatagtcaacacaaaagattccttacatgtttttcagatcttgagcagttaccggtacgttctctggc

SEQ ID NO: 146078 - DNA, 339 bp, Zea Mays
gtatgagcaaaaggcgctgggacgaagttggcttgatttcacattttgacacgagggtggtcaatgattaattcgacataatttaagctcatgttaggcaagcctgagggtgattttaaggaatacgtacaacaagctggtgctcgctggggtcagtgtgcttgttgtctagtatgctaatagtggttagcacgtctctgttatattggtggaagctgcacttccttccaccactcaatgttttgccatggcacctaacgatgtcatacagatctatttgcagcaaccactagatttcagatatgagcatttgcagacaatgcaccccccctgcactcc

SEQ ID NO: 146079 - DNA, 469 bp, Zea Mays
atcgtaggtcagcagggagtagcctagccatggcgcgccaccacagcatcacttttggttgccagcgtccatccgggaggaggaagacacgttctgggcgtcaatctgaaaatgtgtggctgcgattagagctaagataacccttcgatgcttgtgatcctaaccgttggtaggagatccagtggtggatattcgatcatcgtggcgggaattgcggaccgtacgatttagatccaacggccatcacgcgctcactggttggctcagctaggtgatttgatctcggtcgtggagatctgatcgggcggctgagatctgtggataccccttcgatcggttgagttaacaaataggtccctcaggttttaggatataaacctgccatccaccacggggtagatctgtgtcttgggacttttcgcgcattaacccctggactttcctgtaattgatgcacagtctagagaac

SEQ ID NO: 146080 - DNA, 748 bp, Zea Mays
ccagcttctaccatgctttagagcacaagctcttagcatatcttccaacacttggtttgtcctttctgtttgcccatccgtttgcgggtgatacgctgaactaaaatttagcttggtatccatggactcatgaagtcttttccaaaagcgcgaggtaaattgggttcctcgatctgatacgatcttctttggtactccatgcagacaaacaatcctcgacatgtataactctgctaactgggctcctgagtaagttgtcttcacaggtataaaatgtgccactttggttaacctgtctactatgacccatattgaatcatagccatctcgagtacggggtagtccaactatgaaatccatactgatttcttcccatttccattctggtaccttgagaggttgcagcaatcctgctggtctttggtgttcagctttaactcgctgacacacgtcacataatgcaacatgagtagcaacatctcttttcaaaccgtaccaccaatacttttccttaagatcctggtacatctttgtacttccagggtgaatagagtaagctgaatcatgagcttctctcaaaataagttggcgtaagtgctcgatttccggtacacagattctcttcttaaaccatattgtgccttgttcatcttccgtgaaatctggggctttacccaaactaatcaaagatttaatttccttaatcttctcatcggactcttgtcctttacgaatctcttcttccaaa

SEQ ID NO: 146081 - DNA, 359 bp, Zea Mays
cctcttcctactaactaacgggcccaacgatcatggactctttcctcatcgggcgggtcccagggaccgaggatcatctccccgacagtagcccctgagccctcgatgggagagtgcctcccttcgggggatgatgaagggtcgggcgatgcctttttgtctcggcgtgtacttccatagtttcacatgcatggggtcgaaccgtcacttcgtttcgtacgcggtgtttggcttgtgtcctgtttcgtcgtgccttgtgccctcttatgaataatcgctccctcgagcgattttgttgtgccttgcctttacttttatcgtgatgattcgtctatggtcccttatggactcaggcaagc

SEQ ID NO: 146082 - DNA, 560 bp, Zea Mays
tgttcgtacccatacatgactgatggttatagttcatctggaggtccttgctatgcataagggtataggttttggtctcatcgggcaggatagttgtaactggagttgatggagtttcgactttcatcatcaatagggaggcaaatcgaatgacgctgaccgcttcttgtctcttgttgtgaatgcggtgctccttgattggaatcttgtgtgcatgggtgaactaagtctctccggtgaatctccaatcctctataccactccctactatatgaatacccctagcaccatatgttgcaacatcacctccaccttccctgtggctaggatcattgtcgtctgcacaaccaccttcaccagggttagttgtgctttcatcagtcccaacctcctcctcctcctcttcttcttcgctttcatcgggtctagcattttgcctacaacaatgaaacattgaactatcaactttgttgtagaagtaaaatataatgtagatatgagataacaactatgaactaccatgacagaactaataactacattcaaaataccaactaaca

SEQ ID NO: 146083 - DNA, 601 bp, Zea Mays
agtttgttcacgttatgaggcaacatggcaggttacattgctaaagagattgcacctgatttaaaagtcataacagaataacaaaaaccactgaagttatattgtgataatgaatgggcgaaatttttactccaacaataagccaagtgatgttgtcaaacacattgatattaagtattacattgtaaagaaggtagtctaagatcaaacaattgaacttgggcatataaagaaaaatcagatgcatgtggatccatttactaaagggcttcccccccccaacgagttcaaaaaacacatagttgacatgggtttaatggggtgcctatgattgtagattatgggatcatcaatgcaaccatccccttaagaacaaaatttctagtttgagatagaaaggtgtattatggtctataagtcgagagactgagtgacatataagtggctgatttgacatgttgctcttggtgtgttaatctattgaggattagagattatatgctaagagattaagcaattaaaaatgaagttctaagtacaagcgagtaagcatgagatcaagagagagaatgttggattgatctcatccagactcgatgag

SEQ ID NO: 146084 - DNA, 291 bp, Zea Mays
ggtaacaattgaatctcaagtgcatattattttcaattcttacctcctttatgacttgtgtagccactaaggaagagggagcacttgagggtatacatcaattgttgattatgaagtaaaagtccaattggaagaaaaatgaatcttatcatatggtcaacaatccaaaactatgtgatgtactctttctagttaatttggatttgattcttttatattagaccctcaccataatatggcttaaattagaccttggacttcatttaataaccatgcatatctaaatctatg

SEQ ID NO: 146085 - DNA, 534 bp, Zea Mays
ctcactgacttgcggcccccacgcctggtggtatgcccagtcatgtgtgtggttcttcgttacctctacggtagtaaaaaaggtttttaccaccatgacggttctcgggagagcactcattgcttgctcggtggttcagacttcgcccttctttcacccgcgcacgtagcttccactacaactaactggcggccccaggcccacatgtcatggtcaaggtcgcttgcaactagcgtgggtgcagctcatcgtttcgtgcgacgcgtcaggggcgcacgggcaagtccacctaaataagggtttgtcctgcatgctgcggttaccttttggcatttgcttcctctcccaaatagttgttcccctttgccttcatgcatccttgtcccttattagccgccaccaccaccatggcttccctcggtcatcctcgtcgctaccagtgccgagaggagctcaacgtggtgctcctattgctcgggtggactatgtcggaccgtgctaagatgatttgagcaggctccctcccccttggca

SEQ ID NO: 146086 - DNA, 573 bp, Zea Mays
ccggagatgatgcaagatctccatcggaatgctcaagcagtgagcatcatcaagggaagtctaagtgcagaagagtacagaaaagtccaagaacgggaggatgctcgtgagatttggaacatactcaagatgtcacatgaaggtgatcctaaagccaaaagacatcgcattgagtccttggaaagtgagctagcaagatatgactggataaagggtcagtcactacagtcactctttgactgattgatggtgctagtcaacaagatcagggtgcttggaagtgaagactggaatgattcaaaagttaccaggctattcatgagagcttataaggaaaaggacatgggtctggcaagaatgatcagagatcgagatgattatgaggagatgactcctcatcagctgttcgccaaaatccaacaacatgagtctgaagaagctccaactaaggcaaaggattcaaatgccttggttgcaaatgaacaagagtcagtgaagaagtctgcttcaagcaaggatcacaaacacaagaaagttattgagagctccagtgatgatgatagctccagtgat

SEQ ID NO: 146087 - DNA, 418 bp, Zea Mays
cggtagtcagggtatacgaagctgatggcgtcgaaaactctgtttattctcttttttccccaacctccgaaggctgtagatagcgcattatcttctgccttggaataagctccaagcagctcatcacttgtaacttcgatgcattttagccagtcatcgtttggctcatcgaacttatccccatacctgaatgtatacttcagccggaccagttcaccttcactagacttggtgatggtctccttcggcatttcccagctctctacaagcggccatactctgaatgatataagctcttgaattaaatctcttgtaccaataaaaaagcagacagtaccgaacaccttctgacacgcttcggcaacgtcatcaatttcaaccttcggctttcggagaccgaagcggcaccatatggggc

SEQ ID NO: 146088 - DNA, 484 bp, Zea Mays
atttctatgctaactactacttatttgtttcttcaactctgcccactccttttccatttggcttacacgactgtttgtagcccgattttcttctcgaagctctctgttctcctcaagcattgctcgtttctcatcctccgactgtttcagcttctctaacaattcagccttactaacagatggacttcaaagatgtcttgctttcactccaccaccatatccaatgatatggtcctgccgttttgaagggaagcacttgtccataagttgtgcattggaaagagaaggatctgaaaacatttgttcctgaatttgtgcctagaattcaataaacacttaacttagcagctttcattatgatacaatagcaaatagcaaaaacacatattattgtataagcttacatgcttgctggaggactcagaatcaataaaattgtcaccctttgtgtgagtcataaaaaataaggcatccaaagctggtg

SEQ ID NO: 146089 - DNA, 623 bp, Zea Mays
ctggaggccacgaccattgccgcactccatacccaggcagtggctgtcctcaacatccgcaccctcattcccgtcgtcctcgacaccgactcaccaaactacacacaatggcgcggcctcttcctcctcgccgtgggcaagtacgagctgtccgaccatgttctctccgacacctcgctctccaccgatccggcctggactcgcatggagtgcgttgtcctcagctggatcttcggcaccatctcggcaagtctagtccagcttgtcatgtcgcccggcacaactgtccgacgtgcatggctcagcctagaagaccaattcctcggcaacaaagagacccgtgctttgtacctcgacgccgagtttcggaacttcacccaaggcgacctcaacgtctctgactactgtcgccggttgaaggccatggctgatgctcttggtgaccttggtgaacctgtgcaggatcgcactcttgttcttgccgtcttgcgcggtctgaacgagcgttttgctcatctggcgtctctcatccgtcgcgccaagcccttcccgtccttcgtcgaagttcgctcggatcttcttctcgaggaactaaccatgcagaatcgccccgtcgttgctcc

SEQ ID NO: 146090 - DNA, 788 bp, Zea Mays
cgctcaagagattatagagaagatcatgggagaaatagaagatagaaacttctctattcttattgatgaatcacgtgatatttctgttaaagaacaaatggtgttgatattgaggtaaatgtgtttgcaatataagtgatattaggcttattagctatctatattttgttgcatgagtaactaacttttaactttttgtaatgtagatatgtgaacaatgaaggccatgtggtggaacggttccttgccatcaagcatgtcaaggatactacatcagatgctttgaaggaagctcttttggcccttctggatcatcatggcttatctatatccaagattagaggacaaggatatgatggtgcatcaaatatgagaggtgaatttaacggcttgcaaaaaaagattatggatcttagtccacatgcttattatgttcattgttttgcacatcaactacaacttgtggtagtttctgttgctagtagtgcttgttgtcaatccgttcatgacttttttgagtacattcaattaattgtaagcaccacaagctcatcttgcaagagaaggggtgccctaagggaaaaagaacatgagagtattgtagaaaaacttgaaagaggtgaatttattactggaaagggtcttcatcaagcaaccaatcttgctagacccggtgacacaagatggagttcacattatttaaccttgcttcgtttagaaacaatgtgggagtcagtattgcatgttcttgctattgtccatgaagatggtcgtgtaccaacacaagc

SEQ ID NO: 146091 - DNA, 674 bp, Zea Mays
atagcctgatcgggaaaagccaaattacctaaagattggagaagaatgaaggaaaccccaaatcatgagaagccaggtggtggctcgacgaaggaatatcaaccggggcaatctgaagagcatcatcagggatcaactcaacatcaccagcaggaatcagaactctagcatcaggtgcgccggtctctaaggcgacttcctcgtttaaggcatgcgatgttgccatgccatcggaatgtggaggagaagacccaacgtggacatccatggaggtatgagaaggggagcccgctcggacaccctcgggggctgggtcgcagcccacactgcccatcagagctggatcaccaccggcaacaccctcgggggctgggttgcagcttgcgctacccacccgagccagatcattaccggcaacaccctcgggggctgggtaaccgcttgcgccatccttgaggaccgggttctctgcaatagccacctctaaggctgaaggattctcagtcacctctataggaattgaacaaccttgaccagcctcttggctctgaagactgcactccaaggtcgacgaggcacgagacgttgctcgggataactctaatcccacatccggaatgtcagagcaaacgcccatcataccaccatccgttggctcggacagcagatcttca

SEQ ID NO: 146092 - DNA, 274 bp, Zea Mays
gcaaataatgaacttggacagtataaatttatagtggcggtagtcatttggtatgaggtattgtatgctgttaatttggtaagcaaacaaatgcaagcaaaggatatgcttattgatgttgctattgagaaagtgcaagggcttatttctttctttgagggctatagggaaacatggtctcaaattttcctcggacggccctgctgtccctgaacgtacgtaacatatacgtgtgcatgcatgtgcacacgtcggtctgaaccctagcttgccg

SEQ ID NO: 146093 - DNA, 439 bp, Zea Mays
tgagccgagacttcacgaataggtttatatagttgaatatgagtgaagtgtgtgcttggtttgaatttaggcgaagaaaaaggaattagggcactcggctcggaaacgatcgctcaaaacggaaattttggtgaaatttaggcctgggatctcggattggcgtgaaatttggcaagtaggttactggaagtattgtgaaggtgcctgaaaaatttgggttcaattggagcaagtttgggtggtttgggcatttcaccgaacacgtgaagggcgaggaattagggttttagggaaatggccatttgaggtgggaatgccctcccgaaggagctaaaagtttgcagggatacacaaaagagatacttgaactcattccaccaattggattcacaggattttgacaagaattcaaaggaattggaatgggtgcaaaggggtg

SEQ ID NO: 146094 - DNA, 326 bp, Zea Mays
ggccgacaatgataaagatctttccagagactgaaatgggggagaatcccaagaaaggcctcgcacagatatacaaaaatggaaacttgaacaatggaattagggttcagatgtgttaagttcaattcgtagaaatcaaggagaccgcggaaaaaggggaagacaggaagagcaagaccacgaataagaaaaggaacgtaaacgacagattcatgagtatcctctatcggaacggtgacgccgcggcaaatctaccaagagcagagctcttttggaagcaaaaccccaacgtcaataagatgaaggaggtcgggttccaaaatgat

SEQ ID NO: 146095 - DNA, 295 bp, Zea Mays
tggctggttcgggtatgatatttggccatcaatttattcttgcatttgttgacttttcagtttcagtactatatattcgcttactatttgctggaagcgttgacaaacttgacaaccgaacaagcaggtctgcagcggccctgacggcgtcagcactaggaatgtcgggcagcactgtagcacctccgcgacgcggttgtggtccatggccgcgcagctccgggaagtggctcactgtatagaagcgtctgctccccgaatcccttccactcgcctgctcgatgtgattcacaag

SEQ ID NO: 146096 - DNA, 747 bp, Zea Mays
cataactattcaccaattgcttttttaagtcgtcttcatcaattttaaagtagttcattaccaaataacattgttcgacactaaataatacagaataagaaattcattactacataatatcaaataagcacctagactactgagtgcaacggggccatttgtccttgcgaaacgcatcagggttctccttcattgcttcctttgcacgacgtgcacactcaagcttcttctccttctcttccctgcattcagcaacacgcctcatttcctgctagtcttcctattgttgctcggcagcaagctcctctcgtcttttctccatcctctctttgtcctctgcatcccactttttaagattctccaaccacttcttgtctttctgtgagatttttgtgtcaatccactgctcaaaatcacaaagcggtggaggagtctacaaaacatgcaatgattagtaggcaaagaaaacatgcaccacttcgagtcttcaaattgttacatattaaaagactattctcaccattaaattcatctggcgctgaacaatcgttggctcaaatgcatagttagcacacatccaatacctctgtcgataggtgtcatgatcctcagacttttcaaccctgcaaggatcaccacaaaaacatataggccctagaacaccagttagcaaaggcagcgggtcgaaggcagtttcggtcaaaggactcttcctaaatttcgataagatctataacaatcacaaat

SEQ ID NO: 146097 - DNA, 507 bp, Zea Mays
ccggcactgccttcacctccaacctcggtgagtatccctgcgccttcgcttttgctcttccatactggcgcacccaggattagttatagtggtgatgattagttgcggggatttggcgcgggcgtcctaccgccgctgtggtcagccgcggattcgttctcatcaccggttaatgcgccaccctcgagttcgccatgggacccgcatcgcttagcagctgttggcgttgcagctaggccatcgaagcaccagatcggagatagctccggtgatccgctgccgtcgcggcgtgatgggtcgccagtgttcggttggggaggaagagaatcgggtggccgttgattctttaatgaagggctgcgattagatctgtgcaccgattcagcttgggcttttctcgaccgttgatcagccatcatgcgctcaggatttaatcaccagataacgtttaggttggtggggatcctcaccgttggatctgttgccgacgcgtaagattagatcgtg

SEQ ID NO: 146098 - DNA, 505 bp, Zea Mays
accagttatgtttctttagagaatttacgccattgtaaaagtacggactatttttactggatatatgcccctgtttcgcccatcagatggatttctcactccaccagctgccccacgccgtgtagtgaaaaattgtaaaaattgctacaatccagagtcgatttagttttgtttcctggtgtttagattcacaatataaagactaaaagatatgtaacacagagagcagaacttgtacaaagggcctcgggagctatggctgctttatttcaacagtgcttgatgtgtggtgctgctgcaggcctgcaccaagtactactgatcatagcgaaaactcacggtcacacccagctcttagaaatataaaaaaacagctagtgttattatcgggtcaaaagaaaacaatcattaacacataaacagatccatggaccattgtagctgcagtcgggtcaaaacagaacaaacaaacgggtctgatatcaactgggttacaaaacgcggt

SEQ ID NO: 146099 - DNA, 335 bp, Zea Mays
gttttgtttattctcgttggaatgttagcataaataatgctattaggtgttgtgcttgtatcggtagaatcagctctaggcccctgttccaccgcatgtattcacatacttgcctcatcttgtattgcaatttgcactgaacacttagaggtgtcttgctaactttattgaatacgcagttatttctctctttctacatttcccaaatggttagcgtgatcatagatcgcacaccctgtcttctgttccacagttccccatctcaatgaaccattgtcccaagtcttccatctggctccaattagacagcgccaaagctggtgcctcaatccatg

SEQ ID NO: 146100 - DNA, 344 bp, Zea Mays
ggcttatccatccttttatatatatatgcagacatagtcacacacaatgtgtcagtcagtactcagtaatctccaaaaccatatgaatatcactaaaatatctgcaggttcatctggctacggaccctcctaatgaacatgtcacaagcctcatcgatgtcatcctccacgttgaactccagaccttcaacctccctattggtccttatgatctcgatgaccgatggctcctcgggattatcaagggcatgaagctcatcgtgatcgtcctcaccgttgtaatacttgtcatcgtcaaagagggaattgatccagtctgggtagccatgacaataatcttccct

SEQ ID NO: 146101 - DNA, 398 bp, Zea Mays
tcggacccgaaactcttccttgaatgcccaactcgatttagagaagatggctcacgaggtagattttcctaactgcttatgttttacctctttgctttgatacttagtgctcttcttgcctgtaggaggagaggcgaatgcttcttgattctcatgacaatctggatagattgtatcgtgatgctagcaattccctcactatcttggagaggagccatcactttacaatgtcggaactggacaatcacaaggatgagttgagggtttcccagactgaagtgtcatgacttggtaagctactgtcttcgaaagattctgtcatcaaggagttgcgtgcctcaaagaaacttgtcacacaagagttggaagtcgctcgtcacaacatcaaggccttagag

SEQ ID NO: 146102 - DNA, 552 bp, Zea Mays
cgccagctcaagttacgacaggggaaaccaaacccaaaggcagcagcacagctcccaatcatcaggggcacaacaaagttccttcaggccactagctccaagaggcagaggggcagaaacttcagagaaagatatggagatcagcccagaaaacgtttttgtttgttctgcggcgaagacaaagggcataccacaagaacgtgtcaggttacgatccaaaagcagaaagagattgtcgaagcccaagcacggcagaatcagccaaagcaggttctacataccgcttcatggtactctccgtatgtcctagagtatgtaggcaatcaacaacctacgacctcttttgcttcggcaagccattctcaagcttcttgggcccagttgccaccaccaccaccgctagcacctactctgctccacagtcagcagccagaagggcatcaccatgctcagcaacaacgtgattttcagaaggagttcgaagctcgcacggtcaacaacattgtgcccgagtcgtagcacatttactaaaggatatcctaacctgatgta

SEQ ID NO: 146103 - DNA, 326 bp, Zea Mays
ttatgaagtccatgcctatttcttcccacttccattcaggcacggggaggggttgtaataggcctgcaggtttttggtgctcggccttcgtccgttggcaggtgtcacaccgggccacatactgagctatctctttcttcatccctctccaccagtatctggttttgaggtctaggtacatcttggtagttcctaggtggatggagtaggctgagttgtgagcttcctcgagcaggacttctcgtgcctctcctttcggtacacacagacgatttttgaaccaaaggactccttggtcatctgtcctgaggtccgggagttgttcc

SEQ ID NO: 146104 - DNA, 1060 bp, Zea Mays
tagaattgagaaaagaatatagaaaagaaaacagtgaagactcggctgggctgacttctggccggcccactcaacccaccagtccaccgatccctggccggcccatttctcttcccctccccttttctcatacggtgtcacttgcgcgcggcccccacatgtctgtcttctgcacacacctgggcttgcctccgtgacactgtcgggtgggtcccgttgggcggaatcgtccccaacctcgtaaccgaatcaacgaatccaccgcctcctaatccgcgagctcgcggtttccttgcctcagctagggcaacaacctcccactcgcccgcaagctggactcctctgcgctgtatctgaagccgagctcgcgcgcgtaacggacggggcgagagctcgggattccgttgagatccacaaccacccgcggattccgcgctcggcgcggccatccttccccccccacggatctcgccaacggaaatccgaatcccgcttctgccgccatggccgaactccgcgcgggctattacaatcttggccggcgggctacataaatacggccacgttcctcctttgggttatggctcagctagaagatagcctaagcgcgcggcgccattcagagaacagacagagagaagagagagaacagcggggtgattcgccgtcgggtgtcgtgggagctggagcttgctgctcgtccgcaacgcgttgatgtgcagcgtgggtggccggagtagaccaatttctcgccgaagctatggatggtcgcggctccgccttgagtcgtggccaggaggaattactctgcgaatcccggtgagaaccatctccactgctaacccatgttcctaatttcatgtagcatcgtttgattaggaaatggagcattcgggtgtgcgggctatcacccgaccatggcgccgccgctgtgcctgttcaccgctgtccctggatgcaggcacgggttggggggatgagagagatgtccttggaccattgatcggccagcggacggtttagatttgaactagtatgagccgtcgatcttagggtttgc

SEQ ID NO: 146105 - DNA, 392 bp, Zea Mays
attacatataacctcaactaaaaaggtcttttgtatcgttttagggtgttcagcaaacaacgccaaccacatttactcctatccggcggcggattaccctgagccacgatgttcgttctccaggcgtcctcctccaccgacggtggcctccatcgcctctccccttagctggcggctaccacatctcgttccccagcccggtggtcgatggcggccttctcccccggccggcggccttcaccgcctcttcgactagctggtgacttccccaaccgcttccccagcccagcggtcgacgacggctttctcccccagccagtggcctccaccgcctctctccctagctggcggcttccacagctccttccccagctcggcggccttcactgccc

SEQ ID NO: 146106 - DNA, 396 bp, Zea Mays
cttcaagggccttcctagtggcctccatcgcctagggacccggtgccgcctgcgctgcgttgaactggcggatctactcctccaacttcctctctttctcctctgcctcgagctcatgctcggccagcaactcgccccgccgggtgagcatttcttccctgaagacgagatctgtctctcgcctggcgaggtccgtctcccgcctgtccaaggactgctccttcgccttaaggttctcctcggcgagggcggtgtcgctggccttgccctcgagctcttgctcccacttttgcagcctctccacagccttgacctggtgggcccgctgggattccagagtctggtccaggacgctcagcttggcctgatactctatcgtgagggcctcccgctgag

SEQ ID NO: 146107 - DNA, 295 bp, Zea Mays
cagatgccttaagtcggaaggcccagtgcaactgtgtgagtatggattccaagattgccaccctgtgtgacgagttgtgcaagctgaacatagaagttgcttcctcaggtgccttgagttatatttcagtggagcccactttgcaggagcagatagccatggcacagatcggtgacaagggtgttcaagtcattaaggaaatgatcggacaaaaggtggacaaatacaaatgcttccgtcaggacaacaagggaattttatggtttggagactgattggttgttcctaaaactcc

SEQ ID NO: 146108 - DNA, 404 bp, Zea Mays
ggtgtccaagacctctatagctaattctagttatctactctgtagagatgcaaaaaacttctccctgcggtccctgtcacacctcgaaagatccaactttatttcttgatgcatacaatctggttgcatcttttccatcaatagaattgctaacacactaaacatactgtaatgcacataacaaaacgggtggctaaattagcagagtttgatctcaattttgtctgtcaccacctagtgaagagctaggcactcgtatactttgtggttaactccgctacatgtgttgtctccattactccaccaccatcgccttgggtttgccagctgctagaatgatttaaggtccctagcaatgtactactcagtttcgaactaaaagtcatttttggacaaagtttgag

SEQ ID NO: 146109 - DNA, 474 bp, Zea Mays
gtggccccgcttgtcagtcgcttcgtcgtcttccccgccgtcccttcatcgtggtcacctccggccatcgcctccgtcccctcctccgtcttctcgccgcacagggaagtttggcaccgctccgtcctcccccccccttgacaagcgtcctcgtcggtaccgccccgccgtgacgtctcatcggcggcgctgtgcgacatttatggccggcactgtgcagctcgccggcgtccgccgagctccaccgctcccctcccctcgggcgcctataaaaagggtcgccccgagctccttcttccccgcaccagcctcggccatccctctcctccctcgtccgagcgcaattcgcagagcgccaccgtcttctccctctccgatgagtttccccccctcttctctctccctctccgttggtcccgcgagcgattaaggtagctcactagtttcctcgcattgccgcgaactcagcacacc

SEQ ID NO: 146110 - DNA, 1458 bp, Zea Mays
gaccgaaccaaacgagatcggcttggatatttcagactaagttgaatctagttgaaaacagataaactccacccgttccgaatattgggatctggacgagacacaaatggatatacatacagttcttgcagtaggtttgggcgaaatgtaaacggatcggactaaagcgacttttgggctacacatactaattttccgcagctacgaacagagaaacgaattaattacaaatactcggtttcggctctaattatctcagtccgatttaattttgcatcaatactttttgtggtcgagttctaataatttgtttgcgacaaaaatcacaagactgagttggggtttccaaatacgtattcgcttagccgatgaattctaaaccacctcacgactcgctatttcctggaacaaatacgttctgcatttcgcgaaaactttaggaagagtccagatgggtaaagacgaaagcgatgtcgaatccaggataagcggagacggttaagaaacagagaccgttattatcaccgatatcccgtgtttaagtccatacttgttgttgaacgggatataaacacctggggtgttaaaccggctcccgaggccgaaaacgtgggtaccaaactagagtcttgaaaaatggctgttcgcctagaaaaacgtgtgcaggtcacgggagaccaaaaactgccttaccggctcccgaggccaaaaacgtgggtgcttgatcggagtcatgaaaaatggttgttcggacaaagacagttcgaggtatcatgtattcatcccatttaggactaccgttacagtaatctttaccggctgtttggtttggggagtcaccccgtctggcatcagtgcgtcctgcatgtgttagtccgattatttctagaggaatgagtggatgccgtgaatatactggaggagggtgtaatcttatggcagacaggttggttccctttagcaaaccaaacaatctatcgaggttcggacgcaggattggatgactcctcacggtgccattccgtgaaccaaacacgttgtacattaccatgttttgttactaactcatatacttcatgtgctcaggcggagtacatgaggatcgacaccgacagctacacgatggcctgacatatggaggcgtacctgttgtggctcttcgggtgggtcatgttcactagtactcacggtaactccgtgaggaaggacatgatccactacgcgagggcgatcacgaatgcctcccttagccaggtttcccagtactggggtaatgtcgtgctaggcgcgacgtatcggggcctctatgatggctgcataaagaccgatcctttggccatcttcaccggctgccctttactagtacagctctagtcatatgagaggtttttagattggacagcccgcgatagacctttctgcgtacggccaggtgttgtaccaccgagacgaggtgga

SEQ ID NO: 146111 - DNA, 503 bp, Zea Mays
gttagatcaggggaacataaagaattaagaggtaaatagacataatatatgagatttaggtgtggtcatcttctatctctattcatctcctatcttggacaggggctatggggaagaagatcacgcatataatctgcgaaaataaagaaacatgaggtggagcaaacctcgcttccgtaaacataaacgccatctggttatggatctgctagttgctccaggttgctcctcctcgccccggattgccgcctagcgcacgactctctgatcctaggttctcaatggctagagcagggttggatggaacgaagaaatcaagtcacgggattatatactccgaagggatcaaaatgaggaaggttggttagccgtgtgattcgcaggtagttacaactacctaatcgtaataggctcgtcatggagaaagtagctagcaggaagggtcccacccggcagagaattaactcccatgagcacggtggatgggaagcataggtgcgggc

SEQ ID NO: 146112 - DNA, 557 bp, Zea Mays
atctacattagaaagtgggtctaagaaaagctacatgtggttgagtgcctagattaacattttacatgccaaaacaaacaaaaagcctaaaaatcacaaacccaaaacaacgaaaaatagcgaatgtatttgagctcctcatcggtgtagtgaatcacaaacccaaactacattttagtagcctacgaattgtctgggactcgttagctctagggctgagaaaacacatgaaacaagtgagctatatctcacaaaaattggtgaaaacatgaaaatcagtctgtgagcacgggacacaaaatcctacactagaaagtgggccaaagaaaaataacatatgattgagtgtctagatttctatgtttaacatacaagtctagaaatcacaaacctaaaatagtgaaaaaaaactgacgaccctagacatttgagctctccagggatgtagtaaatccaaaaaactcgtttgtgagaaaaaaaactagctagaaaaatgttcccttaacctcggtacatcctagtggctttagagtgtgtttggttctgacaaaagttac

SEQ ID NO: 146113 - DNA, 386 bp, Zea Mays
gccaattggtgcggcatcaaaacgcagaaacgatggatggaaaccgagaggacgaaaggaacgggcatacagctgcttcttatcgttgtaataaattcgatccggccggtatggtcttgaacttgaacgtatcggtgggactgctggggagcgtatctatctacatatccaaccatatgggcatcgacaacgacgcacacgtatatataggctagcagtactaggtcaggactaaactggggaccatgtgtatgtttatgtatagtatataccaacgccaatgcatacatgtcacttgaggacgccacacacaccacaaaaggaccatattcacggcactgacggacctaccgctggagagagtatcccacacggcgaaattgaaa

SEQ ID NO: 146114 - DNA, 582 bp, Zea Mays
caccgtcgctcgatgcgcctataaattgagtgcgccactagctccgtagggtagtcaagaaccccgccaccaagaattaccctcagtggatccccaacgagcgcgaatcttacaattcccccaaatcggttcaaacaagccgcaagaacacttcgccgtggtcagcccgattcaggtccaatctcgccctcggtttccttgtttcaacatccttgcttgctcttgatgctcaccgacccgttaaatcgaactagaccacccccaatccgcgggaacgtgtgctcccacgctcggtttccgccatgaacgtggaccggccgttctcggggtgttcgggtcaaattggtgtgtgttccgaggccgtcgtaggtcagtgaagcctcataaatagttagcttgagcagtcttcgccggccatggccggtacggaccgtgtccgtgacgatctgcgtgcgcaccgtggttaggggcattcgcggggaagaaacagaaggggaagggcctttctgtgatttgtcagcgacacatcaaaacagtagaagaacctgtctccagatagataaaaccctgaggccctttttg

SEQ ID NO: 146115 - DNA, 651 bp, Zea Mays
taatggtcgatccaatccaaccatagaagactacttgtattatattaatacaaagtccagacaaatttcctccacgtgttttgtgtacaattttatgtgcagtaggaaaatcccttggaacgaaatgcgtgcgtacgaattccaggatgcagctgacggtgtacgactcctgttatcacgttttcccgttgcctgggatagtgaaataagcggcagtactcgttagtcgtgactttggtaaaagcggcatgcataattgcatataagtacgtagagatgatgcataggagtagagatgatgggaggagcattcattcgccaggaatgcacaaggcacattgcactgaaaagtagagccacaaaaggagagcttgtatagctgtttatagatgtcatgcactcgtagagtacgcctttttcagacacaggtcatttctcttctttccttacatcgtgcgtacgcacatacagtagatacgtactgccagtatactgcccctatactgtcttgataggtcctgtctctgctgatgcgccatacagtagaatacgtactacgtacgcacagatggttccacaggctgaggatttgagacgtgcgatgcgacaacatcgccacgccatcctttttcccccatggtaagacgtccg

SEQ ID NO: 146116 - DNA, 851 bp, Zea Mays
aacacacttgccttacagaaaccgatctttccaaaatagggtgttagaaccatccccaatttgagtaaggactgccacactaaacagatttcgaacctccttacaagcctgaataggataatcagtccatggcttgctcaagtcgctttttggagccacaaccagcaaactctcaaagcctagccatgaaatcgaaggtcaatcaagcctaaactgcataggttttttggccgagtcaccttaggtcaagctagaaggcaatgtcctcctctggcatttttttcttcctttccacaagaaccctcttcgaagcttgtcaatagctttgatggcccacgtaggaaggtctagagcggtagctgcataaatcagttttgatgtgatcacaaactgaacatgaatagacctcccaacccttgacataagctccgctttccagccaggcaagagagaggctacccggtcaacaatagcttgaacttggtctctgggtagcttcttaattgagaggcaaaccaagatatttgcaaggaaaactcaaaacggaacatggcaacaactcttggacacatgccagattaatagattatcatcattacagcggatagggagcacattactttttttgcacgttggtcttaaggcccgaggccacgccaaagagagtaagaatgtccaaggctaagttgatatccgaggcaactggctttagaaacaacactgcatcatctgcatagagggagagccgatgttgcatactcctggaagacaaaggctgcaagcctgcaacagcctctctgctgacttgctgaggcatgcatgatcagcctgttgaggacattcacaaccaa

SEQ ID NO: 146117 - DNA, 278 bp, Zea Mays
ttttggctagccaagacttcctcaatttctctcacctttccaacaaggccatgcaagttgaaagggcaaaggaggaagaaaaagggcatctcaaaagaaagttccaggttctccgggtacagcagcaggaccggcaccagaagacttgatcatttgggtttccacccaaggggccaaacttcagtagaccagctggacccaccccgtcatgattcagccagcagagtcagagctctttccattccccctcagtggcaagcaaccaacccctagcaaat

SEQ ID NO: 146118 - DNA, 431 bp, Zea Mays
caaacacagaaggcaaaattcgatctacctgatagactacatcgtcctcggtcacgactactttggtcagagcacgccttggctgttaagatcatctacgagcgggacatagcccacaccagccaacgagacacccgtttggactcgggtgccccttggggtttgcgatgcaactgcactaaagtcctggtcaaggttgcgaccctcgatgttttgttggtgctcacgtgccctctccagggagatacgagcatcctcacccgcatgactgtggttgagctctgcccgtaggtcatcagtccacgtgcccctcactacgggtaagtgcacggatgctgacgcctcacttgatgctaggatattcgtggcccggttctggctaagctagtagcagcttgggccatgctgaggaggtggtcgacatctttacg

SEQ ID NO: 146119 - DNA, 437 bp, Zea Mays
ggagtcgggcaatcttcaccaacttcttgacatcgaagactgccatccaaagtagacgatgtgcgagacactgctcgggatacctccaatcccacgtctggaatttcagagaaaacatccatcatgtcgccatcagtcggctccgacagcatatcttcaggaacgacatcctcaagggcctgatcaaaatctgttatggacaattcttgaaggctaacaagagcagatagagctggagaaggaatatcactatcccccctactacctctgtaacaccggctattcttatgaattagcgaaacttcttcttcctcttcttcgtcctcatcaaaaatacagataatagccgatgcacagtcacacccattgggatcagcttctgcacggtcacacccattcgggtcagcttccacactgttacacccattgggtgcagc

SEQ ID NO: 146120 - DNA, 514 bp, Zea Mays
aggcaattatagggcacagagcttcattttgtatccctctccacaaccgtcgtcctcgatagaacggatagcgatgctgatagactctagcagcgaacgtttagctgtccaatctccgtgccttctgacctttaggattcccaggctggccttctatagcacgcgacaagccatacctgtcttccttactagtggagcgctggcccacctgcagagattcatttcgacacaggggcggctttagtaggtcccggagatggcacttccactgccactgccgttcatggtaagttccttctcatggtacccggaggtggcactccactgccgttcatggtgagttgccagcaaatgagcggtttaggggagcgtgtgcgatgctgtccgtcacaaggggggacgcactagctcgtgcgttgcgtggtggcctagagatgccgatacccggattattcgtctgtcgtaggaccagggtacgcaacaaagatcgatcgtccgggcgttgggcaaacgt

SEQ ID NO: 146121 - DNA, 445 bp, Zea Mays
ggacggtgggttttatttttaagaaagtcaggggctcttttgtaaagctgtcggccgaaggggtagtggccaacgagcaccgctggatgcagggtcaacggtgcggattacacaaacctctttatgaaccggtatgccgtgtgagccgttggatctcagatctgtggtcactattcaatcaagccgtattcaatccccatccatcgatacacacatcaacggtggtggatccacggattgaaccggtacgcccccgactaatcgtggccgatggttaaaagatcaacgcaccaagcgtgtcttccaccatcagctgagccacggcggcgccgcccaccagggacagtggtgccattcgcgacgcaaccccgcccgagctcccggaccccaaaattcatggctaactggcgtaacgcaaggaggagtcgatgtgagcacagtggag

SEQ ID NO: 146122 - DNA, 509 bp, Zea Mays
caacatttgtcgcaccacttcttaggtcggtttagtcagtctttgcccatacatagatcacttatttcttgtagatggctttgattgttttgatgtacgattgtgcagaacgaccttcttatttatatattttgagagaagttgatcaaacataggactagatttagcaaacttactaaaagccttagtatagatttagcaaacttaccaaaatccttagtatgatcttgctttctggtcccgttcagctttgttacatgggtcgttgatctgttcttgacattattagactgtctgattctacgggtcggactttctaaagcaccagaatttttcatgataactactgaattatccagcgtgcgccagctatgagagctccattggtgtcttgttgtatctttccttggtgcctccggtgttattagtggtccttatagtctttctcttgcccaaagccttctgagtaaccactcctcgcgacaaatttggcgtgcgaggatcaccgg

SEQ ID NO: 146123 - DNA, 394 bp, Zea Mays
tcgggattctattggccaacagcaaaaagtgatgcagccgagttagttcagaggtgcgaagcctgccagtacttgtcaaagcaacaacatctaccagcacaacaactgcagaccataccagtaacttggccgttcgcatgctggggactggatatgattggacctttcaagaaagctcaaggaggatacactcatatactggtagccattgacaaattcactaaatggatagagtacaaacccattgcttctttaacctcagctaaggccgtggaattcatacaagacataatattcagattcggaatatcaaatagtatcataactgacctaggatccaacttcacaagttcagagttcttcgatttatgcgagcaaaaaagcattcagatca

SEQ ID NO: 146124 - DNA, 427 bp, Zea Mays
ccagaagctagcgtgaccccacccccacacattcatccaacatgctacatgcgtggttgaagctggtgcgatggatgaatccaatccggcgggttggtgagtgtttgcttgacgtataagaagccatggaagaagcgactatattttgtatcgtgtttggatgagagtcacgttatagtaagataaacattagagcaatttttaatcatgacgtgatttcaaaaaatcgatgaaacggtatcgtctcactttctacctccttttatctttctccacacataattttcatgatacctagatttttttctatagctaaattcttcatcaaccatattctaaaaaaactcatcagaaaaagttaaaccaaacaaactcatagagctcatgctttcctttatttaatcgttaataagttaataatgttcac

SEQ ID NO: 146125 - DNA, 665 bp, Zea Mays
tcaaccgagagagcatacttgttctgaaaaatagcactgccaaccaacttcaaactattccaaacagtaatgaaaccccccgaatttcctatcgatggaacaaaagcaaactcatcaaaagaattgggacagaaccttctgaggtcagccctgtcaaaaaattccttcttcgtctcctgcaagcagatgatgtcgcaattggattccctaatcgcacaatgaataccattccccttagccaccgcgttaattccacggacattaaaacttaaaacggaccagtcacaaaaattaatagcattgtgactattcatcgaaaggatcagattcgttgatgaaaaggaacccaaacccaataactgggtgggcaaaagtgtatctgttagaatggaacatagcactaccagaaaccacagagttcttcaacacaacaagcaaacaaagacgccagggccgaaacagccaaaaagcctggcgaaattgagacctgcaaaataaccccacccgaagcagcatcaacagatcagttgtcatcatctgaagagtcttgtttcttatcccccttgtcttttttccctgacttattagggccaacacagccaggggggttcttctttttcttcagagctttgtcagccagctccacttctgacagattgcaaaag

SEQ ID NO: 146126 - DNA, 420 bp, Zea Mays
caaagatatggagtccttgggttatttccctatgggttgtggccgggccaccagagcggagactattctcaagccagacggtgaagtcttagtcttcgagaatttttccttgtcggtcttcgccttccctgccatgattttatgatttcggttcttgacatgttcaaggttcacatctgactccgaatgcggtggtggctctaagcaaatttgtttgggtgacgaccacgtttggcggagagccattcgcggaggtctttgccaagcattattgcttccatttgtagaaaaggacaacaggcgaacatgttgatcggtttgggagttgcacatttaccccaaagacggggaagacaaaggagaaagttattgagttagccccctacgcaaaaaaataagtgaggtgggtggacggagaac

SEQ ID NO: 146127 - DNA, 601 bp, Zea Mays
cggaagagtcttcggatgaggatttggattattttgcggccttggatgtggctgcagcggagacttctccgcgtgtgatgggtgctgaagttcttcctggtccgagtgctgggcataggcggcgaagggcggtggcgaaatggagggtgagtgaggtggagggtggtcgtcttcgtgtggacggggctagcaaacgggaattgttgtcctcgccggctggggcgagtgtaggtgagggggagttgcaaaatctttttgagggtgaggatctgaggataatgttgtttaactacagggagatgggtatcatcccaaaggttgagccaatgtaaagtgcgatgtcctcgccgtatgtgtgtaatcgtaatttatatgaagttgcgtgccttcgttgatctgttcatgcccgtaggcgacttttgcatggggaaccttttggaaaatacttcgattttgcatgcttattatgctagtctggcagcacccgtaagcgtcttttgcgtggagggtccgactgcacccttgggcgacttttgcacgggtagtcttttggagaagacttcgattttgcgcacttattgtgctattccggctgcacccg

SEQ ID NO: 146128 - DNA, 1328 bp, Zea Mays
ggccgcacctgcatgtcccctgcgaccgaccgcaatgcaaggcggcccccggcccttcccctgcttcgtagcctccgccccgtcgtccgcttcgaacgtgccagcttcggcccgagcttttgacacacccctcgcacgcggaacccgatcgagctccaaactcctggcgtctcagccttgcttgccatgcccagctcgtagccttagacaatcaggcaccgagcgcgggcgccgttgctcctgagcacctcatccggcgctggcacttgttcttgctccgtcctgactcctgagccattatggcgaaggctgtggctgtcactgcacttgcagcagcactcgtagtgctgctgctgcttgcatgctgcccatgtcgggcgcgagctgacgaatcggccaacgtcacggcgtcgctcgtcagcttcttgaccgcgctggccggcgacgacggcgggcagacggcgatcaggctgaggtggaacgcgtcgatcaacccgtgtgttcccggcaccaaagcctcactgtggagcggaaccgtccagtgcttcgaccgaggcgtaaacgacgggcacatcaagaggatcgacctcgacgagcagggcctgaacggcaccatcgacgcggcgctgctctgcgccgcgccggctctccgcgtgctgaactttcacaacaacagcctgcgcggcggcctccccgcgggcatctcggcctgctcgggactcacccacctggtcgtcagcggcaaccggctctcaggtaacctgccgtcttcgctcgcccagtccaggagcttacgcgtcatcgaggtttccggaaacaacttctccggcgagctccccgggggcctcggcaggctcaacctagagaggttcttggcgaacgacaaccatttcgacggcaccatcccggacttcgacctcgacagcattgtgggcctcagcttcgacgtgtccaacaacaacctcaccggaccaatccccaaggacgctgtcaggttcggcaaagggaggttctggcctaacgccgctggcatatgcggcgagcccttattcgctccttgcccgtcgccgacgccgcccagctcgggctccgaggccgaagacgacgggaaggggggtgacaaggacaaggagaagaaaagaacagtgcctaagatcgtcatgtatctcggctacgtcctcctgggcgccgccatactggccttcgtcctgtacaggttctgcttcaagaagaagcggagcaagctggggcggaattccaagcccagcggaggcagggccgtgtacgacagcagcaggatgacgacgaccacgaccacgacgtcggcg

SEQ ID NO: 146129 - DNA, 948 bp, Zea Mays
cggcggagccgcctagtggtggaggtggcggcttccctcccctttccccctcggcggtctctaggttcaggtgctctccttcctcccgctcccctgctctctggtcttctcgattcctccggaatggacttagcaaatttggattttcggtcggggatcgtcttcgaggattctcttaagctttgtctggcctcttcggtttgtcctgctcgtccgagccttccgtcgtctttctggttggtggtttcttttggaagatgcattttcaagctgaactcagattctgttggctaccttctccaagctgccctgggaggttttgcggcaggctttgaggtgcatcagctttctgattgggttttctgattttcggtttcctcgaaggctgtgggttttcatatctacaattctaagtgtatcgatcatgcggaattcagagcctttttcaatctttggaaccgtggtggccctaactggattcatgaattcaagaaatttattggtgaggagaatgcttcttggttgactgttcggggcaagaagagcttatcttatgcagatattgttaatctccctctctctggtgctaatgcggtcccgatcctcagcaaaaacaagttctcttgcggtgttgggcatccagttcagactagaatttctgtgttcaatcgcctgggttcttctattcgtaattcaggatttcagggatcgtggttctcgtctcctcagcgaaggttagggcctactggtcttcggattccgtcgactgcgaagatcaagccaactcccatgattgctcctcgtcggggggcgtcttcctcggtgattcactctgatcttaatggaggtgtttgtggcagcgggcttcatgggcgttcaaactttcaaaattcaaaatttaattggactaggcctcgcaaccttcagtggcgtcccattcgaaaacgg

SEQ ID NO: 146130 - DNA, 301 bp, Zea Mays
tggaagcacttgatcgttggctacttgcacagatatggttctaggcaactcttgaacaccagacaactgtgaccgtaagcggtcactgacaaaagtgtgagaagaccctgagtcaactaatatgaggatgtcgtgttgctgcatgcgaccagcaaatcgcatagtggttcctttgtcaattccttcccatgctgctggtgatagagatagtgccatcatgatttgttccggctggtcaggtgcatcttcgacactttctggtactgccagtagatcccatacctcctcgatggcatgtaac

SEQ ID NO: 146131 - DNA, 513 bp, Zea Mays
agcggaaccgatcaaagttgctggattagctcatctgatctttggaccgaaagcagatgtgcacgcgcaggcccgggtcattgccggcgccgccgcgcatgccacgccacggtgcagtgcaacgcaggtagctcccagtcgcaggcctgaacagttgacctaatccctcaaagatatacataaaagtcgtgtttccaggtgtttgttttcgttgaacgtttcttcaagccttaaccccgagctatccagggcgtatagtatagcgtccaggaatagcagccctcgtagcgaaaattcccggtcaaacgcaagctccaatccacatgcataaactaggtaaaccatcgaccaaagctgtcaacgattacaaattgaagcttattcaaccttcgcaatcacaaccacactattttgaaaaggcttacttacgtatttggggctagtttgagaactcaaattctcttcatcacagaagatgattaaaaaagaaattagttcacgactaatattttg

SEQ ID NO: 146132 - DNA, 1157 bp, Zea Mays
aaatatatgatataaactgaaactgatatccatgaataatattaaccgaaacacaacactgaaaagtaaattgttctagcagcatcactaattaaactaaatactgtagtagattttgatctcaaccacaaccacaatggtctgaattcccatttgatacaagtaatttctgtatacacttctcacatatcagccactatgcctcacaattaacatataaacttgtgtaatctaactaattaacatatattctctgaagattacagcaggaacacccttttgcttggacgaactgccttgtgtggttccaaaatataaattaggggcacatcggatgagggggatgttgttctagggatgagggaagatcattgcagctaccacttctaacaattctgggccactgcattacaattctggacatgctgcctttttgaattggcacgaatgcatctagtcggtgcctctaggattattatcattggtaggaggagcagttcaaccagcgccctactacatgatttactacatgattctggatgcaaaggaaagaccgtcggagatatctgaacaaaagaatcaggaagggggaggaaaacgagctcacctggaagggacgtgatgggggatgcccgcccttgctctgtttgacctaaaaattatagaggggaggaggaagatggttgcgacctggaagggaagggattggggatggctgcccctgctccctttgacctaggaattatagagggtaggaggaagacgtggtggctggctaggaattacagaggggatgaggaagacgatgtggctgtccgtgctgcgcagcttaatctattgacagggaacgagaggggaggaggaagacgttgtggctgcccctgcttcgattcaggcggggttgttttagatcatgttaattctttttctgtctacacgcggggagaggtaggtattggcgccaatcagtgtggtcgtcgtgaaggcaacgttggattctatttttaacgaccacagaggtcagctcgctaacgatgacatgttttttggtcgtcggctggattggacagagcttgcactgtgccgccgagactcctcacaaccacatattacaagtggtcgttattttctggtcgttgatacacttttctcttgta

SEQ ID NO: 146133 - DNA, 357 bp, Zea Mays
gacggcgtcgtattggcgtcctctcctatgggggctcatctgtcgatcgcttgctagggtcttgagtgggggaggaagtttggagctaaacatgagggttttcttgctgaggatgggagaggcagaagctgaagaggcaaaaattacgtttggcgatggagggcccctacttataagaagtattgaagccccttcgcgaggaacatgcaactgcccctgagtgtgcccattgggtttcaaagcagcctcattgcggatagttcccatagtaacattccatcctttggggacctagcacaagcacacctaccggtcatggaggtccgacggaccaaaacgacccacatcgaacctagg

SEQ ID NO: 146134 - DNA, 537 bp, Zea Mays
gagcaagcaggtgacgacggcagcaacaacaacatgatggtgacgagcagcgaaacagaggaggaggccatcggctgctctattatgtacaagtgggtagggtaatggcgattgtgacccgaccgtccctatcgattgacgtggaggtccattttatagcgcaagcaaaagccgggcgctgctacgtctgcgtggaccatccctctctcgtttgatcggggacgcagagcagagcaatgcaaagcagagcagctagccagcgtccctctcattagtagtagtactatcgtacaaccagactagctgtagcagactctcatcattatcgtaccactaccagcccagcagcagcatagcctgctagctacgctgctgctgcattcccgcatgcttgagcaagttgtaggcttgtagctgtagggagggagaatcacatcactggagagctaaggtggggcgccgagacgtgaggatacgcgacatctccatttcacccgtgctgatttaatatgtgcgcggttgtaataatgattaatt

SEQ ID NO: 146135 - DNA, 531 bp, Zea Mays
gtcggtcccagtcgcagggtgcgggtgagggagagagtggagaacggtcagatccagatcgggaggtcgggattagatctggcctaattaaaatcggaccgtccgattggagttgggcggactggatgcacaccagggggttttgtctctgccgagaagccaggggcggtgatccccacgggcacggcggcgccatcgcaggaggcgaggcagactgggtctcctagggcgcgagggttcagtcgggtagctggagaggttggggagggtcgtgcgaactttatggcgggtcggttttgtgtgaatgggggtgaggcggccaaacggcgaaggggagttctgggcaagccggaggatactccgatgagcaatcgcgggagggtaaatgtgagataggggaaaataaggtcggggctagaactgttaccttgaggggagtcccaggaacgcacaaacggaagctggggcacggcgaggatgcgggtcgacgacggcggctctccggctgcacaagaagtgctccggtgagcg

SEQ ID NO: 146136 - DNA, 572 bp, Zea Mays
atattctgcagatcgttcggggtttgggaattcgaatagtatgggtagaaggacttcatataatttgtggtccctcagatctaattaagatactgccgtcgactgacaacccatcgggaagctgcagactgaagccgtttaaacggatctaatgattttgtgtactgttaagctgtcagtccttagctgctgaccagctgtgattttgatttgaaaaggctgtccttgtcagttttcatacaaaacactattttagcgctagactagacggagtagattttgaagtaggccactgatgaggatagcttaacgacagaactgactgcatgcttgtttaagctgccacacgagcaatgcctgcaaatcaatattcagtgatgcaaacaattaatgtactctgcactgtctgggttcagagtgcaaaactgctgcttttgaccgtgcgaaattcaccaggttttcgtcgctgccttcaccaaaaggaagcaagtctgcccttccagctccaattctgtcaacgccggggcttgcgagccggcgcgcctcgccggcaacttccgccacaacaacaa

SEQ ID NO: 146137 - DNA, 378 bp, Zea Mays
gaacaatctaaagggcatcatcaggggtgattttagccccgccagcagacatcaggctccttgcatctaactcgccgacctctaaggcgacttgtccgtttaaaactgtggaagcatgtaccgccgtcgccccatcagaccggggtggaggtgacccaacatggacatccatggaggcgtgggaaagagagcccacctaaacacccttggggactgggttatagcttgcactaaccaccagagctagatcactaccggcaacaccctcgggggctgggtaactgccggcaccaccctcgagggctgggtcttctgcagtagccacctctaaggctgagggcccctcagtcgcctccatgggagtcaggtgactcagac

SEQ ID NO: 146138 - DNA, 499 bp, Zea Mays
tgagtgttagtagcatgacagttctgtatctgcatgatgagccaaacgcacttgttttttttttctcccgccgggagcgagctgcccaatttgcagtagtttagttagttagtctatatatgacaggtgctaattcgggagcagccactgctaatactcctgtcctccatgttgcagcttggcagcgtggcggaactgtactttgagcattgcatcgatggctggccgcgtagcttatgagcacatgacgctcagctgcaggtgctgtagtatttttcttttccttcagcaacaatctgatgccactcctctgctcaagcctcacatctgcacccaggatccgttccagactccccaccagtcgctctcacagtaatgtctaaaattgaaggatcggatcgaattatgattatactctatttctattcatttttgaattgtaatcatctagtaagggctaaaaaacatttggatcgtgattcattctttctcaccgggt

SEQ ID NO: 146139 - DNA, 696 bp, Zea Mays
gaccagctaaaggaatcttcgtgcatcaagttggataagaaaaagggcgcccatttcttggaaacctgcaccgaggtcgctgagtagtcagccggagcaaaaaatctctcccagatcctgtaaaactgggcattccttttcctttctaagtgactcagcaaaacaggatccgaatgccagtcatgcaaaaacataaagttcaaccccacgttattgtgcccattagcaaaaggctccaccggttgggcatcaggaatcactatatctccaggcacaggaggaacatcctgcataggtgggccatcaacctcttggggcccaatcatgggatggtcggcaggggcattaaagtttggcaccggccccacagccaccggatcctcaggaatctgcccatttagaacctgcccattctgcagcaaggcaccatgaatgtgaccagaagaactatcagaggacaggtccgaatgggggttgctgacttgctgctcatcaggtggctggtccagaaggggctgctgaggtggttgaacaggaggatcattgacaatccactggtcccagtcaccttgaatgttgtctgcaggttgagcttgaacgttgtcatctggtggaaaattaagatcccagcccgccgccggcacaggttgacccagaccaaaaaactcaaagggaagctgttgcccatccgccggg

SEQ ID NO: 146140 - DNA, 351 bp, Zea Mays
acgacacctacttgttccttgtgctttggcgccatcaccagagccttccttggtcaccgattgacgatgagttccaacataaatggaggcagcacatggtcccccatctctgatcccctcccctccggtagcttctggtgctggtgttccgaccacatgggtagacaacgaggcacgaatttatagtctagcgggactcggtcttatccctggcgagagtgcaacaacccaaggaggggtacacggagccgacgcttaggttgttacgatctggttgacgacgatgctgacagaacggtcccacacaccgatcacagcaggacgagggcgatgccggtgggactgcatgat

SEQ ID NO: 146141 - DNA, 367 bp, Zea Mays
gtcatactcctatgatctgatcgtaaattgttagggaagtgaaatccctacacaccatgtttcatccaagaaaacgcgcgaccaccgaatctcgttgaggaacgattaaatggaagatttgtgtgtttcttgtgggcgtttgatttcgagcgtggctgcgttagtttttttctgtttggtgtgtctgcatgtgacggcaggcaccagccttttccatgtgtgtccgaactttgaataacacccggtcaaacaaggcggactctaccgatctatcattgaggtcacgcaattggcgaaggaagtttccactaagggcccattttgtttgtttagtggactaaagtttagttagtggactaaaatttag

SEQ ID NO: 146142 - DNA, 546 bp, Zea Mays
ggggaggaggtggcagccctgcttgcgccctagttagaggttgaggaaggttcgcttagtcttcttcgactatctgcgtccagttttctgttgtttcttccttctgtggggctgattcggctcttggaggagaaaaagtcattattgaaagcgccgtccttttcggtgatctgccaacaatggtcaaggttcgcaaactcctcaggagggatccttcctttcttggtgaattttcatttggatggcattcctgtgcatgcttgggaggttgccacggtggaacagctgctcaatccctttgcttcggtgttctgcgtgcagtcggacctggatgaccgcacctcttttcgttgttctgcatggtgtgttgatcccgctttgattccagaatcaagggagttatggattacagaacccctgcagtcgccagaaaatgctggtcaagggttcagaactctaatttatcaagtcaaaattcattggtccttcccttcgtcatctgctgagcttgggccctctctgtcgctgggcgatttgggcgccaga

SEQ ID NO: 146143 - DNA, 679 bp, Zea Mays
cacagagacacttcttgagttgagacacgtggaatacatcatgcacatcagatagatgatcaggtagctcgagctggtaggccatctccccaacgcacctaaagattctgaagggtccaataaagcgaggggataacttgcccttaactttgaacctcctcattccacgaagtggtgacaccttgaggtacacattatcaccctcctcaaactccagtggtcttctttgattatcatcatagctattttgactggtctgtgctaccctcaagttctcccggattatacggacttgttcttctgcctcttgaataagttcaggcccaaagaactgtccttctctagtctgatcccaatatagaggagtcatgcactttctgccatataaagcttcaaatggtgacatcttcagactggcctgattattattattattataagagaactcgacatatggtagactcttgtcccaactgcctttatgctaaagggcacaagctctcaacatatcttccagtacttgattagtccttttagtctgaccatcagtttgaggatgacaggccggactgaagctcaactttgtatccatattctcatgaaagcttttccaaaatctggaggtaaaccgtgagcctctatcataaatgatcttctttggtacaccgtgcaaacacac

SEQ ID NO: 146144 - DNA, 523 bp, Zea Mays
agtgggttgaaaatacaaattatgcgacatgtgattggtgttttgaagacgagatgtgcgaataatcagtttggtgtttcactcgtctagtcgataaatgttgtcataaataattgtgctaaagtttggtcataagagtgcagtaggcacatggtgttggttggatgtgataagtagattggaagtgtgggtttgtctgagcactgtgttgtcgaacgtgtatgtcgaaatgcgttgtagtagtgattgcgttaagttgaacggaagtgtctcgagtacacgccgcaacatggttgtattcatgacaaggaggtgtaggttttactcaattagaagtttggttgatgtggctaggaaattgtttcggcttgggtagtgaagtggtgacgtgaccaagtagtcaccccccggttatgagtctagtctagatgtgttatgccttcactgtgatacccatcacatatgctaactggatgtatatgaaaaatgaaatagacacatcatatgatttagtggtgctggg

SEQ ID NO: 146145 - DNA, 468 bp, Zea Mays
tagttgccggggagaatatccagtccacgcggggtggattccgcggtggagcagcgcgccgatgagcaattctctaagcgctggttggtaatcctgcgctgtgagggcacaaccacacccccacgaactcgtagaagacgttgggcgctataccgaaggcccggacgccgacgactccgaaatcccctcgcagccacacttctctccttctccgcctctctctggtcgcgcgacgtctgggtggttgtaaggaaaaagtgaggggacggtgtcctttatcccccacgacgtgcggtaggtcggttccgcgaggttcgcgtcagcaggtccgagatccccggcgctctccacggcatcgcgagcgcgattcagttgagctcgactcggtcacagggaagcagctgacagaagggccccacgcggcagaggcatcgagcgcgcgcgtgggaggaggaactgacccgcggg

SEQ ID NO: 146146 - DNA, 514 bp, Zea Mays
gttcggttggccatcgcggacgtgcgggtggtcatcggaggagtagaagggcaccacaactccggcaattgctcgtcgtcgccgcgcttccatctccgcccgctgctcaccgtagacagctcgcttgtgccaacaattcccggtaagaaaccctcgcccaaacccgctttcatatccgcaacgtgtagcagaagttaatttatgtttggtgcccccgaaccggagaattgcatcgccggtggtgatcctcgccgccgtcgggcatttggggggaattgggcggaggaggacgacggggcgtggacggttgatcaatggatcaacggttccgatcatatcgtggattgggtgatgtctgagccattggatcgatcacgggcggttcagattaaagaactgcgtaccgtttcactcagggcgatcatggccgttagatttggatcgtagggttcacaatgcgtaccgattcgttaagggagtaaatctaatcctggtcgcacgatttgaatccaac

SEQ ID NO: 146147 - DNA, 674 bp, Zea Mays
gccgctcgtcgcgcgcccaccctcgtcgttccagccgctccgctcattagccaccatgcgcgctatcattgatgttgtctcggacgttctagtcccagccatccggtcgccgtggccctcggctagccgttcgctagaacctcctggttcgtacgctagtggcggtggcgacctagcaagatttagtctgacgccatgtcttcaggctccattgcatgtgccctttctgcatattcgacgaaatgtcccataacagtcgatgcctctcagcatatttatcacttcatacaattagatgtggtgcatacagccttgcttccctccactattcattctttctttttttccttgatagcagacaacaccaaggcgccatcgtgcttgactcatagtgaaagttcttttttaaaatccccctatgcattgcaaactccagatgataatggctaagtttaattcctaccatcatagcagtgccatgcatgttaagcgaaatcatgcattaaaaaaagagaacaaacgtaattttcttctgagttcactttattccttttgtctgttgtagttttctctgttccttgaaataatcgtacataccttatttatatatccacatatcagctctgcagattatttttaatgggcatggttttcttccaacattcgtatttttt

SEQ ID NO: 146148 - DNA, 616 bp, Zea Mays
gtaaaactactgatataagttggtgattccatggtgtcatattgcctaattagatatcgacgggattaatattcagcagcaactggtgcctaatcagtagcatctgagtctgtgtgagctcctcctttaatttatgttggttccataagctatatttttatccatttgcatcactaaagctgcaatatgccttgggtctttgacaacctttagcggggcaaatgagatggttttgatttagtaaaactattttaccatttaatcatattatgaatatgaaacatatctgcatgtggcaatgctttccatggtatttccatttgtaatctttttttgagcaaaaccatctgtcatttgttcctttcaatacttagtatctgtgcaatttgcgtttagaagtgttcacaaggttaacatttcagaagtttattttttccaggacataaatttgggtttcctgattgtgctgttatctatgataaaggcatttgaccctactagttagcattgttttagttgacttgatgcttttatctatttgatttgatatatattactacaattcacatttggaagacatgtaagagaagtatatttagctgaaactgcactggag

SEQ ID NO: 146149 - DNA, 1172 bp, Zea Mays
attggttgttgtgaatcagccaggtgatgactttctgtagcctatttgacattagctttgtaagcagcttgacacttgtgtttgaaagagaaatggggcaatagtcaacaactgagactggggcatttttctttgggagtagcacaatgtgagacccatttaactttgcatgtaaatatttccttcataaaagcccatacataggtcgtagaaatctcgagagatagttggctagcacttctttatgaaatttgtatgaaagccatcggtgccaggtgctttacccgagggcaagtcccctaccactgagttgatctcaccatcggtgaatggggcttccaagtgattgaggtttgcaggggcagacacaagattttgcaggtcaaagaccatattattgtatcctgatgtgccaagtctttccttatatatgcattatatagcaaatgcactttgctttcatgggattcaactacatgaccttgacaatcttgtaaggttcatatagtattctgcttgagtttgattgtggcattagcatggaagaatttagttcctgcatcaccacatgtcgcccatttgatattccctctttgcttccactaagttttttgttgctcaagtaaagtttgtaggtgctctgataaaatgtctctaaagttccactcttgcaaagtaagatctctggtttcctcaataagagccatgaattgaatgatcaacttaagttctcaatcgtggtggctagctttggcagttttttttgtgccattgaaaaggagctttcctagcgcttttaaatttagccattgtcctttttgcagggtcaggttgatggatatgctgaaaccaggattcttggaacatagggaaaaaactctcatgatggagccagtagtttcaaatctaaagacactcggtctaggcacattagttgtgacttccaccagccaggggatgtgatatgaagtgtctctggcaagagttcaagctttggtttcagggaatgtgtccagccaatcttgagttacaaagcaccaatcaagtttctccaaaagaggactaagttgcatgttcgacaaattatacgcttggccatgaaggggaatttcgtgcaagctgagtttgctaacagaagcgttaaattcaaacatcagttgagtacttccccc

SEQ ID NO: 146150 - DNA, 458 bp, Zea Mays
ttaaagtaacaactccacaattgcacagttgcagcttcacttactttacccttcttagtggcgaagctattgtgaatcacagaagggtgcaaatgctttggagatacaaagtaatgatttataggtggtgcatgtattatgaaaatccagtctaaatcgctgattttgcaaattttcgtgagtgcatatgtacaaagtaatgatttatgagcagatcacattggctgtaaaagcgggcatgtgtctttacatatagcatgtggattattagaggaaaccaaaccacatcatatccatacagtggcagaggatgagaggacacagtatggccaagtatggcagctatcatacctaaacttttgatagtcttatatgttagagtattcgttagtgttttgattgtctcctgtgtatttaccctcttgcccttaatgtaatgtgtctaaaccaactaccga

SEQ ID NO: 146151 - DNA, 531 bp, Zea Mays
ggcttagcagacattacagcaggattacatactaaagatgtcacaccaggcctgtatctgccttcgctttgttcgtggagaggaactgtgccacaaccaggaatcaaccttgcatgattggatcacttgtcgaagtggggtgagctcgcctcttaatacctttgtgttccggcgtttccaaaggtgcaaacaacataggaggataaagccaattaaaccctgtccttgaagagcatgggggcaagcaagttcgaggaggtgggagcagtgcatatccggggaatggcgatgccagtagcaatctagaaggttttggcaaagctaatgtggaagagcatgtgtgacattgtcttgggttctaaggcgcatacttcacaagtgtcagaatctaggattttctttttgcgcaagttcactcgggtttggagcctgtctttagaggtgtcagggatatgatccccaatccctagggcccatcggtcagcgagcacaccggggaaaagacctatggaaactagggcccgctggtca

SEQ ID NO: 146152 - DNA, 798 bp, Zea Mays
ctaaaaaggaatataccaggagtgcattagactatctccagttgacttcctatcttactccctatttcaaacagtgcaaaacggtactttgcacggtaaacagtgcaaaacggtactttgcacggcctgctggagatgactttagcgagtctattgtataaaggtcatggactgacaacaactttttgcagcctggtttctgacgaagcataatcaacactgagatgattttgacctgaggctccattttggagcccaatcttgtttttcctcctcatttcttcaacagagtactagtactacagtagttgagatccaatcaaatcaagcggagtggtgatgccattgatagattacttggctcccatcacggcatgcatgatggttttatgagggtttttttccccgaaagattgtttgtggaggaaaatggtatatcaggcaggagaggtaggtacgtcagtaatgtagccatccggaatgtggtggttttgagatattcaaccgtgctgcatttctaaatttggcgctttgcattgagatgatcactctgcttcctgtttcaaagcttttgcttgcgcacatttaactcggttggcatgcgtggatacgttctaccaaatcggcgttgtgtttcaaaaactgactaatcagaattattgctccaggcaacattgacaattctgtacaatcttcacgtgaccaggtagcactggtatgttcataatccgagcaacatatgcaactagattttgccaaaccgttcagcattcccaccggtaagatgctctacaaaat

SEQ ID NO: 146153 - DNA, 417 bp, Zea Mays
ccttcccatagtggcgacaatttgtgtcgtccttcccctgttagaattcgacggaggaccaaatctcccactgcgaaagatcgatgttgtatggctttatcatgatagcgcctcagagtttgctggtacctagccgactgaattactgtattcaatcgttcttcttccaatatatcaatatcctccagtctagtggcttctgcttcggctatgttttcaaaaatcagtcttggtgccccgaacttgagatcacctggtagcactgcttccgaaccatagactataaagaaaggagtgttaccatgcaaagctcgcctaggttgggttcttaggctccagaccacatatggcaactctctgatccattttcccgtgaacttttcattcttgtcgaagactttctttctgagtgcttcc

SEQ ID NO: 146154 - DNA, 937 bp, Zea Mays
gcatcctctccttgctggcttgtgggccgtgttgtcatacacgcacacgtctggccgccatcactgcctggtgggcccagcgcgcaggagctccctcctcctcaaccaccgaccgtttcctccgctcgcggtggagtctgagccaactgatcgaccgccaaatactggaggagcatgcgtcgtgatcctggccataaatacttgggtcgcacctgcctcttctcttatgtacccctgcattctgcacccaaagccggcaccggggaccaagcgcaaccacgtcggaaccagggaaggggatccaagccgccaggaggattgcacggattctccctcgtcggggtctctgcgccgggtctggcagcttgagcttgctccttggggggtgtttatggacacgccgtgcacgagagtgcgtggtacggcgtgaattgctcaccagagctggaaggccgccgcggatcatgcctctccgtgggctggaacaggcactgcttaatctccgatatgtcatcctcggttgaattcgaatggatctccgcaatatcttgcacctgccggcgttaggataggtgcgtctggaacggggtgtgctactcgccggcgactcacaccgtgatgcgcatcagctggccgtggcttaccgcggccggagtctattcgtgataatcggtggcaaaaagatggttagctggttcgggttggtaagggctgtgtgcgcatgcgtttggaatcgagatccgggtgcgggagcgcctggcggtgtgcaccggtggcaggctccgccatggtgggctcgacagcaccttcaggtgtgggaggatggaggagatccctggccaaatgattgactatgggtggctaggattggatgtttgcataacctttcgatggattggatccgggccatcaatccagatcaggcggatgaaaattg

SEQ ID NO: 146155 - DNA, 412 bp, Zea Mays
gaaaaatcaactattaaacaagggcaaatcgatgcaatgagggggaggtattttcatgatatctcaatcgtgagggccggaggggagaataatgttcctcttcccgaggctgacgaagtggtggtttacagaagtttcatgaaagccgggcttcggttcccctggacaaattgttggccgaggttttgaaaacctttgaaatttatcttcatgaacttactctcgaagccatcattaaagtggggatctttatatgggccatgaggagccaaggactggaaccagatgaaagatgctttcgcaacatccatgagttgtcttatgagacgaaggctaccggaaaggagcagtatcacaacaactttggttgttacagtttcgtgcctcggtctaagaagagctacccaaatcc

SEQ ID NO: 146156 - DNA, 745 bp, Zea Mays
agagccgaacaacacccatccgttttgtatatcttagatcgactttctgggtagcacctataatggtgcccaccgcccaaagaggaagaaaagatcgaatttcatacggcactccgtagatattgacccaagccttttccaaatgttgaacgggctctattttctgctcaagttcttgaatgaccattatacttttaccatatgcagcatgaacatatttcatggccaccatccgttgtaattcgactttggacggaaaaggtacaacgaaaccattcgcatgactttggacagcccaagtccatctcaccggaatgagatgagccaactcagactttactaactctgccgtaatggtgccttccttggcagtgataaaagcagttgaactttctttcagcgggatcaacccctttgaaccaaagttcggaatttgaaagaacccagattcaccactcccaaaaccgcaaagaatggcatggggtttaggtccattgtatacctgacagtcaagcggcacatggtctccctcacaaatctcacagcagagatcctcacggcgtttcttgcccttgccatcagccagggcgccgtcatctactgtgtctgctgctctctttttagcatcttcatcaaaagcattggatgacacgactcccctgcttgattcaggcatgtctcggatgactcttctatcagattccagaaacgagcgcccaccaaagcgtccaccacggccacgcca

SEQ ID NO: 146157 - DNA, 554 bp, Zea Mays
ctccaatacaatcgacggtctagagagtagaaactcagataccatcagcacagcagatccgtgttgggcactaggcttcacgggaaagacaaccaagtcttatcttaaaaacaaagggactcgtgtaccgttctgctgattttgctccttcaccagacagcacctaacctggtttcttaacaaggtggcaagccaaccaacaagtgatccagatctgactgggtgccaacacctaacacaaacaatatacacctaacatgcaggttgaggtcgatatcaccgaacgcaatataataggaacataacagcaaaaggggatagagtaagcagtacctgctcttttatgcttggaacagatgagagccaactcaatggttgtggacttgcggtggattatttccagggtcaacaaactgcagcatgttagtggaatacaagtgggcaactactttctcctgcgtgtcatagcagcttttgcagataaaaggcagacatgaatatgtagtttataagtaaatgcatttctggtattttggcatgacatatcatgaaat

SEQ ID NO: 146158 - DNA, 391 bp, Zea Mays
ggacttgctaaccgtcgtgccgccgtacccacttggaccacgactggtcggaatcatcatcgccggcgttagccactcaacggtcgtgcgccaggtgccttggtgtcttaccacgtcgcagtagctcgtgttatgcatatccggtgatcgccggtgagctcgccacggtgaaagccaccaattgcttgcgccagtgcacccccttctctccggccgccgtgcgtctttccccaaattagctgccaccgctcatgaatcctataaattgagcgtaccctcagcccaacaaggtattcaagcactcagcacacccactcgtgtcccaaatcgttcaccagataatccaattatgaagtgagctcgccgtggccagcgtgctataggtccgttc

SEQ ID NO: 146159 - DNA, 474 bp, Zea Mays
ttggccatagattcggtggaacagtcccagtccttgttgatctggcttatcaccacaagagagtccccaaacaccataagtcgcttgacgccgagtgaaatagtgatgtgtaccccgtgtatcaatgcttcatactcagctacattgtttgacactggtaaaagaagttgcaacacatatttgagttgttctcccttcaggacgatgaagaggatccctactctagccccttgtaacttcagtgacccatcaaaatacatcttacaggcctccatcggcttcgggttcttaggaacctgacttcctgtccagtctaaaataaaatccaccagtgcttgggtcttgatagttgtgcgaggccgaaactcgatgttatgagctcctagcttgcacgcccacttggctgtcctccccactacctctcggttgtgcagtatgtacccaatcgagaagcaagtgactactatgaccttg

SEQ ID NO: 146160 - DNA, 632 bp, Zea Mays
cagatccagagtttgttgtccctttcagtgtatcatcctgaaatgcaacatggttgtaagtggttgaacattaaaaaatcagtttaatggcataaaaagcattatgtaatatgtatgttattatactgacatgaggagttggggtctggtcaaaaactggcccactgtcattgtgttccatttcctctgttgccaaatcacctctctacacaaaggtatataattagtataattgtgtagtatgtatagtaaaatggaattataacatgagacatgaactgctaacaaacatttttttgcggtgtcacgtcaaatttcggcaagcgggtgcaagctgatgtggtttgaggtgtgatatttgtgttcctcaaaatgatgtttcgaacatcaaaacagaaatcctgttgacaaaaaagtgtggttcgtatactgctaaaaagtagtatgcaaacaatgtacgtatgatgagtaaaaatggtattggagttggacaaattacctgttgatctgtaaccacatctgattcgtcaggacacgtctcaagcactctacggatatgctgttgtctttcatgaatttcttcaaactgagtaccacccagctgggtctcgagctgcgaagcttgggatggc

SEQ ID NO: 146161 - DNA, 531 bp, Zea Mays
gttgactcgtgctctgccctggtactaggtcctgctctgctgactgttggagggaggtgccttggaggtaggtgccgagggaatcttggggccattcaccgagttggagtaggtgggtcctggtgccttcaactgggggcagttattcttgaagtgactgaggtctccgcagtgccaacaggcatttgctggtggttggttgcttgcaacagagggggcctgaagggagctctgactctgctgactgtagcgtgacggagtgggtccagccggtctattgaagcttggtcccctgggtgggagcccaaaggatcgagttctctggtgacgatcttgctgttgagctcggagaacctggaatttcctcttgaggagccctttttcttcctcttttgccctttccacttggatggctttgttggagaggtgagagaagttgaggaagtcttggctggcgaggatggtcttaagctcgggtcttagccctttcagaaaacgggccatcttcctggactcggtgctgacatcgtc

SEQ ID NO: 146162 - DNA, 1309 bp, Zea Mays
taccatgagggaaaaattcgtgccactggaaagtcctgataggttccctcattatatctatggttggctgtaccagaggtttgatctgcaacaggacagtaagacaagatgaataaccagcagctgtggagagcttagaaggtttagttctctttgaatcccaaacgaataaacaatagatctccaaccattccacatggcaatcgtttttttcacatgtacaaactatgtgtccattcttatttatgggactaacatttgatacatctgaatctgatcagggaatagcttctggttggcaactgaacttgtgatttgtgactgaagaaatccaaacatgaactcggtaacccaaagttcatgccaaaccataagtttgcatggagttgtgcaggcaaatcatattttgccaacaaactaccacgcacaagcaaaatgatgtgggacttatcgtttctagtttctacattatctgttttccaaccaccaaaatcacaaaaatcacacctaggacagtcaaggtcaatactcaagagagatttatcgatttgtttttcttctttgataatgagtctacagttaaagagtgaaaacttcatgttcaaggataccgaaatacaacatccatcagtaatggtagaatgaacatgatacaaaaaaatgaatgttacctcaatatagaagcttacagtcagcttcgttgctaaaagaagaacccagaacatggtatacctgtcaggacaacaatgttcagtaattgaaaaacatgtaacacaaggcaagacaatatgaagatgggttagcaaactaacatacttgaagagggagaatgcaccttcatgcatccctctgccaacaaataaccggggctgcagacaaacataaaatcttttttttaaaaaaggaggcatccagaatctctgactctctgtcatctaattagcagcagaaaatgagagatggaatgctacctgagaccaccacattatgatcgttatgaccttaacatttgaactctctaagaatcttctcataaatgggaaaagaaatagcatagaagcaactatgtttggtgccatatatatcactatggccaatatgtacaaagatggctgattctgaccatcaccaagccaactttttattgttcttgcaagtccagtaggattctcccaagtgtacgcgtaagtcacaggtaaaatcacaacccatgcagcagcacatattaacttcaagatatatcgcagcttgactgcaaatgacatgtttcttcttgctttccaaccaaatatgaggtctaggattgctg

SEQ ID NO: 146163 - DNA, 315 bp, Zea Mays
gacggtcttcggcattcgaccaatacaaagtcaccgcgaggggcagcgctagccaccctcgcgtgcgacactccgcgcaaaagtcgcctaagggtgcagccggactagcacaacaagtgcgaaaaatcgaagtcttcctcaaaaagactatccgtgcaaaagtcgcctaagggtgcagccggactagcacaacaagtgcgaagaatcgaagtcttcctcaaaagactatccgtgctaaaccctacaccaaactgtccgcgcaaagactgactatagtcgcgccggaccgacataataaacgtaccagaccaagcg

SEQ ID NO: 146164 - DNA, 487 bp, Zea Mays
ggcggccgccgtgactcagtgagctctcgccgcgctgtcacacatgcttcgatttacctcactgtacctctcctctacgtgctaggcatgcactaaagaagttatccatggctgggaagtgatcgctggaccgccgcggctataaatagcccgtgatccacggcgaggtatgaacatcccgcacacagtgagttgaaccgaagcaagaatttgcgctacctctgcccccttctctcaaattaagtgtgcgcagtaaaactagagttctttgtgaagccatagcacccgctcccacccttaatcattcacctgagctcttgaatttcaaacttcccccaaactggtctccgccatcacgaagagcagctcaaccgtggccaatccattctggtaagacaccgtccaaatcaaacattgttttcatgtctctgtatgcttgtgaagctcacggtggcactcgtttacctagttcggccatgagttggcg

SEQ ID NO: 146165 - DNA, 746 bp, Zea Mays
accctcctcttatccgcaagatttaattacaaatattggagctctaaaaagcttgtgatgatgtgctagccacttgttgaaggtgctatatccattaaacatagagactatcgtctcttctgcaagattatttacccgttaattaccatgctcgagctaacaatatcatctatacatgtcaaattaattacattaaatgttagggaatcagcatatgctataggaaccactttaatgtgtgaaagtttatgctccggttgtagtttttagagattgtccatttgttcttgcgaaatccaccaagctggaaagaactaaaatatctacctctcgtatgtaagaggggaagggcaatgtggagggggactattggccatttggtcaattgcttactccctcactcttctcccttcgtctatctcttattcggtgtaaaaccaatattaccaaataaatagagatgtgcatatagagagatgtgcaaaaagttattccgtaatgcactaatcactagtacttgtgaattaacagattttatcgattggttctttgtaattgtcgttttccaaactaaaaaatataactgaccgacatcagttatatatatgtttacaaggctgagctaataatgtctacattgacacagaaattccaatatagttattctgttcattctccatcaattaatagctctacaaatttactaagctacgtccaaatccatatcaatttgaatatcatcatcg

SEQ ID NO: 146166 - DNA, 841 bp, Zea Mays
ccgcaactacccttagacctagcccaagttctagccaatcaaacccgactcatcgaggtcctcactcgaagtctggaaaatcaacgaccaaatggtggaagaccgcaagacagaatgggggatttcctgagactcaagcctcccacgttcaccggatcaagcaaccccctcgatgcagacgattggatgtgcatgattaaaagaaagctggaagccattggttgcctagaaaatcagcgtgttcaactggctgcccaccaactttccgggatggccttagcctggtgggacaccttcaacgtcaccatcagagatgctacctaggcagaatttgaagcagcttaccgggagcaccatgtgccccaagggctcgttcagcttaaggaggacgagttccgagaactgactcaagacggaagatctgtcagcgaatatgtgcacaagttcaccgagttagcccgctacgctccagatgacgtcagtaccgagggcaagaagatggcccgtttcctgaagggactcaggccagaacttaagacaattctggctagccaagacttcctcagtttctctcacctttccaacaaggccatgcaagttgaaagggcaaaggaggaagaaaaagggcatctcaaaagaaagttccaggttctccgggcacagcagcaggactggcaccaatggactcgatcatttggattcccacccaaggggccaaacttcagtagaccagctggacccaccccgtcacggttcagccagcagagtcagagctctttccataccccctcagtggcaagcaaccaaccccaggcgaatgcatgttggcactgcgatgatc

SEQ ID NO: 146167 - DNA, 335 bp, Zea Mays
tgtggaggatttttctttttttagaaggggaatgcgatatttagcatagcggaaatacacttacaaatttgctgagttatgtaaacattattaactgaaataatgtttgcgaaggtgacgatacaattgaatgatccaaaaccttgagtattttcggctccctgctaccctcgctgccagcaaatttgctgagattgggggtttccatgtggcccgtgcaaagcctaggtacacgagaaatttggcatggcttccagcgtagccctagcttagccgctcactattgttacggcaccactcaccagataggaacgttgtcatctgcttgtccgtct

SEQ ID NO: 146168 - DNA, 390 bp, Zea Mays
cccaccttcatttctatgtcttggttgcacggttgtaccaattagtttggttgcaccaaatacgttcccattaaagattgattgatttctcgagatttacatttggatagacgaagtagaatggtatacgcggttcattccatgtgcatagatagaccaaacaaatctaggatgtgaactaaacattaatccctccattctaaagtaactatagatcttgctttttcttaggtttataaatattatcaatatttgtactcatagtatttatgcacccaaatttggtacgaagttggaatgagaatacatgggcataacaaattttcttatgcataataaagccaaacagtggcctccaatcaaatgggcccaaaaatagttgagaagggc

SEQ ID NO: 146169 - DNA, 918 bp, Zea Mays
gggtggagttgctggaattgttttgtttacatcaaagattgtgcaccagtttgcctcccgacgatctagtctccatgcatttgtttctggcttgcacgcttgcccccaaacggccaaacccacaagtttggaactaacagccctgtttttttagtcgatttttggcatggataacgtatgtgtgcggttggtttggctgcggtttgctggtctctcagaaatgctatgaaagaaaattcacctgctgcctactgcttgtattcatccaaggaatgttttaaaaaaaagaactagagtgttacagaaaaatggtttaagaacacaaatggatgaattgattcattgatttactaaagatttatgttttctcctttttggcttgctggtcaggaaccatctgatgatccagccagcctggtacatttagtattgtctgtcatgatcggtgttttttttgcttcccttttggctagggctatctccaacagtcctacccattttatcttctatttcaaactttgccgtgtaaacagtgcaatctgcagtgaaggtcatatctgctggccacgggttaagggatcgcttgttgatatatgcatcaaaacagggtgaaagctagatagagatccataaaaacagcctggttccttactttggtgccactttggtaggtcacatttgttcacccttcattctaagttgctgagtgagcagaaggctagaagctacactggcccgtttcagttctactgatgtctgcataaagaagcaggtgcgcaatgcaaggcctttttgtaacttgcccgtggttgaagctaaaggcctgcatctttgctttgctgatcaagcgagaaagcatctgatgatgatatgtcatgctactggtatataaatgaaggttgggcaatcagtgacatc

SEQ ID NO: 146170 - DNA, 351 bp, Zea Mays
cagaaaatgttgctaacgaaaacaatgaaagttgttcgccaggcgtgtatgtcaaaagcaggatacgacaaggcaatggatgtgttggatgagctcaatggcgttctaagccgattagagccagatattggatgtaatgagtcatgtgatgttagtgatgatgaggaaaaccaggtaataggatcccaattttttaaatgttatactatttgtaacatatagtatgcatagtaacatattatttgtaccaggaaggataagtaaataataataatgctggcgatggaatggaagatgacaattcaattacatgccataaaatggtatgtaaaaagataaatatataatctt

SEQ ID NO: 146171 - DNA, 453 bp, Zea Mays
caggtacaagcttgtggctcggttgggacagaaaagcaaccacacgcaatgctgataccaatggagtactttctcatgggatatggactgtataggccaagacagataaactatagccctcgtagccctctgaatccgttttgtatatcaccagagctcctctctcctgagagcatgggggttaagctaaagccaatcaagacacgagccaaccttaaagcataggaacaggtgatgagaatgcgtaggaactgatgcgcatcccttgatttttttgtgctgaagtgacatagctattgtttccgtgatgtacataagacaagaggttagtcgggtcagggttgggtgggtggtcgattccattgatttgtagcctttaaaacagttgtacattgtcacagatttatttgttgaagggagaagaaataataaggggagatgagatgttgccaa

SEQ ID NO: 146172 - DNA, 401 bp, Zea Mays
tgcgaacttttttagcaagaacgtgcatgcattgaattatctgcgtagggataacatgtgaagtttgaagtgtataattctaaggtaaaacaagacctaagttgttagttgttctttgcataataaatgcatttaaggttgacttacctttttactaatacggagaacatacggatcaaagaagcaaataatatgttgactgttggcttgtggaatcacgaagtaataatatattgtcgtgttaagtgtctatatgtcgaatacgaaaaatgtgcaggtaaataaggtaatataggcacaaattgatgggctgcaattgaaattttgggaggtttgacatgttgattaattgtgcctgttatgctcggatttgaaaatattgagaattagagatgttttcg

SEQ ID NO: 146173 - DNA, 273 bp, Zea Mays
agaacgtgtaaactaaccccaaaacagatattagtcgagaatagtggtttttcttactccaacagctccctcattcttcccaaaaaattagcgtcccgcatccacaacctcctctccctcatattttggtgtgttccatccctccccaatccattcctcaacatataagatcatccacggcctcccgacgacgactgtacagattgcgccacatgtcacatttaaagaaactgttggagtacccatcataattcactcttaaaattttttagc

SEQ ID NO: 146174 - DNA, 405 bp, Zea Mays
tgggggaagctttcgtcttgactataaaggggccttcccacttgggctccagcttgcccctggactctgtccgaaccgttcggacgagtacgaggtctccttcgctaaattccctcgggatgactgcgtggtcgcgccatgcttttgtctgagcttggtatttgtttagggcctgcagagcgaagactcggtctccgtcaatgagatcctttgaagttggctcatccacgtcggggacggctgacggaactgttcgcggggacccatgttttatttcttgcggggtcatggcttccgatccgtatagaaggcggaaaggattaaacccggtcgccctgcactcagtcgtgtttagtgcccagaccgcctcgggtatcaaatcggtccatctgcctttttttcatc

SEQ ID NO: 146175 - DNA, 350 bp, Zea Mays
cccgccgctctctctgggcatcttgcccttgtggtctctgtttcctcaaattggaaacgaattcaatcatccaaccaaaaatcctgtaggttccttgccactcccgtcaagcgcacggggacatatgcttgccttgttagcaagcctgtagcactacgtctttgtcgcactaggtctcataaaagttcatccctcttcttgcttcctcggtttgtttcacgggattgttccatgccgaccaatttatcttgtatgcaacactcctaactagctaggagtacaattgtaccgtaaattttgaattttagctactccttgttttgatcgtgattcgtttgtgatggctgcag

SEQ ID NO: 146176 - DNA, 1250 bp, Zea Mays
ggtcaagttagtcaaactcccaagataatcaggaatctgcccactgaaattattgtctgatgcccacctagatacatgacaagagttggtaagattattagcttctacctccaaaggaagagcaaattcacgaggtgctagcttattttactaaattacaagattgacaggttcttcagctgggacaatgtcgatggtagagaaccactgaagtcgttactatcaatgtatctgcaactcaaagttggatagcatttttcagttatgtcatgcatatagttatcagtttaaagagtgaagaaagcatagatggtcatgtagaagacatgtaaagcaaccaaatagataactcacatttgtcgaagttttgtcagtttccccagctcatcaggaagtgtgccgttaaaattatttgagcccaatgccctgaaagaattaactaattaaattaagttcgatccaaagaaaagttcaaatggaagtgctgttaagtgccttttgacaataaaaaatttgaaatgctggtaaaatgttggattgggaagatgtgcattcagattctcacttccattatattatactaacttcgtgagaaaacgatattataagattatactcgatatatggccatagtatatgcaaaacttcaagctcttggcatacagcctcatgattttcatacaattggaaagcaagtatttttttaacgcaacaattgaaaagcaagtataaccaggacaacagatgcatgacagtaactgaacataaatattagtcagagaatatccatttgttaagacttcccaggacaataacgtgattggaggatcttacagtgataagagattggtaagatttccaagctcctttgggacaggtccagatagtgcattgatgcccacggtccttgtgatttttcaaggaaaagaatgtaaataagattgctgaaaaactgggaactgcagcacgtttttttatttcagggtattacattgattccagagcagttagttctccaatgaatgctggtaatggcccgtagaagtaattttttctgaagtccctgaaattttaaggtgcgttaatcctgcaagttcaagcgataactggactggttgaatgcagctactgatttttactatcaacatgaatctgaaaaacttcatgtgcactggagatttcgagtcgccttcagcttcaagttaggtatctcactaatgcctgcctaaggaaaaaacgatcttaaccaa

SEQ ID NO: 146177 - DNA, 767 bp, Zea Mays
aggcaatacagattcagaaagatcttcagtaccgtgagaagccagtaaagattcttgactcagcagtccggaagacccgcaactcagaagtgaaactctgtaaagttcagtggagcagagaaggagaagaggaagctacatgggagagtgaggactctttgaggaaggaatacccttatcttttctcaaatctagtctaaatctcaagggcgagattcctttaagtggggtaggtttgtaacatcccaaaatctcaacccaaggtttggaaccctaatctcctaacccccccttatttctattttctccctaaactccacccttaggtcacctcatcatatgcatacacttggattgttaggagcacctcacatagattattttcaacacttaagattatttagcaaattgttgattaaaaagaaaaggaaataaaaagaaacaaaaatagaaaatggaaatgtgaaatagaaaacagaaaaagaaaaaaagaaaaaccctcccccctcggctgggtcgtatccggcccaaaccacgcccgcacccgtttccccccctctcctcccacggctcaagcgggcctagctgcgcgcgccctcgccgcgcctgacagcccggccccaccggtcagcggctcctcccctctccctctcgcgccgctctcccactggcagcccgggcccgcttgtcaggaccatcgtcccgcccatgccttcaccggcgcgttcaccgccgaccaccgccgccccgtctcctcgccattaacg

SEQ ID NO: 146178 - DNA, 292 bp, Zea Mays
gttttagggcagagagggtgctttgaactacaactctcttctaagagtggattaatccctaaagcttatttttgttggcatttaagtgtaataatatgacttcgtacaaagttttagccactaatacctattggtcattttactgtgattttctaaagttcttggccataggggtgctttctactaccacaatacttgaaaaatgttaaacaacagatttccaatttttcctatcttcttctttttgcaagagcaatcattctaaaatttggcaacttttttcttaggggaa

SEQ ID NO: 146179 - DNA, 531 bp, Zea Mays
tcacctttgcggctagggccctaggccctgcgtgagagccgcaagtcccgctgtggacttcgcgcaggatttggacgccttcggtctcggtgacacatttaagcatgggttggctgacccccttcttgtaaagctggccttcaatgagtgcgaagtcccggcttcgatgtctgaggcgcttggcctcgttgatatcggttggatgatagtacacatgcaggaacagggttattggtgcccgccagtcttcggtcatgatgaggttaactatgtggtggccctcgctgtcattggttatttggagcccctatgggctgcggacggctggcgtgccgatgatgtagtagaatatgtcggagggcagggcctcgcctctggcggctgccttggccaatgcgtcggcctcctcattcttggctcggtccacgtgctgcaaggttaagcctttgaattgcctctcaagactgcggatagccgcgagatactgcataagtgcggggtccttcgttgcgtaatctttctcgacttggc

SEQ ID NO: 146180 - DNA, 424 bp, Zea Mays
gcggtctgggggtgagagacgatggagctaccgtcactcatgggaagaacaactcagattaactcgagccatactggttcggctcaaggcacggttgccgttgggtcatacatcaatggtggggaaatcataccgtacacgttcggttgtttcatccgagtcgtctacattgtttgggacggttgagatcagagctcggttatttaaatcgtgaccgtagagactagatcggatggtccgcattgggtatctgttcacaatctttaggctccgatctggcgcgttcgtttctaatcgggcggttgataaaccaccttaccccttcgtccgcgccatcttgtaaaagagcccccgaggaaagtcaaaatcaaccctccatccccgttaagtgaagaaatatttaactaaagcccctaaaatttgc

SEQ ID NO: 146181 - DNA, 722 bp, Zea Mays
gatttttgtgggtatattgcatggctccgcctcattaaaaacctcaccccccaggaggaaaagagtacgggccagaacgataatgtttggttaattgcaagggcgtgatggccctgaggaatcagacaaaaaatttgcggagattatcaatgttccagaaatgctccaggtcttcgccagattgtgttgttagcttgtatgtgctgggggacgacttcgtcttgacgatgaatggcccttcccacttcggctccagcttacctcgtgactcggtccgggtcgttcggacgagtatgaggtctccttcgtagaattccctcgggaagactgcgtggtcaagccaggtcttcgtttgggcttgatatttattgagggcctgcagggcgaagacgtggtctgcatcgatgagatctttggaggttagctcgtctatgtcgggtgaggccgaggcgcttgttcttggggacccatgcttgatttcctacggggtcatggcctccgaaccgtatagcaggcgaaagggagtaaacccggtcgcccgacattcggtcgtgttcagcgcccagactgcttcaggtagcaggtcggcccatttacccttcttgtcgtcgaggagcattttcttgatcgccgtgaaaatcttgccgttggcgcgctcgacgacgccgttggattgtggatgatatactgaggcgaaggcaagtttggtgccaatggagaag

SEQ ID NO: 146182 - DNA, 436 bp, Zea Mays
actgcatgctgctgttactggatgtgtttgggataattggacgatcaagtttttctccgtttttcgttttctttttatgcagatgagtgccccctcctttgtgtgagtgtgtgcacgcgcgcgtgtctgatggtcttagaattttactttccagtttggtttggtgtcagtttaatttaggatttgacttggcgaggatgcagatggggaagtgggagtcaaccacagcggctgcacacattttcttatgtgtgtgcagctttagccacagctgcaacagcagccggcattttaatagtttgtgtttttgttgagcctactggaaatctgagatggtacatggcagaagtatttcattatttcaattggttgaaaatgctaccttgcttcttgttcttggtggatttgcttgtgcttggtgctaatttttttgggg

SEQ ID NO: 146183 - DNA, 519 bp, Zea Mays
gaacaaaagagagatgcaatgagcgatgcaatgagccgattagagacatgtataatcggatacaaatcacacatttagctgaaaaataagggttacaatcaaatccacttcaatcgacaaaaaatgcttcaaaaattgacggaaacctcgatgtatttcaagttggattacctattacttctgagaaagcattggctcttgaatcgggctctaatgctcgaagattgaaggagctcagctggattggagcgacggaaatcgcctggcgagtcgcctcggacgcaaggaaagacggagcggtcgctggggtttccttcctatcggcgcgggattgtctctgttgattgcgcgaagacggttttagaaaccgggaaacgggggagacgtggctaggctgagatataacagcgccgtgactgggaactgctgaccaggtctggttcaacccaaatgagcatattgactagcctgggcttcctctattattggaagcctagggctcttaatatataaactata

SEQ ID NO: 146184 - DNA, 335 bp, Zea Mays
gttgatttgataaaaggacaggggctctttaagaatttgtcacggccgaaggggtatcagccaccgtgagccatccgatcgcccatcaatcgacgggattagatccccctttatccgaaccggtacgcgccctcagccctaggatcaagaatctacggtgtcgattttatgggaacagatctcccatcacccgcacgatcatcgatctacgattcacgtgcactgacccaagcagtttcatccgatgaaatctgagccattgctgcccaatccgacggtcatcgagcaacccgcccaatcctcctgttgaccgtggcggcgccgccctgcccgcg

SEQ ID NO: 146185 - DNA, 287 bp, Zea Mays
aataaatagagagtacaataagtaacgagttcaggatacaatgctcgctgaactgatgaattggtgttcgatgcatcagggacatgacgtccgagcttctttatgcatgatatactggatgagaaagctatgaagcctgttccaggtgaccaaatgctggggagtggtcctggcttgtgctttcccacaagagtacaagcaggttggggcaaaaactctgcctcattctcaaagttactcagagcagtccctaatccgtataacctattaagagattataggaaaat

SEQ ID NO: 146186 - DNA, 435 bp, Zea Mays
accgaggtcgtttgacatggtttgacatcagttttgtcgctggtgaacagtgcagacatacaagacttggtgcccgcatatcttgcaaactagggcagatcttccatggaaacttacacaaactagctagccctaggtgccaggaagagatcttgcacaagacatttggcgagattcgcacgctttggagctctgcaggcgcaagaactcgggcagatgaacacgaccacgtgttcgacatgccctggcgacgctagagcatgccctcggcgctccgcccacacgcgcagccccgcgccgtgccaaccccacgtccatgcccacgctcgcagctataaaagccacctcggcctcgaccgtacacccccacgcgtccctgacccagcccgagcacaagttcgccggcgtttgcccagagagcgaagtgctagcgac

SEQ ID NO: 146187 - DNA, 434 bp, Zea Mays
gcgacacgaaccaacagcacgacaagcgttgggagaagaggcctcacgaagaagttcacgccgccggaccacctgcctctcgcgcccgaggaggacctcgtggaggcgagcgcacgttggacgacatcctcgacgcccagtgcccgtaccacaaggacatgctccacacccttcgaaactacagagacttcaagcactccgtcgggcatggccgacccttccaacctctacctcctcccccgccgcaaggaggaccaggagaaccgcgacaaccccagcagcaggaggagggaggaggtggagccttcccgcgtgtcgacagagaggtcaatgtcatcttcggcggacatggatcgcaggagaacaagagacaacaaaagctcaacgatcgccagatactggtggcaactaccggtcctcccgccccataccga

SEQ ID NO: 146188 - DNA, 474 bp, Zea Mays
aggatagcagccgtacgatccagaatcgagggctcagattagatcggatattaagtaaagcggtatgaaattgtggccatccgatcaacaacagagcgccaggattagatttctcttaaaacgaaccggtatgcactagcagtcgttggattaagatccgatggtcccgagacatccataccccgatccaaccgagaccattagattgacatctagcggtcacggttcgatacgacgaaacgttcacaccatttaatctcagccgcaactcctgagatcaacgacccagggaccgtgtctttcccaacggcggcaaagccaccacagcggcgacccagcggctcgccgggcaccatcgccggtgtagaccacccggcgccctggaatcccgtgcatcggaacagcctacacaagttttcgcgaagggtacagtgtatgcaatagggagtattttaccagagacgaggaatttcc

SEQ ID NO: 146189 - DNA, 688 bp, Zea Mays
ggatgacgggttaattgtggcaaagggtaggggctcttaagtaagaatgccaagcgaaggggtacggataagccctggccacccgattagagatcaagggcccagatcgacttaacgaatcattttccctcgctctaatcctcatcgtctgatcagatatcaacggttctaacttactcgcccaaaacgatccgaacttatcatatcgtccgtcaccggccagatcaacaacacagatccacccactaaaccggtgcccactcaatctaatctgagccatccctccgagatctgacaactacggcgcgttcttcattctagctgcccagcagacccgaaccatggcggtgcagagcctcccctgcggtggcggtcctgccagagttggccaaaccaacacccaagagccttgctcctaaatccgatcgatcctacacggtctaccaaggtatatgagacgatcgagaagatccttaccggtgattacagcgcggaggttcccggccacggcgtgatgcggcaccgcggagaacaccctgcttcgatgagctattaggctagcattggcgctaaatcctcctaggtgtggtaaggataggctccaaggggcatcagcggaggtgccagactcacattcgagccaccagcgccaatgtatgcgagcggtcgcggtcgtggcgcagcttcc

SEQ ID NO: 146190 - DNA, 483 bp, Zea Mays
agccgtggcgggctcatcggcgatgatgggacggcagtagggaattacggcggtgccgtggaaaggctcggacacgcggcgggcatagagatggcacgacggtggcgagtggctttatctacggcggtgagcaaaggggaggggtgtcgtggccgatcggggtggcttccagttcagcggtgacgacgatcttttgacgccgcgaagttatccacatacccgagcgcgaatcgttacgccggcgacgtgaatcacggcggaaagccaccggcggtgggtttgctggcggccttatctgtttcagctatacactgtaccatggtgaacaccccatcaaagaacctgacagccagagttgagggtcgattttcttccaaatttttgtggcaacacaaaccaaattctgtagcaaagttatagatctactaaccagctacaagtttgtcatagatgccatgggcagattcatgctggaccatagag

SEQ ID NO: 146191 - DNA, 550 bp, Zea Mays
gtcgggtgcagctaaggcttgaggggactatgttgttggctagggaggaggtaggggaggtcgttgggaaagaagatggagatgttagtgactgtccctacaagaaagaagaactgagcatggtggtgaaggaaaaaagaaaagaagcaagcccaaatagtatgtgcgggtgagtaaatagtattagtggtgagtaatttcttgtaactttctcgacttgctatggattttgaatactccttacatgccttcaatctctatcgaagtttgttgatacttcgacatatttcacaatgtcttgtcactgttaccgagagtcattatctgctctagtatattcatccatcttatgaagcaacttctataaagtgtgggtggctttgcaatcaagtacttatagcatggtctcgatcaaatccccttgattataatctcaataacaatgtcgtctagtacagttggtgcttgtgctctgattcgaagaaatccttggacatagccttggagatattctttaggctcttagacatactgaaacaaagtttgggct

SEQ ID NO: 146192 - DNA, 349 bp, Zea Mays
ccagccgccggtgagctcgccgtcgcgacggtgaacaccccgagctcgcacccagcattcgcctaactaaatccttcatgctacagagagggagaacagatcataccatgaattggaacgaaggcgaagctggcacgcaaatccctagctcgcaccgcgacggaactccggggattcccaacgccgagtcgcaagctgcttctgccgccgcaccaggaagtcacgccgcgcccggacacttagtggcctccaactgaaggcgagcagaggacaacggccggcgatatgtacacacgcactctctctcctccgcaccatatccgacctccgaacggcgcgagggagctcg

SEQ ID NO: 146193 - DNA, 374 bp, Zea Mays
gtggatgtttcaccattgaattaaaatgaattgttgaagctagtaatggttgtgcttagtgcatattaccccttcataaaagagtgttgtttgaagacattgatgttgatgtatagctgcatccaaattcgatggtgtgaaatcgtagtgttgattgcatctatgacttgctttgagcttcattgcatgttgtttcatgctggatatcaggttgtgtagtttccttagacaattagtccgaggtagaagttcttgtgttaattaagactaataatggatccatgttttgaatggtggtgctatatggggtaccttggatgctttgcttggagtggtcgaattcgaggacgaattctttttaaggggggaagagt

SEQ ID NO: 146194 - DNA, 512 bp, Zea Mays
gaggatgaaatgtcaagcatcctcagcgtcattgtggtcctgcagcctcaactcctcggcaatagcagcggcctcggcgaccggatctatctccatttccatggccgcgcgcctgctggacccccaattcctctgcggctccggttcctcaacgacgagcgcggcaccaacctaatcggtcggcgaccttaccacaaaacaagagaggattagcgacagccgacaaattagtggattagagaggactcagaggagaggaagatagagaatacctgcgcaggcggagcactggagaagagaggaagatggagatccaccgacgacggttagggttagggacttagggttagggttggcgttagctgcttggggttgggacttgcgagtagacagtagaggtagatccacaaccacagtacacaggagggagagaagaggctctggttcggcggttcctcaacggatcaactcaacttgcgatgcgacgaccggacgacgacgaccggagggag

SEQ ID NO: 146195 - DNA, 613 bp, Zea Mays
tattctaggatttggcaactttttgcttaagggaagaggggtagaatttctttgattttatgacctttttcatggggtagggggtaatgggtgttactttacatttttagataggtttcatatttttctccggtggtctacttcatcaatagttgggtaagaatttatttgcctactattgcacaattttaggcttcctcatggtttaattagcacatgagccaaaatcaaattttaattgttcaacccacttattatgatgggttggggtgtctattatttttgtagttgtgttctagtagttaggagtctactgaattttccttaccagttttgaatgacctttatatttttaattatggctttttctgaatttcttagcacctaataattatttaaccttggatttgctctggactaggtttctttgtatttttcctatgttctttatcacctaagtatacttggaaaaatatgttcatcctttgtttattgttttctactgcctttcttgattttctaagttttggacagatatagtctttaatagcaaaacttgagttaatcttgtatactggggtgcttagtatttttaaacagtgcttaagttggg

SEQ ID NO: 146196 - DNA, 354 bp, Zea Mays
gtgaagacacaaaaactgggcgatttggagaaacgagggtcaaatgactcgataacgacaaattgtgccataggaggtttgaaatttgaaaggaggcatgaaatgatgtgggattgagtcgatacttcacagataggtatatatgtgtgaagtgtgagcttggtttgaaattttgcggagaaaacgaatttttggcactcggctcagaaacgatcgctataaataggaaacagtggtgtattcggtgtctgggatatcggataggcgtgaaatttggcgtggaagttattggaggtgtcatgagggtgctggaaaaatctggggttgatttgagcaattttgagtggtttgggc

SEQ ID NO: 146197 - DNA, 297 bp, Zea Mays
gtccccttcattaaggacttcaggatcggctcgtcgggctgagcctcaccctcgaggggctattattggggcgaaggttgaaccagacttcgatcgacctttgttgactaggactttaaactaaatgtaaatgtgtctgagcataggagtaggcgtgatcagagaccttggagaacgcacgatactggtgaagcctttgatctccatggctggcgatagccacacgaagacgtctcaagggggctcgccgaggatgaagcccatgttgtgacagtcaagcgaagtctcatgcatggt

SEQ ID NO: 146198 - DNA, 1152 bp, Zea Mays
accgagcgcaatatttcttaagagatcaggggctaactcgcaatttctcctaagactcatattcacccggtgtaggatggcgggttgattggtgaaaagggcaggggctcttccacaaatgattcacgccagcaatcacacatgtgatcgatgtccatcggatctagatccaatggtcaaaataagattgtgaagtggtacgacgttgtggccatcggatagtcgatcgacggtcaggattaaaaacacttgagatcaaaacccagtcgcaggaatgattgggcgaaccagactgatcaggcagaccaggtaccgcgtccaatcctagctgttcgttacaagatcaacgatcctagcctattcttcattccccagccctctagcagccgtggccgaaaccacaagcctggcgacgccatcgctggcgttctcaggtccccgtccaactattctagcgcgagtatatctcagttcaaattcaagcagggaacgtggggctgatagggtcaccataccggacgctcggtggcccccaagcgcggggacggtcagcaacagctcggtcgaggcatccaacttcgacgagatctgcccggcgaggtgagctggattttgtgctccctgctgcgcaaccccaccgagtgtcgcagagacacatcaccgttgcacgccgaggaccaagcgatggcagaatcgccgtggtgtctacacgattctctcttcctggcgagcagcagcaccgtcggcaagctctgcttcaatggatcaaagatgcaaggtactggaatatatatatactcggggtaggcagatcgtagcggggtcctaggatcaaatcccaacaaacccgacggttatgggagttcttaacaaactgttgcaccagccccgggttcacggcgagaagatgcaccggaacgtgagcctatcatcgaggtcccacgcgatggtgaacaatctcctgtgaacggtgactgacagcacagccccacgctccaatgaccgagcgaacgaacacgaaagctgggatccaaacggcagtttccaatttatacggttcatggtgggaaaggaaagataggcttccacgctattggaccagactggcagcgacacacatcacgtgcggcaagctgcatattttgttgtttg

SEQ ID NO: 146199 - DNA, 757 bp, Zea Mays
atggcatggtgaaggggtacagatcgatcttggccgcacaattggcaatccaaggtctggattagatctgcaaccatctgaaacatggtgcaacataggcccttggatatggatcaaacagctatggctcctaagtcgcgtggattgcatggtgaccgctcgattaaggatctacggcttggactaaatcgcccccaagccgaacatccatatgtgataaatgccacacgctggtcatccaacggtcgacgctaaccaaagctttcccagctggccccgacggcgccgcccacaaactacggcggagcttcaccggcgaaccatgcgccccatgctctagtgctcggtttctcaatcttttaggtgctaaacgatgtgcgaggtgaaaccaatcgacgaggcagggtctaaccgagggtggcggcgcagagaacccccaacacgaccgactacggatccgcggcggcgctaaggttcccgcgagcgattcacgtagctagggcgagcatctacctatgattctcggtgttgtgtaacaaggggtaacgagcgggaggtaggacagtttcttactggcaacggcgcggcacagagctccaattgcggaacaatggcgttagtggcggaatcgcacggcggcggatgagatccacacggaattccgcccagtcctcactgcaacgaacgctcccgcaccgcgcacaacctccacccacgcaaattgaaccgcgaccgagagttccgtggcccgaatcga

SEQ ID NO: 146200 - DNA, 311 bp, Zea Mays
gtcttctgctggtcatgttgccgtgagctaatcagctagtagtagttatcagtaattgttactattaattaattgattgaataggatgctagtagcagtcccaggaagcagcaagtgactttatcagcttgtttatctttagcaaaagtacgtaaggaatagtcgatctggtaaacttttgttcggtgcgtgctgcgattgccctccacctccatggtcggtacctttctccacacacaacacaatcgctgtttcgtgcccaggaagttgcaacgttgcatgcgcaatggcgaaaactggctcatacttgc

SEQ ID NO: 146201 - DNA, 411 bp, Zea Mays
atataagtgaaaaatcccccgcaaaaacatgcgtcgaaaaaagaccgcgacgacggtcttcgacattcgaccaatacgacgtcaccgcgaggctcggcgctagccaccctcgcgtgcgacaactccgggcagaagtcgcctaaaggtgcagccggattagcacaacaagtgcgaaaaatcgaagtccaccgtgaagacttaccgtgcagaagtcgcctaagggtgcaaccggattagcacagcaagtgcgaaaaaccgaagtccactgcaaagaccatccgcgcctaagttgctcgagggcacagccggacaaagcgcaacaaaagcaaaaacgaccacaccaaactgtccgcgccaagacctaatacatacgcaccagtccagcataacaaatacacctaaccaagcaca

SEQ ID NO: 146202 - DNA, 314 bp, Zea Mays
tttcaaatcggttttgaatctatgtttaatatagaaaacctgtagatcggttttgaatctatgtttaatatagaaaacctgtagactgtgtgtttgacataatttttacagggataaaggtgggagcatatcctgtacgcaaagaagtcatgtgctcccaggcacaaaatgcatccagccgatccgttctgtatctaacggtgttatgacatttttgcaaataagtcttcccacgcttcccacattagtgttgttcattaaaaaaaccccggtacgccccttctccccaaacagcaggcaaacgcatcccaacg

SEQ ID NO: 146203 - DNA, 382 bp, Zea Mays
cgatgctccagagtcaaataaaattgatgcgggtatggagttaacaaggaacataccatacaccacgtcggcatcctcaggcactgattctgttgtgacatgattgacccttcctctaccctggttctgtggagtcttgttctgtgcagatccacgagtgggggtgttctggtcattcctctgagtgttgctcttctgaggtgtccgttggttgcgccttgggcaattgttagcatagtggcccagctcaccgcacttgaaacagccattgggttggactggtgcattgttgcttctggcctgcgtgttcatggcaccaccttgacgattctgtgaactcccaccagacctctggttggtctgggagttgttcctctgctgg

SEQ ID NO: 146204 - DNA, 630 bp, Zea Mays
actagaatgtgccctggcgctaacaactataacacttgtttctattgttaggatgtaacaatcatcttgaccgattgcggaagtaaatgtggcgtgctagttttggagttttttcctgacttatgccaatcgcttggctggtgaggcatagtggttgccctaagatgagtatacgtgagcatgtcgcaccgtcttaagtcgttgccgacttaagccgattgctccgttagtagggtatagtggtcaccctaagtcgagtaagcgcgagcatgttgcaccgttttaagtcattgccgacttaagccgattgctccgttagtagggtatagttgccaccctaagtcgattaagcgcgagcatgttgcaccgtcttaagtcattgccgacttaagccgattgctccattagtagggtatagtggccacactaagtcgagtaaacacgagcatgttgcaccgtattaagtcattgccgacttaagtcgattgctccgttagtagggtatagtggtcaccctaagtcgagtaagcgcgagcatgttgcaccatcttaagtaattgccgacttaagccgattgctccgttagtagggtatagtggtcaccctaagtcgagtgagcatgttgcaccg

SEQ ID NO: 146205 - DNA, 693 bp, Zea Mays
ggcgtattatttgtatagtttataaaggaaagagtaagtagtttgaaagtctctctttcattggttgctccaaccttttagttttaagttttagagataaatcttgaataccaaattcttagttatcattatgtgtttagtttagagagatatattttatagaggaatgaaattgttattggaagtcatttcccaaaatagaattttaggtgctacacgttagtagacttcaggtcatctatttgcttctggagagagaggattccaccgcgataaggaagatatttgctcaggtactagaactccatgtgcttccagttgagcaaccaccaggtccaagacactctatgaaaccaagagctagcaaacggaacacccattggtaaatgcaaggtagcgcaagacaagatacaagtacttgtaaatttgacaagaagagcagaaagcccaaagctagaaccactgaggcgctccgagaggcaatgacgttagtagaagccacagtttgagcagggacaagcattgaaggatccggatccctgaggctaagcacaacacccattgggatttcaacaccagatacacccattaggaatttagtgccataaacacccattaggattctagcgctagaaccactgacctccaaggtggttgggtcggctggacaaatgggcatagcagaacttgtta

SEQ ID NO: 146206 - DNA, 305 bp, Zea Mays
gaatcatttcaagtcggttcaccaaatctacagcgggaattcttctgttggtaacccgagtcgagtcagctagacctcggtacagataagccgggtatgccctatccttcaacggctgaatgttcttaaagacaaaatcagcaaccacaacctcagcagtcagacccctctccttcagcagtccaacttcagctagcaaagcccctgcctcagccacctcctgatctatgggggactcggtccaactcggggtgcgaacgtccggctgtctccccgaccgtggggggagagaacttccgtggttc

SEQ ID NO: 146207 - DNA, 510 bp, Zea Mays
gtcaatttctggaaagttcgggggctccggggtaagaatctccagactcagtgaacagtggaggcggatggcgggttattttaacctaaaccgagggactcataagaaaaatggtgtggctgaaggggtatggacctatcgtgaccgtccgattagattcgaagggctgagattaattccatattacatcgaaccggtacgcaatctaatccatcggatcaactaccaacggtgacgattttaaatgggctcgatccaatcatgcccctgcgttgacgatccgacggtcgcagatcacccaacccaaacggtacgctgggcgccatcgcagccgttccctacgaaaccgacggcgcgcaaaccatcttctcccctggttgccgagcgcgacggcgcccaccctcacggcgacccgctcgccggagaaccatcgatttggccacaaacccacccgaatttccaatccaaccaagccacactaagccaaaggtaggccgaacccgatagagc

SEQ ID NO: 146208 - DNA, 479 bp, Zea Mays
acagtcctacgcgtagaggggccacagtccaattctacagagatgcttaccaccgacgatcaacggtgagaaaggctggccatgggagagcgcagatccccgtgggagaaggacgtcggcgagcaattcgttgttcccccgccgatgtacgagctcaatgacccctcggtcataaccgagcacccattgcgcacgcaatcacccacacaccgccaccaatctctcagcgaaacctgattccgaccgtggcggcggagtttctcccccacccgacggtgatggtggcgagttcctttgtggcgggttactcacggaaacacagtgctatggaggagagggtgcgggttgggatttatactcccgagtcgagcccatcaggggagagtaccgcggcttgggatgcgggatactgtgggttgatcgcaacaactgaagctagaagaaccacttgacagggctggcccacatgatgggggcaa

SEQ ID NO: 146209 - DNA, 348 bp, Zea Mays
cgggtagaggcagcagacttgttatttccgctctttgcaactcctctctcgctctccactcgccaaaaagttctcctttgtcgattgtgcacggacggagaagggaagttacgcacggacagtccgacagcttgtgaaaagttcaaccaacatgtcgtcatcacggtatttcataatcttatggatttcatcaaatctattcaattttgggattattcggatttcctctctgatctagaattgagcaatagttttacaaatctgattggtgggattgttagtgctactcgctatgaatgttgtgcaaaaatttgaatgcatttggatggatattctctgtggaatcat

SEQ ID NO: 146210 - DNA, 287 bp, Zea Mays
gccgacaccccgctcagattctttccacccttttagagaaaccatccagtttgaatggccaggatgcgtgcattggaagagcagcagctgcttgaggatgaccccatagtcgtgtacctcactgcatacctgctcaccctggatgcacaatatgatttcttggctcggcaccaccgtgagatgattgcccgagcagaagatgcagagaagctcaaccgtcaactccatgtggatctcaccacagctcaagcccgtacaactgccttggaaagtcgtgaagtcattgc

SEQ ID NO: 146211 - DNA, 1355 bp, Zea Mays
ttgtagcataaaatgcatttaccatgaatacatgatacatatcacatgacaatcacagtgaatgaggtggaagaagtgacacatcacataacccacggtgaatattgtaatatttaacaaaaatatatggtggactcgtaaaaatattttagttagacaattcaggagagtagtgggttaatgccatagtaagctaagacaacacaagttggaagttaaatgaagcactgaaatctcaaacatcttggcctctttcttctaggagagtaaataaatctatatcaaagttgctagcatatgaccttgtgatgcctgcaccaagaataggataaaataaaactacacctcattttataaggttcagcaagcaatgatagccctcaatttaccttatttactaagttaacatccactgtttgtactatgttttaatcataataaggtttacaaattgttaatgtaagataattatgacttacttaaattatccttgcaatcattttgtgtgccaatagacataattaggaaagttcaaaaggtgttaacttagtgtggattactgagtaaataacagaaatgtaatgctagaaaccatgtgttatcccatttaaccaacaaggcaagaagcagggagtggaataatttaagtaccaatgaccaaacgggtgaaaaagtacagtggaaaaagcagtcgaggctgccaacaggaatatgagttgctcctttcctccatcatatgaatcctttgcatccatttgtaaatgaactaagtttttgatattagaaactaaaacaagaacatgggaaacattggcataaaatcattcaacgaatcgaagaaaattggatatttacgaaactacaaacaaagctaaggtaacataatgaattgacgcgagcaaaactaataaaaattggtcaaagagtgatggtatacgatgccttcaattatatggtacaaaataaacaaaaaaaaggatcatgtatttttttagtgggaacaaacaattttcttacccattgagaaaacttaacagttccaaataaattcttttgtagttacacagtatgtgtgtgggttgtattcttatgctttcttctccttaatgcaatgatatacaactctcctgtgtgttcgaccaaaaaaacgaaacctaaaaagtcatcagaagtgtagctcctagcagtgagaacttgtaactacaaaccttacaagttgtactactatgtataatttctgtagtggaggacgcaaaagtttgaacatctaccatgtccaagcacatatatttgatatataaggaaaaggttcggccactcattaagcaaagaaagctgacctacacaaaatttgg

SEQ ID NO: 146212 - DNA, 677 bp, Zea Mays
aactaaatgaatttctttgtattcactcactgtcatatttcccttcttgagggaaggaactccttcttgatcttcatcaacccaacaggaatgtgataatttctgaaattagctgaaaactatgcccaagtgatggtgtcagcagcggcgtgagcaacatagtaggaatccaaccaatcagcaacggggtcaatgaggcggcccgatgcatatatgaccttctcccggtcagtgcaccgagcaatgttgagcatcttctccactttcttcagccaatcatcagcctttagtggaccaggggagctagagaaggtgggcttatggctcatgaactcgcgatgcttatccttggttggtgctggtggtggaggtggtggatgctgttggttttagcggagctgagcttgcatctctgccatagtgttggacatctattgcagcagttgcatttgggtggcaacaacaacatcagacctagcaggtggaggattcatctccggtgccggattagctactgccctccttcgacgaatacacgcaggtagatcaacaccgctccctacctggtatttaccatctaggttagagacatagggtaagatagatttgtagataagataaataagtaggaaacaccctacttttaggtcacgatcttttgggtcacaatagcttag

SEQ ID NO: 146213 - DNA, 1612 bp, Zea Mays
aaaaaaattaaataatggagtcatcccatactagagtattcaactgccatatttgacctaagtccaaattctccacaagggtttgaattaaattggaattcaaatggaattcgaaaagagagaaaaggaaaatggaaaataaaaagaaaaacagaaagaaaatataaaagcgcgcgcggcccaggtactggtttcggcccaactcggtccaattcgcgccagccaagtcccaccacgggcacccacttacgtgcggggcccacttgtcggttctctgtagtaactgcgtgctcgctgacgtttggcccccaccgttttgaccacgcgtttcccagtcaccgacggatgggctctggcatcactgccactggcgtgtggacccaacgcctcagctcgtcttcgtcaacccatggagttcagaacagtagccgctgagatccgatttctgcgccgtttgcgtgatcggcgcgatggtggctgttgtgggatttaaaagggccaggaccccctttcacctccgtgatcctctaaaccaatgcgtgcacgcggccggggccagttcctcaagcttcctccccaacaactcctccgcttcctgcgcgtgaatactgctggtgccgcaacaaactactccgtggtcagcgcgaggaatccggccatgggccgaacgacgtgaattctctccccgcccggctataagccccaacctcctcctttatcgcctgggtaatagaaacccttctctgttcgccatctcgaatcgtcacctcctcccaactttaccttgagctatcctcgtcgcgacggagtgggcggagcttggcgtgtatctgcctgactggtagaatcgcggcggtgcttgtcattcggggagagcaggaggtcgccgccaccaagtctggccatcttccacgtcgcgctctgccgttgttggtcaccagtatgattttcgggggcgaatagaagaagtcgcgacttcggcgctgccgcagggccacacatcggcgtggtctgggttccctgcgcgttcaccatcggtaagaatcccctctccgagccgccatgattataaacatcacgttgagtcctgcggttttggaatcgagtgttggatccgtcgcatcacgaccaccagggttgctcgtcgtcgggtgtgcgtatcgccgcccaggtgtatgggtcgccctggtaatggcttgcgaagagagagagagtattgggcgtggggtagaagataaccagggaccatccgattggtaacgtacggctgcgattagaacatggatttacccccttcggatgtttaaatcacgatcgttcattgccgatccaacgcatctcgtagcgtatcctttcgggttataactgagtccatcggatctggatcgtgcggccgagatatagagataccccttcgccgtgcccatttgctaaagagcccctgaaaaataaaagaaataacccgcagtccttgttctactgttacctgggtctggtgaatcttctgggttagcccctgcactttctaggatttggcgcgcagtccagactgattataaaacagagaaaatcatttagaaattgatttttagtacaaaaataattcgagaaa

SEQ ID NO: 146214 - DNA, 1010 bp, Zea Mays
tagcggtgtctctcagatgcgagctcgttaaaacagacgcttccgtaagcatcgccagggcggttgcgacctgtgcatggctgttcagacttggttccctcggagtataaatatcaatgtctggcaacacctttggccatggcgcagataatggttaagctaggctaccaggctaaaccttcctcgagcggagcgagagaaagacaaagaagggtatgtcgtcgcggcaggcgatcctcgcgtgcacggccaggtctgagcgcggcatgtggtatagaaggatagcaggagatcatgatcgtgcgcgtgcgagtttccatgcagaagaccgtctggggatgcaagatccctcgtcgaagatgcaaagctgtcgatctgtttccagccatatgcaacctcgccttcacctctacaactgtggtgagtcacccgatctaatcatggccccgcggtgcgtagaacctcttgcatgaaatttagttcgctggaaaatctgggtcgtgggattggagttggccggcaatggcaccgccgccctaggcgctctcatccctcgcgtccgtcggccggagtgaagaagacaaccgggatccattgatccgggagcgtacggctaggattagatcgtgtatacccgttcggccgggacgcttcggggccgttagatccttgttgaaggacagggatcggatcgcaccgtaataaaatcatggcctttggatctggtccgtgggctggcattgcatgcgcttcatgatctaatctggacggtcaaatagcgatcggacggatcgagttagacggtacaccttcggcttgagtttttacaaaagaaccctcgggttttcaagaatccaacccgccgtcctatgcgggggaaaactgagtcttaagcaattttatgagttagaccctgggttctctgttattgtgtgcgcagctcaggactcagagaaaataggagaaatgaatttagaaaatgaatttccaatataaaaagaattccacaa

SEQ ID NO: 146215 - DNA, 327 bp, Zea Mays
atcgatcccaatcaagagaatgaagctctcatcagagagataaggaacccaaagaagaaggccatcagctcgcccccgtgaagaagagcttgatgaagaaatcagcaaccttgaagccattcaccagcaagtggagaagcgcagagagaagatgcttagtctttcagaactccaaagaaagattattgaagaaactgaagaaatgtgcaatatcaaagcccaagtgggtgagaacatgacaatctttgacataaggtgtacaatgcccaagttttcctctatgatgaagcttccccactaacaccagagttgtaagctgcaccatgg

SEQ ID NO: 146216 - DNA, 468 bp, Zea Mays
ctcgaccatatgatctgagccgcgcatttcctgatcgacggcccaagagtcatcttcatcctcccctccgactaagccagatagcagcgcgcctgccaccatggcgaagctgcccgtcggagcaccactgcccgagaccacgagcccaactcccacatgggcaattccgcaggcattcaacgaagcatcccgagcatccatgcgccaaggcaacagcacaacgagctgcaccgcggcggagctttcttcccggctgtcgtgctgcggcgaggaggcccggtccaccaaacggcacaagcacaggaaagttcccgggcgcctatggtgctgcgaataccctaggactccgcaccataatcaatcgcgggggaaaccgagacaagcacggcggtggccatctactctctcctggcggtctctcttcgctctctcccataatggcgcttgcatgaggatgcagaaaacaac

SEQ ID NO: 146217 - DNA, 416 bp, Zea Mays
acttcataagaggcgatcatgagggcccaattgaatggatcagcggcgaagccgaagcttttgaggaagttttgagtggtcatggggacgtctgcgccttctctggcacgaggggagttgcagctgtcttggagaagataggttgcgatcatgtgaaatctttggcgcaaaccgaagctgctttatctgttgaagatacaaaagacccctcggccgaagcaagcttagttggcggaaaattctttactgacatctgggaaaatggcggtcgagggatggcccacaagataataaaaaagagcgaaaaagatactcacgatgcaagagaagcaacgatggcagctgaaaaagctgcagaactcgaaaggcgaataggtatcgcttaatagtttttagcttgattttttaattttgtg

SEQ ID NO: 146218 - DNA, 378 bp, Zea Mays
tggtagtccacccatgcggatgggtcgtacgtgaagcatttcctacagataaaataagagaccacaactaattgcttgctaacaatgtcaaagataacattcgtcacttctcgatgtctcctaccaaatactacctctgttctcgaatatttgttgcccactagttcatatctccgttcttgaatatttatcgttcaataattcatttttgaactaaacacgagaaataaaaaagtaaggagggtgtagaaaacagtgatggccttgttcttccaactaaatatcaaaatagaaccatcattttccaaaaaaacacagataagaccaacccactctctctagtcactaatagggtgtttggtttgaggaataagctag

SEQ ID NO: 146219 - DNA, 517 bp, Zea Mays
tctatccttttgttgtcgagtcaccatcatcgttgacatggtctgcagggtgaccatcttgatattgaagtttgccatgaacacaaagcaatctcaagagtcatatgaatccaagtacgaacttgagtcagcgtccgagtcggacttgactccatgttggtggtgaggtgaagcttgagttcaaattggttgcatgaggtcaggttaacctagattcggcgaggtgtatgctagatgtactaaagcttggacggggccacctaagtcactaggaggtctaggtcaaacccaagattcttgtgcagttggtgatgaatccaaacgtacctgaaagtcgcctagagggggtgaataagaaaaatctgaaatttatagcttaaaacacaaacttcaatctcaagttagcgttggaacaagaatatagtgtagaggaaagaattcttcttgaacaagttgctcaaatgatcgcggactacattgagagcaacttaagttgatatgaaatcaagcacaagca

SEQ ID NO: 146220 - DNA, 618 bp, Zea Mays
tacaacttgagcaccaagacaagcaataaagtacaataaagattaacaatatgattaaaaggcataaagacacatgtatcttatagatcaatctatgttccgcgaatctaagacattaagtctgttaccctccctcgtttcttgcctagcaaattagataagataagacttatctcttgcttgcgtgtattacattgcaactaccacaagcgcttcctcccctctttgttgtcatcgtatattaaccccaacttcacatatcttttctcgtctccgcctcccttacccagattgttctacaccgccatataggatattccgttgggcgagtcgccatagaggacattgagcaggccaatctactggcctccaactcactagtcatcgcgagccttcccccatcgacaagcacttgaaactaccacaagcacttcctccacctcgttgttgtcatcgtatattaacacctaaccgtatattaaccccaacttcccatcacctttcttgttgaaagggaaatgtgttatataccatttctaacttgattttggtgattaatgtctacaacacaacttcaagagctaactagtttgctaagtgcacacttgtaggttcatt

SEQ ID NO: 146221 - DNA, 567 bp, Zea Mays
tccgttagcagggcatagtggtcaccccgagttaagtaagcgtgagcatgttgcaccgtcttaagtcgttgtcgacttaagccgattgctccattagcagggcatagtggtcaccccgagttaagtaagcgtgagcatgttgcaccgtcttaagttgttgccgacttaagccgattgctccattagaatggcatagtggtcaccccgagttaagtaagaatgtaggtcgatcatgaacaaactgagtattcttgaaatcttgtttattgatgacgtatttcccattttacagagtacattgtcgtcccagtagcttttgaaatacagctagggataaaatttcttgaggtgttctatattccaggagttcccaatttctgtgccgtccatctgagtgagacggtatgatcccggccgagtgacttctgctactatgaatggtccttcccataggggtgacaacttgtgccgtccctcccccgttagaattcggcggaggacgaggtctcccactgcaaaggatcgtcgtcgcacggccttgtcgtgatagcgtctcagagtctgctg

SEQ ID NO: 146222 - DNA, 353 bp, Zea Mays
ggcttaccggcagtgaagttggctaggtgagagtcggtgtggaacgacggttgtcgacgaactcgatggtggtcttggctcgaagggtcgcgaacggagacgtccggtccacgcgcgccggcggagaccgacgaatggcggcatcgatggtggtgctccgatcgtccttcagcttgggaaaaagggtgtcgagacggggcacgagatggtgaagcgattgcgacttggtgcgtgggctacggtggtcagtggaggcgcgggcgcgagctagctcgcgacggccatggcgaacgacgtcggatggaagacaaaccgagagcgagggcgagtgagagcgagatgaaagcagagag

SEQ ID NO: 146223 - DNA, 663 bp, Zea Mays
cgtagctgttgcggcctctcggaggaattttgtgcggagaaagatggcatggaagccattcgcttttcccacgaacggagcagttgttgcttgaaacgttctgtttggattcttcgatctttcccaacgccgggttcgtgcacatcatataggtattaggttgctgcctgttttcagcatttttatttacaggcagaatatgcgattttcctttcttgtttccgatcctcccatcttgccacatctcgcatgcgtgctaggaagtgggaattgggtggtagctgtagctgtgtgtttttcttgtctggtccccctcatcgaatccagcatccttcatcaccatccatggatgtcatcgacaggacaaggatcgggactaggacgtgctatgtctgattcacatctgttagtctgtcgtttgctgcttccagcttctactgctacctgttcactaatcagtgccctgctgtagttctgctactgccctaaagtccgcaacactatgaatggtttcctgtgaggaaggacagaccaaagagaatatcataatcaatatgagttctgtttggcatgtgaactttcgaatgtgacacacaaacacacacatgacacacttgatgatctgaatgaaactgtgacctcgttgcttgtttgtaatggttt

SEQ ID NO: 146224 - DNA, 412 bp, Zea Mays
ggcggatttgcgaaaacgccctcagggttttcactaattggaatccggtttcgttactgttgtccagggtcactgaccatttacggaaaggtccctctactttcttttcttccccacgagtacccctggtcacggcgtggttgccgccgagcaccaagcgacttgttccggcctcgattggcggtggctatctaaaatggctacggaatgggcattcccgacctaaggcgatccgagaacacccatcaatttcaactggcacacctacaaaatgttctgtccacgcctatggcggaagcagggacgtcgagcccgtgttcttaattatctacgcctgaattggtcaaacggatgctacggtgagctttaagtgcctacacagctgctaaaacaaggcttgaattggacaggg

SEQ ID NO: 146225 - DNA, 381 bp, Zea Mays
tgaggggagaacaaggtttataggagtaggatctagtttatttcactagtgttaacttgttaagtgacccacattagattgaataagctctagattagtataagttgagtgtgttatgtcacattctagttgggtggctttgtgttaggtcggactcggtaaaatgatgtaaaccattggaaacatgttggtcaaactggtagattagaatccctcttttttgtatatagatagattaggcaatttatcaagaatgtgaagtcgttggtatatggccgagttggtcgagttgatttaagtcaccagtttaggcttgagtgaattacaaatatggccttatcctttgtacgagcattactaactcacactagatgagatcat

SEQ ID NO: 146226 - DNA, 436 bp, Zea Mays
cagatgattggtcgcacgagattgagatgaaggttgaggtcgtccatgacgatgacaaggacaaggtcttacttgcggtacaacagttaaggggacaagtcgttgactggtggcaaagctactgagaggttaatggagaagcaattgtgatggagtgggctgatttcatcaatatctttcgagagcagcatattcctagtagtgtgatgaagctcaagaaatatgagttcagaaagcttcgtcagggtgcaatgtctgtgacagtgtatcttcacaagttcacagagttgtcccgttatgccctcgaagatgtcaatgatgagaggaagcaataagacttttttggtggccttaactttgagatcaggaccctagttgaattcactatccataaaaactttaatgccatggttaatagagctatcactatcgagag

SEQ ID NO: 146227 - DNA, 473 bp, Zea Mays
gtctacccttacaataccataatggggcacagatcaatcaataagtttgatgcagcaatacatggactctatctttgcatgaagatactaggccctcaaggcatgatcacagtgtatggagaccagcaagcagcacataataagccgtgcagcagaacacgaagacaacaacagtccttgcccagctaaaaacaaaaaagtcaacgcccaattgtagagcaacgagggaaccaagacggtcccccttgaccctgcaacccccaagcaaatcgtcttgatcaacaaagacctttcaccaaacaaagaagcaagacttctctcctgtctcaaccccaacaaggacgtcttcgcctagtccgctctatacctagtgggggtcagccacaccatcattgaacatagcctcggcatcaacccctcggtgcgcccaagaaagcaacagttaaggaaaatgcccgatgaaaaaatagaag

SEQ ID NO: 146228 - DNA, 585 bp, Zea Mays
atcgtgccacaaatggtgctcctatgtctgagactatagcccttggtattccatgcaaacgaactatctggtcaatgtagatctctacatacttctccgtcctgtgggtggtgtgtactggcaagaaatgagttgacttggtcaatctgtccacaatgacccaaatggaatcatggtgtcgggaggtattgggcaatcccacgataaagtccatgcaaatgtcctcccatttccaagatggtatgggaaggggttgcaaagggcctgctgccttcaaatgactagctttgatcctctggcaggtgtcacactcggatatgtacttggcaatttccctcttcattctggtccaccagtataatgatctgagatcatggtacatcttgttgctgccagggtgcatggagaactttgaaaggtgagcttcatccaatatcttctttctgagctcggggtccttgggaacaaccaatcgatctccaaaccatagaattcccttgctgtcctgacagaagcacttgtatttctctgccttctgctcgatcatttccttgataacctgaacacccttgtcttcaatctcgg

SEQ ID NO: 146229 - DNA, 326 bp, Zea Mays
aattaatcctcatgaatgacggagggatttaagttttaaaactagcctttatctaaagattctccagcaatagctcaaaaataggtcgcttgtttcttatttccctactattataaaacactggtttccactgtgtcttcttcgatcccgctgattcctttctaactaaacaagccctatggcactgatggtgggcatgggatagattcagtctcgtgtttagggctcgtttgattagaaagggattgaatggaaattgggaggggggtagaggtttccatacatgaaacgtgagtaggagagcctaccagagatatgctggaact

SEQ ID NO: 146230 - DNA, 292 bp, Zea Mays
gtcacatcatccatggctgacgactccattctcttctgttggtgtcccccatcaggtacagatatgatgtccatgcccgtcgacgtacccggatcatctacgagcactgtttctcctcgcgccgccataggtctccgtccagcgaacaaaaaacccgacggatgtggtggctatgcgctagccttcgtaatggaaagactaataccatataacaccaacgtatcaaaaggatatgtccttccttattttaatgttcctcaaaccgcaacacgagagtaaagcggtaactatc

SEQ ID NO: 146231 - DNA, 1821 bp, Zea Mays
gtacttggggcgagaagtaaagtggcactgcgacgaactcaaggcggggagcggcgaacgaggcgactatgcgcaagggccaagggtgaggttagggggcgaggcggcgagcaagcttagggtcgggacggtgtgggcgagcttgaggttgaggcaacgggcaagcttagggccgagacggtgtaggcgagctctaggcttagggcgtgggtgcggcaaaggaccgggggcgcggcgaccaggtcaaggtgcgacgacagctgagaacgggggtgggcgaggagaacggcgtaggggcgaggtgctgcgacggtgttgcgacaatggcggttagcacggcgacgcagtggaagaagctagcacgggggaagaggaagcacacacagggcaatattgccgagcttaacgccatagatctcagcgtcaagatttatggtgccgagctaggtgtcacgacgggcgccagtgcagcacagatcagcactgctggaacggtacctcgatgccataactcacgtcgccgagacgtgttacattgacgtcgtggcttgtggcgccgagctaagggtccaaaaacgataatatgtcgtccagggggcaaacttaaaaatttacaaaaaaaaagtgttaacttataaaaaatcggtggacaagtcaccttgcaaatgaatatgagcagtaaccataataaccagcttatcatgggcagttacgaattactcaacgcagaatcacacaaatgagtgaatgacatatgacggcctctaaccacatttcagtcattttaaggatgctaccataggatggtaagaggaaagctacgtatcattatattatcattatattaagaagaaaaattgtgaggtttaaagaaacctcgaacaactccacacaaaattcacgccctaacctagaaactttacaaaagaaataactgaacccttgacctactagacccaaaaaacagagctcactgattggaaaacaactattacgaaaggtggagctcaccatgatccaattgatgagcacactaatgctaggttggggcctattgaaaacacaactattacgatgattccaaacagcccaagcccgctatatgattagtgaatcagccccttatctgttagtccatcaagggccatattagctccttcccaccattcatcaaataaagaagaatcatgactgggagtaaggcactgcagcacgacaaaacacagggtgatgaaccaagcttcccccgttgtggtactggtaagcatatactggctcgaaaagaaaaaggacaataaaaaatgcccccgttgtggtttgccttaactagaaattccagatattttgacccgctttttctaactgattatagtcttattcctcaaactacactgacgaggacttgattcgtttagtcttaggaataatgctgctttattctcacctttgtttgtatgtttgtactttcagccatctagattggatagagctttatagtgttcacctgtcaatctatttctagcgatgaaagacagaaagtcagaaacttgcagatagcctctactcatggaacttcagttgatttcccagttcggggttaagcttgtgtggtgagttaatgcagctagcgtgtttttcattagtcatgacattatcacactccagcattggcataatatctctcaaaattaaaatgcaccgtaaacgatattgtgtgcaatattatgtatgaatcaccattttttaaaatatatatatacaaataaatagtgcaccgctggatattgggcagatattataacctctggtaacataatgcac

SEQ ID NO: 146232 - DNA, 405 bp, Zea Mays
cggcaagtaccaaaccaagaagggctccacaactcccctccagctaggagggacccttcaaggtgatgggaatacaccgacccatgggtgactatcttgctacgactgaaggagtacctcttcccgaccactggagcatctctgtaagttctatccatagagagcaagtttgggggggtcgaatttttctcccttttgtaactaggcaacgcacatgtgtatgccagcccggtgaggcccaccctcataagcccgacctattggtctgcacccatgcatgacaggttataaagaaaagatttaccccctcagatgtgcctctatgatagttttatcctactgctccatggtcttaccttgcagttttccggatgttattttatctaacccacccgaacagttccc

SEQ ID NO: 146233 - DNA, 698 bp, Zea Mays
agaaaactcacacgacaggtggaaatccaggcaggacaggagacagcacacgggcagtcaaggtcactgaaatgacagaagaggtgagcacgtattagtcacatagtcgtacgtatatgaaatgtgaataaatacatacacagagaaatatggcacagaaaacgagaaatatggcgattgagatgtcaaacgatgcgaaaacggcgtttgaacgagaaaagtgccatatgaggtttagaaatcgaattgaggcacgaaatgacatggaatggagccgatacttcacgaaaacgtttatatgggagaatatgagtgaagtgtgtgcttggtttgaatttaggcgaagaaagtgaaatttgggcactcggctcggtaacgatcgctcgaaacggggaatttggtgaaattaaagcctggaataacggatgggcgtgaaatttggcgaatatgttactggaggtattgtgaaggtgcctgaaaaatttgggttcaattggagcatttttggctggtttgggcatttcaccgaacacgtggtgtgcggagttctagggttttggagaaatggctattagaggctgtgaaaccctccctaaggagctagaaacctacaggggtacacaatgggcacataggaacactttgcatcacttggattcactggaattcacagaattttgaatttgggcacaaaaggg

SEQ ID NO: 146234 - DNA, 318 bp, Zea Mays
actggcttatgtgctaatgcgtgctcttctcgccttcaccgaaaaatttggagaagtcaggtatcctaagcccttgcagatatggcacgatgtcaaattggtgactataaggtttccgatacgactgccctatgcctggcacactaacaccgagtttgtctctaaacaacccggctacctcatatctaattctttccaccacgtctggtggctctccattaagtttgtgggtggaaatctcaggttgcctgacatcattttgtcagctttcctccgagggatgtctgagatgtgtgctaggtgtcctattaatgccac

SEQ ID NO: 146235 - DNA, 824 bp, Zea Mays
gtgactatgattttcacagctatatcaattgcttgccccacaaatgatcagccagggtcaggtaaaccatattgtgtaaccatcactataacactgcaatcattttctaaatagtacttttataaatcacaaatcgaaggtataaatacaaaagtctagaaaattataaaaaaaccttcataaagctggcttcatcgcagtaccaaaagagcagtaccaagtgagaaaaatagcagtaatttgttgtctggtggtaagcatgaagattgagattgcaacacaaataaacactacctcttgatttgcatgcgtcccaagattgcaaccagatttttacaaataaacactatgcaccaaatgcaccagacaaatgtacatttgtgtgaaacagactacaagaaacaactgaaacaagcacatacggtgactcgctggacgcaccatttcacattaacagaagcagaattatcagtcaaagcacacattatagtctgaacctctccaaactgcctcatgttggctcaagtccaggttccccctaaacctcccctcataacaaaaacaggagataaggagaattgagagagctaagagttcgtgatgatcaattttagaatacgagcttataatcttcttcatatttgtattcacagagtattgtccactgatcagaactctctaaaattgttatcctgttggttcccgatcgtatccaaattcaacacaccagtggccagcgtatgtacaggacgaactcaccattgcctagctcactgttacattcatccattacatctatccatgcagcattacgtacatttgaa

SEQ ID NO: 146236 - DNA, 367 bp, Zea Mays
ctggaccagagttggttgagcttaaaaagcagatcgatgagctgtcagagaaaggttatataaggccaagcacctcgccttgggccgcccctgtcctattcgtggacaagaaggatggcaccagaaggatgtgcatcgattatcaagctctgaataaggtcacaatcaagaacaagtaccccttgcctagaatagaatatctgttcaaccagttgagaggagccagcgtgttctcaaagatagatctgagatcaggttatcatcagctcaggattcgaccttcagacattccgaagacgacattcattaccaagtatgggttgtatgagttcattgttatgtattttggcctaacaaatgcaccagc

SEQ ID NO: 146237 - DNA, 599 bp, Zea Mays
acattgatgatgttgttgttaacaaaagaaccgatagcgacagatgcagacaaaggcaaggaagagcagcccaatgatgcaccagcagaggaggatggcaagaaaaggaaagctattgctccaaggtcagatgtatgggaacatttcagcaaagttagaactgaaggaggggaagacagagccaagtgtaggtattgtggcaagctatttcgctgtgacacaaggacaaatggtacatcttttctgaaaggtcatctaaaggtttgcaagaagaatccaaacaaactagtaattgataatcaacgtactttacaactacaaccttgtcctggcaatagtagtgttggtactgtttcaacatggaaatttgatctggattacttaaagaatacttttgttgaaatgataattgaggatgaacaaccttttgtcttgtctgaacgtcctggtcttagaaagtttctagctaaagcatgcccacgttttgttatgccatctaggagaactgtcactagaaactgcgtgaaagtgtacgatgtgcaaaaagaaaagctcaataatttcttgaaggaaaattgtgctagagctagcctcacaac

SEQ ID NO: 146238 - DNA, 365 bp, Zea Mays
gccaggggcggcgctccccgcggacacggcggcggcgtcgccggaggcgaggcaaaccggggctcctagggcgcaagaggttggtctgaatagcttgaaaggctagggaggacttggcgagcactatggcggggtcgggttgtgtaaaggggactgaggcgaccggacgacagaggggactcctcggcggaccgaggaactctccggcgagcaatcgcgggcgaggaaatgcaggacaggggaaaatgagggcagggttaggacggttactgtaacacctcaggtgtttatcgtctgcttgcccacacgtgcagactttaacacgtaatagcggcgaaattcgttttggttccactaaatcgaat

SEQ ID NO: 146239 - DNA, 373 bp, Zea Mays
tcaaagaaagaatggcatgaatagtgtcaaatcagccagcgaaggcagggacccacacctatcaacaacaattcccccttgctatcaagacattcaaccaccacctccaatgcccacaaaataaccacccctaactccctcatcaagaaaggttgccccttccaccaccgccacatataatactctctgttcaacaactccctcctccaccacccaacggcgaagacgatttccaccagccaccaataaactgcataataaagttgatctctggagggtctactatatacttcaaaaaaagatagagaaaagaatattaccgaagggtcaatcaagtcgtcgtcactagacccgtcgttaaaatgaagcggtc

SEQ ID NO: 146240 - DNA, 840 bp, Zea Mays
taccgccatcgttcggattctgcagcaggcgaactctgtgctgcatcgatctcaagtaacaccggcttgaggtcaggtcgcccgatcgaggatgggttctctcgccgatccgtacgcgctacgctgcgtctccgacctgcctccgccattccgctctatgttcaggttcaggtgtgcgacccgtgcgctgattatcaagctctgtgttcatttttttgctgtatatgcgccttgtttctgcagtttttgctttgttcagttgcctgattgtagcaccctcatctgtatagtttgaattgaccaatattctcgagtattgcatcactgcatgagattataacgttaggttaatgaaatttagaattatgggggatatggagtaatatcgagagactggtgtggaggtgggatttagtgaagtaatgttttggtttctctgcagatacttcaattccttgcagagtgagtgcttccatgtatgtttcttctcggatgtgaacatggttatctcggcacctacggggagtgggaagaccgtactatttgaactctgcattctgaggctcctctcaaggttcctttcaccagattggaggttcaatttaaataaaggaactctgaaaacagtatgtaccgattctgaatgccatttctgaaaaataataaggcgcttataatgcaattgcgagtttaggatttgtgtattttatttttatcttgtggttcactggatttatatggcagatctacattgcaccgtcgaaggcgctggtacaggaaaagctgcgggactggaacatgaagctgggcccattagggatcaattgcttggagatgact

SEQ ID NO: 146241 - DNA, 469 bp, Zea Mays
tggagccggagtccacaagtgccgtcagctcttccccttggatcttgacgcgaagacggatggtgtcaccagcagggacccccgtcaacgcgttcagcgagatgcagacttcctccgtgatgtcgtcgtcctctggcgcaacgtcgtccagggacagacagaacacgccgccccgcgccgcacacttgtgatcccgggagaatttctccgggcaaaaataacattgccccttggcacgtttgtcggcgatctcctcagccgacagccgacgaacgcgtggtcgctgtggttcctccatcgtcggtgctggtgtcattgactgtggacgaggacgggaaggctggcgcggcatggacgggtagatggcgcgagccgcctcagcggaacggcgctcgaaggcccgggccagactcatggctgtctgaaggttcgccggatgttgcatctcgacgtcggatgacaagggctg

SEQ ID NO: 146242 - DNA, 795 bp, Zea Mays
aagattataaaaggctagtacgtgcatttgataaatccagtgttgcaaattttccttcacacgagtttgaattgggagaaaatacacgtaattcatcggctacaggttgtcacgaccagtcacaacccctttatgggatgccgatagacacataccctgagcaaccacaaatcggcagtaaattagccgatctgcacatggccgaaccgtccgcatgcgagcgcggaccatccggtccagcaacggccggtcctatttttaatgagttaccgagatatgcgtccgagccgccacatgttgcacaagccctaaaccacccagacagaccatccgcatatgatcacggacggtccgcatatctgaccggatggtccgcgtatccgaccgatggtccagcacagggttgattgaggaggattgttacataaatcctcgcccgtcccaacaacacttcccatcgcactatacaatgcatcagcccattaatacagaatcccaagcccatgtgggtgagtactttccgaccccacttagaaggccggaaaggaatggtcaatcctatgaaccatatagggcaaatagtaatgcaccacaaaactcaaaccaatgggggggaagacagcaaactaatgttcaaacaacctcacctatgatgggacaaagagtcggtggtctctcgccggctgctattgacatagtaaggggagaaatagccggggcgttccaagataagctcatagtaagcatggtctctaggggtagtcatatcggaggccttacgacagccgatttgac

SEQ ID NO: 146243 - DNA, 415 bp, Zea Mays
ttttttgttatactaaaaggtttgtttccttgtactaacagtgaatttgattctcaaaattggatgtctggctgtgaacgtgaccagattcgtcgagagggaaaagatgggggacctaatttcttgtgttggtttcgagattatgtagatataaatgacaatatacacgtaatcggagacattacacacgtaatcggagaaaagaataagcgaaagcggattacaatacttactttacattcgtaaaatatagagagagtatttattacagtaccaggtgtcatgagtgcataacttattattacaaaacagggaggtaaaacatcctcccacacaaaagcttagtgttttaaactgggaggcaacacatcctccccaaacagtttattgattggcctcctccttgagcagaaac

SEQ ID NO: 146244 - DNA, 371 bp, Zea Mays
ggcacgtggaggatgcgcacagcactggcggctacgcgttcacgaacaaagtgaaggtcaatctcgacatgtttggtgtgttgatgttgcaccaggtttgtcgagaggtagacaacactcatattgtcgcagtaaacagccatggcacgctggagaggctggtgaagctcgagtagaagctgacgccgccaagtcgccttagtgacgccgttggcgacgacgcggtactcagcctctgcactagattcagagaccgtcagctgtcgcttgctagaccaggagatgagacagtcaccgaggaacacgacgtaccctgacgtggagcgatgagtgtccggactctcggcccagtcgacatcggtgtagacagt

SEQ ID NO: 146245 - DNA, 674 bp, Zea Mays
ctgacagttgaattaggtacggattaaacataggaggtagaaggagaaggtgggaagcaactacattcaacctcagtgagtggtacatgctacaatgattcaggttaatgaagtggagatggagataacagagaagcactattaggattattagttaagttgcttgatgaggaagcaagatatattataccaaactattatgattcgtgaatgcctcatctgaagagtttggtttagaatacataatagagagcatgtaactgtggatgctgtgaaaaaggcaaaaccaagcaagacaaaaggcaatgacagcgtgacaaacatgcaaaggctatctgcagcaacttcctcatcttcatctactattaaagcttcactctataaacagtacagtctaaagagaaaaacaatgttttgcacgtctatatatacgatccactggccatagccaaataataccaaactattcaagatagcaagttgttctgcccactacataaataacatctctagcaaaaaaatttactttattacctaagaagaaacaacaattccagttgcataaacacatacaggaaacacgactacagtctacagactgtagcaattccagttgtataaacacatacagaaaacagactgtagcaattccaattgtataactaacaatatgc

SEQ ID NO: 146246 - DNA, 397 bp, Zea Mays
ggtgtccttctcgccgtgatccaattaaaccaggcagtgtctacctcgctgctccgtggacttagttcagtaaagccctacctctctccccgaatttagtagacctcgccgtgtgttactgcgttccatattccgggtgctagccaggtctgtcgcgcgctgtccttgcccttaccggtgaccacgctaccgacatcccacctccaccatggtcagcctagcacgatttatttatatgctttaagcttagtgttctagtacttgcatagggcagtgaagcttatggacatgtctgtttttttgtcccgtagcgagtcgattggaacgccgccacgacgccgttgatctttgccgtgagccactccatcatcgaccgttctgtttgcgctctccccgg

SEQ ID NO: 146247 - DNA, 404 bp, Zea Mays
tgagtgtccaagccgaaggatactacacacagctcggagagtatacaaaagcaaatacgaccagagcaccatccccggccgatgcaggatggcgacaaaccatggactccggcgaggtgggctggcttttgtgctcactgctgcgcaaccccactgagtgtcgtagacacatcaccgttgcacaccgaagaccaagcgatggcagaatcgtcgtggtgtctacacgattctctcttcccggcgagcagcgacaccgtcggcaagctctgcttcaatggatcaaggatgcagggtactggactatatatacttggggtaggcagatcctaccggggtcctaggatcatatcccaacaaacccagtggttatgggagttcttaaaaaactgttgcaccagccccgg

SEQ ID NO: 146248 - DNA, 382 bp, Zea Mays
atacaagagagatgctaggggaggagtcctcactgaaaatcacgggtgcagtacctccgtccacggcgtaagcgcgacaccacgacgttatgcgacaccggcgaggaatcccacacaccttgggaaccctccctcacgacgatggcaagaataccttccctcagccctgatgctcttccactgccgcaccccgaggttcagacggcgcaggcgaggtatcctcggtgacgacctccgtctcgcactgtccaaatttctccctcgctgccctctgtaacatccgacccacttgtctgaagtggtgtcatcgcagcccactacacggcccaaatcgagatgtacaaaagcagcagctacgtcaagacagagggcatcgaagaaa

SEQ ID NO: 146249 - DNA, 477 bp, Zea Mays
gtagtttttccgtccattttcgtccattttcatccctatacctgaagctgtcgccaatggttccggtattcttgccgaagaaacgtacgcgcgacgagttcctagagctaaagaatgggacactggtggtgccgcaacgtcaacactttcaaatcaaccggaggcggcaatagatcttgggagccgccatgattgagacagacgagaggcaccgcgatgctgcgacaggggaaggggaaaggtgacttattctgacgggagatggaggagagacggcgtcggtgagaccgtaagggcataaatggtacaacggggctatgggcccacctgtcaggtctaccacaacatctgtgacctattttgatgaacgacacagcttgagcgattccaaccaagacgtcatttgccaaactgcatctctatcacttactcatatgtcaaaagcacgcatgggcaagccaatccagcgccttgttg

SEQ ID NO: 146250 - DNA, 495 bp, Zea Mays
aagtcggtgcaacatgctcacgactacaaaacaaagggtgcctattgtaccctgtcaatagaacaatcgacttaagttggaaacaacttaagatgatgccacacatcctcgataaccaatcaaagagggcacgacctgccccatcaaccaagttttaaaactcagacccaaattatcaaagaacattcggaagatacactgttctccaacctagccaactagtatccacttttctgttattacaaagcattatgcaggagcattttcatgaggaatatcgtccacaggatcgccaggagcgggaggtttccttgaggtacccgacgcagcaagaacgccagccataatatcatcaggtaccacgacgatgggtatttttagcaagaggtggccagctcggattgccttgtccattgccttgttgcaccataccttcatgatttcacggtcgtcctccaagaccttgatatattggcgagcaacttctaactcctg

SEQ ID NO: 146251 - DNA, 449 bp, Zea Mays
aaggttgggaaacaaaaatttctttacacaaaaatatgcagtgttgtcatcaattaccaaaaagggggagattgtgaattctctaggcccctaagtggtgttttggtaattaatgacaaccgattacggactaacagttcctcaagtgataagattgcaggactgaatcacaaagtacaacaaagtttttgaggaatcataaccattgattgtggatcaagtgaaggcaaaggtaaaacataggtttttgcttttgccggtcagcaggtgttcagaaaagaaactggctggattagtaggatagacagtcgtactattaagaggggtcaatgaacttgaatggtgtatgacttagtgcctcgtagagtataaacgacaatatgtgtatgagggggtaacagcgctacggatttcaaaattaagtttttcttgagatagcgcaaaaactt

SEQ ID NO: 146252 - DNA, 369 bp, Zea Mays
ctccttacgctcaatggagcccaagttataaatgtgaaaacccaccgccatcgaggaaaccgaaaaccgaaaaacgcggtcagccagctgaagcacttcgaaatccttggcgagcccaccaagagcagcctggagaagatgaccgaccgagaccgaattcaacttgaagatgcatctgccaaaggacaccaccagccagaagggcgaccgcaaacaggggcaagcagggcaaaccgaggcttccaaggaatcccagagggattccgcgaaggccaagcctggccgaaagtccaggagggagaaatccatagcagaaaagcaagaagaccggagagaaggacacgagaagcagagaacctaagctaggcc

SEQ ID NO: 146253 - DNA, 545 bp, Zea Mays
cttctagctaacacctggggtgttacatggatatcccctaggtcaccatgcatggatgcgctccatgtgacgcttataaggcccctgatgggtcgtccatagggtgcatcgtgggcctctgcaagatgcaaccgaagccgagtaaagcggtcacacaccgagtcaaggggatcttcgaaggcatgtcccatgcatgcagccgtacacaagcctcgcagggaaccaaccgaacgccggaaaatgcgttgcgtctatagtgaaagtggttagatgcatataggattatgatctatacagggttatctcttcatttggccatataatgctgaaacgggagactccattagactcgtaggctactttcatattctaccttcaacaatcacctataatcttcaaacccagagcaatacaaccactagaaacttacatgacgtaggacattacgcctctaggtggttcaaacctatataatctgctctgttccatcgtgcctggcatgaaccatcaagttttgatcgacatcgctatcctcccaaaagcac

SEQ ID NO: 146254 - DNA, 471 bp, Zea Mays
cgatcctaaaattaagcgggtaatggatatgcgccgtgaaatatgcgtccacgatattgggtatacgcttggtacaggggaaaaaatcataatcttccagaaaagtggagagtacgcatcatttgatagtccgctgctgggtgaagggcgattttgatctggaagatggcggcgccatgtggaaacaagaccataagtgagtatgggacgccgacgtctgttcataaacaaaatcaatgcttggatatcgtaacaatggtgcaggaagaagaacaaggagggtaccagttagcgtcagatggaattacgcatacagaatcagctactgctgtagacgcaattactccaccagcagctttgagggccccaggggttgatgaacagaccatatttgaggcatcaaggatgacagtaactcaaggaggatagcaccttaatactatgcgtactattggtgatcatgaacaggac

SEQ ID NO: 146255 - DNA, 529 bp, Zea Mays
cgggcgctcaatttggccgcggaacaccggagcactgctaccttcagcgacgggggcaaagttggtccggcgacccaattctacggccacggcgtggtagaattccaaactccggcgtggagagcaacaacgatcagtctcaaccagggtgcttgtgtgagaattaccggggacggcgtggattagcaggccagcggggaggttgtccacggcgctagtccgcggcgtcgcgaccttgttcctggtgattcacaacggtagagcttacgaactaagcactgtgagcttcactgttatagaaggattacggaacatgtcttactcgtgggtgggattgctccagctaccctggccacggtgaggtgagtcatcggtgaacgtggtcaccactgtcagctatcaactccagatcaggtgctggcaaagcagtagaagagctggggaatggttaaaggcttgatcaagctatggaggacaggtttgatatgctggagatgctaggaaaacagcaagagcacgacagggtcct

SEQ ID NO: 146256 - DNA, 515 bp, Zea Mays
gtctggagctgccacgtgcccagtagctcctggcccttactcctcacttaggtgggtcctggtgccgccatgtggcctatagaacatgatgtaagccaacaaatagagcatgacgtaagcctctagcatgaggcatccccgtattaaatatgtataagacatgcacctatctgctcaggtggcaggcgacgcacccagtatgcaacgcgcgggttacactgttacctgcgtgttaccgaggcgaggtcattgactcaatgtgttgcatgggcacttgttatatgactcctactattccccgcgcattaccgagacaatattgaacatgcgaaggagacagaacgacactatccatacacccctacacacgatagcatatcaacctacaccgcaacctacaccaaggcctatgcatgtgctccgagtagatggggtaagagcatatcaagacacaagatccacacaaaaacaaagagaagatatctgaccggtacggatgagatcttggcccacca

SEQ ID NO: 146257 - DNA, 568 bp, Zea Mays
tatctccgtcaatgactacttgattgaaggcgtcaacgagttcgacgcccacactaggcaggggggcggtggtaagtgtcttgttcgtttgggagatctttattcacgactttttcgtttttatagactgggtttttgctgtaaggtagcggtctagccaggtggtcgtgacctaggcgaagtctacagttgaagtgtcgtctgacccttgggcgcggttctgcgctgttgttgatggcggtcgaggggggtcaccgaggcgtctgcatctggtgaagtcacggcggctgctgtcaagcagttgtgctttgtaagctgttatcgctctcttttttatgaagtctgtttgtggtaggttgtcgcttttgctgaccaggtggcgtctgagcacttgtggatctcacgactacgttctgagaagaaacgactggaggataaggttgagtgacttcagaccaagaatactgaagctatctgggacaagtcttccactaagaataaaagttgaaatcttttggacaaggtcggcacccttgagaaggagaacgagggccttagtcgctagttg

SEQ ID NO: 146258 - DNA, 460 bp, Zea Mays
gcatgcataacgatcgacgggccagattaaccctggcagaaggggtatctctcttctaatcgtggccgcacaatttgaatcggacggtgcggcacgccccctcctttccaagaccaagtgacggcggtggccgtgcccacacggcggcgccatcaccggcatcaaccgtttcagtcccctcggtgccctaacgagaccttaactcgatccaaaatgaggtagagaatcacacgaacacgtgggtagggcctttaccggagttgaagtggagacggtgcttgcccacgcaccgaagcagatctgcggcggcgcaaagctctgatgagcaattggtgtgcaccctgccactgattttgctcgaaagcgccacagacgacttcgctgtggctcagtgcaggttcacagcacaaacccggacaccgaacgacgacggggaagaggatttgtgaccgcgcagctc

SEQ ID NO: 146259 - DNA, 387 bp, Zea Mays
gtctccaccacctcctccaccacttggcatcgtcgtctcggacatcccggacctgacgtcatgaccaagattaccagtagcctagatcttttacgtagtaggggacattttgagggcctctgtcatgcttgtcagttagaccagcatactcatctcccatttactacttctcgggctaagcaggcttttgacctagttcattgtgatctctagacctcccctgtactcagtctttctggttataaatactatttggtgattttggatgctttttcccattttatttggacttttcctcttcggttgaagtctgacacgttcaccacccttacacacttcttcgcctgagtctccacctagtttcaccgcccggtccgtgccctgcat

SEQ ID NO: 146260 - DNA, 510 bp, Zea Mays
cgctagatgatgaaacaaggagggctgcaatgcaatgcggtttgcaacctcatctagggctagcgtggcgagagttcacacaaggcggctagcgagggcaaatcgagtaatgtggcgtctcgacttgtaatctgggaaaggtggatgggatagcggcggaaacaaataacagcgatggagcggttgaactacgattacgacacgacctaaaccagcaacaagactcgaacacggacacaaattcaacaaagcaatctgaaacgaaattgcaaggctaaacagggttataggacagcggaattttttttgtatggcaattatctagagttataggatgaaaaaaataaactaaactagggtaagcctgacggtaatacctgagtctttgaataccacttgataggaacgggggtgcccgatcttccgtcaggtgaaggtaactatcgatttggtggagatgtcacacagacgatccggcttccaatcaacacgactagaaccccgcaatcg

SEQ ID NO: 146261 - DNA, 541 bp, Zea Mays
tgacacaagtgtgttgtgtcaagtgaactaagaagtgacaacacacaccaagcaagcaaggtaacactctattctattaagcatcggttaccaaaattacagacatgttacaaatcagtcaagcactcaagcaccactactgcacagatcacacaccaagcagattagattacctctgcgccgcacacgaagaactcgcaccgttagcagtagatccggagcaccggttccaaaagacttgcaaaggaaaaggatgaagggaataagcagatcaggtcacggggaagacatccagaataagttagggtttccattgaacaccagttcatcactctaccgagcagatcaggtcacttacatctgtgccggacgcagagatgaggccaacgttagcagtagatccggagccccggttccgtcaccgactcgtcgtggagattgagacgacgcccactagtttttcatggttaccttaccttcaccgatgagcaacagatccggagcaccggttcagtcgtcgacgcctttgaggtcagggtag

SEQ ID NO: 146262 - DNA, 400 bp, Zea Mays
actctgggtgattaagcatctgtctagtgttatattgaatatcatcagcaagtaatctccaaactttttcaaagaaagacaattcatcacccacttcacagaaaagaagcattgtgacaaagagttggcgaagctgattcgatgtggcccaagacgcagcctcatcgaaggcgtagtaccattcttgatcatcttctaggagcccacgtgctctacaagcttctttaaaggttggatgtaaaatatgatcgtatgttcgtaatgattcatagttctgagctcccttgacaaccatcagaagcatcctaacataatatctttctcctgcagatggatgcacaaaatgtatgcggcctattttaccatggcgttgtctgtgctcccataatcttttcttttc

SEQ ID NO: 146263 - DNA, 556 bp, Zea Mays
cagaggtcgggtacacacatgaaatgtggacagaatgagggtggaagagtgggtcgacatgagtgcgctttcggaagtgttccgtggtggcgagctgatgttctcgatgccctatcgcggtagtgttcaatcggttgagccgacgagctacgttaacgttcaaggatgctaaaacaaggaacagaggggtatgaacggacctgggatcggctgatcacgacagggtgtcttatagcggcgcgagtgaccgatttggggaaaatccaattcctcgggctacagtggagggattgaggggaggagtggtgcactgggcacgtaataagaaggcggagcaagggaagccttcaatatatagtgaccactcgagcgcttcgcgagtttgggatgaaatgatctcgtggccgaaaagaaggtgactcaccggagtgcaactgttgtggcgctcggtgaggtaaggaccctggcggtaaatgggttgtccattgtgacctattgcgacgtggtaacgcccccaagcacgtggcatcctcgcggcgagcgacggatgccgaca

SEQ ID NO: 146264 - DNA, 506 bp, Zea Mays
cgccatttctaaaaagcaaccagtcatcacccggcggttatttctaaaacgcaggcgtgccatgtcatcacccagctgttatttctaaaacgctggcatgccatgtcatcactcggccgttatttccaaaatgaccgacgcaacccaaattaactcagctgttatttctaaaaacgctgatgttacctgacctcactcggccactatttccaaagcggccgacgtggtccgttatcactcggtcgttacttctaaaacgccgacgtcgccgacagtcactcggctattattcctaaaacagtgacgtggctccagaagattcggctgttacctctaaaatgccgacatcgccagtaaccgctcggtcgttatttctaaaacaccaacacggcccgctatcgctcggctatcacttctaaaatccccaacatcgctgataatcactcggccaccactactaaagcgctggcatcgtgaagaaggcagtctgaagcacggctcaatga

SEQ ID NO: 146265 - DNA, 583 bp, Zea Mays
gcggtcttattaaaaatatacgaacaggcgcccgaagcgtccttggagctctcgctgggtgtcacttcaccaaaacctcaaaccgctccattgctctcggctcaccggcgatcctcagaaaatctggcaatggtgtaccggcgcgtcgacccggaatcgttcctcccaccaggcttcaacgccttggtggtccagcatcgtgggatcatggtcaggtcagtctcgcagagattaccgccaatgcatgaagactgggcgattatcaatattcaccctttgcctgagcacgaggtcttgttccctgcggtcagtgatgtggtcagagagtaccttgtggagcatcgtagggtcggtgttagagccatccagcgctctcacttggggcaggtgatagtgcagtttcgtagtgttttggagcgtgacaatttggttctgcttggcccccagcaatatttagatgctactttcaccgcggttcgtcataatgacgcctggaatcatcgggccctttttttcaaccacgagtgttggcttatgcttctggggtttccgctggattaccgttcttctgagtacttgcaag

SEQ ID NO: 146266 - DNA, 523 bp, Zea Mays
ctggatatgctttggcacaggcttcaccaagttcaagcttgatgaaaaaggccaaaaggtaatccatactttggaggcaagaaatggagcaaggttaaacccagtttcagcaaatccaaaacaaacgtaaagaaaaacccatgtaattaagtaacagaaaatgatcagatatataggttgcggggctattcgcttcatattaaagtcagcttcatattaaagccaactgtttagactgcactgtaaatgtaaggaaaaacccatgtaattttttgttgtggctgtagctgcttccataactaagtacatctcggtttgccttttgcagccgctaatacctgcaacgggtgtacctatatattgatgaacaattccatgctagttgagaataatggtcagaatgtgctttaaaactacaaaacaaaaaagttattgttcatggccctaccagtataaatgaattggggggcggcacaaatctagttacagggagtttacgacctctcagttcttgctggaagtg

SEQ ID NO: 146267 - DNA, 348 bp, Zea Mays
cagaccatacctataacatggccatttgcgtgctggggattggacatgattgtacccttcaagaaagctcagggaggatatactcacgtgttggtcgccatcgataaattcaccaaatggatagagtacaaacccattgcttctctaacctcagccaaggcagtggaattcatacaagatataatattcaggtttgggataccgaatagcatcataaccgacctgagatccaacttcactagctctgaattctttgatttctgcgaacaacggagcatccaaatcaaatatgcatcagtagcacacccaagagctaatggccaagtgaaaagggctaatggaatgata

SEQ ID NO: 146268 - DNA, 418 bp, Zea Mays
ttgcggactcctcgagatcggccaaatcaacagtgtctgacgtgaggctccgtccaatccctttcaaaagacgagttgtgccagcagtggatttactcttctttttcttctcgaacggggacactaattttggtatagaaactttagatttctttgatggtcgtggatcccatggctgtggagaaagtggatccctgaagggcgatgtatgtggcggagacggtgggccaccatgaggatgaggagaaggagggtcagaaagaggatgaggagcagcatatgaagtttgaggaggtgatgatggatgtacaataggaacaacaatttgagaaggcggagacggttgggcctgcgactgtcgtggtggatcaaccaattcgacatcccttcgaggctaaaggataaaattcttgatagc

SEQ ID NO: 146269 - DNA, 429 bp, Zea Mays
actcaggaagaaggtgttcgacaaaaatgaaaagtttgcaggaaagtggattagagagttgccctatgtggtttggagcttgagaactcaacctagtcgagctttacatggaaataccccattcttcatggtctacggttcggaggcagtgttacccgccgacctcaagttcaaggcaccaaggctggtcttcaaaagcatagctgaagcagaagcaaccaggctagaggatatgatgtgctggaggaagagtgattgaatacagtaattcagtcagccagataccaacagaccttgaggcactatcatgataaagtcatatgacactgatcctttgtagtgggagacttggtccttcgccgaattctaacgggggaaggacggcacaagttgtcaccactatgggaagggccattcattgtatcggag

SEQ ID NO: 146270 - DNA, 616 bp, Zea Mays
gtggcaacgacgatctggacgagacatccctcaaggaagctgtcgcgaaggctgtcgaggatgcggtggcaggaccttcatcgccgccgtaggctgcagtgggggcccaacgcgacggagccttttctagctccatcggctagcacatcagttttgactcgatcagctaggacagacagcggaaagactactactactgctggtggtggcagcgatgtgtccgtttcaattgttttccctgtcttatggtcctttaggtaagatttgactagctcttggcgttgttgtagtaggtagctaggtcagccacgaaggaagaggtaaagagacagcagatgattagccacgtatgctcacatcttgcagtctgaggatgatgtttgttatacgaccgttgtaaatctatttgtagcgacgtttttacaaccgttaatactagaggtcagtagcatggattttttgtgcatgcgggtaataggaatcgccagtaaaattcgattttccacggacggtgatgtaataaaaccatcaatgaaaatattttctaaaaaaataaaaatgactttaaaaataggaaaaaatacacctaccacccgctcgtctctgtcaaagcatg

SEQ ID NO: 146271 - DNA, 501 bp, Zea Mays
tatattgtcttcggaagggaaaatttaaagacaaaaaagtaaaaatgcattgaacttggaaactttcttgtcaagcccctgtgtttctttagtaaatatgtctcaattcgggcacaatgttgttgactgtgcgagcttcggactcctctcaaatgtcgtgccgttgttgcgcttggtgatgcccttctggctgctgatttatgagccaaggtaggtgtcaatggtggtggtggtggtaactgagcccaagctgcttgagaatgacttgccgaagcaactgatgttgtgggttgctggttgcctacatactcagggatgtatggcgaataacatgaggcagtatgcaagacctgcttcggctgattctatcgtgctttggcttcaactatctccttttgcttttggatcatgacttggcacatccttattgtgtgtcccttatcctccccacagaataagtagaacaatctcctggattgagtgttgaaccttcctccgaag

SEQ ID NO: 146272 - DNA, 554 bp, Zea Mays
ggctggatacttcacttccctacgagcttgcggaggcttcaatttatagggatagcgagcggtggtgatcaattcggccgagccgtgctggcggccggagatgaagaagaacactagcgcagcaaatacgtgttcaacgtcgtggcagctattccggtgagcaacggggagctaaagcgagtcgtggcggtgcgatggcaaggctcggacacgcggcacaagaccgtgcgacggtggttcaccggcgagcttatctgcgcaagccacaaggcacatggggtacggcggtgagtcaccggaattatcctccggcgaagggttactatctagcaagcttatctgaccgctggcattgtaaatctcaacggcggtggcgcgaatcacggcggggatcggtcgtcggcggtgagagtcctgcgctggcgatgtaatctgatcctggtactgtaccatgggatatgttcagtcagatgaacctgacagccaaacttggagctaaactttctctcaattctcaatgataactcacaccatgctctacagcaaaattgtag

SEQ ID NO: 146273 - DNA, 683 bp, Zea Mays
cagagagtaattgagaaattaccaacccgaagagcgctgtccgcggtgaagttcttcacggcagaactaggaaccgggagaaaggaaattcgggctatgtgagtgctcaggtggaattgagtcgattgctcagccactgaggtgcgaagtgcagtgaataagcaggatcagagcgccatttataggtcgacgaccggatttagatgaaattcccggattgcggatgtgctggcaagcctaccgcgcggcggataccggtgagggcacggtggccgctgattaatcggagcttgccacctcagtaactcactgacacgtcaccggtaacttttaccgtggccgccaacgacctatccgagccacggcggcatccttatcgccggcgagactgatccttatcgcttccccgatgcactgtaccatggccagcctcatcagacagcctgacagagcaactttaggtcctattttctccagattttctatggtaccaagcccaaacatctatagcaaagttgttctactatgattggtctacaactttgatgtggtgacctagggcaaaaaccctagagtttgaaagttaccaggctcaaaagttgagcccacaaatctgaaattcagacttagagtgaaatctcaattggggtcctttttgcaaatgaatccaaaacttagggttt

SEQ ID NO: 146274 - DNA, 787 bp, Zea Mays
gaggaggccaacacccgtgaggcttatcggaccttaaagatggactatgacaagaaactaaagaagctcgcccccaaaaagaaaatccagaagaagaccaccaaccgaggatgccaaacggagaagaagaagaagaagacccctccagccccaccttcccccagggtagatgattggtccgacgccgaggatctatccctagcaagcctcgaggatcttctcaaggagtttggggacaccttagagaaggaattcggtagtacctcggggaacgctctcatgtagctccacctatagtagtcttatgcttgtattgtgctggtgtaatgaataaaataacttggttgaaaacaatttgcatgtgcatgttagtgactctcttccctggcagatggcttcggataaaaccacgcctaccgcctccgggattggagcagggtttcccctgagagctgaaggggaagccgttagagagaaaagtgaaacccacctccccgcacccccaccactacccttagacctagcccaagttctagccaatcaaacccgactcatcgaggtcttcactcgaaatctggaaaatcaacggccaaatggtggaagactgcaagacaggatgagggatttcctgagactcaagcctcccacgttcgccggatcaagcaatcccctcgatgccgacgattggatgcgcacgatcaaaagaaagttggaagccatcggttgcccagaaaatcagcgtgttcaactggctgcccatcaactttccgggatggccttagcctgg

SEQ ID NO: 146275 - DNA, 390 bp, Zea Mays
gggattttccccgctttgacggcacgacagatccaatgctcttcctcaacaagtgcgaggcctactttcgccagcatcgcactatggcggaggaacgcgtgggacgagcttcgtaccatatggacgacatcgcgcagctgtggtacacccaactacaagaggacgagggcagaccaacgtgggggcgattcaaggagctcctgaacctgcgatttgggcctcccctccgttcagccccaatgttcgagctcgccgaatgccgacgttcgagcacagtcgaggagtacgccaatcgtttccaagccctcctgcctcgcgcaggtcgccttgacgaggctcaacgcgtacagctcttcacggggggtcttcttccaccactcagccacgccg

SEQ ID NO: 146276 - DNA, 381 bp, Zea Mays
ccggagcactgcttcttcacgtggcacaggtaccacacggtgagaagggacgcagacgcatataatccatgattcacaagccagaccacgcaccgtgcagacatgccgaacttcttcgtattttagccccctttttatttcacgttcacttttttatgggactgttaccatgttgggcactttgagtgtctgcgtgatgatctaccacgcaaattttctgcttttgcttccggtggctagttttggactctgagctaatatatcatcccagccagccgtttgagatctgtggaagcccaagtactcaaatatcactcggcagtgtaggcgcttttgtgaagtgttttgcttagttagaccggtgtgtaagtgattgctcta

SEQ ID NO: 146277 - DNA, 534 bp, Zea Mays
cttgcacatcgaatacatcacgaggagtggttcctcagaaggctccgagcaagaagaccaataagactggaggcactggggtaaggacgattgtgcagctgatcaaagcttcatgtctcgcgcatcacagacgatccaggatttgtgcctagacagttcggagcccacacgaacagtctggttaattaagccggatggtccgatggtgactagaggccacaacacccacataatgcaaaaggtggtacgcaacaggggcgaaatacagataaagcaccagttcggctagtcaaagccagccctacttttgatcaattactctacaaatacactaagaaggttgttctgcgtgattggctaataaagcagcccagtcaccggctaaaataaaatggcccaaagggcaacgtgacaagcatcacttattcatccagtgatgccaggatgcttttcacatgcctactcattgtcaatatattatcctattcaaatgtgcaacgatacgacgatggacccatggtacatgcatagtcc

SEQ ID NO: 146278 - DNA, 429 bp, Zea Mays
gcgctcgaacccccccccccccccccccgccgcgagcctgcccgcgagcagggccggccctgagcaggtgcgagcggtgccgccgcacagggcctccaaaagtcaaagggccccatctacatataagtacatatatattagtctatagtttgatctaaaaatctattaatcaggtatgcaatcaatcactcatgctctagtgccttctccttgaccgctcaacgtttccagccttcagacgagtagttcacacgcacacttggtagatgcccagtgaccactcccgagtcacgaattgttagccttcgccctccacacagcgattgctccctccgcttcgcaaacactcggataagcaatccgatcgttgcgcagcactaggtctatcatcgcccttcagttataaaggatggaagtccaaactagtcc

SEQ ID NO: 146279 - DNA, 582 bp, Zea Mays
tgcgccgccgtgagccgcacggagaaaactcgctgccgtcgtggtgtcgcgtctgcatcgccggtgtggtcgcgatagctgaccagggagctcctgcacggttgtcggtgtacgtgcgtggcctcaattggagctattggagcttgggtcgccggtaattgctcaccggtgcttcaccaccgccacggatccgccgcgcaccgttgacacgcctgctcgctccataatcactggtgagcacccgtcccacgcatatcctatcgttctggctactcgcatttacctttggatagaagttttagcgcccaaatcgctctgggattggtcgccgacgatggcgccgccgtaccccgtgcttgcgccgccgctgttggccgggggagaagaaggggtttcctcggtccgtccatacggctatggacggtgtagattagacgccacttaacccttcgcgtgcttagatcatggccatcggtcgaccgatcgacgatcagcgttggatctggatctcattaaatcaagagcattgatctcggatcggatgatgccaatcgcgtaccggttcaaagtagttgagatcta

SEQ ID NO: 146280 - DNA, 383 bp, Zea Mays
atcaaggactggtgcaaggcctaggctacaatatgaagaataaaagatgtttttggggctttggtgcttgatggtgaaactagacgtcgtgaatgaaagagaaccaaattcaacccaactatggagtcgctggagggacaaagataaagaaaataagattagtcctagaggaaaataaggtacccttgctctgtctgtatcctacgtttgggttacttaatcggtgactgtgtgatcttgtagttatggtccaaaattttatatggcacaaagatgactatgttagttcctaagttcatataatgtcacagatcttgctagacaatttcatggtgtgttattatgttagttctctatatttggacatgtcatgctctatagtg

SEQ ID NO: 146281 - DNA, 418 bp, Zea Mays
acagcaaggacagagaaacagccagaaccaacaaaggaacaactctcagacaggtcaaaggtctagtgggtaccaacagaatcgtcaaggaagcgttgtgaacacacaggctagaaataacaacacaactactctagtccaacccagtggatgctttaagtgtggtgaacttggtcaatacgccaataattgccctaagcacaacccacagacaccccaaaggaacaacaatcaaagagctgatcggaatacacctgctcgtggaactacgcagaacaagactccgcaaaaccaaagtaagggaagagttaatcatgtgacaccagaaacagttcctaaggatgccgatgtggtgtatggtatgttccttattaactgcatacctacatcagttttatttgattttggagcatctcac

SEQ ID NO: 146282 - DNA, 309 bp, Zea Mays
gtcgagagctgcgctaagaatgagaagagatacaccaggaaaggagggcgcagcatcagcaacaacaacaagtaccactgcctccaccaccaccacctgttccaccccgtgataagcaccgggaattcatgagccataagccaccgacatttgctagttctcctgatccactggacacagatgattggctgaagtccgtagagaagatgttgaacattgctcagtgcactgaccgggagaaggttttatatgcttctggacgtctgacaggccctgctgctgattggtgggattcatatactgctgccc

SEQ ID NO: 146283 - DNA, 537 bp, Zea Mays
ggtgatgatgactctggtagggatgttaagggaaaatcccccttaaaagtatcctccagtcatgtcaatgttgctggttccttgtctgaacaatctgaaagtatgaagttggggaaaggtcctgaaggaaccaaaggttaccttgatagtcagggtaatgatgatgaagaatacaatgaaagtgaggatgatttgttggattctaaggagttggaggaattcatcaaggatgacgaatttattccttctcccgctcaagagaaaaagaaaatgaatataaatgttcctgatgatgctagtaagaatgctggagttaagaaaggaggacctatggaaggtgatctggcagaaggagttagaaggagcagcagactggaatctacggaggaaatgaagattgttgataaggcggatgcaagagctatggctaaagatgcattcatcaataaaggtacgtcatacaatcctttctctgttcttaatactgataatgttgttcttatggatgtggttcatagaattggagttgatttaggt

SEQ ID NO: 146284 - DNA, 454 bp, Zea Mays
gtgcagccatggcttctagcactgctagagtgtttgcagtgatgttgcggtagtacctgttcgaagcggtttaagagagtattatgtgcaggcacgggactgaaactgatgtatttgaaacaacagcttgaacacattatgtatgttaaaccagaacaaactcaacttctggtgtccgctagaatttaaaaaggaagataaaatgctcacattatggcagcccctttaaaccatctctcatgaattaaaattaagcagaagaatgaatcaaataagtagctgaattacctcacattgataacatcatcaactcttctagtcagctagtgtcacaaagaaaaggattcccacgcaacagccaaaaaactaaaaaaacaagagacgcgccttcactttcaacagtggtctcggcaacaggctacaagcacaaatatgtactaaccagcatgcaagc

SEQ ID NO: 146285 - DNA, 584 bp, Zea Mays
taagtttcctgttccggtgattgatgaatttttggatgaacttcacggggcagcctggttttcgacgctggatttgagagcagggttccaccaaatccgggtagcacctcctgaccagcacaagacggccttccagacacaccatggccattttgaattcaaggtgatggcgtttggattattaggggcaccagctacattccaaggagccatgaaccggactctagcaccgttgcttcgtcactgtgcgctcgtctttttcgacgatatcttggtgtacagcaggacttgggaagaccacctacaacacctacagtccgtgctgcacctgctgtctaccgaccgttggcaaatcaaactcacaaagtgttccttcgccaagcagcagattgcttaccttggccatgtcatatctcaacagggagttgccaccgacccaaccaaagtggaggccgtccgatcatggtcggttccagccaactgcaaagagttgcggggcttcctgggacttgccggttactactgggagttcgtaaggaattttggagtcatcgctaaacctctgaccaacctcttaaagaaag

SEQ ID NO: 146286 - DNA, 554 bp, Zea Mays
tctttgccttcgccccaacacatattacttacaattccacttgtccttctttgtatgttttacaataacagtgtcaacttcaagaaggggagcaaggttggacgacatcaagcactaaatcaacaccttttgcaggcaccaacgactttgagtcgagtacgactcaaaaccaagaaggggagaatgatgagtacatggacgtcaactatatggttaaggcccaaacaatcatggagtcccaacctcaaggggagtcgaagtcaagtttatcctcggatctggtttggattgcaggagtgggtcttatgaaaacggacgcttaggccacatacggactccgttctcgatgttctagataccgttagaaagttaaagagataggtgttccaacccaactggtcccaggtcaaaatatgcttggagttgattggaatcatcataataagattacctccagaatttgtcagaaatcagtgacacctattttggggctaaaatgctaaaagccttgtacatcttagggttgctcggccaccgcttgagtcgatgacgac

SEQ ID NO: 146287 - DNA, 489 bp, Zea Mays
gaattataaagtaaagtagcacatgatagttccgaggacacttaccttcaccaggttgttgctcggagggatcttcgacaacacactcaggaaccacgtgccgctcgttgtctaagtaaagcgagcatacattcaatacatttggaaagtaaaaatgaacatcacatcacacatgtgcaaacattggcacaaaactcaataaggtatagtattaagtacaggggaatgaggtcaagttataaaatggactaatcctaagtggggaattgattattctctaagtgttgaaacataacctaaaaggatagagtaataattaaacaaagaaaagattacattataagatgaactactcttatttaggaatttgattatcctttaaacattatccataattacatatctaattctatttatcacattagggtctaaaggttaaaccaaaaatgaatccatgaaatgcattacactaatctcacaaactttaaa

SEQ ID NO: 146288 - DNA, 682 bp, Zea Mays
tcatctgactgaaattgccatggtacagtaccccatatggatcagaccgccagcgcggctgtcctcaccaccgatggctccctccgtcgtgattcgtgtcaccgacgtcgggattagtgcctgggcggatggatagcgctgcggggtaaaagaatcttcgccgccggtgagctggacttcactccggttagccgcgatatctctcccctttctcaccgcccttggattggaatctcatcgccgtcgtgccgtcgccgttgtccgccgcgtgtctctggctatctactgcatcaccgtgactcacccttgctctccgttgatcgccggagcaattgccacggcactggacacccagtcgttgcgccagtgccttctttctctgaccgccgcgcgtctcgctcgattcaccggccaccgcttgcgagcgctataaattgagcccgcggctagcttcgcaacatcatcacgcaccaccacacctagtattgctcccaatcgttcaccagagagcactgatttcaaacttcccccaaaactgttttccgccaccacgaagagtgcctcaccgcggccagcgcaattcgagtcagctcacgccttctactccctcaattgagtattctcaggtacccgtgatgctcctcgacctatccaattgcattataccgccatgaatcgcttg

SEQ ID NO: 146289 - DNA, 520 bp, Zea Mays
caccagggggaatcccttgtcagacttgaagaatcaccacgggtcagggagctccatagccggtggcttctactgcgtcaacaccggtcgaacagagaggaaaacaaagaaagagagaacatcgcgggcactatcgcttgcaggcacaccggcgggccgcgccgccgcggggcgtcctgcacagccgagctgggcgctggaggtaggagaacccgggggagccctcgatctctgagtgatctgctgcgattcaatcacaggtatcgcttcaacctgatagatcagaaccgtcgactcactgatgggcgaccatgatttaatcaagcataccccttcggtgtgtgaatcgagatcgttgatttgtgatcgcacgactcggaatagattgggcttcataaaatctaggccgttcagtcatgatctaaggatcccgagcccataccggttcggtgggtgtctgatctaattcgcgccatcagccaaggatcggacggccagatctgatcagtttcccttcgcc

SEQ ID NO: 146290 - DNA, 631 bp, Zea Mays
tctatctctcttactgattcaaattcaatgaatcatctctttcccttatccctcgtctctccccctctctcctcgccaccccacccagcctcccccttccccgtgtcgcgctgcccttccctctcactcacgcctttgccgtcaacccctcccctcagaccatcgtcgccactacccgtctatatgcttgtcgccacaaatgttacacctgtgatgatcactccatcacctctagatcatacgcctcgccagtagcgatgaacacattgtacgtcgtatcagctttgatgtgatgaagatacataatttcgccgctggatgatacattattggaccaactgtggtgtccacttcaacaccaccgcgcatcatgcgtacgtcagaccataggggacgtcaccactagattatacacccgtttggtgatgatatattatcatcttggattttaatactattggtcacttgttctcaattgctacacaacaacaaaaataaggcaacaccagttagaagattactaattaacttctcccctcgattactccttccctgaaggataattaaagggagaagataagaagtgaggacgaagatatattgaattgcatgagaaatgagtaaccgaata

SEQ ID NO: 146291 - DNA, 385 bp, Zea Mays
atttatgcatcattgcatcactgccagaataaattgtgcatatgttatataaggttttcgattgttagaaaagtgcccagttagttgccgtgatagtgttcactaactgaaaagaaaggtgcatgttcttggagttacttctaataccatctgatggctcccaagtcccaacactgattaatttgtttacaaaatgctcttctttcttccagttgactttgtgggttgtaactcttgcttcaaagtgcgaatatacagtccgaaagaagtgtccatctacatttcttgtttgattgctgttgaatttgtattttaaagtttggatatagcatatactagaacgtacaacactcatattaatgtgaatctctgagcttagctagac

SEQ ID NO: 146292 - DNA, 477 bp, Zea Mays
aacagtgctcctctatcagatacaatagttctcggaattccatgcaaacgcactatttggtcgatatagatctctgcatatttctttgccttgtgggtggtatgtactggcaagaaatgagctgccttggttaatctgtccacaatgacccaaatagaatcatggtgtcgggaggtgttgggcaatcccacaataaaatccatgcaaaaatcctcccatttccaagatggtatgggaaggggctgtaaggtacctgctaccttcaaatgactagccttgactctttggcaagtgtcacatttagatatatacttagcaatttccctcttcattctggtccaccaatacaaggatctgagatcatgatacatcttgttactgccggggtgcatggaaaatttggaaagatgagcttcatccaatattttcttcctgagttctggatttttaggaaccaccaatcggtcttcaaaccat

SEQ ID NO: 146293 - DNA, 391 bp, Zea Mays
gtcgccggcttgcaaggggagagggccgtctatctggaggccccaagccggttcacgtgttgggcccctgttggacatgggcctgatcctgcctttcagttgcaccccactatagtacgacccggcctgaatatgctttggtcaagtctgaaggaaaggaacggtggctgtttaggtaggccggccggacaagcactgccgctgcccagtggcagtatcatctacgcctgctgcttgctcaacaacattatatcatcctctgccttttccaccccctgacatgaatacaaggacatcaacagcttaggtgctggacgacatcttgtttcctcctttcatagcaacaagcagtggtgaaactacgcttctgcttgcaacgggtcgtttactc

SEQ ID NO: 146294 - DNA, 606 bp, Zea Mays
ggagctcaacattgatcaacaccgggagtaaggcgcccctggactccatgagacgggaccatttcttgcaaaccacagaaaaagacccagctctgagagtagcccatctaccagtcaactcctctaccttgtcacgacatgggaggacaagaagataatttgacgttgaaacccgtcgcaacaccagagaactagcttccatttccagccttggggcaagcagatcagctatctccgaaacccggaccgaagaccgatcgctgatcacagtcaccattaccgcgtattgaagatcatcctctgctctcgtcatttggtggctccatcccaggatacacggaggaacgtggtgcattggggttaccaaagcagcggtggccttataagatagttgcctagaaaacgtttttcagaatggtatcgtgtcaaatttggccaaaaaagacaattgggtgttaggtgggcccagtgccttttggggtgggtaaccaatcaaccaccattgaaactctccaccggtaactaacagtcattttgaccttctcactatttccacaagtgttaggaaaagggactacagaagcacagaactacagatgactgttg

SEQ ID NO: 146295 - DNA, 779 bp, Zea Mays
attcgatgaacttacatggctttggagaatgtgtggtgtgtcctgctcatgatcaccaattgtcctcatgggtatccgttgaggagctccaaccaaacttggatgaactgtgttgctgtcttcaaggattcctggcgccggtaacgcagccgggggagttacatcatgccgaccatctgacctacagggtaatgtcgatgttgtactctctccacactgcaccgatccgctagccatcgccatggtgtatgccctaaccctcccaggtcaatgaactaaagctgcggctgtgtgtaaccctgttttattttttggagttatgctcctggccgaaaccatcgtggccgatattcatggtttgttcaaaatatcccgcgtgatttgcatgtggcgagatttctgtgtcccgacccaattacgattacctgcctattctgttacagcaacataaactcatcaccccacgcgcgaccccaccacaaatccacgatcccggtagacccactcgccacccacaccacgatatgcatgcgtcagatcgttatgcatttgttatcggcaatttaaacaagcataaacgcccaactacaacccgctcgcgtcccggcataccactatgctaatttacgcatccactaacggtaaaatacacatacataaacgcgcaaatcacgcctgaccccaccatgatcccgatgcacccgcgcggcacccctctattccctattacgcatccgtttcagccaaattccttatgcacaatcactgcagtccacacg

SEQ ID NO: 146296 - DNA, 558 bp, Zea Mays
cactttttggtgcctcttttctcaccagcgatcgtttccccgctgccgctatcatttgttccaacaattgctggcatcttctgatcctgaacagtggagccgggagtcacatagacggtggagcaccgtcatcaccagcaactagtgttagcaccgcgcttgtagcgagaaaaacggtgacaatgtcttgggcacccgcaaccttattgagagacgacgacggcaactaagatgattctctagcaagtcatcctcttcgtatatatagattcttgctaatgggcttttaacctaaaggctcattaacgttcttatagatcatgattgcattttaggtatatattcaaccttaagaaatctaaaacaacttacaatttagtacaaatagagtattaatttgattatattaaaagtaacaactgtggcttgctgctgatgagttcagcaaggtgaataaggtcctggcttgtccaaagaagtggtgagcggagtaaaaggaccctttcacactgagcatcatattgtatgcacacccttccatttgacggccattgaaag

SEQ ID NO: 146297 - DNA, 481 bp, Zea Mays
tacacgtgagcatcatacctctctgagggctggatgcgttgccattgatgaagcccgttaatctccatgctcttttgtattaatgcaaatatacatgcccgggaagcactctaaccagccttgtgtaaagatgctactgctataatttgcttttgtgttccattctaagcttatgaagcctggattcgatgcgctcgatacaattaggataggcgcctcgatagaaagctatcatcgtctccctcccacccgaaatgggaagctagcttcatggccggcaaattaggcaaaccagtactgcgtttctggcacgctacacgcactcgctgctggtcattaactcgtcacgggattcctttcaacggcgagcgtgagctacatgcgaacggtgaggcacgagtggaggagcgtcattaagccaaaccatgtgcggaaaccctccgagctcggaacgaaatcaaaacaaaaaccgtaagcaaaa

SEQ ID NO: 146298 - DNA, 658 bp, Zea Mays
cgacaagaaactgaagaagctcgccccggcaagaaaaatccgcaagaagaccaaaagtcaaggatgtcagactgagcagaaggaagaagcccctccagccctaccccctaccaggataagaaactcatccaacaccgaggaaatgtccctagccagccttgatgaccttctcaaggaatttggggacactttagagaaggagttcgggagtaccctcgatagcactcgcgtgtaatgaacttatggtagttgtgtgctgtaatgtgtaatgaaccggtgtaatgaataaagtaactggttgaaaaaaaatggcatgtgcatggtagtaactcttttccctggcagatggcttcggataaaaccacgcctaccgcctccgggattggagcaggttttcccctaagagctgaaggagaagctggcggagaagggggtgagacccacctccccgcacctccggaactaccactagacttggcccaagttctagccaatcagacccgactcattgaagtcctcactagaagtctggaaaaccagcgcccaggtggtggaagaccacaggacaggatgggagaatttctgagactcaagcctcccacgttcgtggggtccagcaatcccctcgatgcagatgacttgctgcgcacgatcaaga

SEQ ID NO: 146299 - DNA, 591 bp, Zea Mays
gctccttcggcgtcctcgtgaaggtcgcctcgacgttcatgtacaagttcccgttccagaagacggtctactacctcgaccatgagtgctacatccgtttcccggcgcccaacggcggggtggtgacgccggggacgctttgcagcgccacagcgcggtgagtctgcttgctactatgcatgataaataataatctcttctgtttggttttgtaggtcatcatgacctttaatttgggttgttcatgtccaggaaataattgagagtttcaaccaaacagcaaaatccacaaggaatctatcacttaaccacacggcgatgatggattactcgccgccgcccgtcgtcgaggacgacgacagccccaagctaggccccaacttcacgatgcgccagtttaatcatcatccttgtactgtttgcatccaactcttgtttgagtatatgttcatgtactctatcgatcgatctgtaagactgtaatccttaataataataaagtgaaatggaagttctttttcgtccattgttctttatagcacaagccacaagcaactaaccccaggcctatctgctagcttttgcttacaa

SEQ ID NO: 146300 - DNA, 504 bp, Zea Mays
tgaggccataaagaaacttgcaatagatgaagtgagacctcaagaaaaggatgataacgtaagaactttgttgatgataaatgaggttgttgatgtaggtgcaaaagtggtgggtgacaaatcatccacccaagcaaacccatcaacctcaagtcatccaagtcttgaagaaaatcatcaattccaaaggatgccaactgtggtagatgaatacgaaagtgttaatggtgaaatacctcttaatcaagtgaatgacgaggaggagcaaatacaaagacaaccatgagtgcctcatcctagagtccatcataccatttaaaggggtggacaacatcctgggtagcatcaggagaggggtaacaaatcgatctcgtttagctaatttttgtgaattttacacgtttgtttcctctcttgagccacttaaggttgaagaagcattgggtgatccagattggataattgtcatgcaagaggagttgaacaacttctcccggaatgaag

SEQ ID NO: 146301 - DNA, 505 bp, Zea Mays
agggcctcacgaaacattgacacaaagaaagcctcgctctatgatccattgaggatgtcatggatgaacactttcggcctcatgttggcgatgtttttgagcaccgtgtctctggggtttggcctgtcgacagtgacactctcatccatcaagtttttgaaacagaaatgggagatgacgacaagcacctcatcgggatctatgtccaggtcctcggcacagaccgcctctaactttgccaaataagtcaattgttccttgactgttgggctcaccttgcccaggtacattctactatttccaacactgtgcatgtacatgttttttcttcttgtcttatatgcctgtactctgtacacatattttctttcaccataaagcacatgaaagccacaaaagaaccccacaaatatgcataaatcattgtcttaatgactctctacaagcaatcttagttgggtgagaggctaccgacctataatggtaggaagaacctgtacacagc

SEQ ID NO: 146302 - DNA, 699 bp, Zea Mays
gatgatttgggacatggagagtgggaccagtggattgtgaatgagcagcccattcagcaagacccacaacccattttgccagaggagcagcacattcagcaggaagaactgcaactcagcaaccaacactctggcttgtcgtctgatagctcctttggtgctggtcagcttgcacccccccccgaatggtcattttgcggtgaatggtcatgcgctgattgggaatggaatggacatcaatgctgcccctttcaatgggcctcaggaggttgatggaccggcgcctcaggtggatcaggtccaggatttggaggtcgtggtccctcaggcccatgttgatgtgcctaacaataatcaccctcagaatttggagatgaatttcatgctccatcaggattggcagcctgaccccgtcttccagatgattgaagagagaaatagagctgtccagttctctaggctctgggccaaatactttgctccggctggatcgactgatcactcggtggacgtccctaagaagtgggctcctttttttctttcgaatcttcttcagccggagtctttcaattggtccaagacttttcttctgtcagatatccctccaaagttgcaggagcaaggaatgaattccatcccttttgtggtacctaaggattgtccagttgtcccctccctgggggatgtcacctctgggat

SEQ ID NO: 146303 - DNA, 542 bp, Zea Mays
gaaaaaattaatgaatcaacaacacttacccacaacaaaaagtttcggatatttctgccgcatcagctcctcaagttcccacgtagcctcgcgctcagactgattagtccataagaccttgacatacttaattgatctcttcctcaaaacacgctccgaggattccaagatacacaccggacgacaatccaaggtcagatcctgctgcaccgcaattggttccatctcaatctgatggtccgaatcctgcaagaacttcctcagcatagagacatgaaaaactaggtgtacccttgccatggaatccggcaattgcaagcgataagccaagctgcccacccgggccaagatagtgaacggtccaatatatctcgggctaagctttccggagacaccgaaccgaacaactcctttagtgggtgataccctgagaaggacttggtcacccactgcaaattccaaatcccgcctcctcacatcaacataactcttctgacggctctgagtggccaaaatattctgacgaatttccagaacctttt

SEQ ID NO: 146304 - DNA, 821 bp, Zea Mays
ctgcgtgggaataactgcagctagcaaggctggaaaagtgcgagctttttttctttctttctgggtctgcctgcctctgaatgaatgaataaattggcaataagttaagtggagaatgcatggcatgcgctagtcttttttatttgtctatttacttcaatgcaactcctcaacaccaagtgtgcaggtagggatggcgatgctactgctagtggcacaccaacaccatcatcaagtactaatgctccacctgcagcagcacaaccacaatcaggtatagacaatgtcattgtggaagatgatgatactgttattgttgggacgaagaggaagctgaaatctgatgtttggctagagtttgaacaagtaactgttggtggtaaattaaaagctcaatgtaattggtgtaaaaagcaattagttggagatagtaaagccggtacaactcatttgcgtagtcatcttggaagttgtcaatcacggcaagttagaaaaggattaaagcaagcaaccttgaagttgagtaaggatgagcatggagcaataatagttgataagtatgtttttgatcaacaagttgctaggaaagaactcgcaataatgatatgtgtccacgagtatccactttcaatggttgatcatgttggttttaggagattttgtgcagctctacaaccacttttcaaaacaatgtctaggaacactattaaaaaggacattttagatatgtatgaggtgcagaggagttctatgatcaatttcttccaaaagtgtcaatctcggattgctgtaactactgatatgtggacagcaaatcatca

SEQ ID NO: 146305 - DNA, 322 bp, Zea Mays
tggcagggcaagcctgtaagatactgtcccaatttcctccagaacctgatagggaccatagaagcgaggcccaagcttagagtaggcggctggtgtgattcctaaagttgtacgctgttgcagtcgaacccacacccaatccccggtagtgaactgcacttcccttcgagacttatcctggaattgtttcattgtgagctgagcctgtatgaggcgttccttgatctgagctaaaaattcatcccgatcttgtaactgagtgtcaatagcagctacaggggaaagtcccggttggtaagagataatagctggagggtctcgt

SEQ ID NO: 146306 - DNA, 305 bp, Zea Mays
caactatatgatggaatatgcaaaacagcagcacagcaggaagtgaaagaacattatcttttgaagatgtgaattaaaggaatatgcatatttcaaatcgaagggttgtacacttactctgtggatcgtccagctgtagagaaaagatcagcccagtgtcgaccatcagttttcctagcaacactgactacaacatccatatattcaggaaagttccgtagcaggtcacaagttttctcaagaagagaattcttgggagaatcaactttttgtgaagcctgattttttgaagcacttggcctgta

SEQ ID NO: 146307 - DNA, 4694 bp, Zea Mays
taccaatatcaggttcatcttcacatggaacactcgattcgggcaagagataatctgtgagagcgccaacagcatgtaattcccggcaggccttgagacaaacaaccttcttgattatagaaacttttccttcagcataaattgtttgtacaggactgctcattggaagatgcagcgtacatgtacctaatgccttgtcaattttgaatcttggtagaggtttaaaatacctggcatatgttggtaaaaactgttagtatttgcaccaggaaatgttttgttgtatgaaccaaaagaaaaccttatcaaagaaagaaaacagactcatccgatggtagctttgagcagaaaaagttaatcaattgaatactagagttcaaagtcacaattgctccagtagattcaacaccataaaattcttcattgcatagtgtgtttagaagaggctgacaacaagtagattccaatctctgagattcttcccgcatgatttgtccacttttcagaaacttctgtgtcttagaaagagcattgacatctcccctggtacagacataaagaaacctaaataatcaagtaaagcaatatgcaaaatccaacaatatcactcaaataagattggcaataaaatttgacacagattacagggtcctagtaaactgaaaaatagtaaactaacagaaaccacatcttgaatccctctaacaattgtgaacaaataaagatgataccaccagaaacaataaatcaacctagaatgaataaaacagagattttttcatgatatttcttgtatcaccatcagtcacactggcatgaagattaagccactgggacaaaaaagtgcatttagcaattcacaacatacaattcaaacaggaaatattgtgcctacactacaaatcactgcaacggaacaccttttttattccagccaactttcattggtcattgggtaatccagccagcaaactttactttttttctctcaactttcattcaggagaaaaaggacaaggagatgcaaatgcctactccaaatatgcagggcgtgtcacacaaagtcacaaaccaacaaaaagacgaccacaacaagaacactacccagcaagatgaccaaatgtccagggtgagcaaccaaaggagcaattccacaaagtttactttggaccaaaaaatgaagatgaaaggataaataaaaatttgctgaggaaacaacacctacaaaactggaaaacatgccttctaactagtaaaacatagtcagaatgttgcatcctagctcgaccacgtgactgtataaagctgcgtacagttgctgcctgatcaaaacggattatcaagttacaacttggcacatctagtccctcctccaaaatttgtgtggcaataatcagatgcacctacaatgtatcattttatcatcagtacaaatatttatcggacacaacaacagcagggcaacataagcagcagacctttccactccgaaatgaatcaacgatttccacatgcttattcctactctgatgttgcaaaccacaattacgccctgatgccatgtatctaacactccatccagacatttgattaatagttgacagaagggcctccaacacaatgcttgtaataactctttcgacaaaaacaatgcatctcaaatcttgcatatgcctgcaagagggaacgagagattaatcacctatggtaacaatgagagaacaattttcagctccccatatcagttttaggtgttatatattatttggatccccatgtcagttgcttgatttgcgtacaacaattactaagaaagacaatatgtccgacacctactgctctcctgcatttgctgctcaatgcagctgttaaactttttgctgttattaaagcattgtattgactaacttaggagctcatacacaatgtcatcaaacaagccacaagcacttcatcttacttgctgacttctcttgtgcgtgaacaaagcacaacctgaaaggcagtaacagctagctaggtgtagcatgagtttatagaattggtcccctcttgattttatgtcacgctccgccattgccatccagctggacattcgggttcataacactataagatctataggacaagcttgtgtacatttatttggatagacaactttagtggaattagatttgcatgtatggcgaatcgctacttcaaaggcaatgggagtaaactattttctcacctataccccataagagatttgataagaaaataaactttggatgttaataacccatcttgcagatcctcagcgaagtcctcaccaatatgtcctgtatagacggatataaatataaaatatgacaggaagatcaacaaatcatatttaatacacttcagaaattgatactccatacagtcaggtacagtgtgcatgctttcagaagatttaatctttgtatgttttgaccaataattagtcaagaaacgtctggtataaatatcatataagtacatttaataaatgactttgcactatattagttggttttgtagctacaaagtacaaacaacattcttgtttgagaaaacaatattcaactagttttaattttaacaatgtaaaaataaaacacatcatatacatttttggacagtatcatagatagctcaagaacacactaagaacaagtgtgtctctacctaataatgtaaattgccaaatcgtgcaatggctcaatcattagccttcaatcgagaggccgctgaccccagttcaaacccaggtggtcaaaggtcgtgtgtctacataaaggttgtgcaggtgtcatcttcttcccggagttgagtttagtattttatttagtgaactgataaagtgataaatattggcatacacctcataaataacacagtagtaattatagatacacttcttatcaacaaaatgatttataaaccataaaggctgagttaaaaatattgataaacagtggcaaaacagttgcacagagtaattcatgttaaggctgaactttcagaaaaaggtacattaaagaaacaagaaacaagaatgcaattacgttgtacgcccctctttgtcatcttcaatataatttctgaaagatcactatatacatctctgacatagtttctaacaaatccttcaagtttttcatccaattcttcgccccaaaaggacacacagctttccttatttgattgtagaatctcagcagcctgaaaaaaaggtttaaagccatttttaggagtgcatcagaatgataaaaatgtgcacattacatatccccatacctttgctgccagccatactccaagatcagatatgcaatataagaacattgcatttaatttttttattcttttctctgaattttccaaaggtgaaccatgcagtttccccttcaggatttctaaatgctaagataatgtaaccactgttaattcatgtgtatatcaactcagaacatggtgagagaagttattggaagttatataagaaaatatactaaaaaggtccataaccccatcatgagcataaaacgagataaaaagaaatatggatatgtcagtaaagctattgcatttttttgccaagtataaagccatgagaacattgttgcacatgtataacaaagcaaataatgaataatacagatttgttcatcatcccttcaaggttgaatattaatttgaatttgcttggactaaacacccacgaatatccctaactttataatattacttaccaacagcattatgcctatgatatttaatcatattactagtaatgtgtcgttgtctttcctgttaaaccatttgaagtccaagtcttagttatttttatgtgcattattcatgatatcatatctactacaaaccaggtatataaggtgtgatcatgcataccatctagaagtttaggagccagaacaaactaatgtagttgtcagagtgttgtagcgccatttacaatttcagcatcaaacagaaaatgcttttagaaaaaaaaaagaccaaacaattttgctgtgaacggtagtatcttaaatcataagattcgaattctagagtatggataaataacaaatcaagtgttatgcttcgataatataatgcagaatgcactgcaaaagatccctggattacatactgggtgacgcaaagtaacatagtcaatctgcatccagcagaaggtcatgcctagagcatataatagtacctttgtttccaatttgttcaagcaacggatagtatgactatataactcagacgttacgatataatcatcgtactcaactatctttgtagtcgcaattggaatgtattgcaatagtgctgattcactggcaacagtgtacacctataaagggaaatgcataagttattgccgcatgtaaccaaagttgggataataaatacaaatacagttgtgtgggtgttcttatatagcctgaccttcgcattcatgagattctcaaactcagatatttcttctgaatatttgtcaagcgccaaatctgtcaagaaaattccacaaaagagttaattagtgagagaataaaatgcatatgcacatataaatatacaaagagaattgttgtatccttacttcttgcaattaaagaagcggtcatcccaaatatagttggaatggaatctgatggcctagaattcagttgcgg

SEQ ID NO: 146308 - DNA, 664 bp, Zea Mays
accagaactatggtagatcagaggagcaactcatctaccaagctttctttaagaaaaaccacacagctactgagtgttggcacatatttgatgaaaaattgacccaaatcaaaaacttttgttgcctctactacatgttcttatcatacttatccaagctggttcatggatttcagtgccatcgatcacatcactggagagctaaaaattgtctatcaaaaacaagtatcgaggagatcaaatccatatcacatcactagtcatacttattaattactccttgtcgtagtttcatactaaaagatgtttgtgttcccaaatctaagaaaaattgtgtctctgttcatcggcttacatctaataattcaatctttattgaactacattctactttctttctcgttaaggatcaaaaaataagacaatcttgtttagagtgagatgcataggaggactatatccacttccaatctcaataataaaggaagtttgaagtggtagaagatcgttaataaacatgtggcatagtcgtcttggccacccatcttttagtattgtcgagcaagttgttaataataacaatttattatgttcacaagaatttgtgagtgagtcagtttgcaatgcttgtcaacaatataagagtcatcggttatcatatctc

SEQ ID NO: 146309 - DNA, 477 bp, Zea Mays
gtctataaacccataaaaacaaaactctctattgagagtgggtgttttttctaattcatgtttcgttttattctacacgatataatggtcttcaaaacaaaaacctccaccaagactagtgcaagaatagcgtatcattaaaaaaagtagaggccacttgaaagggatcagtattctattgattgaagtttcaaattttttgtggttggtgaactgccgaaagcaacaactccaccaagatttgtactcagcggtactcatgtctttttatgccctaccagtactggaataggttactgtaatcgcattccaccttttgtttatccattttgaatctgaactccagtttgaagcagtactgaaactggttctgcagagataccatctttctgcgcatttcagcacattgcaccgatttaactgctatatgccttggtccgaagaagaatacaattctaacgtagaacctggacatgc

SEQ ID NO: 146310 - DNA, 1203 bp, Zea Mays
ctccttccccgagtctgcggtgcaacaaacgcccgcaaaagactcccctccatccgcggatcctctcggggcgtgatcaccgtgcgctgactataaagtcctggggcccccacctcctgttgccctcgaaccacaatcatcggatcatagggaagcctcagactgcaagaaattcctcaccggaatcaggactccgccgctgagccgcgtcacatcgtgggcaccccaaatcccaacacctccgtcggtaaatccaccatccccaagtttggcctgacctccacattgcgtagcacgtttctgggggaagaaatagtcacctttgggaccatggcgcgttagccggtgggtcccccgacgtgtgagcaggcagcgccgcccctgaccgtcccgtcttgggggggttggttcgggtgccgtcgatgtggtgatgggtggcgtggattaacggctggcataccggttggcaagagttgatcgggatcgtcgatctcggtctgaacgactgtgatcagacctcagtcctggtggctcgatctaggatctgtgccgtcgatctggcggttgacggttgtgatcagatcaagcacgtaccggttcaggatttttgaatctggtacatagtttcacagacgagcgcgctagatgagatcgtggcgtggcgagttctcagctattgacctcggttccagaggctaggaagacctaccagctcggtataagtaaaatgtaatcgtggcccttggcttttgatcggacggttgtggtcgtcccgtaccccttcacctagacgttttagcatatgagcccctcggtaatttcaaaatgaacccgtcatccacagacattataaaatcattacaacagagtcctttttctgcgtaaagaaccttgggttccgaagaatttatggccgcaatccactaattcggtgtaaatatagatttaatccgaaaattgattattatgtataaaaataagcctaagaataaaaggaagtcataactttctcatactaacttcaatttgacccattcaaattttgttatcttcatattaaagttgtctcgatgataataatttctattttagtgttttcataggtaaataaatatccattttattgcattaactttgctaatcaaggttaataagataaggtgaatcaaactagaactatggtctaactaaaataggatctat

SEQ ID NO: 146311 - DNA, 272 bp, Zea Mays
caagtatttgctgtagccccaacaaagacaatggattcacaatatcactaacccactgccagctatccatcgcctgagcaacagttcttgaagaagcagttctgctgcccaccatacagacaacatcagggctaaatcttgtaccgacttcccatttaaccaattatccgaccagaaaagagtattggcaccatttcctatcacagataccacaaaagacttcaagaattttctaacttgctgctgcacatgaacagtcaacccaatccaag

SEQ ID NO: 146312 - DNA, 298 bp, Zea Mays
cgggtcgtgccgggccgtgccgtgttcgtgacgggccaaaatcgtgtcgtgccacgggccgcccgccgggcacggcccatttggacatctctaatctgcaccatcagagccattcaaagctagtagatacaacgggcagcagacctctttattgccatcttctgtaatacctcattagttaacaccatgttcatatcctcaataaacataatattcaagtgtggagcacttctcttgtggctcaaatttatcatcacatgcataacacaaggcattcacctttctgaacttcctaacg

SEQ ID NO: 146313 - DNA, 603 bp, Zea Mays
gctgcatataaatctttatttttcataaaagtaaacatagatctttgattgaatgcatcagccatagagagaagagatcaatatattgtatctgtttcagtgaaattgatgatactgtatttggacactggatcttcacaagttacagtacgaactaaacatccagcaacatgtgcaaaaaatctatttaattcactaaacaagagatattaaccaaatttctacagctgaaaaaatggcccttaagatgctggcggttccgattcctcagatcttgcaaggggaccaacgagtcaacaaaatccctttctagcatcgaattcaccacgcatgaacagattccctggtggtgaagcccttccatatcaaattttcaggttggtcaggtaatgtcaaagtgtaccatgggaccctgaaattcatgattctaaataccatactggaggtagcatttggttgtttagactgtatatttttgagcctgggtattggttgtatgaaggaaggttcatgaagcacgatcacttttctctagtgctccacataaccgatatgaatttacaagtgaatgatgtccacacactaaacaatggtcaactgtgc

SEQ ID NO: 146314 - DNA, 469 bp, Zea Mays
caataactctgtagttatcacttacctcatttctggtggaaccatacctccaacaatcacccctcctgaagtctcactaatcaaatcactatcttggccacaatcatcctagccaccaatggttgcaagtcgttgttcgactaatcgtgattagtcgggttggtcgcctgttaatagccgattaacaggacgactcgattagggaacatggttgtccagatcgtctgactagtcaacgttaacggcgattaatcatctacttttccagattctagtcgttggtgcttgaacttttgtgttgggctacagaccaatgttttttgcccatctacaggaacattaagttctgcctctcctctcctctgtcaaaaccctaaggctatctaaagccctaaatcctgccttcgtccctctgctggtggctgctctagaggtccatatcactgacgtctctagaggtttatttctt

SEQ ID NO: 146315 - DNA, 534 bp, Zea Mays
gagagggagccgtcggagccttccgcggggcgtccgtacacggagagtgagaagggggggggggggggtattccgtgaatggttgaaggaggcataaaccaaactcttcaactgacacgttcatgagacataatagtatggtataataaatcttgcttcctcgtcaagcaacttaactaatatccaaatagtgctgattctctgttatcttcatctctacttcattaacttgaaccattgtatcatgtgccattcactgaagttgaatgtaggagtagttgcctcccaccttctccttctacctcctctgcgcgttgtcctacactctgacaacacccattctgttccatggctttctgtagacccacttactcaacttcactgttttgtgttttgcctcgctgaccctgcaatcctggctgctaccacagtatgcatcccatgaaacttatatccagtttggagtgatctgtgccctctctatttctgatctctctgactatgtttaatccatatctaatacaaccatcagat

SEQ ID NO: 146316 - DNA, 952 bp, Zea Mays
ccccaacggaattcagttggcgaggatcgcgcctgatcctccccgggctccgcaccccggagcatataagaccgacccgccccggagcttccccaaaccatcaaaccgagacaccggaccaccgtctaggcagggatgagaaaacgagggaggtgtgcggagagggaggggatttagccgccggcgtggatccacggttacaccgacgtcgaggcctcggtaccaaacttgggagcttcactgcgttcctacggaggtgatcatggccacgcctgggcgtattggcgaccgggcacagcggaattgctcaccagagttgatccccgccgcgaatccgcacctcgccgcgaactgacttcttcacgacatcaccaccggtaagggctgtctccacatgttcgcgatctcgtactagatgattagcactcgtcaatctcgggtttggagcgctcggacgtcatattgccgcgcgccggcaagcatcgccgccacgggacctcggccaccgccgtgccctgggatcgttgaagcgggtcgcgtgggagccatggatcccagaatcaacggacgagatcatagcgagataacggtatggctgtaggaaacgtggtccgttggatctggcattgatggctgtgattagatgtaggataccccttcacgcgttacaatccgggccactggatcagatcgggcggttctgattgaatcgcacttcattaaatcgtggccgttgatcctcgatccgagggcggttatcgcataccggttcgggctgggaagcttttaatcggagccgttgattcggattgaacggcgctgatacacctataccccttcgtccggcaattttgcgtaagagccctcgaagaatcaggaaaataacccgcagtccacccttatgtaaagatcaatacatacgggtccttttatttatagaattaaccctgaa

SEQ ID NO: 146317 - DNA, 1094 bp, Zea Mays
ctgcgtggccccaagcacaccgtggtcgaccaccaaggccctctactagcacccaaccatcatcgctgccctacctttaactgtgtccgtctaacccctacgttccttctcctaggccaccgcactcgaccactaaacctccatggctggccctaacccacctctcctagccaccaaggcccctgaaagtgcatctacatctttttgggttttggtgaattgaatgacaacaatattaaataactaatcagtttgtcaagtgttgaacatgaaattaagtatatagcacatgtcttagtgaaagacatagaaggtgtaacacaagagaatcatgtgatattccatagaaagatcagtcatgattattgatcatggatatcacaagaaggatttgatacaagttcaacactcaaattagatagtcaagaattcaatgtacactcaaagtggtatggcttaagaaaagcttgatagagtgaagataacaaggaaaagggcattaagggactaagcaaagaagaaagtcaagatgactaaggtaccaaggctaaggtgaagaagtaagtatttgcatttagtcgagggactaatcaagctcaggagaagtcttgcaatgtttgtgcgatccttgttgaagaagatgaggagaagaatggacattgattaagttggttttcaatgtgatatacttggagacagtctgatagggtgaagacaaacaaggaaaaggctttaagggactaagcaaacatgaatgtcaagcaaatggcttatggaccgaggtaccatggctagggtgaagaagagaatacttgcaagatgtcgacagactaatcagattttgaagagttatgttgtgttagatatcacaacattagaatacatgattggatgccatcggattaactcatatttattgtgatggttcaagtcataaggattaagggatgcaaactcaagggatcaagcatggtcacaagtccaagcagaaggtatcaaagatagaacctggtagggctcacttgttgtgtagagtttggtaaaaaagccaagaatgataaatcaataaggaattggattttgggtaattacag

SEQ ID NO: 146318 - DNA, 457 bp, Zea Mays
gggatttgaagtttagcttcaagtaagagagtggatgagggaacgaggaaaggtaagtatgggtagttctaaataggaaagagcatatagaaagggggagaaagagtgactaagggttacctatctatgggggatgactacataactatgactacataactcttggaggggtgagatccacctatagtacttaccacctaggccaatagtggggcagcatgtggtgtctactacaagtgatatgaggaaaggacaaggtggatgatagaagggaagatttgtaccatctacatttgtccaaccatgaggcaccatgtgggcatggtgtggctcgcttggcgatgacgtggaggaatccaaatgaaggggcaatttgggttgtggcgttgggttggaaggatgatagaagggagagtatgccagggccaaaaatggattgtagtgatttttcctcttc

SEQ ID NO: 146319 - DNA, 440 bp, Zea Mays
cttgcgctcgcccgcacagctgccaccgagatcctgtcggtacccttctccgcgcgctcccactcctgcccaggaccaatccattcgcctgttcgtccactcagcgacagtcacggccacacctcgccgttgttcgtcctcgacagcgggatcaccatgcgtcgtggtcgtggtcagctctcatcgccgcttcaaactttcggtatgacaccttctggcgtttgccgtcatctcctcttgctcgtttaataccctgataggtcgccggaggcgggatttaggttctccggtgattatgccaccgtagtggggatcgccaccgtgccctgtagccggggaagaagacgagcccagaaccattgatctcgcgatgaacagttaggactagaagagggctccggatggtaggatttgagacggacggtagagattagtttgag

SEQ ID NO: 146320 - DNA, 660 bp, Zea Mays
gcccaatcaaagtcagttgtaaatcaagagtctgaatgcctttggaaaatgaaagctttattgatgatgaaatcttcgggttacagagtacaatattccttcaagagttttttgaggccttgctaagggtagaactttctaaggtgttctatgttccacgagttccccacttctgtgtcgtccatctgagtaagccgatatgatcccgaccgtgtgacctctgatacgatgaacggtccttcccatggtggtgacagcctgagtcgtccctcccccgtttgaatttggtgaaggaccaagtctcccactgcaaaggatcggtgccgcacagctttgtcttggtagcacctcaaggtctgctggtacctggccgactgaattactgtgttcaatcgttcttcctccagcacatcaatgtcttccagcctggttgcttctgcctcagctatgttttcgaaagtcaacctcggcaccccgaagattagatcagcaggcagtactgcttttgacccataaaccatgaagaacagggtatttacatgcaaagctcgactgggttgagttcgcaggctccagaccacgtatggcagctctctaatccattttcctgcaagcttttcactcttgtcgaataccttctttctgagtgcttctagtatc

SEQ ID NO: 146321 - DNA, 645 bp, Zea Mays
ctgtcttttccttgtaaaaccacttgcagttgataggacttgcaccatcgattggatcactcaagttccaaacttgattgtcatgcacagattgtatttcggattccatggctccaagccacttatcggagttagatcccatcattgcttctttgtaggttgcaggcacatcattgtccaacaataatatgtcacgatgctccgtggttaggagtgtgaacttttgagttacgcgtcgtttccttgtacacctatgtggggcacgtgtttcatcaatatattgcacatcttgtacatcatcaatagaatgcacaacatcttgtacatcgtgtacgagttcagtgggtgctgaaatatttttaggtgtttcttgaatttcttcaagttgcactttgctcccactaactccttctgagagaaactcttttcctaagaagacaccattgcgagcaacaaacactttgccctcgtttttattgtaaaaataatatcccttggtttcccttggataccccacaaaaaagcatttgtctgattttggagtgagtttgtctgacatcaaacgtttgacataagcctcacatcctaaactttgaggaaagacaatcgagacgtttcccagtccacatctcatatggagtcttc

SEQ ID NO: 146322 - DNA, 363 bp, Zea Mays
gtgcggggtgcattattacttgattcactaagtttgccttctatatggcagctgcctctatttcctcatttatttttattgtatatgcatgcaactcatggtaaaccatgtacaagttattggattgtcatgaatggttcgtgtctgatgtctctagtaacagtgtagttcgatgtactaccatattcccattctcttgatacaaattcctgaaaggaaaaggtccaaattactctatatgcaccgtaaagttgtctggataaccccctaaagtatattttgtgtccaatttacccatctgggtacttcagttggttcaattcaccccttaataagatttgtatttcttgtttctcatataca

SEQ ID NO: 146323 - DNA, 754 bp, Zea Mays
ttaacatgatacatatacaacatcagggtacatatattctttttataagtttgtcaggcacctcacagaattaggacaaccttgtcacgtactcaatattggatacaagtttgcaaaataaaatggttcactgtattcaacggatcacacatgtatctgttagatctaaaaaatcattttttaatcaaaacgtttcttatttattctattttttttccaaaaataacaattaaataaatacaatatgtatcacatattatctctgtataagtaacatataatcctaaccatccgaactaaataaaaaaaacggctcacggttatttatagtgtcctagcaaagtccctatttcttacagctggctcctgagtcctgactagaccattcgagtcggtcaagatgttgaatcggttagaactcaggaaccgagtcgtgtgagttccatgttcgcagtgagcagacagctgatagctacgggactgcatagaagtcaagatcacaaaagaaaatagaaagaaaactagcgcaaacgatgcacggaatttgttctttgtgtaaattgttttacaaactaatcggaaggaaacaaacaacaaagaacccttcagtgttcagtgatcttgacacatgtggattacttagggcctgttcagaagcatctaaattataagaaattagtttatgaaaattgaaatggctctaaacatacctatttatattttagtttatagaaattagattactagtttctta

SEQ ID NO: 146324 - DNA, 298 bp, Zea Mays
gtgaagccgcaaacggaaagtgagtctcatcaaatacaacgtggcgggagatgatgatcttgcgagtggatagatcaagacaccggtagcccttctgagaaggaggataaccgagaaagacacgccgtggatcgaggggacaatttgtggggggtcgtggcactgaggtttggatagcacaggcgaccaaaaactcatctggcattttgcgataaaggagatggtagggaataccattatgtatggacgacgaaggccgccggtttgtgagaaacacggcggtggagagagcctcggc

SEQ ID NO: 146325 - DNA, 587 bp, Zea Mays
gtgggctggtggctgtgccgtatgagatgtgaagctagttacaggcggcgagctgcttttgcaagctctgatgcttctgccgcagagttgacaaggtccgaatgggagttagtctgtctgtctttgcagctctgtttcttctgcacttgggtaaaaacgctgtgaaccccaaaattaggaagattcagttcagaggtgaggattaggggtgggtgtccggtctgaaatagcagtggacctttgatgcctctgtttgtcttggtctggttccagtgatagctgtatcttgtgctaggttatggttatagcagttcatcatatgagcttttggagaccagcaagatatggaaagttcctggtaattacttaagtatcatttcactgaatgagtaatgctagctagttagtgaaaaggaacatgtcagcacctaactgcaccagatatcagaccgcaacatcaggatacaatacaatgcagcgagataaacagtctacccaacgagtataaatatactatgagcagtatgttggggcctcagggaaagggggtaggcagggaattgaattcattctaataattataattt

SEQ ID NO: 146326 - DNA, 614 bp, Zea Mays
gaaaaatatatctgttgtcttcttgatggactgagaatagaggaaattgcagtagagagtgggttaccacaagattgctatcatgctggttttgttacaatggattcaatatttggatgcgagctatagagtgtggacagcacaccaagatgctcttctttcattgttctctcactgcaggtctcatcaagtccaactaccggcactccgatggtagcttttaatcttttcaattcaatcaaagtatagagctgcagtattatgaatgatgagcttgtgtctggtggtgatgacagccatggccagaataatgaaagtgagcctaaacaggatttaacaaaggttccttaaacttccaagaaactcataagaaaaactccatccgtgctggtcattaattttaaaagcctctttaaaggagttgtaagagacccttttatccgattatctggacccatcctcctgcgcattataccaatggccaggagacattgtaagatggaactgaaacacaatttatctccacggcttgacagctctttaacaacactaactatggaatcctcatcacaaagagatccagattggaagatactaattacaaaactccggtc

SEQ ID NO: 146327 - DNA, 296 bp, Zea Mays
cggggtttgggcaaaatagagcaaccgagaaataacatgttagcaccctgactggaggaagagagagcttggggaagaagaagaaggacggagaatttagttaactggaatttagcattcgttttccataactcttacaacatcccttggtaagtttaatactcgccaccctttacactgtccattccggacccgaatatagagtatttagccttttggtactacgacccaccaagcgtagaggttctaggttcgtgctgtcggcagtgttgtggaccagcaacggtgtgttgcta

SEQ ID NO: 146328 - DNA, 492 bp, Zea Mays
ctcatactcgagcatcgcaagatatgggtggggctggcgcgtagaatgggaagtactcgagcatcggaagatccaggcggggctggcgcgtagaatgggaagaatgagatggcggggtggtcctgcacttgcgatgggatgcgggccgatggtggtcctgtgcactggatggcgatgaggggtttgggttgcgattccttccatggtggcgaggcatggattgcgtttgggacgagaaggatatgggcagggcatccgcgatgcatggaaagaacgattgggcaatgggtggtcctacgcgtcaccgacaatgggattcctgcgtgctggattgctgcgaggcgtggatagcggcgaggggatgtgtttccttctgtggcagtgacgggatttttccttccatggctgaggcattaatcggtgaggggattgcggcgataccatgcggatgcaggggtagaggggagagggcgcgcacggggaagaagggag

SEQ ID NO: 146329 - DNA, 302 bp, Zea Mays
ctgcattgataacatcatcttcaacctcggacgactctgcgaggcgggcaacggcgcgcaccgcagaggccagagagtggtgcggaatgagcacagatgacgcaagaacaagaggaccccgagtcacaattacattcgcaatattttgactggcgactgagaccctgaacacccaaggacgcaagcacacgacgcggaggcgatccggatgcaccgagaggaggtagtttgcggcgttgctgacggagtggatgttgtagtgggggagaagggaagatggagttaaccagagatgagccgac

SEQ ID NO: 146330 - DNA, 751 bp, Zea Mays
agaagcagtatcaaaatggaggcagccatccaacgtcagtgaagttcgaagctttctgggaatggcaggatattaccgccgctttatcaagggattctccagcatagcaagacctatgaccgaactcctcaagaaagaccataagtttgtgtggaccccgaagtgtgaaggaagtttccagatcataaaggagaagctcacgaccgcacccgttttgacactaccagatatacaacaggatttcgtcgtcttctgtgatgcctcgaggcaaggcttagggtgtgtactgatgcaaaacgagaaagtcattgcttatgcatcacgcctactcaagccgcatgagcagaattatcccacccatgatttggaattggcagccatagtgcatgccttgaagatatggaggcactacctaattgggaacaaatgccacatcttcaccgatcacaagagtctgaagtatatcttcactcagccagatctcaaccttcgtcagagaagatggctggaactgatcaaagattatgacctcgagattcattatcaccccggaaaggccaacgtggtagcaaacgccctcagccgaaaaccttttgggataaagggaaccaactttttagaagattggaagaaggaatcagctcaactgaatgcatgtttgggaaacaacggcaacctcgaagtcaaaccaatgctagaagacctcatatgcaaagctcaacgcctagactcagagacagcaagactcgtg

SEQ ID NO: 146331 - DNA, 772 bp, Zea Mays
ttgtcacactggatgcttcggatggtgcgaccaaattgagtagagacccaggcaaagaagtgagacagggtgggaaaagtgtccgacttctgacgtaaaggaaaagtccacaaataatgcgagaagtcatcgagaatgagtaaataatacttatagccagaaatgctgattacaggggatgtccatacatcacagtgtatcagatcaaaaatgcctgctgctctagaggaggtggggaatgggagcctaacatggcgacctaacttacaagcatgacagaggtgctcaatagatcccctacaaccagaaacataagtactactggagagcttggacatcacatcacgcccggggtggccgagacgacgatgccaagtcgcagaagaggcggccgctgcaagaacatgtggggctgaggtcgaagtagtgggagcaggcaggcgaagcgtgtagaggggctcggggctgtcacaccgagcgagaagagtcctggtggcaagatccttcacagaaagaccaaacgggtcaaactccatggaacaagagttgtcagtagtaaattgacgtacgaaaagaagattttgaatgatgtggggggcaacaagaacgttggttaagcggaaaggaccggggaggaccgcgtcacctactgaggtgacgggaagggcggactcgtttccgacaatgatggaagagggaagagaggggtgggcgggggaggtggaagatagaatacctgccgaggctggggaggagccaagggtgccgccgg

SEQ ID NO: 146332 - DNA, 377 bp, Zea Mays
aggggagaacttttggcatgcttcgcatgacctcgtgactcgattggcagtacaaattattgtgggccagtaaaatccttgacgaatcaccttggcagcgagggccctgggtcctgagtgggagccgcaagttctgtgtggacttcgcgaaggatttgtatgccttcgatttcagttatgcacttcagcataggttgactgatcccctgcttgtacaactgaccctcgactaatgcgaagtcccggcttctgtgctttagtcgtttggcctcattgcaatcgcttggatggtagtggccttgcagatacagagttattggggcccaccaatcttcagccatgatgaggttgatgatgcggtggccttcggcgtcctg

SEQ ID NO: 146333 - DNA, 491 bp, Zea Mays
ggcactaggatgttctctcgaatatgcaagtgtgttccaagcttttgtatggtgtatgctatttcaaaaggtgggttgtccatggtttattctcttggatcagaaagtgacaacagttctaagatactccaggtcaacgagagttctaacagtgaactttattcagataagtcatcagtatcaggtaaagtctatggaatttatattgcgttgtgaggatagaacaataaattactacaacttgatttttgttatagttaccaccagagtagttgtgtggagcctccttgtatttgtgaagctggtatagtcatatagggagcttgtttgctatgtttgtacttgtgaagtttggagctcgtagtttcctttttgtgatctaaaattctaaatggtgtattgttggctctttgggtttcaataggaaagaattgggtgtcatttggttcaggcacaaaccagtcctagaaatttatccttttcatcccatg

SEQ ID NO: 146334 - DNA, 958 bp, Zea Mays
aaggcataaaagagccagtggtatgagtacaacaaagaatggagttaagataagactcacacctagcgaagacgaggttccgaccaagggcaggataagtaaaacacttccctcgaattgagatgagagagggaactttaaataacagacataagatagtcatcaaggtaagatggagagacggcgaaggtaaaggtagtaacagataacaaaggatggagttaaaaactcgcaagcgacaaggaataggatacaaactgagggaaaataggtaaccttcaatgtttaaaattgtgacgaaagagagaaggttttggagcgcaggtataagataggcatcaaggtaaggtatagaggtgtcaaagatgaatgtgataataatgaaaggcataacaaaggatagagttaaggcaagactcgcgaaatggcgaagtggacaaaataatcaaggtaagataggtgagggtgcaatagaatggttgaagtaagaattcattatcgagagaagttataaaggaacaatgagatcaccaaggatgggcaacataaaatgatcgctcatggaccgttaagaaacaggggtggtcaaggacatgttaactgaaatgtcttgaacagttattggggtatgaaaataagcatacataagaatataagagtatgtaagactccaaggatacgagcatactaagaccaagggcatagaaattatcgaaagataatgacttaacaacagaatagaaagggatctcaaaagacaggaagggcatgaaaatataaactagaatgtttatatgggcaacagagttttcagggttaagtatttgaattaagggataagggtatggaagaatccaaaagatgcagcaagtcaataccaatggaatagatatggtcaaatggtagcaatttaataatggaagacaaaaagaatcccaaaagacaagaaggttatgat

SEQ ID NO: 146335 - DNA, 614 bp, Zea Mays
cgcaatactactttatttttatactttatgcagtgatgtttccgcttatgtccaatttcaatccgttatcaagttgttccgttctttttcgttatcccgctagtcctgttttcgatcctattttcaatagtcctattttttattccgtttccgaaataaaatgtgaaaataaaaatgggagaggggttatcccaatcgatcctttttgttgtcatccctaattgccttattgcctctaaccctaggtagccaatgtagtttgttaaaacatcaacccaactagtgtagaaatttagctataacaatctgatcacgccagaagatctagttagatctgtaccattataaattcaccgattttgaggtgcgccattggaactcaagaatttgtgccagtaccgttacaattgtgctgcaatttgagatatgccatgaaggccccttagaccctcggccaggtgtatggatgtgtaccttatttttatatggacccttttgcccctgtgcaaatgcagagtcacggctcacccatgtatcaccgttccccaatctcttctccaattctcactcaggtaaggtagtctctccctagctttcctaattacttgaccaag

SEQ ID NO: 146336 - DNA, 493 bp, Zea Mays
ctagttctcatcaattgagaattcgtgaggaggatatttagaagaccacttttagcaccaggtatgggcattatgagttcatagtcatgtattttggcttaactaatgctcctgctatctttatggaagcaatgaataggatgttgcatgagtttttggacgactttgtggtcgtgttcctggatgacattctaatttattctaagaccgaggctgagcatgagcagcatctccgtctcgttctgggtgccctaagggagaatcagttctatggcaagttgaagaagtatgcattttggctgtccgaagtggctttccaggggcatgtgattaatcagcagggcattgcggttgatcccaggaatgttgcggctgtggtggagtggaagagaccctctagtgtctctgaaattcgaaggttcttggggctcgctggatattatcggcgcttcataccaaatttttccagcattgctaagcctttgactagact

SEQ ID NO: 146337 - DNA, 410 bp, Zea Mays
caaaaatgagaaatgatcgtattgtgtgtctgtgtccggaagaaaatcgataatcgaccgcacagaagaaaacgacatactgcggaccttgttcgggaaaaaacacggaataagcggggtgagttgggctgaaaggcagtgaatgattgggccagactgtgcgttgcaatcgaaccccgtacggatcagactatgtattatcattagatgtacatcgttttaattcgtatgaatgcaacctcaatatatctcacattcgaactccgcacctattattattgttatatatgagttgttctaacatgtataagcatacaccgtgtaagtttgggtgatatataaagtgtaaaaagcacaaattggaccggaaaaaaccgggacctctaatgtctatcagtctatgtagtcaa

SEQ ID NO: 146338 - DNA, 309 bp, Zea Mays
caagaataggcaggggtaagaaagtttatggtgaggaagaactccgtgttgggtggtaatgcatctgaagattgagtttgacttctctccttccttgacgaggttgatcttttctttcccggcctgggtctcattgcttcgaggtgggagtatatcatcgtggatggagaatatggttaagataggtatgaatgtgatagactacacgatgtagatcaagatcttgtttgatgttaggtggggatagacagattatgcaatccagcatgactctattggtggagttagatctttttgctcttggttaag

SEQ ID NO: 146339 - DNA, 1180 bp, Zea Mays
tggcatcacatctagtcttaccgtgttgctataagttacaggcagatttgcctcaatagcactattctctaagaaccgttttgctaatattccattttcaattttgcctaagttcaaacatagacaaagcctggatcatgtcaattagtagccactggtcaagataaagttgaccgaccccaatcttttgatgtcatcgtaggcttaaggctttccagtagcaaagttgtttcagggtcaccactcgccgcattgtacatgttgcaatgacatgaagcgggtgtttcagttaacgacaccagacatatgtggttgctagataaagttggctactggtcaagataaagttggccgaccccaatcttttgatgtcattggaggcttaaggctttccagtagcaaagttggcatggaagcgcatggttgtttcagggtcgccactcgccgcattgtacatgttgcaatgacatgaagcaccagatgaaatagggtgtttcagttaacggcaccagacatgtggttgctagataggaggttttgacgataaagatgaggatgaacattgtgaggcactgaggctgccttgaagttcccctgtgataaaacattagagattattggtgctcttggtccaaaaaaaagtctgtccgtacatacagatgttctgtttttcttagatcttttttgaagttttgcattgttgcttagagtttctaaacattagatcctttttggattttctatgcatcatgtaaattaagttgtcctttcacccttgagacaaagtcatttcggtttgcagcttatgttcacttgtctgagactttgaacaacccacatgcaagcttatttcttctatttactattctaattccctgtgtgttctttttggtgtcttgatttgcaccatactttactgatttagtaattatggaatttataacctgttatgtggtcggcagtaggggggaagtggcaagggcgcaagcgccggcccctgactccgcaggtggcgtggacgatcggttgggtgccgatctatgttgggcaacaaggagggagaccgaattagcagggacgaaagacagtttggagataattcattgcctgctttatttcataactttccattacatatataggccagctgcctggccgcagcctcctaactgcttgactc

SEQ ID NO: 146340 - DNA, 615 bp, Zea Mays
cttgaaacaactgaaagcttcatcttttgttgccagaagttgtatccacatatatctactatgatcatccactataagcatgaaataactcttacctcctggtgtcttgggcctaatctgtccacagagatctgtgtgaaacaggtccaaattcttgtctgctctgtaatttgctacttgaggaaatggctgtcgttgttgcttgccaagagcacatccatcacagaactcttccaccctatcaatcaatggcatgccttctaccattttcttcacgccaagatctctgagggcccgaaaattaagatggccatatctcccatgccacatccaagccacatcatcaaccttagctactagacagacaggtgctgcaagactagtttttagcaaatacagtctattcttgactcgaggtgctttggccagcagtgagcgctcgacatcaaacacattgcaaaaaccatcttcgatcacaactttgcaaccaccttcctctagttgtcctaaactaatgatgttactctttaatttaggtatgaaataaacttctgtgagtaccttgtgccccttctttctggcttgaagcattacagagccaatgccttcgatctg

SEQ ID NO: 146341 - DNA, 424 bp, Zea Mays
ccattcttccgctgccggtgggaccccccctggccaggttcgtcttccccgcaagcgcggactcggacatcgccggtgggcgcgcggattccgcgggagggcgcgcgtactccgaccaaccgactccgcggtcgtcgcgccaacattgtaacggcccttccgattactgcgcaccgctcgggcataagaaccgaggccccgctctgccctcaccatcgtagcacctgtgagagaaagggtgagttccgccgccgcggccaattcctggcctcgtcaccgttgaagccttagaaagggtcgtggggcttcgccgagtcaccaggaagacatctctgccagtgttcgatgggattgagcctcgaggcggtctcaattcctcaccgcacttcaacctccgccgcgggtccgctcttctccgtggcca

SEQ ID NO: 146342 - DNA, 631 bp, Zea Mays
ctaaatatctcgatatgttaggatcctattttcttgtaaatgcacttaacgaattgagtactcagatatggtgtataacttgtattagtactacagtgacctcacactgcaacacatcccaacccaatatatatctttttagctttaacaacaaaatagtgacacttgtagtgtgctgcctatgcttgacatggtaaccttttatattgaattaattacaagcaagaaacactgccaatagtggtaggtatgtggtgacctgatgcattgtatgcatcattcattattttaccttgaacttgaagactccacttaaaataagctcaccttaatatgtattggttctagcatagggtccaggttactatcataacagcatgggcgggcacccaagtagtgataaatacattaatttgcaaccgggtaagctcacctaaagcaagtactttgtacaatactccattgaaatgtataactctaaagactagcttttttagggttccatcccgcaaggtcattgagagcaaatttatataatatatgcactagtttgaggtctagtagcagctattacagtattcagacatgcatatgctcaccaaggcaggccagttcatgggcttgcttgtgt

SEQ ID NO: 146343 - DNA, 1033 bp, Zea Mays
ttcggaaccgacgcaagggtttcgggccgccggcgccgtagtgccgagggttgtcggggtatacgcctcgccatcgttggagtacgtcgccgccgtcctcgcggtgctcaggtgcggcgcggcgttcctcccgctcgacccgtcgtggccggaggagagggtctcgtgggctatctcggcgtccaacgcggcgctcgtcgtgtcttcagttgggtcgcgaggagccacgctgtttgagagcagcgcctgccctgttctgcgcttttatggtggcatccggcggcgatttcgggatggaaatggcggggatgacggggaggagcttgtctggccgtgcgagcacgagtggcaccgcaagttctgctacgtgatgttcacctctggttctaccggaaaaccgaagggtgtttgcggcactgagaaaggtaagccgtgctcttgttggggcctggttgcttgagataggcagagtgtataatctcgtgcagatattgagatgccttacccctttctcattgttgtgactttggcatcgtgaattagtaggtcccactatgtttctaattgttaggtgtcaaaccttgaaaacataaatgtactatttgtttagtcatgattgtcttatggtaacaatgtcttgttcagtcaattaactaaaagttctagtgtattgtcttgttggaccaggtacatatatgcataccagaaacttatagcatagaatatttgtgaccaacggtgaaattgtatgtcccagagcatagggtttatttgtttgcgatggcatggctacttggctaggtttgagttgagcagccaccttatgaagactttttttttgacaccatgcctaggtcttctgaatcgttttttgtggatgcaaagaaggaatcctctgtgttcagatgatgttttgttgtttaagacatctgtcagctttgttgaccatctacaggagttcctttctgcggtcttgacttgctcaacacttgtcattcctcccagtgagtggagagctaatccagcatccttg

SEQ ID NO: 146344 - DNA, 696 bp, Zea Mays
gtggggctcctgtcagtcctcaccaggtaataatttctcatgaatgaacttcttgactgagtttttttagttttcttccctttcttgaccacactgttgttcatcataacaaaacaaaccagtcacggccagttcctctgaatcatcatgatgtggacatatgtcgacaacactgcttatgacttgtagatttcatggtcttgggcaggactaattggcttggatcaggtaacacgtccacacaggtctagatgcgatgcccaattgtgtctcctacatgacaatcgaatattccaaatccagtctggttaggtgctgcctccaggttgtgttgtgtacatactacattctgggcgaattggggctttgagcatccataggtcactatcaccagacatctcgaaaggaaaccaaatgtgaatttcaatccctagatttctgctgttcaacgtggtgggactggaaacgaagatgcaaccgaattccatcgaaagactcttgtgggaaaacagaaaaaaccatgtacacgcgcacccgcgtggattctgtatggggcgagggaggatttctgggagcaagagagtagcaggcagagcagaggcttaggagagttatggagataaccgtagtttgctgctgcggaccttgaagcgcaccgcagcagcaagccgtcgttgctgctcaccgccgagcgcc

SEQ ID NO: 146345 - DNA, 778 bp, Zea Mays
cgccagcaccatccttgagggccgagttctctgcagcagccacctccaaggctgaaagtccctcagtcacttccatgggagcagggcaatccaaaacagcttcctgaccctcaagaccacgctccaaggtcgatgagacatgggacgctgcccgggatgaccccaacccggcgtcgagcacaccagcacaaacatccatcgcgccaccatctgccggttctgataacagatcttctggaaccatgtcttcaagagtttgatcaaagttcgccagagataattcttgcagaccaatgagggcagacaaggcaggagaaggaacaccactactttccccactagctatgtaacgccggctgttcttccgaatcagagggatttcgtcctcttcttcatcatcctcatcaacaacatggacagcacacccattggggtcagcgtcagacgggtcacacccattgggatcagcttcagtaaattcaggcactagcacttcctcagcaacaggagcagaaggacaggcaccctgatccaagctagacacccgacgaagacgtctcttcttcttttctccccctcagcaggaaaagaggcttgatcggctcagcgagaacgttttggacgaacattgacagacttctgagcgtccaaagctttgtcagcctcagggatgggcgccacgaccaatgtttcagcaggagcggcatcagaggaatcctcggctaacatatcaagcatggcacttatctctgcatcacttggattcaaaggcacctca

SEQ ID NO: 146346 - DNA, 860 bp, Zea Mays
gtagaaaatagggtctgttttgaagtttagcacagggccttggaatttgccggcatggccctgaatcgtttaactaatcagggcgatggatagaccatagattatattgttcaccaatcaccactcaacagactaagctggaaccttgtcaaggccaagcatataagcgttaataccaccactacaaaagttggcatcaatggctgacatgaccataagccactcttatcaagaccaaaagcactactgccactgcagcattagtcgaaacagcagcagaaagcattccccaaatctcagtctctgcgaatgatatgcacattcatcgtgccattcttggtatcaagtggctcaaagaggcagatatctcccagctgcaaactgttgtcgcctgcaaaccgtgcccaccctttgcaaagccttttgcatttgcgtggagctcccggaagcttaacgcgtaacagcacttcccagctattgccatggcaccgaagaatcaactctctgctcttgaatggaagatataaatcagaatagttgatggagaattcctggttacagagggaaaagggttttcagtgctggaaaattgaaacaaattgaagtttaccatcgaacttcgctttcaaatctcttcagtgcatctaaacaacctgcccgtcaaacgacgtgcatttgaaatgcaatatcaatccgggaacaaacacacacaaaaaaaaacataactcaccagggcttgagagtgtccagaaatgtttgtcttcttcaagacacacacatagatggggatttcagaacaaatgtctcggagtcgctctttcagaatcttcttttgtaatctatcaagcctggtgccttgt

SEQ ID NO: 146347 - DNA, 560 bp, Zea Mays
acctgcttgaacttttgatagcctgggcctcatccagtaccatgtattgccacttaacacgtctcaaaagcttctcttcattcacaagtatctgatagtttgtaataagaatgtggaagctagcatctctgcagagttaagagagaaaggttagatgattaggcaatcaggttatgagccttttcaagaaaaggggcactcgcataagtttctgccctagccagcaacttacctgcgatacaaacgcttggggttgatgttctttcgaagaatcatcctctctgggccccagtaaggaagtatctttaggtcagggcagaatctaatcaactcctcagcccagttattcacaacagatgcaggagccaccactagaaaggggccccatatgtttttgtcctgtgtgatttaccgaatggttagcatccaaccattaagtgttagatttatactcctcactcctgttccaaattgtaagtcattttggctgtacatggcttttgctatgcacctagatatacgctatgcctagatacttagtaagaattatgtatctagaa

SEQ ID NO: 146348 - DNA, 324 bp, Zea Mays
ctggaggatatgtttgcgtgagcaacaaccggttgcgggacaatgcactgacattggagtggtttggtttgaagattgaagacgagtccttttcatgtctggattgtctgcttcgttttgtagactggtcttctgtctttaagaattatgctgttagtcgtcatctgacaaccccagtttttctttcatcttctgtttccctgcgaggaggcctaccctttcttgctttgctgttccccagtgatgtaaacgctggtcataatgctttcttaaaagcggagctgtttgctcgtttaaaaaaaaaactgctaaccacaacctacg

SEQ ID NO: 146349 - DNA, 666 bp, Zea Mays
cttcaatgtctccagatcttcccaagttgccaacgacgatgacaatcctgaccacttgataagcccttgagccacaccactggtattcatccgacgttgtaacacttgtacagggatttgtagaccttgcaaagcaactggtaattcagcaaccgcgacagtagaaggaatagctttcttcaattgagaaacatgaaaaacgggatgtatattagaggaagaaggcaactccaacttgtaagcaacagacccgactttggacaccactggaaatggcccaaagaacttaaatgccaacttctgatttgctcttggagctagcgaagactgcacatacggctgcaacttgagatacactgtatcccccacctcaaacaccctctctgaacggttcttatcggcctgtaccttcatacggtgttgggcgcgagccaaatgctgttgaaccaattcagtcatcactgccttctcctggatccaatcggccaaagcaggaactggacaaactgcctgagcatcgattccaaagtgttttggctgatacccatatagcacttcaaaagggagaaaagcccacagcagagtgcaaggaacaattgtaccagtactcagccaagtatatccactgacaccatttatgaggacaggcactcacaaagcaacgca

SEQ ID NO: 146350 - DNA, 616 bp, Zea Mays
tttccttatccgaacgacactacacgaactagagatgaacgcgagtcgggggaaggagtccttaccgtgaatcacgccgagctgcgccctgcccacgaaggtgtgcggatctgtggcgtcgccattactccggtgagcaatcaatggcgcaggaagcaggaatccccccgcgacagccggtccgagatcaccccacgcaccggcgcctatccccggtctcccaattccatggattatcggcgtcagtgggcaattgaggtggtcacgatttctctccctcgcgcggtaatgtctggcggcggcgtgcagataggggaaagccactgggtctggcgtagacattttataggtcgggtaccccgcactcgaaggctccatgcaggactcggtccccgcacttgccgtggttgcccacgattcccgcgccgcgcgccggctattgagtccgtccgaggagagcggcgaaagaagaggagatgcccgacgacatggccccaccggcagtgaaagggggcgcgtgttcagctgagagggacactggggattgggcccgagcgccgcaacaaccccctgcgattcgcgtcggtatcccgagctccgcggagacgaatgcgca

SEQ ID NO: 146351 - DNA, 353 bp, Zea Mays
tggttgttgagggattggattgatagaacaaggggtatctcagtgcaaagggcctcgtagggaagattaggcaatcagcctgaaagtttcagacatatgcttgtcatgtttctcagtaaccataggcccattagtatgaacagaacaggcagtacacagtttcgaatgtgtaacggcaatttggaagttacaacaaaacatgttttaaggggaaagcatagaagagacatcaacagagaacatctcaacaaccaggaacaccaaagggaataatcgtgtcccaacatttcataataacctgtactacatgaaaaaacaattccctgtcggtatgtagctgaaatcactgtcag

SEQ ID NO: 146352 - DNA, 1263 bp, Zea Mays
gtttggtttaaatgttatatgctcaaactggaaaatttaaacaaatttgagtcatagtcttttgacgaaatttttcttggttatcgcatacttaaccttgaaactaattgtattgtggagacttcttaggtaactttcgatgagactatgccttgtacaaaccctattttgagcatgcagataatggacagataggagagactattttatggaggaagggcaagatgacaacgatcgaggtgatcctgagccgtctccatcggttgtctcagtcgagcctgcttccactacttcagctgacagacctaacatcgcttcttccattacttggggtccacttgagccggaggttgctgagcctagaggcgatcaggttgctgttgagggggaggtgacctcttcgagagacgcatcacgacacattcaacattgtcgcccacctaaatagatgatcagtgagcttcacgagcgagtcactcgattcaggtcacaacatatttctcacatagttcattctgcagtcgttgcctcttttgagccccgagatgttggacatgctttatctgatactagttgggttaatgacatgcattaggagctcgaaatatttgaaagaaatcgagttcggcttttggtatcacctccacaaaactgccaccccataggtaccaaatggattttaaaaacaaatagggtaaggataggatggtagttcgcaacaaagataaagatagattggtagacaaggttttggggttgtttcaaacttttcaatgtatgttttgcgatccgtttgtttcgttgaactcgtgtatgtccaagaaacttttttctcaactcatgtgtgctatttgcagttttgaagtttagggtgtgatattagggaagcaagacaaagatttttattggctcccatttaccccctgtgaccttcactacgttcctcactcatgtgcgcgcactctttaacaagggcattattctcgttatctatatatggtgactttatcaattttgatccacaaggctggctgcagagctccaaacaggtgattattcttctttcatctcatactaagaccgactaggatgtatgtaaaaacacaaatgcatttttaacaacctagtctattagaaaacaaatgattcaataactaggaactgctgtttgagaaggaactaattaacggcaggtgagcacattcgaataattaatcagctagctagaccatgaccatgaatgaaaacactcgctctaactcc

SEQ ID NO: 146353 - DNA, 464 bp, Zea Mays
catcggagcagaacggaggggaggtccgaatcgcaggttcaggagatccttgaaacgtccccatgttggtgtgccgtcgtcatcctgcagttgggtaaaccacatctgggcgacgtcgtccaggtagtacgacgccagtgccacgcgctcctccgccatagttctgtgttggtggaaataggcgtcgcatttgtggaggaagagcatgggatcggtcgtaccgtcgaagcgaggaaaatcccactttctatgtttgtggtggaagtcttgatcacgtaggccttccgcacgtcgggcagcaacgttgccgccggaggatgaagacgtgtccttgatggccgccatgtctgacttcaaggtcgtcatctccgcggtgagggacttcagctgtgccatgatctcggcgagggagggttctgccatggtgttgctgttggtgtctgaggcagtggatggtgggctag

SEQ ID NO: 146354 - DNA, 275 bp, Zea Mays
ttggtgctggacgccgagcgtgtcaacgactccaccttccggtgttacgtgtattgcctccacttctttgcgcttgaggtctgccctgtcctactcattgacgaagaacccgacaaccgttgtattcgcctcctctcctgcaaggtatctttcgacatacaaaacttcatgcttcaacaatggcggcagttgtttatttctgcgagtagctattagtgtctcgttgatacaactatttagttttgcttgcagctagagggatcactgctcatgga

SEQ ID NO: 146355 - DNA, 459 bp, Zea Mays
catggatttgcctactccggcgaggcctccgccgtgcgctgagcgccgccgtgttcagctcggtagaggaagaagggaccgataaccgttggatgggaaaaggacgtctaggattaaatctggtttgtgttggacctaggccgtaggatgatgatccgagggtagttaggcgtgtgtttacgcaatcgttgtggaccgttgggattcgatccatcggttctaatgcgtagtggtgcgtgggcagatcttgagcgcagatcttggatcctacggtagatagtgggaatggagtagtgatcaacaccggtctaatcctgtccgttcgcgcttgatcggacggctgtggaccgaggataccctttcgcccagtcaatttaacaaaagaacccctcaggttttagcgtatcaacccgccgtccagggaccctgttctctgtgccttaggaaacttacaccgag

SEQ ID NO: 146356 - DNA, 956 bp, Zea Mays
gggggctctttacgcttaaatatgttgaacatgaaattctatttaatttccagcatacactggcctaccacgtctaccttgcttgctcctggcctgctaggtgctggacatgaacaatgcatttatatgcaggaaggcaatacatatgtctgagacatagaaatttgctatttgagagacagtagccgaaccttttatgcacagtttcggtgtagccattttgtcttagtaacctgcaacataacctggaaatctaggttgccttgttaaccgagggcaacgtgtatatatagttttttgtgtacattgttgccttagtgtgagttatttcagcaaaaaagtttgactggtttcttacttttgtccgtgaagttaaatttctgtttaacacttcagatcgatatatagatgtgtttgtgctgccttttatatgtcctagatacattgaccaactacctgtttatctgctaccttattagtatctttaaacaatgcaaatacagctcctgtgttgttttgtctcatttcctctgaattttttttttatattcagtggggctgctgcaagccgctttcccaatgattgattaccttgcctagtagtagagcaaagtgtgagatcgccacactgctttgcagactttatcaagtgctcctcagtgtcccaacatgctggtaggccgccgtactggcatgtatctgttgggaaccattatataccgtggtccagatgcccacaccaccaggagctgtacaactttcttgtgcccgggagggagggaggtcctggacgtgaaacttttatctaatctgaacccccccccccccccccccccccccccccatgcaaccaatttcttaactgacattctgaaacctgagtggtggtccagcttgtgtacttttgcttttgaagtggcaggcgagtactatttttaaacagtgggcgataaaac

SEQ ID NO: 146357 - DNA, 322 bp, Zea Mays
ataaagctactacatcagagatagtattgacttggagttgggtgcttccatactggtgtacatttggatcttagggttagggtggcgttttttggctgggccttgtgtttggaatatcctaatgaaactagcttgctaaggacgactagagtgtactggcacgaaaaataactaaacctttaaagtgtgagtttcgtcgcgcgttgtccccctccccacgcgaccaagcgagtgtcgtccatgttttatggcagaatacttactgttgattcattgatacatctctttctcactttgttgcgcgtccaccactccattctgg

SEQ ID NO: 146358 - DNA, 714 bp, Zea Mays
gtggattggactggatattgagtttgcgggagctgttagggacaatattcatagttctgcagttagtatcgaaaccccttttttgttaagtacacaaaaggcctctttgttggatgcttaaattctctatttcatttcatttcttgttataagcacaattggctatttaatcagctggatcttcatgtatgctactcaaaacttcgtggtcctaggtcctagaaataagcccctcagagaacgaggattcctcaagcataccaactgaatcaacttgttcaacaaaactgacctttcctccagcttcaatagttaaacaactagtgtctgccattgagtaagttcatgttccttagcaagcattgcagtgcacctcatccatcataatattcaaaatatatggaactgtttaaaacaggctaaattatcatattattttttttcattcctacaataataccatttgtccattttttaagggtaagagtacattcagttctgcaagcaaagttgcatcatttggagattcacatgtcatataaagttcctatttatatgagtggattcattttggcaatttttaatattttgtatatgaaatgtacaaatcatgtcgtgctcatgtagaaatgggaaaagtttcaagtcaatgagtgatatgaggtatactggagaacaattgctgaaagataagggaggtttgagcttgtctgt

SEQ ID NO: 146359 - DNA, 686 bp, Zea Mays
cacatttggatcagccaatgcattaccaatgcctttgtttccattgttctgttgatcttcatcaccaacctccagatccaagtcttccatatccatcggttccggattatcattgtccatattctcttccactctgaactgaagctcatacaagttatcacctatcactacatccacaaactgaggtaacaaactcgcatccaaaactaacacctgtaaacgacaaatttcatacttatttgtgaacttcatgtccaccgcctttgtcaccccgaggatggaacccaccgcccaaataagcagaaaatccatcatctccttggggatgccagtgaactgaacccaaactttgcccaaagttgatttcacttccactggcaacaccttctcctctattgacattgacgcattgaattttgtttggaccacaccccattctatcatatgctctagatcggcacgagatggaaattgagtcttgaacacattggtaccaacagactccacctcccatttccacctaaccggcaccagacgctcaagttctgatgacacctgtgctgtggacagagcaccccctgaaaccttaattatagcattttttgaatcccctctatgcttctgcgaaggagtgtaagggatgtgaaaaaaaccgagcccatcgactgcatacccacaagtcacag

SEQ ID NO: 146360 - DNA, 537 bp, Zea Mays
cggaagtggtctgtatcaacaaacggggaggtgcgatgtttcccacggtagactgcgctgccggaacccggaaggtcaccgcgccgcgacgctggagcaggaccctcccccatcagcgcctcctcatcgacatggctgacgcatccaatacggcgacgagcaccggtcaggaaggtgacgcccgacgcacctatattgtgcaagtctagttttattctcgttgggaagcataacgctgtctatgttcgaggcaaggcatcctgaaaaatgcgttaacctttccttactgcacaatttttagttcttcattcaaatgcgagattgacgtatatgttactggttgttgtcttgtcctgcagaactcgttaacttttccttagcgtacagattttattctgattttcagtcaaacgcgagattgatgatgtacctgttaatgttttttttgtgtttcgtccagtgtttacaattactagtgatcaggcttgttttgcatatagaatgcgtacacattcccaagctttgtttctgatttcg

SEQ ID NO: 146361 - DNA, 513 bp, Zea Mays
caacatatgtgtggaaatgcagggcctccccgggcttgctacaacattactcgcatccatgtcagggtgatggatgcaggggacaggggattcaggactctgtctgctcacgagttcccgacaccactgtccacctacgctgcctcggttagcgatgctgcccgtcggacccagtggtcgctcagccacacctaccggcagcagctgcataacacgaggttcaggcatcttcctcagcgtctgtgtggaggaagtcagaccagcatcgtcccaggtgaagctggtgaggatcgcctcaacaccctagctggtgtagtggccagtctcaacaccgacctggacagtgccaccctggatctctctagggtgcacttggagctagagaatgcccacgccaggattacagccctggaagcccaactacaaggactggatccgcccgaagctcaggtccccgccatggcattgtctcctccccgcaagaggctgcgctatggagagcctggatccgtc

SEQ ID NO: 146362 - DNA, 304 bp, Zea Mays
ttgctgctacttcaccatggacacaagcacgaccacggactgctattgttggcggcaggctgctgctactatacaccatgtcacgggctgctggagctggttgctgcatgctgttttcatttatcaatttatcatggcgtatgtgttgttaattaatgaatattaacttgtgctaacagtcaactgtaatgtactagaaactaatgagacattgacaatgttatgactgtcaactgtcatgaactcattaagcttttattctctgtactcgaatttaaatctattggatgcgataattatgagt

SEQ ID NO: 146363 - DNA, 483 bp, Zea Mays
gtgcactgcaggttctaaattttttctgttgtctcctttttgttctccatcgttgatactttggtggtcctcttagttctcagtcacacatctatcacttagggtagaaggatgtttgacatgttcttgtctcaaattcataacttaattggcatcttttctgttccaatttttatgccacttcgtggtttagagggtctaatcgaaggcacaaacaatgtttcctgatttcttttttaaatatagtctggcaattatctcagaacatgctgatggacagccaacctaaaagctatacctgaaaatctgataactttttggcaacctattctacctttcaggtgtggaaagccgactagttgctggtttgcctttgtgttacccagttcccggtaacaacattataatatcattaaaattaaaatgtggatgcataatgttatctatgaaattgttatgttcattcccactacagtaaacgag

SEQ ID NO: 146364 - DNA, 507 bp, Zea Mays
ctgaaattcaacatcagtaaatgcacaaaagtgaataacatagtccgacataacccttaaggagaaatattgttgtacccctttttttgacaattaggggcagggacatggcgagtgctgcaggctgcagcaccggtccaagcaacaaaaactcttacaaaatgctgctccaactagttggcaccacaacatcttatagttagaatcaagacatactaggactagcagtgtagttagcatcttcccttgcctgtgttttggctccgcccctgaaaacaactatcatgtatgaaatattatgccatgaaagatgagtatacaatgcgttaacatgtacaaactggtctggttaggctggatcctgtgcaactggtccttatcgactgccatgtcatatcaatcatactaccaaccacgctatcaaccgtcatcagcttttatctaccacatccctcctatgcctagtctatatcatcaccctacagtcgccttagcaccatatccgct

SEQ ID NO: 146365 - DNA, 352 bp, Zea Mays
gcgctgcagaggcacggcgccgggatgatgcagtgcgtcgtcgacctgctcacggacgcggagagccggcggtacgacgcggcggcgatgctgcgcttgacaagatactgcatctgaggtaaagtaaggaacagaaaaaccatgtgtcggtccatggtcctagctttggctgtggatgctgaagacgaagcgcacatggttggtcattcatcgtgaatgttaataaaagaaatcgatcacatgcagtacttgtatctagagttcttcctattctatctagcatgatatatatactcctcaacatccccagcaagcaccacaacgatcgtagtcagcactcagcactggcgcg

SEQ ID NO: 146366 - DNA, 438 bp, Zea Mays
ccgacatcatgttaatttgttggcatgccacatgtttgttgtattgctcatgagtcacagccaaatcatccttccttattcttttaaaaaatggtagctttgcgaaaaagcgagattccgttgggatatcttattaggggaacccaagatcatgctaatttgtcgtcatgccacatgtttgttgtattgcccatgagtcacagacaaagcatccttccttattcttttaaaaaaggtggctttgcgaaaaagcgagattccattgggatatcttattaccctttggagatttcagctctttgatttcaggtcagcaaaacgactgtcagcctcaagtcccacccaaccgtacaagtgacagatgaggatgtcttgcactacatccatgtagtgttcattatgtgttgtagcatataaaagcttttagctgaacctaaa

SEQ ID NO: 146367 - DNA, 334 bp, Zea Mays
gaaggtgatgtctttttgccttattttaatttgttttaactgtaaagatcaagaaagctaaaaccatatgtgaatgtttagttgcatatgagagtacagacctagcggcttcaaagtactagaaattaaaattcaaagaattatggattagataaaaagaaagacattagtgacaattaacaaggttactatgaaccaatcactggtatgttgcatctgttcaattcgaacaaataagttttactattactcgctcaagcctcatggcagacaacttatttactatcaatttgtggctgaaggatgtggcccttcttcattttgcgaatataaa

SEQ ID NO: 146368 - DNA, 519 bp, Zea Mays
ctcagactcgccgagtggtgacgctgcacccgccccaggacaatgactgcacggcgaccgatccatagattgccagaaccccagaacctaagccttcggagtactaccggcacggacgagtaaagcagaagtggcaagggtgattctcaccagaggttctggcagcggcactgttcggcgatggagttcccacccgatgaggagccgaccacgtcggttcttcgtgtgtacagtacgcccgcttggcgtgtgatggtgacttcccccgcggtgtgagtccagctatttccctggtttcctggttgttgcgcggtgatggtctgcacaatctcccttctgcctcagtgccgatcgcgatcggtggtaatggtggtcacggtggccacgagctttctgcaggccatggagagatgagaggagaacgtggaggctagtcttatagccgaggatgatctcgcctggcggctaccatgcatggcgcttggtttgttacggagcagtgcggctattgcggccaag

SEQ ID NO: 146369 - DNA, 455 bp, Zea Mays
aatggataagggagttgccctatgtcgtttggagcttaagaactcaacccagtcgagctctgcatggaaatacccctttcttcatggtctatggttcagaggccgtgctacctgctgatcttaagtttggggcgccaaggttgatctttgaaaacatagcagaagccgaggctactaggctggaggatgttgatatactcgaagaagaacggctgaacacggtaattcaatcagcacggtaccagcaaaccctgaggcgctatcacgataagaccatgaaacatcgatccttcgcagtaggagatctcgtcctctgccgaattctaacgggagaggggcggcacaagttgtcacctctatgggaaggaccattcatagtagcagaaatcactcggccgggatcatatcgtctcactcagatggatggcacagaaatcgagaactcatggaacata

SEQ ID NO: 146370 - DNA, 305 bp, Zea Mays
cccaaaccctaaacgggattctaacacccccgcagtcgcaactgtatcatgtatagatagagactggagcgaaagtctaaaaatacactcgacggtaaccccttggtgaagatgtcggcgaactgttgtgtggtggggactctgagaacctgaacgtcaccgacagtgacacgctcgcggatgaagttcaggtcgatctccacgtgcttcgtgcgctgatgctgtatggattggtggagaggcacacctgctggacgacataggcgatgtcgggcctggagaaggtgaggtactagagtgcgtcg

SEQ ID NO: 146371 - DNA, 303 bp, Zea Mays
cttggagcctactccaagtctgaagataatgcactatctgcggccttcgggagccgaaaaaagaagaggctaaatagagtttttgatgctatcagatttatgtatcctgactaccgctacccgccaagggggcagaagagaaagagtgcaacttttgggaaggatgttacttcagctgctccgagtgagcccacgccgaagaggagaaaggtgaaggttcttactcaccgaccgcgctacattgaaccggccacagtgcccgaatttggcggtgagtcctcttcggctactgaagccaaagaa

SEQ ID NO: 146372 - DNA, 436 bp, Zea Mays
gagataattaggggggtttaggagttttagggtttctaacctggggatcaaaattgggatgttacaaacctaccccacttaaaagaatctcgccctcaagattcagactgggcttgagaaatggtaagggtattccctcctcaaggagtcctcactttcccaggtagcctcctcttctccttctttgctccactgaactttacagagtttcacttctgagtttcgggtctttcggatggctgaatcaagaatcttcactggcttttcttggtactgcagatccttctgaatctgaattgcctcttcttcgatgtgactttctggcacttgcaggcatttgcggagctgggatacgtgaaacacattgtggatatctgacatggattctggcaattcaaggcggtaggctgcgggtcctattctgccaatgatagga

SEQ ID NO: 146373 - DNA, 1387 bp, Zea Mays
cgcgttttgggccctgcataagcaaaaaaataactggagagagagacatagagagagagagagagaggagaatcttgagcagccttcataccttggggacatgtaatctgatgaggtgaatgaggatgatagccacggcatcaaacatggagctttgccctggtgtctccacccgcctgttagtttaaaacaacttgatacatgtactgataatacatacatatattactcttgctgttggctgaaggaaggagatgcttgttgctgttgctgcctggttggattattagggttcctgtgggcttggctgccattgccatgtgggcgtgccacgtgggcccgcatgccaggcagtggagacggtgcacagctgctgcaggtcactggggacctggaggagcgccagcatgcagatgcaggtggtggccaaggaccgggttagctagccctgttcatcttttgttcaccttttcaggggagcatgtgaatttccctggagcatctgcaactctagcagtgtgatttctctcgctcctcgcaagttgccactgtttgtggtctgatgtctgaagaaaacacagcagtgggtctcggctctcttgttctctagctaggggccctcttgcctctccagttaaacaattcaacggtagctgtagttgttgcgagcacgggggactgaactgactgtgtgggtgacagcagggtaaagaaagaaatggttgtgactcctctctgctttgcttcaggctttactcttgtatctattgtgccttttcgcttggcattgcataccatcagctagcattttttttctctcctcagttctcagaagaaggaaaagaagggtacagatgtaaacgaggagtgctgagaaagatgcatgcgtgctcttcttcatccttggtccgcctgcctttgctttgcagtgtctcttgctgctgccgtttgctgggtgttttgtagtgcagtgcttggccattgccatggaagtatggaagcccgtcttaaagactgaaggctagaagcagtataagtcggtatggattaaaaccaagtgaacgttcgagcagccgccaatttgctgtaggtcttctgcggaatgatctgacgaatggatgaatgattgccatgaaccgcttgcacgttttgctcttggtagtggtactgctaccctgtcctgtagttggctgtgtgttgttggttcttctcgttcagatccctgtacagtgactggctgacagttttgaattggggctgccatgccactgccaccttctacggcggatgcgtgctttctcaccgatccttgaagcatgaatgcgtacattaactaatttgatctggtgattgcttgtttgatctggcatgcaacgttaactaattt

SEQ ID NO: 146374 - DNA, 291 bp, Zea Mays
cccagctggccttggcaaaggaagttttacataagatggaaatagcacatgatgaaagggtgttaactcctgctgagttttggctgaaaaacaagcttaagaaacactctttgctgctgtcctccctgaagcgtactatggctaggatgagatcaaggattttatggcttaaagatggtgatgctaacactaagtttttccactagcatgccaggcaccgaaagagaaagaatttcattgcttctttggttgatggggatgtcattcttaccagtcatgaggacaaggcag

SEQ ID NO: 146375 - DNA, 355 bp, Zea Mays
ctcagaactactggcgccaggactgcgggttgattcataaaaagaacagtgactcttaagaaaatgttacatcgtgaaggggtatcctacaatcagatccgcacgatcccaattcaacggtccagatttaattaagcacactccaaaacggtacgcaatcatgaccctgcgatcacagatcgacgctcgggatttaaaatagccccaatcaaccgtgcccgctcacacatcgatctacggtcgagatcaggctgagtcgaatcggtacgagcctcaaatccagtccactcatcgcggatctaacgatcgacacgatctctaatcccacgcctaatcaccaccgcccatacccaga

SEQ ID NO: 146376 - DNA, 363 bp, Zea Mays
taaaacgactactagtttgaaaacggatggagtaaattattctaattttttaagtcaaaaaaatctgaagtttatgcagggcgaagctgagatggtttctatgggggcaaatgcaccctaaagaatctaaaatctatagatccagttaaaattttaccatatatacatcatataacaaattcttacacatcctcaagacaaatgcacttccatcaaatttgttctaacttcaccactggtgttaagtacatatcgatattttaaaaggaataagaacaatacaacatcaattatgttaagaatcatccttcccaccgaaggattcggggaagaaggtttagaatcttaattgattcgtacttc

SEQ ID NO: 146377 - DNA, 557 bp, Zea Mays
tgccacaatgatgcactaccatgttgtgcccttgccgaggcgcctcactcccatggtggtgtaggcgtacgtccacttagtgagcttgtcgcgacaagagacgaggaaggttggaagggcagagagctggggtgaggagatcatgatcatgagagcatgcgcaatgggtgagagaaaggagacaaggagtgtgtcagtattggagttgagtgcaattaccgcgggggcaggggtaacgctggtggtgctgcaaggtgtaggagcgagtcgagcaagagcaaagagggcactgaaggtaggatcatgcctagacactcatcttcgagaaagctaggcttgcacgatttggtggtgcaaatgagcatggcaatgggtgtggcaccgcgtcaacaacgcagcgtaggtaagcatgggatggtagattgatcacggtgcaacacgacgcaggtgaggtgtgcacatgcatggcaatggggtaaggacggtgtcatgcagggcgaggggtggactgggatggtatagtaatacaattttttggagctgaatgtgcaatttac

SEQ ID NO: 146378 - DNA, 284 bp, Zea Mays
aacacacttagcggaacggggatcaagtttgtggctagtggtggcagagaggttgggatagcaagtgcaaccgaacacgcgaaggtgttcataggagggtactgttttgaagagggagaagtgaggagtagaaaagtgaagggtcttggtgtgtagaatgttgagaagaagtgttgtcgtgtggagagcttcaacccagaaggttggtgggatgctggcctgaaagagaatagagcgaatggtgttattggtagtaccgatgatgcgctcagctttaccgttct

SEQ ID NO: 146379 - DNA, 662 bp, Zea Mays
tcctctctctatctctgcacatttttgttccttgccggcttgccccgagcctttcggcgctcgttttgcatcgcagggcacgtgtagcacggttcgggcgtgcgatttccctgtctggatttgaattcgaaaatttggagggaactcgctccgtgtaccgtccgcactaaactggaccgtctagaatgctgttgcttgggtccatcagtagctcgttgttgttctatatctgttgatttagtttggtggtttgtccgttaataattgtactaactttgcactcgcatagtcgcttgtactcgttgactccagcagtaagtgcagcatattacgtttagagttcgcttgcctgcttcttcatagtgctgcctctgctttgaaattgtagttgaaaatgaacatgcttaaaataccttgctctctcaaacactatttaagcttaagacccgctcaatccatttattcccctgctaacttttccactgaatggcctgggctgaaattcaggcataacttcagttttgttctcccaagttcatgtccatggaagcatggaaaagtttctttagagggagggagggatccgttcacccggttagacgttgataaacaagagaatacagagttgcaatcttacatgggtgagcagcgcaacctcacac

SEQ ID NO: 146380 - DNA, 275 bp, Zea Mays
ctgataattccaaatcatgtgttggataattctgctcatgcggcttgagtaggcatgatgcataggcgatgactttctcattttgcataagcacacatcctaatccttgccttgaagcatcacagaagatgacgaaattctggtgaatatctggtagcgtcaatactggcgcggtcgtgagtttcttctttatgatttggaagctttcctcacactttggggtccacacaaatttattgtctttcttgaggagctcggtcataggtcttgctatg

SEQ ID NO: 146381 - DNA, 435 bp, Zea Mays
gggaggtgggctagcgcggctagacccaggcgaacacggcggcgggacaaatttagctggtggcgcactgggagggactgaccacgaggaggtggcgggcttcgcggcgacgtgatcgcctgtgaggccactaggcgtgacgggggaggcgaagtggtgcctcgggatcgtggagaggtggtaaagttcgtgagctaacttaattggaccttaggctactagagaggggagggggaactcaccggagcggagggagagcgcggcggcgccggctcgattgagctcgggggaggggtgagggatggccgaggccggtgcgaggagatgaggggctcggggcgacccttttataggcgtccgggaggaaagggtggaggccgtcgggcaccggcgaggcacgctgaggcggcgataatggcagtacagtggtggcga

SEQ ID NO: 146382 - DNA, 421 bp, Zea Mays
cttagagatgaagagtcatgacttccacatatggattgaacggattcttcttgcgatggttcgaggctatgtccttgagcatgtctggctagcgttttcagagttgagctatttcttccgccagctttgtgcaaaagagttatctcgtaccgtggttgcagacttggaaagattggcacccatgttactgtgtaagcttgagaagatatttccacctgtcttcttcaatccactgcatcatttgattcttcatctcccctatgaggcacgaatgggtgggcccgtgcagggacgttggtgctatccaatcgagagatgtctaaagactattcgaaagaaatgtagaaataaatgcaaaatcgaggcttccattgcagagacatacattctagaggagatgtcaaacttcacaacaacttac

SEQ ID NO: 146383 - DNA, 402 bp, Zea Mays
cggtcatatgcatggcggtcgggtcgtatgtattcaacgtatgatagatgtttgttaattacagatcgaatcaaacgtcctcaaacagaatggagaaaccatggacaaggttgatgccctggacaggatggttggactcgagatgagagaactggctcaatgtgttttccgcagcggcggcagctccgtggacagagagacgaggcagacgtttctccacgtgaccaagagttactactacgttgcactctgctcgccggaaacacttgagcatcacatctccaaagtcttgtttgaggatgtcgtctagcaacgatgtttatattagagctcaaattccagtgtatccttgtgcatgcaccgtgaaggtgtcatatgatgatgttgtgcctagcttttctc

SEQ ID NO: 146384 - DNA, 492 bp, Zea Mays
ggggtatggagctctgctggccgctggattagactttaacggccaggattagatctacttaataccgaaccggtattcaacaggcgcccctagatccgaatctaacggtcactatcttatgagagcgagatcggatcgggtccgtccgatttcatccaacggcgcacgatcaaaatccgaaaaggtatccctggtttctaatctcaaccgccaaacaacgatccaacggctgtcgctagctattctctccatctaatcgtgatcgtccattgttaaatctagggcccctgtgttgtcttccacccccagcgctaaaccacggcgacgcgcgcccagagcggcggaggcacaccggcaaacgcgccaatgcggtgaacttcgaccggtccacacacccgacacagtttttacgatcgctcggacacaaggaatcgcctggccaaaccccaatcgtgcaacgaaacgcccagagccctacccacggcgaagcat

SEQ ID NO: 146385 - DNA, 413 bp, Zea Mays
gtgcacttttggactaaagtgcaaaaactagtaaagtaaggtgttttaagttatgtggttcacaattatgaagatttgcaacttgaaccctgagttttggacttaattgcaaaagagccacatttgaactcttttgactaagtctgaatttcagtgtgatgtgctcatctttgtgaccttgtaactttcaaacaaaagggattttgccctaagtcaccacatcaattttgtagctctatgaaaggagaacaactttgcttaagagtgtaagcatagttattgagaagaaattggagataattaggtctaatgtctggctgttaggctgttaaagtctgaatttcagactgacagtggcctagaaccaagtttgagagccatttcgaccatgatctagtaagaatctatctagg

SEQ ID NO: 146386 - DNA, 489 bp, Zea Mays
gtgcttggtttgaatttaggcgaagaaaaaggaattagggcactcggctcggaaacgatcgctcaaaacgggaattttggtaaaatttaagcctgggacctcggattggtgtgaaatttggcaagtaggttactggaagtgttgtgaaggtgcctgaaaaatttgggttcatttggagcaagtttggctggtttgggcattttaccgagcacgtggtgtgcggggagttagggttttaggaaaatggccatttgaggtgggaatgccctcccgaaggagctaaaagcaagcagggatacacaatagagataatgcaatgcatttcaccaactggattcatggaatttcacagaaatttgaaagatttgcaaaagggtgagaaaggagggagctccactgtctgtcaggcagagaacagcagagaaggggagaggagaagctgctcaccgagggggaagaggaggggagcccaaggtcaccggagcacgg

SEQ ID NO: 146387 - DNA, 334 bp, Zea Mays
ctcaaataggcttttctccaaaaccctaaatccccgcacgccacgtgctcggtgaaatgcccaaaccactcaaaattgctccgattgaacccaaacttttcaggcaccttcacaacaccttcagtaacatattcgcgcaatttcacgccaatccgatataccaggcttcaatttcacccaattccctgtttcgagcgatcctttccgagcctagtgcctaaatttcatcttctttgcctaaattcaaaccaagcacacacttcactcatattcacccatataaacctattcgtgaagtatcggctcaattccatgtcatttcatacctcaattc

SEQ ID NO: 146388 - DNA, 378 bp, Zea Mays
tgtcaattcagcatcgacaactcttattctattgagtttgatccttttggcttgtcgatgaaggatctcactaactagaggcctctcgctcactgtgatagctctaggcctttgtataccctacgactatctatgtcccctccttcgcatccttcttccacttcaccatcgtcctcgccacaaccacacgctctgactacatccactacatccaatattagtatcgttgactcggtcatcctatcctcgccgtattgtccaagctgtgtagtagctcaatcatttcttgtactcggagcgcttctgagcatctttgtcatgcctgttagctaggtccatgtttgccttcctttctctagctcctctcaagccgtgcat

SEQ ID NO: 146389 - DNA, 573 bp, Zea Mays
ccgccccctctctggcaggcgggccccgcctgtcagctccctcccctcgcccgtgatctgcaatcgacgcgatcaccgccggccggcgccctgccttgtcgcctcgccattactcctccccagcaagacttggtgccttgcggccctgtcccttgcgcctgccccgagctatcccgtcaccccctctgcccgagccatcccgtcgcaactgtgcgccattttcaccgccgcggcaagcgtcgccggtgtgcgccacctcaccccccttcccggtcgcctataaaagggccgccccaagctcctgacttcaccgcaccaggccttagccactccaccttcctccctcggactcaatccagctcgacgccgtcgtccctcccctatccggtgagctccactttgccccctctgttgagttcgagtcaaattagtgtagctgtggacctccgccacttcaccgcgagcacaactcacctctttccctcgcctattgcacagttggcctcaccggcgacctcaccgccgcgagcgcctgccaccacaccgtggaccggccaccccaagcaccctccg

SEQ ID NO: 146390 - DNA, 386 bp, Zea Mays
ggaaatctcaaagaaattgatgctgaggtttgagaaggaaatcgttgtccttgtatgtaagatggaaaaagtattcccacctagattttttaattgtatgcaacatttgcttgtgcatctaccttgggaagcgctgttaggaggacctgcacagttcaggtggatgtatagtcaagaaagagaattgaaaaaactcagaggaatggtgcggaataaggcaagggttgaggggtgtattgcagaggcattcacagccagagagatcacattattctcaagcaagtatttttcagacacaaacaacatgaatgcgcaaatgacacggtaccatgttgccgagcaaactccaatcactgatctaagtgcttttaagtgggacggtaaag

SEQ ID NO: 146391 - DNA, 377 bp, Zea Mays
cgcccttgtaattcaccaaacagtatcattttggcccgcactcttttcctcttgggggtgaggtttttaatgaggcggagccatgtaatatacccacaaaaatcccccgcaaaaactaagacacaatatgtcgaaaaagaccgcatcgacggtcttcggcattcgaccataccgaagtcaccgcgaggggcagcgctggccaccctcgcgtgcgacactccgcgcaaaagtcgcctaagggtgcagccggactagcacaataagtgcgcaaaatcgaagtcttttccaaaagactctccgtgcaaaagttgcctaagggtgcagccggactagcacaataagtgcgcaaaatcgaagtcttttccaaaagactcttc

SEQ ID NO: 146392 - DNA, 1695 bp, Zea Mays
tatagaaccagttcagaagctagagctgatgccaaatgaggttaaactggagggggtaaagaattatttggcttggtctaggagagccttgcgattgttgaaagcaaaaagactcgagggctatgttgatggaactgtcgttgagcccaaagacaagccaagtgctgaatggaaggattgggatgctataaactctttggtagcagcatggatgttaagttctatgatcccagcaattgctagcactattgatacaattataagtgctgcagaaatgtggaaagcgcttgaagaaatgtattcgggagctggaaatgttatgttgatggtggagactgaagatcgcctccataatatcaaacagggggagcgaactgtggcggagtatgttcaggaattgcagtgtttgtgggctgatgttgaccattatgatcctattgagctaccacactcagagtgtgttgtttgggcaaagaaatgggtggaaaaaagacgtgtgcttcaatttttaaggggtctaaacccagagtttgagggaagacgagcctccatgtttcatcaatccactcttcctagcctacaagaggcaatagctgctatatcccaggaggagtcacgactcaaagtgatgagggaaagtcctccagtgtcatctcaccctgtgttttcagctatgagaactaaagacgctagagagtgttacaattgtggtgatattggacacattgctcgtaattgtactaaacctttcaagtttaaccgcgggagaggaagaggggctgctagaggtggtagaggttgtggaggtagaagttgggcaagagctaatgcaacaactacaaaagaagaccttgagatctttatggagaatgaagctgaaacaaagtcgactgagcaacataaaattcctggaaataaaaatcaggagtcctacactggggattttgtcaactgcgcctacacagatgaaggtaattatgtccatgctcttgtacccacacaaatcacacgattaaattggattttagactcgggagcatcaaagcatgtcacaggcacgtcaagtgagtttacatcatatatgagatatccccccacacgtaaagaaatgattcaaactgctgatggtactccacgacctatcaagggtgttggcacagtacaatgcacttcatctattaagttgtcatcagttttgtatgtgccaacttttcctgttaatttgatatcactaagtgctttggttgatcaattggactatcagattatacttgaccgagataattgtttaattcaggagaggagaacagggaaaagacttgggacagctaccaggcgtagtggattatggtatatgtaccatgaggagacaaatgatacaagatgcactatgttggcaacgaagttggaagagaaggaagttgtagtgatgcttttgcattgtagattcgggcatctctcttttgataagatatgcaaagtttttcccgatgtaatgtgtggggtggataaaagcaagctattgtgtgatgcctgtgagtttgcaaaacacacgaggacatcttatataagtcgaggtatcaggagtatatctcctttcgtgctagttcattctgatgtttggatgtgtcctgtgacttctattaatggaatgaagtactttgttacttttattgacagtttttctcggatgac

SEQ ID NO: 146393 - DNA, 359 bp, Zea Mays
caaagtggcgccaaattcccttgaacacaccgtggcaaagtttggagacctctcttcaccgtttgacacgatcttgacatggttttacctcgggactcgaccttgtgacactgccacctttgtgacacgacaactctctgtacacatccccaaaccgctcgacttccacacataaacaacaaagctctgttgggagagcaaatcttgtgcagtgatcatgcccaaatacgcgaagatcttcaacctatgagcgcttgaactcgggcagaagcaaagagccacgtgttcgatcgcttgcctgaccggccgagcgcaaactggccgcggcagcgcgtgccccacgcatggtcgccccgccc

SEQ ID NO: 146394 - DNA, 954 bp, Zea Mays
cccctacccttcctatctgtccatgcatctgtcatgattgtacatcctgtttgctcccatgattccttgtggttcttgaaaccatccaataccttttgtttccttttctgcaagaatggtccactcatctcataaggactaggccctctcaaacctttaccaaattgcccaatggcctcaagcataagtgcaaagctaggaagggtgactgtgttgtgtgcaatactagcttcatagaaaaactgacatatgtactcacaagccttatcccttctctcttctcttttctgagttgacaatgttgtttgaaccttgttgctaaggttaattcctttatgcatcatttgaacaaattcttcaatagtagaaggtttataaaatctgtcaatagtgccaccacgtaccactgttctacagctaaggctactagaaccttttgttggcttttgcttcaccacaaggacttcattcccaagatcaatatccacttgctcacaactttcatcttctcagatgtctaagttaatttcatctctctctttccttttcttttgctttatggtccttttcttctgtattctttgtaagcaaagcaatcatatcttctttcacatcacttggaaccttcaaacactttgtaacattattccctttaataccagcaaggtgccacttaattcttgtaatcccagctttgcatagcttgtcacagtacttgcacttcagccaatgcttcttgtttgcatctgggcaaaaacaatgagcccaagctacatcatctgagttgataatagcttgtggtgctgctgcatttgatacagaggcagaggcgacacttgatggaataactacacaatttgaagacacataatgcataatattaggaaaatgaaaagctttaaacagatgaacatctattgaagaatgtgttgcggcctaccgcctacatcaatg

SEQ ID NO: 146395 - DNA, 346 bp, Zea Mays
cgtgcactcaagttgacgtatgagcagattcatgcttgtctgaggggctgcgtgctatttaggaaagaatacgcggaggcaaagtactgtcccaagtgtaaatcatctaggttcatggaggtagactctggtgatggacagaagaggcagctcgacatcccattaaaaatcctatggcaccttccgttcataccgaggatctagcgtctgtacaagatagaggaatccacgaaacagatgacatggcacaaaaatggaaaacgatacaatcctgacaagatggtgcacacatccgatggtgaagcatggaaacactttgatgccattcaccgtgagaaagccgaag

SEQ ID NO: 146396 - DNA, 341 bp, Zea Mays
tttctttcagaacgtatcagtatccaaaactaatttgtgacagttggaagaattatgccaatcaatcaaaaaatggaggggggttttgaaattaatattatttctgaaaatttataacatccaatgtttttaagaatacttgtaatgtgtggtttttaattctccttggatgctaggtatttcttgtggaaagacaatgtgcactattttttgtgtttattctatgaagttcaatcaagtaacagaatatgccttttaatgaaatttatgacgagcttacattttcttcttttgatgaagaagtgaaaccagcttagtatgtagcaaatacggaaagcgca

SEQ ID NO: 146397 - DNA, 613 bp, Zea Mays
tcaagcagacttgcaaaagtggtttgttgatgattgggataaaagaactcctgtaaaagtctctaccgatgggtgcaccaatgactttttaatggttggtcttttcacaaaggacatgtgagtgaccaaatccaattcaatagatgttttatgtgattatatcatggcaatagaagacgatacaacactagagtaagtgctcattgatttatctattttatgtataccaactacttagattcttgatatagactttcgtcatcctacattacaggatgacatgggtgcgaagtttcaatccttttaagatagaaatatctgtcaaagacctgcaaaacatattaacgataaatcaagatatgactctaagatgttttgacatggctgttcggcacttcggctgcttgccaataaagagtcacgtaggccgaaaggagaaatcataaataatagaaagcattatatggacatgcgtttctgggtaagtttgtttccaatcattaatgtattaatatatagtatctacatctaatcctcatgtggacatgtatatatactgtccagagaatggttggttttggtaaacttccaaagtaccatcaggatcctacag

SEQ ID NO: 146398 - DNA, 514 bp, Zea Mays
acttcacaagttcagagttcttcgatttctgcgagcaaaagagcattcagatcaagtatgcttcggtggcacacccaagagccaacgggcaggttgaacgagctaacgggatgatattggaggcactcaggaagaaagtcttcgataaaaacaaaaagtttgcaggaaagtggataagggaattgccctacgttgtttggagcctaagaactcaacctagtcgagctttgcacggaaatactcctttcttcatggtctacgggtcagaggcagtactacctgctgacctcaagtttggggcgccaaggttgatctttgaaagcatagaagaagccgaggctactaggctagaggatgttgtactcgaagaagaacggctgaacacggtaattcaatcagcacggtaccagcaaactctgaggcgttaccacgataaggccatacgacgtcgatcctttgcagtgggagatcttgtcctccgccgaattctaacgggggagggacgacacaagtt

SEQ ID NO: 146399 - DNA, 498 bp, Zea Mays
ctgtccaaataacaactgatttaattcaggaaccacaagcaacaaaaagataatatagttcttgaatagagtaacataagaccaacatttacactgtcatgcactaaaaacctcaacgcttaggaaaagttttattatttaaggaacacggtgctagatttaaggtttcatttaaagaggtgaaaatatcaagctatatattctcttatgacctaagcaactcattctcaattctaatttcattggtgcgcttatggagctgcattaaccaaaattctcattaaaatacatatatcaggacatgcaatttgatacatataactgtccaaataacaactgattcaattcaggaaccacaagcaacaaaaaagataatgcacttcttgaatagagtaacataagaccaacatttacactttcatgcactaaaaacctcaacgtttaggaaaagttttattatttaaaaaacacgattctagatttaaggtttcattcaaa

SEQ ID NO: 146400 - DNA, 767 bp, Zea Mays
atagtcataagtatatcaaatgtgaataaatacatacatagagtgttatgacacagaaatcgagagttatggcgatcgagaggtcaaacgacgcgaaaacgacgtttgaacgagaaatagtgccataggaggtttgaaattcaaattgaggcatgaaatgatggataattgagccgatacttcacgaataggtttatatgggtaaatatgagtgaagtgtgcgcttggtttgatttgaggcgaagaaaatggaatttgggcactcggctcggaaacgatcgctcgaaacaaggaaatgtgtaaaattgaagcctgggatatcggattggcgtgaaatttggcgaatatggtactggaggtattgtgaaggtgcctgaaaattttgggttcaatcggaacaattttggctggtttgggcatttcaccaaacatgtggcgtgcggagtattaggttttcggtgaaacaaccattttaggtggtgaaaccctcccgaaggagctaggaacctgcaggagtattcaatagagtactaggaacacatttaaccacttggattcataggatttgaaaagaattggaaagttgagaccaagggtataatggatggtttcactgaccttgaaacagagagatagagagaagggaagagggtgctcgccgagaggaggaggggagcaaggggagcacgagcaggatcaccacgccagagatccacgccggtgatcaccggcaacgagcagagggacgcttgatcgccagggacaga

SEQ ID NO: 146401 - DNA, 360 bp, Zea Mays
agcagttcctgccgtgtactaggctaggataacaatctgtgctattatggatagaaaccaggatagttatggtaggagagatcctgattggtgtaggggatcaatctggatcagcccacactaggaaggcctgatactgattgatagaggagatcaatctggcactatttctataagccactcatgatctcctctccctataaatactgtaaccggctggctcttcattcatcaatacacaatagcctacaccacatatctctctcacatggtatcacgagttcgggacactcccgttcctcccaccttccgctgaaatctgcagcctgctgcacctgcgcgctgcacgtctgcagctgc

SEQ ID NO: 146402 - DNA, 479 bp, Zea Mays
ctcccctggctctggagctaccagtattggtagggacacaaggtgctatttcaactcttgaaaggctcgttctgcctcctcagtccaagagaatgggctggacttccgtaatagcttgaagaaaggtagcgccctctcagccagtcttgagatgaagcggctaagggcggccagtgaccccgtaagcttctggacgtccttgattcgggccggaggcctcattgtctcaattgctttgatcttctctaggtttgcttcaatgccccggtgcgaaaccaggaatcccagcaacttccctgcggagacaccaaagatgcacttatccgggttcagcttcgtgcgtgttgcctgcagcttgtcaaagaccagggttaagtcttccactagggtcaaccctctcttagtcttgaccacgatgtcatctatgtatacctataccatgtccctaatcaggtcaccaaaagtcttactcatcgccc

SEQ ID NO: 146403 - DNA, 625 bp, Zea Mays
tctgggtgggggtacttgttcttgatagtgacttcattcagaacttggtaatctatgcacatcctcttcatctcatctttcttctccacaaataacactagggtggcccaaggcaaggtgttgggtctgatgtaacccttctccaacaactcgtctatttgcttcttgagttccaacaattctggtctggacactcgataggctctcttagaaataggggtggtgccagggataagctctatggaaaattcaacctttctctcaggtggcatgcctggtaaatcctcaggaaacacatcaggagattctggtacaactttgatagcttccggtggctcgatttcctcaatgtgggcagtgatctggtgacagcttcctttccttggtctagacaagaccaactccaacaacacttcctctctggataaggacactaacttcatagccctcttgtcacaactaaggcttgcttggtatttggttaggcaattcatccctaggatgacgtctatggttacatcccgggtacccattattatcagatcagcggggaactctatcccccttatttgaactcttgcactggggcaaaatctatctgtttgggatctctcaccaattgaac

SEQ ID NO: 146404 - DNA, 395 bp, Zea Mays
ctgggcttccatcaatgcagggagcccctgccaggctaggtgtgccgggcgcgggtcgacgtggcaggtggtcggagtaccgcgcacatgcaccgagtgaaggtgggtcgtacgtgcgcaccctctattaccatttatgcatccgtttcactcgaattccgtatgcataaacgcgtaactgccacggtgagtccgctcgttccgcgcgggttctccgaagtcgtggtcacgtcccgcgttgaaattgaccgcgtttatacttgcatattatgactccaacggttacataaattgacacgtcgatgcggcctggtcggtgtggtgtagtatttgggatttatgattgtataattcgatgttaacaactacgtatcaatttggatttattatattac

SEQ ID NO: 146405 - DNA, 406 bp, Zea Mays
gtcggactagcacaacaagtgcgcaaaatcgaagtcttcttcaaaagactatccgtgcaaaagtcgcctaagggtgcagccggactagcacaacgagtgcgcaaaatcgaaggcgcattacatctgtgcaaaagtctacatcgagaaactgtccgcgcaaagaccgactacagacgcagccgagccgacataataaacgtgctagaccaagtgcgcaacgcccctatggaaatagccgaatgcgcgaaggcgcacagcctcatcatacaaactatagttacacacgtacagcgagggcatcacaccttacattggttcaaccttcggattgattcccatctccctatagttaaacagcattatcctcagctcctcaccctcaaaaagacttcgcaactccccctca

SEQ ID NO: 146406 - DNA, 701 bp, Zea Mays
ccactgtattgggatcaaactggtgaaagacagttctttgggccagaaattatacaagaggcagaagaacaagtccgatagataagggagaaattgaggactgcacagtcaaggcagaaaagctatgctgatacccggagaagaccgctagagtttaaggagggtgatcacgtatatatgaaggtgtcaccaatccgggtatgaggagatttaaagtcaaagggaagttgtcccctcgttttattggacccttcttgatcctaaagcgagtggggaagttgcctatctactggagctacccgattatcttgtgaatgtacatgatgtcttccatgtgtctcaactgaagaagtgtctcagggtacctaaagagcagctaccaatggaggatcttagtgttcaagatgatctaacttatacggaatatcctatcaagattcttaatactttgactcgtgttacaaggagtaaagtgataaagatgtgcaaagtgcaatggagtcaccatggtgaagatgaggctacatgggaaagagaagatgagctacgcgtagattttccccacctctttcctagtccatcctaatctcaaggacgaaattctttgtaaaggtgtaggatttgtaatacccaagttgtaggccatagaaaacagggataatactcttgagtatcttgtttctacatactatcatatgagc

SEQ ID NO: 146407 - DNA, 627 bp, Zea Mays
ttctctaaaggaggtggtgtacattacaaagcgcgttttggtcgccggagggagaacgtacgtagttcacctactccgaactgcaatctgagggaggatcatccgtcctgctccatcttggcttgagcctttttttttctttttgtcgaggagagtccaccaacgtccatgtccatccattggccgttgcgttccgtgttaggtgatgcctttgcctcctacagtgtgccgttccaaaggcgtccatgggagatgggatcgtcatcgtccaccgacgaaggctgatgaaagaagccgtgcctgtctgactgtctgtctgtagaacagaagcgggggggcagttgaactagtcaccgttggagaggacacgccggcgccggggacgcccgggagtgctggacagacaggcaggcagttagctgtcactcgctcatcctccactccggcggccctcgctcactcaagtctgcagcagcttctgccagtggccagctagctggctggctggcagccatcctggccatatataattcctcttcgtccttcccttgcctttgcccatccatccactgcctacgtacggtacgggcagtcaagagaatcctaaacagggagtgtagctcagga

SEQ ID NO: 146408 - DNA, 773 bp, Zea Mays
gcgcccttcgtctcgctaccatgtgggcccagggcggacagacgcatcgtcgcacgccgcgcacccggtctcctcgcgctcgctgtcgggtggggtacgcctgacagggctttccccttcccttgcaacgaccctccgagattcactcggggggcaccttccgcccggacggaaatcctagggaggagtgcctgagaagagagatagtaggaagccaccccgcgtcctcgccatcggtcggccttggtgtcgggtctggggagcacccaatggagcagcgctattcatcggtcaaccagatacggcctcggactgcgcagtgattgccccatagttgtcgtcggtgagccacccttcttcctcgtacctctttcttctctgctcggtatgcattcgatgttgggcgttgcagtgaggatggggcggatatgcgagtccacggtctcgtccacggctccgctggcgtcgtctgacccttctgtccatgcccgctccgctgtactagcgcttgcgctgccgtcgtggtatgtgtcgcggggaagaagacgagctcgtggccgttgccttcacgatggacggtctggatcggaacctagatagcgctaggttatatgaaatcatatcggtttgattctaatcgagtggccgagatttggtaccggttcggtatagataggttctaatctgggaccttgaaatttgatcggatgcccctagctcacccgtaccccttcggccatgccaatttgcgtaaaagccctcctggaatttgg

SEQ ID NO: 146409 - DNA, 403 bp, Zea Mays
aggtggctgccagtctctgacacctcgtgccgtccatcgtgttgagtgcttgataaatgccaccctgtgagctggtgctcgctatctaaccgaaggacctggcttatttgcatcatgtactgtggatgccatttcaattctaaatgtatgtctattgagaataaaggagcggatggtgcgcttggaatccatagatgcctttttcatttgaaacttcaagattcaaaacaaataactgagttttggtattgaacgtagccttgttctgaaaacaagtgaagaagatcttgaagcacagctcttcttgaggaaaccgaaatgttttatcacacctccatctccatgtcacactggctttatctaactttacatgagatgtagcttatgtatcactgaacctatg

SEQ ID NO: 146410 - DNA, 336 bp, Zea Mays
tgatactgtttttatgctgtggtagatgttcggtcttaaagactgaactgttttgtgaaagaccggaccatctggccttagaagccgaactgtccgtgaccaaggactcatgaattttgtatgcactcatcatttaaactttatttaggatttagtcgattctccatcagctctagcattacagggatgaaacccttcttatctatacttatgaactggtaatcagaaaaatctactcctgtgagacatgtagcagtctcataagtccagagtacaggggcatcagccacaacgatacaggtcgatacatcagcatgtacttgttctatatcatcg

SEQ ID NO: 146411 - DNA, 1013 bp, Zea Mays
caggcagtaggtcccacgacccttccagggaagagagtgttcgtgacgcgggcggcccccaaatccgcataacaatctctgttgcccccccgccaaaatcctcagatccccttgctgcagtgcagatctctctataatccgcgctcgtggcgacctctcctccagcttccgttcctgaaatccatctctagtttcgccatttgggttttttctcgagggtttcgctcctcactcatctgatttaacgaagggagctgggtcacacccacaggccgcggcttctgaaattcgatggccgtggctgcagcgcgcctgacgctcccagatcgattcgacgaggtttacatagcctctgcccggtgaaaagatgggctcgtgggttatacgcgcctcgcacatgcacgagctgaatttcttctcgccttttcgatcatgacgtctttcgtttttttgacgtatatgattttccctggtgctagcgccgagcgcaactgtggttgagatccaatgctcctcgttactccgtccacctttacctatggaccagtttgcatgtagttgcagtctttttctaatgtcgataatctgatgttgtggctagttctcctcgagtggcaatataatattctccggatgcacatgatttggatcatccgctgtggagtttagggttttgttcaggttttacaggctctgctttctggtatctagcagtgtttgtttctttcgttctgaatctcgcttttcgttctgaatcatctctcgtttcgggacatcctgagtcatctaattttttccttttgaataacgtctcctactaagacgggtatacccttttcaagcattggatttatcagttattattacccatgtctctcctttttcttttcaagaatatatctcttacttattatttatatacatcatgataagcctcagcactaagagacaatgttcatatttgtgtgtataaatagggaagtcaatggatcaggatccaaatgttttttcac

SEQ ID NO: 146412 - DNA, 1126 bp, Zea Mays
tggactgaacctctcgagccaatccataccgagaatcatgtcaaaatgaggaatatccaaaatcttgaggtcagatacaaactgatagccttgcactgaccaagcagcctgcaacaactgagtggaacatgacaatgttgcaccgttagccaccctgacctgcacaggaacagcaagtggtgacagtccttcgagcccttgtatgacctgttgactcagaaacgattgagaactgcctgaatccaccaaaatcaaaagtggcttgttctgaatggttccgacaaaccgaattgtgcagggagcttccacacccaatgaagcagcctccgaaatagcaacaaacagctgctcacctggctccagagatttgttctcggactcttcttggtcctcctccggaattagatcccagacctccaaaatagcagtgaggggcaccgatgctggacatttatgatcacgagaccatttctctgcacagcgttggcaaagacccttggcacgacgataggcacgcagagccaacagcttgtcatcacttggtcttccacgagcagtgtctccataccgtctgtcatctgtcaacatgggtgctgaacctttatccatcttgggtggcactgatataggacaaggtgatttggcagcatgcacccatgaggaccagaattccgattttccttgatcacgccgtcggtgcacctcatgggccgttgcttcatcctgcaattgagcaagcacgaaagcagtatccaaatccgacggccgttgaataagaacaacagcttttaaatcagaccttaatccctcaatgaatcgcataatgaaatacaaaggatcattgctattttcatatgcaatcaattgatctaccaggccagcaaattgttcaatgtaatcagctacagtacccgattgcctaatggtcaaaaattggcgaactaaaatttcatgctgatcacgcccaaaacgacccagtaacatagaacagaactcaggccatgctatggttctaagacgcttttctacagactgtaaccatacagatgaggctcctgaaaattgcatggtagaaattctaatccacaaattaggtggtacttggtataagtaaaaataatcctca

SEQ ID NO: 146413 - DNA, 405 bp, Zea Mays
gggtggtggagatttctcaacaagaggaaaggatggacgaccagtggaccattggtggcgaggacatcgatgctttggggatggagaggaagacgatgctcctcctcctcggttgttgtataggtggtaatcgtgtttgtcgaggactcctcgcttcgggaaacatccatgtgcataaccaaggggaaactgacgaggtataatgtgaagggaaactggtgtgcgatgcgagcgaaggtgcacgaatgtggcggggaaatgtggaggatgaagcaacagttgggggtgggtttacgtatgagttacgaaggggaaggtttctcgtgtgagcgtgggaggggttacatggggttcaatctttcatactctactgacaacaaggggaaccaaaagtggtcaaggtag

SEQ ID NO: 146414 - DNA, 482 bp, Zea Mays
cacagacacaggaggcgaagtgtacttcgactgttatcgaagtcgaggtctttgtccaagaactgttgaaggcattgaagtgaagggatctaccgtttaaggcagggatcctcatggcttcgcgaaggcggccccgtcagctcagacgattctttgctatagccttagcaatgatcaaagacccagtgccttagggcgaagggtgccacacacgggcaaagaccgcgtcacccaatggcggggcccatgcaacgtccggctgtcattcgggaccatttgtaagtccctccctatggtagggtttactgtgtatttgatcaggctgtacttaacatcgctgtaatgaccccatagggtggaatattctggggctgtagcaggtaaccgatggcataattgtacatagaagggtgcacccacccacttggttaccaataaataatcccgcattgtacattgatggaacacgcttaacaagacgc

SEQ ID NO: 146415 - DNA, 328 bp, Zea Mays
aaagttggaatataaagaattcaaaacaatatatcaccttttaaacctcaaatgacgtttctatgatattgtgggcattgtattcacactagagggtattagagtacaactagtggatgaagacgttattgggctagctaatgaccttttgtgatacctggtttccaccatactgttgctaaaaagttggaatataaagaattcaaaacaatagatcaccttttaaacctcaaatgacgtttctatgatattgtgggcattgtattcacactagagggtattagagtataactagtggatgaagacgttattgggctagctaatgacc

SEQ ID NO: 146416 - DNA, 351 bp, Zea Mays
gagatcctatgccacttgctccaattattgtgattccgctacaaccatatccgagtttggccactgaggctatctccaccagactatcgattgcactctctatcccactctttatttcaaactccactcagtcaacagtgtgatctacagtacaaaacagtgttttgcacgccatgtgcacggttcctgagaccgtttgaaggatagcccaggaatgaagtctgtagaaaattgcatagataaactgcagcaggagaaacacaataaagcaaactgaaaattttactgtgctaggcagcgctggacactgccacaataaatacatcactgactatccggatggatttatcc

SEQ ID NO: 146417 - DNA, 330 bp, Zea Mays
tgacaaatgatgtagctgacttaattaacgaccatattgtcgacctcattccaggacttcacagacaatatctaagttgtgatagaattgcaccacaatcaaatgtgggagggacattagatctgttgtacccaattgaatttctaaattcaatagatagcaacaatttcccatagcacacgttgttgctaaaaaaggagtgcccattatgttgcttcgaaatctaaatcaagttgaaggattatgtaatggtacaaggctcattataaccgctctaggagacatgattttagaggctcaaataataactggaacacatactggaaaaat

SEQ ID NO: 146418 - DNA, 313 bp, Zea Mays
atcggcgcaaggccctccacctgccgtccgcattgccatccccgcaccacacctaaaacctcggcaccgcgcgctatggaggagggagttcgccgccgctagctatcctcggtcgtggtgaaaattgatctccaccccgcgccctagaatattgtttgatcgccgtagtaaggggagtagtggtcacctggggccagcgagtctctaccgttggtgaattgctcgccgcggtcacttccggttgggtacccgacgacttcacgaaccgccctcaccacgaccttccctccggtaagacaaggccctaaccttc

SEQ ID NO: 146419 - DNA, 344 bp, Zea Mays
tttcagaggctactggataaggctcttgctattgaacacaagcgtgttcaactgggagatctgaagaggaaggctatctcgcaggacagggtagcagcagtgttcgtccctgctacgtaccgccacagggtacaccgactcgaccaggaggaccacgcccagttcagtatgctccacagggctctccacggacacctactcgtcaggccactcccactggcaccccgacgaggcctacaggacagaagaccggccctacatgtttcaagtgcagtcagattgggcactatgctaatgcttgtcctatgggaaattctggtacaccagctaagaacaagcaacag

SEQ ID NO: 146420 - DNA, 489 bp, Zea Mays
gccggacctgtcagggttgatggtttttctgaacccttcaaatcgcctgtgcccttgcacggcccttgccatgttgccgtcgtacgtgtacacgaacacgtcgctctgcagggccacgatgtagtccacggcggcgagcctgttctggtacagctccagcggctccagctcgtccaccgtggcgaggctgtagtgcgtgtagatgttggggtactcggcccggagcgcgtccaggctgtgcgccccgtagatctcgccggcgacgatgtagatcttggtggccgaggggtaccccatggccttgaggaacacggccgcctcgcggggcgtcatggggcacccgccctgtagccgcctctcctcgctgttgatgtccttctccttccagtgccgcaccttgaaccgcatgtccgtcagctccgccgcctcatccagcgtcaggttgtggttgcacccggtgaaggccagcatgtccttctcgtatctgac

SEQ ID NO: 146421 - DNA, 406 bp, Zea Mays
tctggtaggctgggctacctgcaaagatcatgcatttgctttggttgctccatgcatccaccaatgattgcctcccgctggaatgaacatccggggcaggagaggaaagcatagaaaggaagagcatactggccttcttcctaagcaaaataaaggcaaagaagggtggatcactcgacctttccgacaacggtggaagagagctaggattacaggtgagaccaggtgaggcacatgagtaacatcgacgacgacgggacctgcgatgtggcacagtaggagacaacgacggagagtgtggacgacggtgaggaggaggggaccgtgacgtggacaccagggtgatgcaggcgacacgaacagcgtcgctgattcccttccccatctcccacctgcactgacacac

SEQ ID NO: 146422 - DNA, 447 bp, Zea Mays
gtcatgccattctcgttctttggtctttagaccaccgatgcaggttctagcctcgtagctagttgtccaaatatgtgtgtgtatgaacccattttcaataacgtgctcgagaaaggtgtttttggactttcggcacgtacaaggccttcgtctgttccatggtctgagaattttatcgaaaaacgaacaaatctcatgagaggctactgttggaggtaagcctttgctgaaggtcctcaaaaccaactaatcttaaccactttgtgatttgtttcaagagcaaccaattcatgtttgccgaaggtcactattgcaggttaaaaggggaatggaagaagctttggtttgaacgtgcagagaaagcatgttgccgagctcaaagcgagtggaaagaaaacaaagaaaggacttgccgatgtgtgcgccactatttcgagagaaaaggat

SEQ ID NO: 146423 - DNA, 502 bp, Zea Mays
acacaaaccaaccagcacgactcctgaaagcctgatcgcactccactgaccgcctcacctcctctggaggagaccaaaaggccgagcacaccagcaccaacccagaacagagagagagagagagagagagagattactaaaaggctcgcgagcaggttagtcaaaacgtacttgtagctcgcgccggcagcccggcaccaatcaccggaggacagcgcttccctctccctgcgtggctatatcttcttcgacagtgggagagacagagagagacaacacccacacgctcgggatcggagaacgcgcacaggcactttccatcccccgatcaaatcgtcatcatgtgcaacgccgccgggacagattccttgccggcgccggcgcccccgctcggctctctcaaggcctccgcgcaccagctcctccaccccgtcgacggcgaccaagccaacgcccatgcactgcagctctccaaggtatataccctcccgcgccgccgccg

SEQ ID NO: 146424 - DNA, 377 bp, Zea Mays
aacaagagagaagtggagagctccacgacggcaacgatcggggcgtgggagccgacaagagacagtgtgggactgtgatggagaggcagacatagacagcacgtgaccggggcccaggagtaatgacatgacggggctgcgctcttagctcaattggagaagaatttcgagtccagtactccgccacatgtcgagcacatactgatcgaagcttcacggggtgcaaggaggcgcccaaactaggtcaagtttttataacttcgattgtaaacaacaatggttctcggttgaaaaagggcatccatatttccactcagagattaattccactaccagaatagtctagttaggttcaaccaatcaagcgtgaaactcca

SEQ ID NO: 146425 - DNA, 298 bp, Zea Mays
ttcgccctctgtcaacggcatcagctattccttgtactgatttagaccgcaggtctttttgatggtcggctatgaattgtaacctggagccctcgatagttgaatatgcgtcgacaatgacctgagcacttaacctaccataacacgtgtatgggtttgactcgtgtaatctgtaatgtaaatgtcttcttacaaattcaagcattgttacgtattttcgtttggtcccaacactgtcttcatcatcgcaatacgaatgccaggatggtaaccattttcaccatacggaaacaacaga

SEQ ID NO: 146426 - DNA, 511 bp, Zea Mays
tatgtagctacttcatgtttgtttatacagtcaaacaactaactgagctgtggccaggtaccagttctttataagttaggattgaacaataaagtgttgttggcttgttgatttgtttgacattagaaaaatgactgatttcaactgcacatacaaacgggtaggagaactcaatgaatggcaacatttcttccttggttggggcgttccttctttcataccccaccttgtctgcttacacgataatttaatgttggacttttttaccccagattgatttgattctggcattattcttctgttgaaccataatttggtctatgcaaatagctaaaagcacttgggttgctggtaacatgtttttcgaagggcgacaagatcattgccacataatttattataaaaaaatggaactactgcacggttccaaaatggaaaccagcccaacctgcacaattcctagcaatttagagttaaagaaaacagtatctaatgtagtagtaaaacgctg

SEQ ID NO: 146427 - DNA, 580 bp, Zea Mays
gttctctgttgctctgttagtggatttttttaacccccactgcatggcaaaattgggtgctgctgcagcctgcgggggttttagctacgagtatgttaatttgattgattggaatccttcgagtagtagtcctgctgagactgaaacaggggatgttgcattgcatcgtgactgatgggattgcgactggtatcgtgttggttgaattaccgtggaatttgtagtgagggtggttttgggtaaatgctgctactgttccgtgggcttgagctgtacccatgaagtttgcgctgttgtttcaaagcaaatttgtgcgataggttgggagactatgagggcttactggattcatccatccatcaaccttgagctagctcaacatttttcaaggacacagcttgaaaacttccgtagcttctttacttaggtttatactctgcatttcgaaggtgtgaacctgactgattgcttgagggtagcgaagtgaggctcctcttgttcgagcagtgaagtgatgctacacttggagtaatgctatctgtactgtgttcaaacttcagagcctgctcatcaacttagg

SEQ ID NO: 146428 - DNA, 314 bp, Zea Mays
gaaaaaggaggcgacagcaacgggcgaagattcgcgtttttgcagtgggcgcttgtgtgttgtgttctggactggaggaagtggctggtgcatcgaagacgaagatatcattaacgtcgtggtcaatgcgcgcgtagtctgtggctgattgaggggagcaactggatggaggaggaggtgaggaagaggataatggcgctggcgcggccggggtgggtgggtgtgggtgagtgggcacggctgtgccccccgtttacttttggtgcgttggagagcgtcgggcgatgtgtacgtctgcgtcgctgtttgcctcg

SEQ ID NO: 146429 - DNA, 810 bp, Zea Mays
ctgtggagatctcgcgggggagctctggccctgcttgtggttttcgcagcagccgctgcgggttgatggattccacgtggttgggtttgatgaccagttcatagttcggtggttgcctggttggcgtgcgagagtctggagcatggtcgtcgtgactcgtgaggatttcgtagaaattctagtgtccggatctgttctcaatttcacgaacacacggctggacatcgttgggattccaccgggaggaatgagctttgctttcgggttgtttcctggtgctgtgggaatcgtccgctcacattttagtttagcatagttgagagagtttgctttgatctgctagtggcgtgatttcagctcaactactgtggttacttggcagagtcatgtttgcttttggttccatgcattttctcctgttcaatggtgtgataattgagtgattatcatgcatcgatgcttgtgtgtgatgtcgctttggtgcgagatacatttaagcatttggcatgcctttctgcgctagggtagtgtgggcaggcagcagaactcgtgatacttctgaattccttgcagtaaatgaaggtgttagtttgctcaattgagatcttgtctaatcgagttggatctgacaaatgggtgccccattccagattagtttgtgcagaagtcttcaattgtttaaaattgaactattttgtgtggctgtcctgaataacaaaaacagtggtgagtcctgctgttcaccagctgtataacttcatcagaataccataatggatgatgttaaaacttctcttgttttaaattctg

SEQ ID NO: 146430 - DNA, 432 bp, Zea Mays
ggaagagagaaggttttaaagaacaggtataacataagcatcaaggtaagatatagaggtgacaagggtaaagatgataatcgtgaaaagcataaacaaggatagagttaagccaagactcgcgaagtggagaaaataatcaagggtaagataggtatggttccaacagaagggttgaagtaaaacttcattacccaaggaagttacaaggaaacaacgagatcaccaaggatgtgcaaaataaaatgaccgctcatggatcattaagaaacaagggtggtcaaggacatgtaaactgaaatgttttaaatagacattggatataaaggtaagcatataaaaagacgatagtatgtaagatttcaaggagatgaacataccaataccaagagacaagaaattgccgaaagatagcgacttaacaacagaaaa

SEQ ID NO: 146431 - DNA, 575 bp, Zea Mays
gaggaaagatcatcgtagtggttatcgagagtgtggaggtatccggccatgtagacaatggtggggtcatcctcggtggggtctctccctgacagggcctgaagtcttttcctccaggtgggggtatttttgttgctaggtgggaagtaacgaaggggggtttcaaagatctctctgctgtagttttggcatagctgtttaagggcttttcgggcaacactttggcaagtgtctgggaagcggtgcccgatgaaggtgacttggaagggagggtggtttgggtagcttcggctttctcccaggtagaccgccatagagcacttctctattccattttcgcggtattccttccagacatattcgggctttttgcggatccccatgcatagtgcgtaactccgtaggaggtgaggaaatccttcctcttctgagcagtaggatgtcctaatgacccaagagccttccatctggtaggagaaaagaagggtctattaatatcggggaaaggagagaaggtgttccttaggggtaagaggtgttttcttgttaaggtaacttttaaggtcagggctgcg

SEQ ID NO: 146432 - DNA, 902 bp, Zea Mays
gaatgtttaaagttataatatggaatgttcttataacaaattgtaaatattccatgtttcatttcagaaatatttgacattttattacggaatattcttataacccatacaccctaaaaacactaaacctaaaaaaacccctaaaccaataccctgaacccaaaacccttccgatacgctaagctacgtgaggggctcaactcatgtagttggctattcggacgtgaaggctacaaacaccaaacgacgtggtgcttgtatgatagactcaaacaccaaccgaaatggtttttgacttataggtagcaaaacccccgtcacctgtgtttagaacccacctaaagctgttcatcgcggtctagaggccattttggagaagggtttacctggatccgctcttaacgtagttgtcacaccgcgtacatggcagtaggaggaattaaatatagcacatcgtgcatctaggaatagcagatgggccgtcggtcgtgggctgccacgacatataactagcacgtccaggtttacgtaatagcacatccaggtttacgtaatagcacattgaaccaaaatgttattcaactgtgaacaagctacaaaaatatttgatggaatagctagagaatgaaaccaaatgagagttatatttcccagaatgaaagagaggaaagcacaattttactctggatgtgctattacgtaaacctggacgtgctagttatatgtcgtggtagcccacgaccgacggcatcaaaggtgcattgctactctattggggacggtacaacaagcttacgcgacagttgtcaagtggcgcaggcccgataaagctctcacttgaagaggtacctcacctgaacatttcagtctttctctgtttatagaacttaacactaactgac

SEQ ID NO: 146433 - DNA, 886 bp, Zea Mays
tttttgccctagatcaccacaccaaagttgtagagcattcaaaggagaataaatttgctcaagagtacaagccttgttcttgtgagaaattgggagataatcttgcctgaagttggactgtcaggccaagatagactgaattcctgttggacagtgactttgatccaagattaagagtcatttagcctaagatccagtgggaatctacctaggattgctataacaaagttgtagagcttttatacaggaacaactttgttacagaaacttaggtgtgttgccattgaaatttaggagcaatttggccctaaatcctggctgtcaggagctctgaataaggcttgccatggtacagtacccggctgggatcagaccgacagcgccccaaaagatctcaccgccgatgtgccttgccgtgattcgtgtcaccggtgccaggattcacgctcggggtagatggataacgtcgcgggtaaaggatctttgccgccgatgagctggaggtcactccggtgactcatcgtcgtagcccccttgctctgcggcttgagcagattagctcgccggtgatcaccgcctctcagccttacgccgcgtgtccgagcctcgccaccgcaccgccacgattcactttagctccccgttgctcaccggaatagctgccacggcgttgaacatgtgttcactgcgccggtattcttccttatctccggccgcctgcgttgctcggccaaattgcacgccaccgtcgaagctcactataaattgaaggccgggactgctgcgctaggtcatcacgaagccgacacacccgttcttcccctcaattgcccaccataactagagaatttcccttttcccccaaattggtctccgccaccgcaaa

SEQ ID NO: 146434 - DNA, 444 bp, Zea Mays
ctccggccgccgtaccaagcttggatcacgaccacttcggataagctcgtcggagttagccacttcgtgaccgtgcgccacgtgcctcggtggtttaccacgtcgcagtagttccccttgtgcatatccggtgatcgccggtgaccccgccacggtgacagccacctattccttgcaacagtattcttttcactctccgaccgccaccgcgccatccgaaattcaccggccaccgcccttggagcctataaattgagggcggggatagttgcgccatgtaatcgtcaagctatagcacccactctcatctccaatcgttccccgtagctccccaatttgggattacccccaaatcgatcgaagaacgccgcgaaaccaagctcgccgtggtcagctcaattcgggtcagctcctcccctctgctcccttgtttaagcattcaca

SEQ ID NO: 146435 - DNA, 4767 bp, Zea Mays
ctttatagtatgaggcgaccacttaaaaaggaactaaataatttattctggaagtaaactaatgcatatctcttattttggaagtaaactaatgcatatctccctgtaataaaaactttcctactaactcgattgctagccactttgttgatcacttccctttcttgctcctgttgctccttgggctagatcctggcgctggcgcctctgatattggcagcccacaaaggcatcagtaacatttcccccctccacaagaaatagctcgtccgcgagcttaaaaaggatacttctgtgtgaaatcttccaattgttcccaagaggcatctgaggctggccgacccacccattggactaatagttcccaaactcctctattcagccgagccttgagtacctttgtccggtgtaggaattactctgccatgcagaatttcgggtaagggtactatggctgttggtgctgtgccttcaaacttttttaacaaggacacatgaaaaacgtcgtgaatccgagcacgtgctggtagctgcaacttataagagaccttcccaatgcgacttgtcacctggtatggcccaaagaagcgaggacccagtttcgacggagtagccgcggtgacacccactgctgtctgatgttgtaaacggagccatacccagtctccttcctggaactctacctctcgtcttgactgatcctgatgtcttcacaatttgtgcttgcaccagccttgctttgatttcagtcagaaattcatcccaatcttgaagctgttgatccactgctgtaaccttggcgatgcctggatggtaagacaccaatgtcggaggctctcgaccatatactacccgaaaaggggagcacttgagggtggtgtggtatgaagtgttgtaacaaaattcatcccatggtaaccactgtagccaagttcttggacgatgccctgctaggcagcgaagatacatgataataactcgattgaccacttctgactgtccatcagattgaggatgaaaggcggaactcatatgcagcttgacccctgctaagcgaaacagctcggtccaaaacgcactagtgaaaaccgtgtctcgatcactgacaatggagcaagccaagccatgcagccggacaatgccatcaaagaaagccttggctactgaggctgttgtgtatggatgtcccaatggaagaaaatgcgccatcttggagaaccggtccaccattatgagaattactaatttaccgcccaccttgggaaaaccttccacaaaatccatggaaatatcactccaaatacctgctggtactggtaatggttgcagtagcccggcagggtgcaagtggactgacttgttgcattgacacaatgagcagcccttcacatattctctgacccgttggagggcatgagcattatagaatgtagcccgccaacggcgcaccgtcttctcgacaccttcatgcgccccatcatgggcgtcggccaagaggagtggccacagagatgacgcatttggcacaaagatcttgcctttaaacagcagcaacccatctacttcaatccatccctctttggtcgtccctgctgccagctgagcacagatagtctccacttgggaattagtggtcgcctcatctcgcaggttgtcaaatagcgagaatgttggtagtgacatgctatgcagattgcccatgggttcctctctccgaaacaaggcgtctggagcaccattcaacttgcctggacgatattctacagtcaaatcatagccaaataatttactgacccatgtgtgttgggtaatggtggagagctgctggtctaggataaacttcaagctgtaatgattagtgcacactgtaaaggcaagatatgggcgccaattacgcacggccttgacaagatcgattagctcgcgctcataagtgggcaacttctggtgatgtggcgcaactgctcggctaaagaaggcaattgcaccatcaccttgatggagctcggtgccgaaccccgcccctgaagcatcacagtccaccatgaagcgcttggagaagtacgacatttggaggagtggcgccgtcatcagtgagtgtttgagttgcatgaacgctgtgtccacagcgtccgaccagtgaaaggcctctttcttcaagagggctgttagcggggcagccacctcgccatagcccgctatgaatttgcggtagtagccggtgaggccaaggaagccccgcaacgcctggagagactgcggtcgaggccatgcctccaccgcctcgatcttggccggatccatggcgacgccgtccctggaaatgatgtgccctaagtaggacacattttctttcccaaagaaacacttggagcgcttcaggaacaacttgttgtcgctgaggacttggaagacctgtttcacatgctgcaagtgttctgcccatgtcttactgaagataagtatgtcatcaaaaaataccaggacaaacttccgaatataggatttgaggacgtcattcattaaggactgaaaggtggagggtgcgttcgtcaacccaaagggcatgacgaggaactcgaatttcccgtggtgtgtgcggaaggctgtcttgctgatgtttcccaaactcatgcgaacttgatgatatccgctgcggaggtcaagcttggtgaagaacctcgcaccgcggagtccatccaacagctcgtctactactggaatgggaaaggagtcctttaccgtcttgctgttgcgctcgcggtagtcaatgcagaacctccacgacccatctgctttccgtaccaggaggaccggggaggaatacgcagatgaacactcccggatgatgccttgctgcagcatagcctcgcattgcttcttgatctcatccttcagcagctgcgggtaacgatacggtttcaccgcaattggtgttgtaccctagaggagtgtgatgcgatgatcatggcgccgaggaggtgggaggctgcgcggttcctcaaatatgtcggtgaaggagtcgagtagtgttgcaaggagatccctagtgatggccagcacagagagctgcgactaggggccactgatcccggaccaacggacaacacgctccttgtgccagaacgccatggtgaggtcgccgaagttccacaagatcggccccagggtatgcaaccactgtactccaaggacgatgtcgaagccatccatcgcgagggtgtagtaggagatgtcaaaggtgtcgttgtcgatggagatgaccacctggcgacatacccccgtgctggggacacggtcgccgttcgccactttgacggagaggcaggttcgacgctccaccgtgagccccaacttgtccaccagtccctcctggatgaaggtgtgagtcgatcctgagtccaccaaggcgaccagggagactccgttgatgacgactaggagtttcatcgtgttgccaacgtcgatacctgttagggcgtgcagggagatccccaactcttccggcatggactcctcatcgacgttgtcgcccatctcgttgaggaaaacacccttgcctgtgcatttgtggtctgtcgtgtatttctcggtgcagtgatagcactcgccattggtgcgcttggccgccagctcttccgacgagaatcggttcatgcgagggcgtggcgcacccccgagtttcgatgtggtcgccagaggtagggcctttgaggatggtcgaccggctggtagtgcggcgtgggtgagccgacgctcgtgagcccgggccaagctcatggccgtctggaggttcggtggtcgcttcagctcgacctccgtccacaagggttcacccaggcctgcagtaaagagctcaacttgctggtgaggcgtgacgtcgtgcgctcgacacaagagctgggagaattgtcgctgatagtcctccacggtgccggtgcgatacagggccttcagctccgccaaactgttgtgtcgaagcggaggcccgaactgcatgttgatgtacttggcgaagcggcgccatggtaacataccgtagtcgagctcgaagccgaagtaccagtctaatgtcgcgccttccaagtgtagggacgcgacccacactctatcgtcgtcgagtgtgcgcatcccacgaaagtatgtttcacacttgttgagccacgaaaggggatcggattcgccgttgaacgatggaaacttcagcttgggccggtgattgtgatcctcatagcgatcacggtcatagaagccgtcacgccgacgctgatcgcggccctctggtcgccagtcgcggcgccgttggtaggcgccgccagcgggatctcgcccaccgcgcctgtcgtcctgacgaaagtcctcacgtcctccgccctgccgtcccttagtgatgcggcggtcctcccgccaatcgttgtcgagggagtcgtcggtggcgttgtcgtcgttgtcgtcagagggccaaccgttgccacgatgtcggttgtggatacgacggtcgagcggcaagggagagccatccgatttctgtagagggtcctcgtcgttgccgacggtgccccctttttcggtgcgcccgcctccttcggccagcttggtgccgttaaggccctccgtggcgtcggccccaggcagcacaagcttctccatacgcgcgagccgctggtcgtgcagcgccatatgcgtgttgagcgtggagacttgggcgagcaggcggtccagcttgtcttcaatcgaatccccaggaacgttccccatggagccgga

SEQ ID NO: 146436 - DNA, 523 bp, Zea Mays
cgccagatagaatataaaatgtatgaaagatcatcacacatacccatactatgaatcaacagaggtagagatattgtgtttgtgatcgaagctcatccatgtgcaaaacaataatcataaacataaaactggataccatgccacgaaaaattaccaggtagattctgcataaggaagtccttgccattttactaaatattcgggaaccagatcatctccatcagctttgctgaccctatcagcaaatatccgttcaacctgaagattcaatgttagacaatatgcaaagcgataatgaacagtatatatcaacagtcaacctgactatattgtttaataagatccagctccatctccttgcccacgtcatgtacctcaacctgttatatgaatatgttagcataacgagagaaacgtatcgaattaatcacaatatgttgccaggtaaagaatcctacgcatgcaggcaaatatcactcaataatcactaattaatagcagcaaatataaacctaacttaact

SEQ ID NO: 146437 - DNA, 1213 bp, Zea Mays
tcaggatcgcccgcgacgctggacatggtcggggcacttgcctctgataccaatttgttgtggctgctgcgtggtggtaggcgaggggtatgcaggggagagtggaggaggagagtggcttgagaacaagaacgcagaacgtagcgaggaggtctgtcgtcgccggcggctgaaggcgccaccgtcgaagaacagcccacctctaggaggtaactgtattattcttcgatgccctcttacaaactagcagccagcctttatagtataggcggcagggaacacacccaatcaacttattactttctataatggaaataggaaactctactgtctgctatagcagaaataggaaactactgattgatatactggagataggactcgcctgatcctcttcccttgcttccaattcggctgcctgattgcttgcttcctttcctattcttccagctcttctagctcggttgccttattggtggaggttcccttcttgtgcctgcgcccataggtgttcctgtagaagaatgagtccacaacagttgatcttaccaattgaaagcagagatgtcatatttcaaacttcttggtggttggtacccaactccattgtttcagaactgatgctatggcggcgctgcaaattggttgtgccacttgtgcacctcttttcaggctaccttagaccatctgttggactatactccagtgttcactggcaccacctaacttgttttgacagccctttggacaaacaaattttttattgttctttctgtggtgactaacggaaacacttatgcagtcaaagataaaacacaggaagggccgcacacaaaagaaacactcatctactgacatcccattcgtctcagttctttactttgttcaattgagtcatggcatatgacaaggatttccctttaggtcaccagataccctgtcctgacttattgggtacaaccatgtgactgagcaacagaccactggggagaataagtaccaggatacgaccacagtgtcatctgcagattgaatgatggccagtgaattacatctccatgtgcaactgcctagcctataacatgaatgaactgagcaccaatgcctctgatcatagcgtgcatctctccagttcacctgtcaacagctgagattggtttcgatagggacctttctggtttgtatttgtgcacccccagaatgtgagcattga

SEQ ID NO: 146438 - DNA, 450 bp, Zea Mays
gggcgaattgctcgccgccgtgtcaactgcgggcgattttccgcttcgtgccgtggtaggcttctccgccgtggccgtctgccgtaaggtaccttctacatgatcgcctcgtcctcaatttcgttttgcgcatgaagtcaaccgcatccagtagccggaacggtggaattcgggtggccggcgaagagctccgccgagcggaggtgtctctgcgcgcgccgccgggggggagctggctgctggcgtaggattgatgacggaccgatggtcgttggatgggaaaggagcgcccgagattagatcgtgtgaaccgttgattcctaacccttggatcataatcggacgataggcgcgtagctctgtattcattaaaccgcggccgttgatcttggatccggtgatcagaatggatgcgggttattagccggcccagatctaatctggtccgtc

SEQ ID NO: 146439 - DNA, 413 bp, Zea Mays
cgattctggtgcatcacattctcagtggggtagcatgtaaaaaacgtggattcggtgacaacggttgttgaaggaacagttgcttcgtgggttggtttgctatataggacatgataagggctactcctacagtatttattagagaagaaaaacatgaaagaaatgatggtttctgtttgaacaatttattactactatagctggaaagcaacacgtgtgcacatggctgaatcaagacgaacaacttggattctctactctgttttgctcgttgtcattccacaaaagcatgcaagccgaaaatatgaaacttcagattcaaatgattagaactgtggtgcacattttagctactctctatgtttttgcattacaagggtctaattttttaagtcacgtaacgtttgttatgc

SEQ ID NO: 146440 - DNA, 505 bp, Zea Mays
atctatcttatcttaataagattctctcttatcttaatagattcatcttatcttaaaaagattttatctcatcttaatagatctaactaatctcaaaagattctatttcatcttatcctaataagcatacttatccaccctagtttaacaaccatgatctaatgtaaattaattagatcttatctagtcaaactagtcacaccaatctaacctagatctgatctaatctaaagtgacttatcaaacatgttagataatactaatgaaatagtttagactctactcctatagaacatgtcttaacttagttcaccttgcactaaattaagaatgacagatcgacttagccatatgcaactaccttaaccatccgatagttgcataacccctcaattttaacctagcaagtgattctaacctacctgcaccatataatccatcctactcacatatatcctaaccatatgtccttaactcggatggcaactccaagatgaaaggccaa

SEQ ID NO: 146441 - DNA, 369 bp, Zea Mays
tgggaagagtgtcaagtgtgttcctaaggtggttatgttttgggcaccacacttgtttctaaggaggggctctcacatgctcctcaatcagttcatttttcacaacaggggtggcaattttaggtggagtcagtttgacatgtttgggggtggttgaagctttatctgagggttttaggacactacactcaccaacattaccaaaacaagcgacactcctatccttagaagcaaagcctaacctcggcccaccagttcccctcttgaactgactgaccatcatgcccagccggggctcactgaacgacacctagctcaagattgatcaaaggtatgtgttctcttccttgatctgagtcttgtcgtgta

SEQ ID NO: 146442 - DNA, 1412 bp, Zea Mays
gaaaccatgaagcttacagttctgacaagggagtgccactcacagcccaggtagacactggttccacacacacattcatcacagaggcaatggtgtctaagatgtaacttccactagaaaggcgccaaggcacagtgaaagtcgccaatggggacaaggttaccaacctaggattatgtacatggttatcagttcaaattgttgaagaacagttctccctaacttgctatgctctaccactggaaggctttgatgttgtgttgggagtacaatgtgatccttaggtctgattccatgggacttcgaacgtctatcaatgacattctggaagcaagaccacaaggtttgttggacagggatgtgtgactataagccacgctgttgtgcattttcagaagggaaggaattggtggacaaattattgtactcctacgaagacttgtttgcataaccctgcggcctaccaccagcccgacgccatgatcaccacatcaaattactgcctggcacgacaccaatggttgtacgttcgtaccgatacccctagctcttgaaggatgaaattgagaagcaatgtgaggacatgctgcatcgaggaattataagggaatgcacgccaacattctcttctccggtgctccttgtgaagaagtcagatggaacatggagattctgtgtggactaccatgaactcaatgggaagacggtgaatgaccatttccccataccagtggttgatgaattgttagatgagctttagggttctagattcttcaccaagctggaccttcggagtgggtaccaccaggtgcgaatgcaccccaaagatgttgacaaaacaaaattccgaacacaccgaggccactttgagttcctcgtcatgccattcggcctcaccaacgccccgtccacattccaaagcttgatgaatgatatcctcaactcattcatatgcaagtttgtgctagtatttttcgatgacatcctgatttatagcaagacgtgggcagctcacctccaacacgtcaagtaagtgttccaaacactgagaacacataagttggcattgaagcgctccaagtgtttttatggggttactagtgtgtcatatttgggccatataatctcggcatatggtgtggctatggatcctgagaaggtagcaacattagagacttagtcgcagcccagaactttaagggtgctacgtggtttccttgggcttacaggatattaccggaagttcattgcaagctatggcgaaatcgcagcaccattaactgtcctattgaagaaggaatcatttcagtggtcggaggcatcaacaaaggcattcctcgcactcaaacaggcacacatgaccgtctccttgctgcagatgcctgacttgagcaagagttttgtggttgttc

SEQ ID NO: 146443 - DNA, 304 bp, Zea Mays
aaagctcgtttcttgcttgctctgtttcctcgaccgacgtgatgcgcacgacatgcacatgcagattctgcaactggagatgcacttcaaggatcagtaggtggtgccggactgctgggtgcttgactagtatttgtcattatttacatgagttcaacatgaaaagtttgtggtaagagagaatagaaaaggctagcagaatactaacgcagcttgaatgcaaaaatgcaataaatttatagagtatacaaccaaaatgaggtcatggatatgctctcctagctctaaggggctacaaagtgat

SEQ ID NO: 146444 - DNA, 426 bp, Zea Mays
cgccagtgcagactgctcaccggcggcgacctcttcgccgggattcgtgccacgggcgtatggatttcgttcaccgggtaaatatctcgtcgcggatgtgcctgagctactgtggcctcgctgtcccctgcccctttccaccggcgacgtggcctcatggccgtcaccggagttgccgtgctttgctgcggctgtgccacgctccaagtcttccaccacgccgtccctagctgtaatagctcaccggtaaccgccgtagctcctcaactggtggtcaccggaggaagcgccacggtgaaagccacccatcccttactccagtgtccctgttccctccggccgccagcacggctcggtcgaattgatcgccaccgcccccggagtctataaattgagcccgccgttggctccgcaacctgatcacgt

SEQ ID NO: 146445 - DNA, 362 bp, Zea Mays
cctctatagaaaccatagttcaaaaccttatggattatgcacaaggaagctccaaagtctgtcacaatcactgaaattcagacttaggcactattctgaatctgaaaattcagaattcagcccacaccactttgaaccacctttactcctagtagcatatggttttaggggcaagttgcttattaaaatttatactccaatagttcctctataggttttacatagtgaccgttagctaaacccttttggactccaatctaccacagcccaaagttggcatcaaacacagaaattcagaatctgaatttactccaagtctgaatttgacaatctctgacagctctattttggaccagttttac

SEQ ID NO: 146446 - DNA, 628 bp, Zea Mays
gcagtagttgaacttgcagtaaattctgtaataagctgtaagaaaaatacatgcgcaatctgcttgcataactctagtggccatctttttgcttagatttcaaccagacaaacaatgctgatgtgcttcaagcttacaagcagcatatacatatatgagagctcagcgcgtgcgtgtagataatcattgaaacacaattacttggttcacgcgggcaggtgaggccagctgacttagggtcataacaaaaatgaaaatcagacaaagtccacacaactggcacacacttttttattgaaaaaaaaaacaatacagttttcagtatttattcagtgcaaatccattattggacagccatgacggtgcatcaatgattatctgtcccatacatccaactaatttatctcaggcaagctctgatgtgcgcctgccatcgcaagctgatacctatcgtccaaccaatgatttcagtgcgtgtgactacacttaaccaataacaaccacattactcatgaccattggcgaatcgaaattcgttaactagcgtcagtaattcagctggaaccttcgtctcgcaagaaatcaaccaagagaaggaagcagcctacgcacgtccgtcagagagaac

SEQ ID NO: 146447 - DNA, 574 bp, Zea Mays
agaacggtccagggagcaccgaggcacctacagaggtgaccggaaaagtggaactgtttccaacgacgatcgaggtagggtgtgtgaggggaggtgagtgggagcgagatagcatgcctgtggtgggagtggtgtgataggatgctccggagtcgatgacctagtcagatggcggaggggccaacgccatggtgcgatagtatgtggcggcgagggcgatagggtcccagcctccagcgaacgaaggccacgtcgtcgtgggagacgacccctgtcggtacccagaatcaggggtaccctcttctacagtatgaaggtgttgtacatctacgacgtctccaggtcacacggagaacggctcccgaccccaccgcatgggcaggtctaaaggcaccacgtggcaaggaaaggtaatacatccaggatgtatcattgggtccgaacctccacagtaggacatcggacccctgtgcgtacaagcccggagctcccaagaaggcatgtcgggtccctcgggtaggcctcaggtccctccgagtaaggtccgggccttggcaaggtcccgggacgggaa

SEQ ID NO: 146448 - DNA, 297 bp, Zea Mays
tagatatagagagacaacattctattgttgtttggttgctaaatgtgtacatttagctacatccgatgttgtttaagactttagatcacttgtcatttgaaaagagtcggtggttacaatggccaattgtgctataatttgtcacctaaatacacgaggatttaatttatatactaatgcatattaggctcgtcccatatttgtcaaatacggaataaatacgggttcaatccggaaaaaacgggatcccgcaaaaacggacggaataagccctctcccgtttccgtcccgtttcca

SEQ ID NO: 146449 - DNA, 957 bp, Zea Mays
caatgactgcgtttactgttcaaatttattttttaatgtagcttttgcttgtcctgattaacttgaaattgcaattttggactgtgtgcattgtatgtggctggtgcagtggtgagagctgtttcactaagtcatcaggttacgggttcgaaacagtcaatctgcatttgtgggagaaggttcgccccagtttattccttccctagaccttacttatgtggaagcctccgtcattgcatctgccattttttattgtatttggctttatgcattgactgttgcactgttgtaccatgccatcaaatttatctttgagagcattaccttaggaaaaactaaagaagagcaattttgtggaaaataagatgatgcattgatacctggaactccttgatatttcattgttttgtcatttctattttgttgtgggctattttatcttttctgttgggctcattctatctgtggtagagatgctgtcagcagttaagacaaaaaatgtaccaaggattggactgctttgagcaatacaacacagatcctccaaatggaagtagccaaagttgtttgtttatttgccattgctattgatagaacttacagtgcaaaacaaacgacaattgattggagttgtatgaattgattgtgacttttatggcatatttctgcattatcctgacttgttaaagttctaggttggatacttggaatttatgcagccttcgtgcaaaacaatgtatcagtatataggattatgtagttactgatctttggcaagggcttgaagttagatgtcttaatgactagagctaccttgattttttttcctgaaagacctgccttgatgattttttttgcagctttgcttctagatttgctgtattttagctttgtttctagattttctgtatccagaaaaaaatggtgtagtatcaaattatcaaaatttacacttat

SEQ ID NO: 146450 - DNA, 727 bp, Zea Mays
cttgagatacttatttaatttacaacaaagcaatatatataaacacatgtcgggagggcagaaagataaacactacaacactgtcatagaagttaacgagatgatctagtgcaaatatgttcacattcaccataagcaccataacaaaaggtttgacaggagctccctcatgatcatactttagttgtgttttcgcttttccgtagttcatcatcaccactttatcacaaaatggaaatgtatccttgggcttgcacattttgactactattgaggtgacattgaaaggaaacagacaattatacatacattgttagatatgctctaagtaacacatggcaagtataggaacaaggagatattattcatgacacgcttgcacagttatgttccatatccagctacgcaacaaatttcttgatgttaatgttatcaaagtagaattagacggaaacaacaaagatggtacaatagtctctggacacaaggtacttctgaaacctaaaaagtgaaaaatcataacgtttcctcccatataaatatgtaagtttctgttttcagtatcctatagtcctgataggatctggtactactgcagacaacaatcaagcagttaccggctgaatgctagcatatgaacaaaactaaatattcgctttcaatgtaagcacatcttgaaatgatggatatgggaccagaagactggatcacgctattcagtgcccat

SEQ ID NO: 146451 - DNA, 686 bp, Zea Mays
atgattttgctttctttcatggtaagtgttaaatgtcagtgcagccttactatatttttgtgcagctgctattcatgtgttgtccttgtatacgtatgcatttcttaaagataccattaattttgttcatagatattaccatgcaattagcaatctatgccctacctaattctccatgttaatttcagtgcagaagatatagataactaacacatgtacttttccccattttctattaattgtacaccgatttatgtggatattaacctatttttttttactgattccacatattggtccattgcatggagacatcacaacttcactttccaaaagtcatcactctgaggaaaacatgtatgcttcacacatttcctgtttgtttttctaaatacgcaccttttaatttgtatatttgctagctatgatgtaaataatagtaaattaaccttaaattcatctaatacacacaatagagttatcagcctctattatgttgtccttaagatcattaatctaaaacttagaatgttgacatctagattgctgatgctgctacatttgtagactaaattgttctactaccatggacaattgtttgtttagatatatccacatatgtcattgctccatatatctaaaacaacacgcttttaagtgtgttcagcattgatcgaagactcgcg

SEQ ID NO: 146452 - DNA, 1438 bp, Zea Mays
tgtgactccggtggatagcaggtctctagcgaggtcatccagtcagcgaccctaatgcttactggagcattgttggtgccctccaatacctcacctgacattgcctatgcagtctagcaggtatgcctcacatgcatgatccctgggaaccacacttgataactgtcaagcacatcctctggtaccttcatggtacactcagctacaggtttcttcggcgctcctccatccacgagcagatcgtctacacttatgctgacaggccaggttgcctgaacacatgtcgatccacctccaactatgttgtgttcctttgagataacctcatctcctagttctacaagcatcaacatgtggtctcccgctctagtaccaaggttgagtatctcattgtcgccaatggcgtagcgaggcgagatggctctgaaaactcctttaggagctccacatcccgctcaccaggagtacactcgtatactgcgataagtcaacagtctacctgtctgttaacctagtccagcatcagcgcacgaatgttgatattgatcttcacttcggccgcaagtgcattgtcatcggggacatccgtgttctccatgtctcgacaagctcgcggtttgaggacatcttcacaaagggtcttctatcctcggtgttctcggagtttcaatccagtctcaacatctgatgtggctaagtttcaacatcatgaggtgttagacagttttatattatggttgtgtgtgttatgggcctagcatagcccaacccattaggcctattagggttaggggaagtataggcctatatgttgtaaccctttcatcaatcaattgtattttgaactattaatttgttatgcttgataattttcacatttttatcgagctattttgtcgttggacctcctataaaggttcatcaatatttcattcagtttataccctatgttaccacaaatctaccttagaaatccattctaacaatggcaccaaatttgtcgatgatgccacctctagattcttagcttctcgtggcattctcctacgcttttcttgaccataaactctcgtcaaaattgtaaggacaaatgcatgatccacatgctcactaactccgtcgaatccctcatccatgtacacatgcccttttcttgtgtgccgagactttagctactacaaacaaccttattaacaaaagttcatcatttcaaaattccatctttttgagtttctccatttcaaaatgctaattacaatcatcttcagatgtttattctaccctaatcttagttcttgctttgacactatccgttgacacataatcatatcccatcaaattgcctttgatgaatcatgtttcccctttgctaccatgtggcatcctcttttgactttatgtcatgtattaccaagagtatctcgtcctctccatacat

SEQ ID NO: 146453 - DNA, 680 bp, Zea Mays
ttgtttaacgtgatgagtaaattggaaatacatgagatgcgaggatttaattagtgcacataggtgtgtgtgtgtcgtggtgtgatatagtagtggtggcgtgagataattgtttgaggtgtgcgggtatatacaacattatggttatactcgcgacgaggaaagatgtatgtattgtgtaacacgacgtttaggtcgctattatataatcgtgtgaaggatgctcgtgatgattgtgtgattaaggagtgatgtagtggcaggcgagaagtaagtttaattttcaaacgattcgtgggtagtatctcggtgttgtcatgatttttgtggtatggcaatgtgatgcttcgctttttcaatcatcacattccatgcccctttggataaataaatgtcttgttgatcgattagaggtcttatacgagtgttatcgcaacccaagaattattggaagcaagtagcattcataagtcggtcctggttaaaattgaagaacaatccgttaacatatgcacctaagtgctttaggtccttcagtagcaagtaagtcttatggagttttatgccagacgttaatgcctctatgttagacctcctaaaatatggtgttctaagtgacttgtgtgttgtcttgtttaagttgagaaaaggttaagaaacgttaattaacctgctcccac

SEQ ID NO: 146454 - DNA, 666 bp, Zea Mays
gctcgatccctccagtagctgtgcgagcttgccctagactcgacctcatcgtcgtccctcactgtcgatcgcctacgccccatccttctcagctccaccgtcggccctgcactgctaaggatgttggcccggcctccttcagccggcactgagccccctccacagtcgcgtccatggtcgtcgaacacgccagacgctgtgggctcacctcatctagctccctgctcgccggcaccacttgggccagcctcgccgtaaaccagttccggcctcaactcgtcctcgctctgtagcaacgcctttttcccaagcgtcatgtcggttgtcgtctccaaccttcccttgacgctgtcattccttgtcctccacactggagttcgccgttgtcggtccctgctacgacatcgactcgccggggtctgcatatgtagaggaaagtgaagcttcgtgcagtgttcgttgttgttgcgtccggtggtaggtataggccgtatagcgaacatggttgctcctgcgtgcatagtgttggtggtggcggtacgattgatggtcgacgcggcttcttgcagcacgttgcgggtgcgggtgatgaaagcaaagtcatgtggcgtgacatcagggtcgtttctgactttttagaggcctagtgcgaaatccgatatggag

SEQ ID NO: 146455 - DNA, 998 bp, Zea Mays
atatcgaggtcctagtcgagtactccaataaatttgaaggagaagaaattggtacacctaatgtttaatgtttgccacatgtttatgacacgatttattctagttgtgttgaggtatattctaccacataatgtcaaaaaaacaatcacatctcttggttgtctagaaaggcatcagaattttggcataaaagcaacaacaattatttttggttgctatatgcattcgttaatgtaatttcatagaaagcaatccatatagacaatttaggaagacttcataatggtgccacccaatgttttattaaattcgagctttatctccatcaatttttgatattatgaaatatctcctagttcacaatgtcaaagatattggcattcttggtcctatgttcctacataatatgatccctttcaaaggtacatgttagttatgaagaaatatgttcgtaaacattctagccctaaaggatgcataactagagcttctgggacatatataggaggtttttgagttttgtactaatatattgatgaactttttagacttattgacattttgttatcgttcttcaacaatcttccatggtggctcgctgtatcaagtacataagaagtctctatgttgtaaatacacaggaaagtccaaggcctagattacatgacaactcattgataattgcactaagcggttgcaataacgtctcatgggtggtgaggatcttgatgatcactagcatggttgggtaggggttcgtcttcctcaatcttgacattccaagtatatgagataaatgggtatacattctacattattgcacaagacaaaaggaacactagctaaaatagtgatgttcgtatagatgccattgtgacaatggtactaaggagacgtgttatggttacatcgaggagatatgggaacatggaggctgtggacattattttaagatccctctagaaaaagttttctttatccaaccacatttttacgca

SEQ ID NO: 146456 - DNA, 1346 bp, Zea Mays
taataaataaatatgtcattaggagtcaaaaacttgccaacaattcggacaaccagtttgcgcggtgaacttaaatcatcccaagcatactgttctgactcttgagggtgtaatacatctgaatcaactgaatcctagatcaaattaatatatgtatcagtaatatcatgacaatgattgattccctcatggaatagaataacaaagctaaaaaaggatctgcaccttctggaaatacaggatagatgattcgctcaagtaattttctattcgatatgggagtgtaaccttcggtggtttagtgaagtgtagcacaaaagaagttgtctcttgagcaacatcgacagaagcaaatagtttcagcttcccagcattcaaagggtctcttttaataccatcttccagcattccttctaatcttctaaatttcaagaaaaaacgaccaattgatgaaacacagattggtccagaccaactgtatccaggttcttttggacagaactggataaaaatgtgagaatcctcaaaaacatttctgtgcttcttaacaaataaatcaaagtaatttacttctcgttttttcccaggtttccatgtctgtaaagcagcccgctgtttagcttcaactgtcaatccatcaatgccgtgctacataattggtaaccacatccactagtatcagatgagagtaactacaaatatattatcttggatctcaacattcaacaaaacatgttacagcataagtgtcgcacctcaacaaaacattgacgaacagcaattgcagcatcagactcatttgaaagaacatatcttggagctattagtactacttgtgatggcacaggcaagttataagaaacaggttgtaaagacactccaaaagcagcaatacgatggggaaatatattatcttggatctcaagaaaaaattcagtgaagccagacagtgcttctaaatcaataataacttctgatcctttctcactttgtgggcttattcgtaatttgcttgacctgccatgtataagttacatagttataaacaagttttgagaactccgccagggaatcatattgctttgcatttacgtttacagtaacaccaaatatatctaaaaatgaggaaaatggaaccaatcgatcatcatggcttctccccctgacccaaccccccccccccccgaccccaacccctccccttccgccagccaccacagcccctcgacggctgccactccggcgtcggcgaccacccctcagtctcgtcctcttggcttccgcgcctctcaggttggacggtccaaattccagcgatgggatgacactgcttcgggttcctcctc

SEQ ID NO: 146457 - DNA, 2148 bp, Zea Mays
gggggagagagaagaggatgacgcgtgtggcagcggtagggagcaccgtaggggcagcgctacggcgtatagagagtgtatgttccctctacgcgaggggagggggagcggccgcgggagccactgtagatagtctaagggtccgtagggttaggctccaccagcttgataaacgggccgagctggccagacccgcacggacgattcatccctgcggacaacgatggcggctttgctgcagcgtcgcgcacaccaccagctcgacggaatgccccactagaccaggtccaggacgcctgctcaatgtccatcctagcgtccggtcgcgcccgcctcctccgtggactctccagccactgcacgcagcggcctcaacagcaaggtgcctccatttgtccctcataccaactccacccccggcgtcgaaactctgcggagtgctaacgcctctgtttttccgtttgttcctggaaccaggatactatgtcgcgtgcgtccggcggtacaggtcgcgacacatgtcactcgatggagttgaggacgcggcggagcaagccgtcgaaccgccgccggtgtctctggcgaagagcctggcttctctcgccgaggaggccgcggccgtccagaggcagaggaagcccctcacacggatggagcggaagcggttagccgagctccacatcaagaagagggtcaaggagcagtacctcaacggcaagttctaccgcctcatggataaggtcgtggcgaatgctgagacgctggaggatgcatacgacatcgtgcgtctgaattcaaacgttgatctagcgtcttcaaaggatgatgtatgctttgccacgctggcagaggagctgaggaacggggcgtttgatgtccgagctaatgctttctcagtggtcgcgaagagaaaacggggacaccttgttcttcctaggctgaacttgaaagtggttcaggaagcgataagagtggtgcttgaggttgtctacaggcctcaattctcaaagatatcacatggttgtcgcagtgggcgaggatatcactcagttttcagatttatatctgatgaaatcgggattccagattggttctttactgtcccgttgcacaaggcggttgatagcaatgtgacctctaagcttatgtcgctaatacaggagaagatcgatgacgcccagttagttgcattcatgcaaaatatgtttgatgccaaggtgatcaatttggtatttggtgggtaccccaagggtcatgggctgcctcaagaaggagtacttgcaccaatcctgatgaacatatatcttgacagttttgaccacgagatattcaggatttgcttgaaacatgaaggccttggttcagaggcaacagatgtttcagaagaccgtgggtcaaatttgcgtcgctggtttcggagccaactgaagggcaaggatgaaagtagtgaaaatcaaacagattgtctgataaagataaagctatatgcttgtagatatatggatgagatttttgttgcagtttctggatccagagatgtcgcggaagatatgaaatctgaaatggttgcttacttaaacaaatcactttacttggaagttgatgataaaattcatcttgtgccgatcagaaggaacccacgaggcttacagtttgctggttttgtggtcagagtagaaacgaaggaaaatgctaaactgaaagctgtgcataagctgaagcagaagattggtttgtttgcttctcagaagcaagagatttgggacgctatgaatcttagagtaggaaagaagtggttggcatatggattgagaagaataaaagagagtgagatcaagtcgcttggccttagcacccctttgttggatcacattgcacaatttaggaaagagggaatgaagacagatcactggttcaaaacattgctaaaggtatggatgcaggatgtcaatgccaaaaatgagctaaatgaggatgttctcttatcaaaatacattgctgagccagcacttgcacaagaccttagggatgcattctacaactttcagaagcaagctaaggattacatttcatcagagactgctgcaacggaagcattgttgtccgatttgaagagtacctgcactgatggcagtgtcataaaaattc

SEQ ID NO: 146458 - DNA, 689 bp, Zea Mays
ccgttggccaccttcaccgtcagaccttgacgaggttcaacttgaagctgcagctggctgaccacagaatcattgatgaaggaatgtgtcgaaccagtgtccacgagggccactaactgacagccatacaaacaaacagacagtttcatggtagtgccaatatcaataccgatgagagcatggagagagatgccaacatcatccaatgtttcaccaccctcatcatcttctgttaattccagcaagaaaacccctttgtttgcacatctgtgatcggcagtatacttttcagtacaatggtagcactcaccactagcccgctttgctgctaattcttcactggaaagacgcttgaaccgagggcgttggttgccaacaactgatttaataggcgtactcacgccacgggctgcagggtgcgccgtggagtgtgtgcttacagccagcgccatgcgacgctcatatgctcgagcaaggttgattgctgactgcaaattagttggcccttggagttcgacgtctgtcctcaatggctcacccaagccagcggtgaagaggttggtctgttgacgctgcgaaagattgtcacaacggcaaagcagcaaggaaaattgacgtgtataatcatccactgttctagtgcgatagagatccttgaggttagcgaggccattcatgcgcagtggggg

SEQ ID NO: 146459 - DNA, 531 bp, Zea Mays
tggtcagtcggagcgaacgatccaaaccttggaagatatgttgcgtgcttgtgttctgtcttggaagggtagctgggaagatcatcttgcattggcagagtttgcttataacaacatctaccaggctagcatcaagatggcaccatttgaggctttgtatggcaggcggtgtatctcccctctgtgctgggagaccttgggagacttttgaaaaggttcgggaaactcgtcagaatattttggccgctcagagccgtcagaggagttatgctgatgtgaggaggagggatttggaatttgcagtgggtgaccaagtccttcttagggtatcacccactaaaggagttgtttggttcggtgtctccggaaagcttagcccgagatatattggaccgttcactatcttggcccgagtgggcaacttggcttatcgcttgcaattgccggattccatggcaggggtacacccagtttttcatgtctctatgctgaggaagttcttgcgggatccggaccatcagattgagatgg

SEQ ID NO: 146460 - DNA, 620 bp, Zea Mays
cttcctaataagatgtgtagcagtaaaaacgataatgattgcttgcagattcagagagaacgatttagggttccacacttaggctagtttgccccttcgggattgaagggaacgagggagacattagtttatttctacctaaatctcctccaatccaggaggagatttgagtttctaaactagctctcattgactgccagataattaaatccaaggagtagatagtcgttccatttgacatgcggaaacaggtaaaaactagtgaactttaccgtctcgagaatatattaatacaatccaccgatggtgtacaacatattcaatggaacgttttctatgtacaaacctaaacagctagtgtaattgtacaacggcacacattaaagaagtttaccaaaataacggacaatgaaactaaacatttaacgcccctctagaattgtgatgctcatgttattcagcgatcttcgcgcgtgtattgacttgactgaccagtttcataattcctagtagtaaaatatataggtttatttggggtaggaagtggggctgtttcatttgctagcatgaacacaacggatggcatgagcggcctcgcatttggactgtcttggacgcat

SEQ ID NO: 146461 - DNA, 352 bp, Zea Mays
caaaatggtaaagccaagtgtactcttcacacagtcaataatattgtacgctcgttgctctttcaaagtagcctacctctggtctattgggttgagtcgcttaacactgccacctatcttctcaatcgccatcccactaaaaccctaggcggccatacaccgttctttgccctctatgacacccaccccaattacactcatcttcgtgtctttggctatgcgtattaccccaatttatctgccactgccactcacaaattatctcctcgttcatcgttgtgtgtcttcctcggctattcctctgatgacaagggctatcgatgcctcgacctacactccaacctgattatcc

SEQ ID NO: 146462 - DNA, 485 bp, Zea Mays
cacatgctcgcaacatgtcttccaatatttgattcactctttctgtttgaccatccgtttgagggtgatatgctgagcttcggattacttgggttccaagtgactcctgcagttgctcccaaaatcgtgccacaaatggtgctcctctgtcagatataatggtcttgggaataccatgcaaccttactatctgatcaacataaatctcagcgtacttctctgccctgtgggtggtatgcactggtaagaaatgagcagtcttggtcagcctgtccacgataacccaaatagaatcatgatgtctggaggtattgggtaatcccactatgaagtccatgcaaatgtcctcccatttccaagatggtatgggaaggggttgtaaagggccagctgccttcaagtgactagcctttatcctttggcaagtgtcacactcggatatgtactgggcaatttccctcttcattctagtccaccaatataga

SEQ ID NO: 146463 - DNA, 468 bp, Zea Mays
gccattgtttcagcagggaccgagtcagaagaatccccagccaacatgtccagcatagcacttatctctgcatcacctggactcgtaagcatctcaaagtgaacttgcctctcatcattgggaagatcaccaagtgaagcaaccaggacctcaacttcctcgagagagagtcgcactctaagacccaaaccactatcaccagcaggaggattggacacaaaatcgaaaaaggacttagaaggtggcagattccaagaagaatatgcaacaggagcaccaatatttgatactttgcccctcaagatcatctccagtcggctcaccaaatccacaacaggaatcctcttgttggtaacccgggttgagtcggtgacaccactatacaaataagtcgggtatgctctgtccttcagtggctgaatattcttaaaaacaaagtctgctaccacagcttcagcggtcagacct

SEQ ID NO: 146464 - DNA, 449 bp, Zea Mays
caggcagtgtaaatttgctgaaaaaaacaaaatgaacctccaatgagtttgaaccaaactatgagatcgtaaacccacaatttagttgcttgaatcaactcacttgggcacgcctgcatcatgcacacccgagagaccacagcaaattcagtaacactaggatatagtgtttgacaaaaattaaatcctctacaccagttcttcaactcaagagataccaacttcatggacagaactcaagcacatgcacttcaataattcaaaaacaaaacctgttgcagtacaagaagggatcgaacaaaggggatcatgcaggtacgccaggttcctgctcctcgtcccgcttccccgagcgaagggagcgtatggaaccgtgctgcgggggaggaggacggcgggcccaccgccaaatctaggggtaaattctgattgaaatcggtaaccgaagg

SEQ ID NO: 146465 - DNA, 1058 bp, Zea Mays
taccagttgtgagtgggttaagagaacttcccgcctattactttctaactcataaagaccttcaacttcaagattagaattctccaatgcgttggcattaatttgcagcttataagtaggaatgtactcattggcccaaagcactaactcaggacccccaatcttcaccaaactttcatgatgtggaggtggccaccatccattctttgtttcacgtacttcatgagaagacttcattaaactaacgatctccagacacctcttagcatttttcactacttctgcctcagaagttttgtgtatacaaactgaggaatccattgagcagttgagctgtcgcttctgaaaaaaactgcctatgctcccaaaatgattttttctgacatcctcaatgacacaggagaaaatggcctcagcaagagaagacagaagttttccatctgatgagctgatactacaatccaaagacccctggtgtgtattaacaaatgagcaagaagtaaatggagcagcaaatattattgaaaatttgtgaactttgcaagtttgcacacacctttcggggtttgccaaaatcttggaagtctctctctgaacctggggggaagacctcgagccgaaagtttgagagccgctgaattacaacttgcttaaaggccatagccaacatactctctgaatcaggttgatttgcaaagaaaaaatcagatccgaactgtttctctatcttactggccttatctttaacttccttggcttgcaaaatctacaaaaaaaatgccactgtttactcatgatgatccagcaaaacatgggccatgctgtaaattattcacatacacaagtaaaccactaggtatgtcctatcctagagtgacatacaacaaaaggtggataggcccattccatagttaaaccaaaagcacctctatgagaaagaggaatgttcatggtgaatttggctttgtctaactgtttaacctagtgacccagttgtgcattgcacataagaatgagtgcttagagcatatgcatatccaagagtacctaaaaaattg

SEQ ID NO: 146466 - DNA, 340 bp, Zea Mays
attcaaggaactctgagcaaaggaacgcttgctgagtttcatgtatagctaatcagtctggagttgagtgaggactgtagcaagatgttggacatgttgttccaaggaaggactgtatatgagaattttcatagaaatggagccaaaatgtcgttcatcaggcactgaaatgtagccggagcattcgtcaagccaaatggcatgacccaaaactggaaatgtccatgatgtgttttgaaagcggttttgaattcatcctctgggtgcatcctcacttgatgataactggagcacatatccaatttggtaaaatactgagtacccgctaactcatctagga

SEQ ID NO: 146467 - DNA, 766 bp, Zea Mays
gccagacacactaaccactggagatgtccaaagatcacaatgtattaggtcgaaaggattaacagcacgagagttggagacactaaatggtaggcgcacatggcgacctagctaacaagcatgacaaatgtgatcatcaatgtgtttattacatgaaatggcattggaactaataagtttagataaagccgcatgtccgaggtgaccgagacgacgatgccaaagtgaagaagacgtcgtggtggtggcgagggcagtggtgctgttggatggtatgggaaagaacgggtagaggtcacccgtgctattgcacctggcgatcacgctccgtgtctgaaggtccttcacagaaagaccaaatgggtcaaattcaatggaacaattattatcagtagtgaaacgacgtacagagattaaattcttaataatgctaggtgacactagaacattagagagaacaagaggacgtcgttctgtagggaaagaatgtgacccaatagatgtaacgggaagcgaagctccgttacccacaatgatagatgaaggactggatgacgatggagggtgaaggctagaaaggataccagcgttgttgaccatatgagcaccggcgccggagtcagcataccattcgcccgacggaggaggtgtcaacgtcatggcgttgaagttgctgacaagggcggacggatcccaggacgggccctgcattggcgtccagggctgctgctgcagctgctgtggtggtggtggtcctccatagctg

SEQ ID NO: 146468 - DNA, 1090 bp, Zea Mays
cccccatggatcttctccaatttcctagtcaccaaaccagcctccaatgtttctagaccaaggtacaatacacttaaagcggctaaagacttgctgcagttacagttgctgcagcttattttcgacacaattatttaaaccccattgttacttgccaatacagcttaaacatatcataagggcaaattcgggtgctaatgcagcttaaataaacataccatgagagcaactttgtgttggcttccaggtaagccgatgggatggagataggcagttttatttagcagtttacatttataaggttgttttgtgctagtcattgtaatctgcgattgcgatttccatgaacatctcgccaccatgaccaggtgaatttgcagtggtgaacacccatgggcttttggaaacttcacatgtttaataaagtcaaaagcacggaggttggtaactatggaagcatgtgaaacctttaacacagcctaacaaactgtaacacggttctgggcagaactgttcgtgtcttgttttcttgccattccaatgtatttaggcaaagccaagtgcagtcatgcaggttactgcaaaggggaatgaaacatgatcatgccgatgaccacagtaaatttatctcttgttttactcagagggattgtgattttatacgtaaactgtgaaagttcaattcgatcagaccaatagaaatatgctcgcgagtttatacaaattgtgcgtgggagtctggcaatgagcatcatactaatattgataatgacaagctactgagataaattgttatagtgatctcaacaatatgttatcacggttttgtgcaacaatatattatacaactactaatctttaatgacaaggctagtgaacatcacattagttatttatgagttgacatattggcaaaactagtaaaagattatttgagtgtatacttttataatctttgttgaatgtgtcattcaattatatgtgcacttgtaatagggttcgggagttttcttgacctgtctgaaaatgtcttcttaaaacagtacacaagggttgtcttaccgccgcaagtcgagtttttttgtaaggt

SEQ ID NO: 146469 - DNA, 488 bp, Zea Mays
ttgctcagcgatgaaacaacacacacaagcgtagacaataaactggtggtggtgatgtggatgcagagaaaggcagaagaacaacgtagttgaagcagagggaaccaaccacacaccacgacttgaagagggagataccaataattaataggagtcttatttcatcgactgctgtcaggaatggacgtcgatactgtgcaacctgcaacatatatatggagtggaggggtccattcgcctccaatggcagctgttgttgattacctgcaaggaattattcagtaaattgatcaacaacactatatatacaacagtatgggatgattgagtgaatgtctaggcatgcatgcaataaattggcagattacttgacctgaggacgctgcctctaagaagcttgggcttcctgtagtggcatgagtgcttggggcggaagagggaagggtggtgcttggcctccaacccatcccactcgaggccatcccacc

SEQ ID NO: 146470 - DNA, 433 bp, Zea Mays
tcggtgaggttatacgatgccagccaagccttgtcggactccagagtgcgctggcaccagaagaactactcgcaacagttgaaccaccccagagggtcaccgctgccgtcgtagatggggaaggagggggtgctgcagtcatcgacatggtagtagcagtgagagtcggcgccaggggctggtacaccggtcctggtatggttgcccctggcgtcgtcagccatgcaactggtgatgaagacggccctaagggcgcaacgcaactggtaggcatcgccgcccacaaagatataggtgtcggagcgggcgacgacggccaggccgctggtgctggcgtgctgctggagagcaccatgttgattgcattgagcttcgcaaacagatcgtcgaagtatgcctggtcgggaacccaaggacccacgagaggcagagg

SEQ ID NO: 146471 - DNA, 548 bp, Zea Mays
tatatcacagaccattctgtctcctatactccttcaccagtctctctttagacagcttgggtaaggaagcaatccctctagtgtcggacctgtacacagcacccccaatcgaccctgattgactatcttgaatgatttctatcgttgtttgtccaaaataccttgttggatcctggctaacaacgctgctcgttccatcgaagttggcagatgagacttaaccggtccttgcagctcttgcttcaaccccttaattaaatgggccacatacaaagtctcatctaaatcatgattatggacagaagttgcataccgcgcctcatcaaacacctttttgtactcctccacagatccagtctgcctaatctccaataaggaccgcatagcctgtgaatactcctctgacccaaacttcagcatcacagcttcacaaaattcctcccatgaacatggaccatactgaattttaaaaatctgaaaccatctcttagcattcccctccatgttcaatgatgctgacatcacccaaaccgactcaggtacccgat

SEQ ID NO: 146472 - DNA, 1393 bp, Zea Mays
ttttggtccccggaggacggtaaggctattttggcctcccgcgacacatgtttttgtcgttgaacaacaatttgatgccacccgttcgccacccttgttttggccactaagacaggtaaggctgtttttggcctcgcgtgagctacaacacatgttttcatggccgaacaaccaatttagtgtccaaccatagtacactagtgttaaaaccatagtacacatttttgtccccggaggcctgtaaggctatttttggcgtcccgcgacacatgttttcttcgtcgaacaacaatttcatgcctcccgcccgccaaacatgttttggctactggcatgggaaaggttgtttttagcatctattgagctacatcacacaaaacacttaaatcctaaaccccgagccccaaaccctaaaccatgaacccgtaaccgcgaacccttagactaaaacccgacccccaaaacacaaaatcacaaatcccaaactccaaaccctaaacattaaaccccaaacgctaaccctcaaatcgaaacccgaaatctcgaatcccaaaagcctaagctctaaacctcgagccccaaacgctaaggcctgaacattgaaccccaaaccctaatttgtgaaccctatacctcgaaccctaaatcaaagacccgaccaccaaaacacaaaactccaaaccccaaacttcaaaccctaaaacacaaccctaaaaagtaatgtaaggctgtttttggcctcgcgtgagctacaacacacgttttcatggccgaacaaccaatttagtgtccaaaccatagtacactagtgtccgaaccattgtacacgcatttggccccggaggccggtaaggctatttttggcctcccgcgacacatgttttcgtcgtcgaacaacgatttcatgcctcccgcccaaactctaaacacagagccccaaaccctaaagcccgaaccctgaaccctgaaccctaaattgtgaaccctataccccaaaccctaaaacgaaaacccgaacaccaaaacacaactccaaacccaaaaacacaacactaaacagtaaagtaaggctgtttttggcctcgcttgagctacaacacacgttttcatggccgaacaaccaatttagtgtccaaaccatagtacactagtgtcactgtaaaccctaaactccaaaccccaaactccaaaccctaaaacacaaccctaaaaagtaaagtaaggctgttttgggcctcgcgtgagctacaacacaagttttcatggccgaacaaccaatttagtgtccaaaccatagtacactagtgtccgaaccattgtacacatttttggccttggaggccggtaaggctatttttggcctcccgcgacacatgttttcatcgtcgaacaa

SEQ ID NO: 146473 - DNA, 577 bp, Zea Mays
ccacttcaagtccttatgttgcaaattttgcctcaagccgcacatcgatggcacaggctttgccaatcccactgaccctcaatgggatcaagtagactgatgtgttcgcagttggatatttggctccatcgatggcttcgtcctcggcttcaccatggacgatgacgaccagactgcgtgcaatctctgggttaccatcaagaaccttttccgcgccaacaaggagcctcaggccatcttcctcatccatgagtttcactccatgcagcagggtgacacttccatcaactcctattgctagcatatgaaaaccattgccgacaccctccgtgatgtcagtcatccagtccaggactctgatctcgtcctcaaccttctccgtggcctcaaccgtcgcttttctccaacattgtggacatcattgccaactccacggtgctacccaacttcaccacgacatgcaacatgttcaccctcaaggaattgtgccttgccaacaaagacaaggtctcctccggtacctcaattgttgccactggctgcaccactttggatgggtgtcttagctccatcgcca

SEQ ID NO: 146474 - DNA, 432 bp, Zea Mays
agcgtgagcagcaagcagccaggcgtgtggcagtggccaccgccatggacagccaatccccggccaacgcccgctcgtgcctcgcttttaaaagcacgccgcgcaccccccccccccccccgagcttccctggactcgcctcgatccctcattcctctactgcagcacactaacgccatggatggacgactgaagctccctgctacctctaaatccctgtcctcagtagccgattgcttaaattgagtttgccatcacctccccctcgccacgtcgatccgttcgaaccctttcccgagcgcagccatgagcggcgatgcccgcgccattgcagcagtaggctgccaccgcgggctcgcgtggccaggccacctggggctgccgccggccgagccaactccttggctgtgcgcgccctccactagggacggc

SEQ ID NO: 146475 - DNA, 630 bp, Zea Mays
ggcgtgtgaattgggagctcacgacatagagttttggcctcgcacgacaataaagacttatgcgcgggttgacttcgtatcagagtggactgagcaccaggtcccggacaacctagaagttactgaggtgtggagaatgtactttgatggctcgttgaagctgcaaggagcgggtgcagggattctctttattgctcctggaggtgagcaactcaagtacgcactctagctactgtttctagcatcaaataatgcggcagaatatgaagcactgattgatgggctaagcatcaccgtatcactcgacatcaagaaactgatggtatacggtgactcgctagtggtcataagtcagataaacaaagactgggactgctcgacggattccatgggcaagttcttgtccagtcgtgatggccatcggctcggtgcgggtagagtcggacgattccccggccagcaggctaagcacgacgtccatctcagcatcatcggtgctagctagcatttcaaagtgagtttgactctcagcctcgggaagactctgaagtggagcaatcaaggcctcaatgtcctcgggagagggtcgcactctatgacccgggctaccatcacgagcaggaggattgg

SEQ ID NO: 146476 - DNA, 808 bp, Zea Mays
caatgacatgtccttcatatccacgtgctcaatatccatcataccaaaacgaggtgcacgatacatatgtttgagcataatgaaaagtaacacaataccatatgatgtcacacgatagttaagtaagcactaaacaacaagacaccgtgaacatctactcgcaagcactagctatttatatggcattagacacaggaatataacaccactaaaagatatgggatacataactctatacttaaccaacacaatcaagacatcacaattaaggaaaattttgtttgtagtttggctgtaaactcagctcgctgcagtccgcccctagataaatgccatgtgtgcactcatggacatcgacgatggagaaacaaagtagccaaaactaagacgatcggctcggaagcgtctggctctggctacaagcagcggcggcttggccacacgatgcaggcacaatcccatgagtcaccgccgccgcttttttctccagccggacccaatctcacctacaccgccatcgctttttctcccgctagactcaatctcccgtaggagggagctgttgtgtcgccgccaccatgttcctcctccattatgtgccaggtaagttgaatcctttggcatgtactcccagttccacatgtactcccatatcctaccgacgaaactaattgtatctttacaaactctgaaatattaatcaatctttttattccttttgtcccaggatctctcaccactacggtgtgtttgtaaactcaaggaatccaatgttagaatatgccttgaacacatatggtttttagtc

SEQ ID NO: 146477 - DNA, 463 bp, Zea Mays
tcgacggtctggatctacctgatcgaaccggtatggccccattctaatccaagttgttcatccagggaccgacggccaggttgtcatctccagcctcactataggaaccgagcagcaggaccctgccgacggcgacgaggttcaccggtgccacgacacgaaggttcctacgccccaattctagcctcgacgttgctaaactatgcggaggacatgacaagtatgatgaagtttgactcaccggtcgctaggtagcgtagacccgaacccatagagatgagtagcaccacggtggagaacgtattctagcgagcaattccacggtcttcaatggcctcttccgcgcactcgagccacaacgaccttcaccgcgtcccggttcagagtcctggccagttcttgaaggtaagccgatggcaaatgcgaggaagtggctacatcggtggagtttccgaccacgagc

SEQ ID NO: 146478 - DNA, 1076 bp, Zea Mays
gcctctctcgttttttagcctgatttgttgcacctagttgagatgggtgttcttctcgttaaagaattgagtttgtggagggtttggaaggggatttctgttgccacatagaatacccacgaatctgttatttttgttcctttcttattccggggattaggtttactagtctcctcgttctttcgcggtctccttgactactactccctcaatctaaccatctgaaccctaattccgttctccaagttgctacctttgtccacctttgtgaagcctttctcgggattgcctcacattttgttttgtggaggtatctttatcactgcaagtcgggtatggcgggtggttagcaccaggtggttgggggagccagcttagaacttcgccaaggcaggaagactgggtatctagacatctccttgaaggatagtatcaaggtgtgatgatatgagtggtttactatggaaattcacaataattcactgcctcctcgctctaggagacaggcagatgttcaaatgcctagttggatagagggcccaactgattctaaggtctctgaggcaagggttttgctggccgagattgctagtctgaaagatagagacttgactgctgaagccgttatgattgactgtgttgaagaacatttagcctctgaagtatagattcatatcatgaatgtttgcctcgaacgttcggatgagcaactttgtgagctcccgagcactgatggcccttttcagtggcctacaagataggggtgaaatgggcttgctggctgggctagaggtcagtctgccaccttctcaagaagccagtgcagtacccctagccttacttcgtgacgatgataccgctggagcaatagctcaaatattcttctgaatatagaagcgttagtaacacgtacctgtcttaacaacctcgatcgccaacaacaagtttggaccggctggagcagcacggccgcgacccgcgagacacgaaacccggcgtcgactggtttcttttcgcgttgcgcgcaggcagaggcagggcagtgcaagcgcaacgcaacacggctggagcggcgg

SEQ ID NO: 146479 - DNA, 375 bp, Zea Mays
cccaattattggaatgggttgtggcaaatgaaagaaacaaggagagataggaaaagttttatttacgggtgtggtttcctagatgtttatcgtgcctcggcagccgtgttaatgttcggttagtgttgagttgagttgagtgagaacgacaagagccaaagccaagctcttgttgaaatacatgcaggagattggcggccaactgcggcgtgaattagaaaattcaagctcaatccattatatatatatgatcctaatcaatggtactcaattaagtcttttgtctgtttctttcttccgtttaatttatctgcaaaatcacattgatcataagactttttagctttataatgattgagcacaaaaggaaattat

SEQ ID NO: 146480 - DNA, 369 bp, Zea Mays
gtgatcttctaatcttggccgtcgctggtcatccaacggctaggagattgtctcccccaagccaactcgaccgagccgcggcacgccagccggagcacggcggcgccattgccggaaaccaggccaaatcgacactacggcgccattcacagatctgtgacttgctatgcgatgcggaatacattctgaacactataggtcggttcttaccgacggtggggtcgaagacgaggctgcccacgacgctcggtgaagctgcagcaatggcgagcaattgaagtcgccgaggccgcccacctccgcccacgtcgagctctatgtgatcctgttgcacgaacgacacccctcgaccgcgcgaacacccccaag

SEQ ID NO: 146481 - DNA, 1216 bp, Zea Mays
attttccaatatgacaaaccgattgagcttggccattaagagatcaatcttggattgtctaactttgtcaactccttcatgaggatcgtgtagagtatcccaaatatcttttgctatttccatcccaatcactttgttgtactcatctacactaagtgcactcaacatgatactagtggcttgagcatttagatggatccttcagtactcaagagttggattactaggatcttgtggttcttccttcccacttctcacaattcccaaagctcaagatgtagctcaatgagataagtcttcatcacatgtttccactttgcaaaattagttccatcaaattgaggtaacttccctgtagacacattcacaagagatctatggtcaagattaggaatggaattactataggacgttagaggaacctttccaatcattcttgttgtccttgctatctttattgttgccactcttgttagtttgataagatatgtcatcatctccatcatcactaccactagactcatctgacattgaaacttctttcctttcttctttttcagctctcttttgcttctcttcttcttccaatcttagttcctcttgtcttttgagtctcattgctgctcccctaagaagtttttcttcttcttctcccaacttttgtgcttgttttttgcttcttttctcaaacgacgctcttctttccttcttgctctttctccttcggatatctcgacatagagtgttgcatagcttgttgctgatatgatttcattcgctgattcttcaccaaagagattcgtgccatcatttgtcccttcatttccttgcctagacatagccatacctcacgcggttaaacgctgctaaggaacaaggttctgataccacttgtaaggatttggtacacctagaggaggatgaatagggtacgtgtaaattttcagctcaagaaactcttaaaatcttgagtggcagtgcctctctcaggcccgacactgtcggtgttctgaacgtagccaaacttgtacggaatcaaattgatatgatttcccacttctactcaaaatatgaggttcaaactagttaaacacatatatcagactaaataaagtaacaagggattcaaagagcacaacttaaaccctaactacttaaatgagcaactcaaatcagcacacaaagacaaggtatttatcccatggttcagatcgcc

SEQ ID NO: 146482 - DNA, 324 bp, Zea Mays
catcatcaataaagtttttgttttcaaaggcattcagactcttgacttacaactgatttcgattgggctgggcttgaaatcagccgcttactcgacttagggtgaccactataccctactaacggagcaatcgacttaagtcggcgatgacttaagtcggtgtgacatgctcgcgcttactcgacttagggtgaccactataccctactaagggagcaatcggcttaagtcggtgacgacttaagtcggtgtgacatgctcgcgcttactcgacttagggtgaccactataccctactaacggagcaatcggcttaagtcggcg

SEQ ID NO: 146483 - DNA, 500 bp, Zea Mays
gacacttttgcacctgccactgctcactgtcacttgacatgtccagagctctctctccatttatacacagctccccatctctagtccggcactcagagctctgcccccttctccttctagcgcagggcgctcccctagccccaggacagctcctccattcggcgccccttgctccaatcctctcatcttcttcctccatggacgccgagacgcaaagcccccatggccgctagcctccatggcacttggccccttgagctcgccttcctcaactccggcagcttgggatccacttctccctgcacgctgcacctcccatcgaggcccggatgagcagcgaccacggccacatgcagcagcggcaaatctgccctgtgcgtgcatgttctagaggaagaagaagacctccctgtgtctatggcgagtgggcccaaggccagatgtaagtgcacaaaagttgcagatttttgctcttccatcaaatatttatatctcgagtt

SEQ ID NO: 146484 - DNA, 698 bp, Zea Mays
tggtctttttcgacattggtttagttttttgcgggggatttttgcttgtatattacatggcgccgcctcattaaaaacctcaccccctgggaggaaaagagtgggggccggaataataatgttaagtgacttacaagggcgtgatggccctgaggattcaaacaaaaaatttgcgaagattgtctatattccaggaatgctccaggtcttcgccagattgtgttgttaatctgtacgcgctgggagacgacttcgtcttgacgataaatggtccttcccacttcggttccagcttaccccgtgactctgtccgggttgtgcagacaagtacgcggtccccttcgttgaattctcttgggacgaccgcgtggtcgcgccaggccttcgtttgggcttgatatttgtcgagggcctgcagggcgaagacacggtctccgtcaatgaggtctttggaagttggctcgtcgacgtcgggtactgctgaagcgcttgtctgcggggacccatgtttgatttcctgcggggtcatggcctccgatccatatagcaggcgaaagggagtgaattcggtcgcccgacactcggtcgtgttcagtgcctagactgcttcaggtagcaggtcggcccatttgcccttcttgtcgtcgaggagcattttcttgatcgctgtgaaaatcttgtcgttggcgcgctccacg

SEQ ID NO: 146485 - DNA, 447 bp, Zea Mays
aaatttattttaaaacatcgttttgaaggaaaagtatttttcgtataactacggtttgaactgttcttgcacatggatggtcgctttcataccagtgcaagctattaagatttatgttgacactgtaacaagattagttcataaagagagaagtgagttcaaagaaagctgtcgaaacagtgcaagtaatcattatatttaatcacttcacttgaagagagaaacactcgattgctaaggaagacttcaaggtttatggtacagtgcaatccttttcgttggaggggaaacagtagcactaccagtctacgagcattgtcattggccgtggtacaatataatggatatttttactagttgaccaaaaaggatggaaattttcgcaacttcgtgtttgttttggaatttgtttctttcgcagcttgcatggctttcgtttatttattt

SEQ ID NO: 146486 - DNA, 777 bp, Zea Mays
gcttcacaagtgtgcaaagccatggaaacaacacttgaattggataggaactcagcagagtgggctagccacggacgggctgttcttcgcggtgcgacggaccaatttggggggaattcaaaattcgtgcgctctggcgaacgattgagggtgggattggaggttctggtttcgggatgatgtagcgcagctgccctggccttcaatttatagagggcttaggcggtggcgcataattcggctaagcagtgctgacggccggcgatagagaagaaccttggctcagtggcttcgtgtctaccgtcgtggcgacctcaccggcaacgatttgacggctataaagagtcacggcgacgcaacagggatacccgagcacgtggcacatgaccagcagtcgaccatcgccggtgaacctatctgccaaagccgcaaagtaaaaggggaattacgttggtgagtcaccggagtggcgtccagcgcatggggtgacgatctttctacccagagcgttatccccgagccctgtgcacgaatccaaacgccggtgacacgaatcgcggcggaggtatcatcgacggtgagaactccctgcgctagcggtctgatctgtttcggacactgtaccatggcactgcttcatgagagcgcctgacagagcaggtttagcgctgatttactcccattttggtgtactgaccgagctagctctctgtaccaaagttatagcttaataaaccagctttaattttgttacatggtgcatcctcgaaagatcac

SEQ ID NO: 146487 - DNA, 786 bp, Zea Mays
aggccatgggggcagcctatgtcctgtaccagtctgtggctacccaaacccaccagagggccttggtcaccgcctccatgctgatgttcgtcaccggccttgtcaagtacggggagaggacatgggcgctgaagcgtgctaacatcgacagcatccgaggcggtctcgatctgcaggacgacagagaccgtcgccagccgtacgatgggagggctggaacggcggagctggagctggactcggaggaggttctgctgggcgctcactacgtgttcaacgcctgcaagagcttcttcaccgacgacctgatcacgtcgggagcagagcgcgaagctatcagcaggggcatacagttcaatggcggcaggtacacgcacgagctgatcgagatgcagctgtccctgatgtacgacatcatgtacaccaaggcggcggtcatctacacgtggtatggcatatgcatccgtctaatgtcaccggcggccacctgggcgtcgttcttcttgttccgactgagcagcagccgcggccatggtggacctggtggttacagcagagtcgatgtcgtcgtcacttacgttctcctggccggggccttcgtcctggaaatcgcgtcgttggtcagggtgctagggtcttcctgggcatgcgccttcttgcacgctcgcagatgggaccggatccatggcgcagtccggtgccttcgtctgctcgtccgggccgcgaggagccgaaggtggctggactcggttgggcagtacaacctcctggacttctgcactcgtg

SEQ ID NO: 146488 - DNA, 1049 bp, Zea Mays
ctcggtgtgcccaacacgctcaacgtgctcaccgcctacccgcttctactcgtcggggttccgggcctcgtcctctgcctctacgacagcgggtgcttcggcgtcaggtgccccccttagcacttaccctacctttgtttgatgaaatgtctaaagaagttcgtcttatgtcctagtcctagtttagtaatttgcttacacttgagtcaagtgaacagatcgatgatccttacattgaataaattttttggctaaccaatgttttttggcatagtagttgtaaaatagtccgatcttttgagtcatgcttgaaagcttcagaactcagaagaggtcaagaggaggcaataggtgattaattgttttttgctattatgtccgaatgaggttccactaatcctgtggatttttaagttaaacgagatggcactcatgaatcatgttgagaacctttgcttatatgtcttctagccatctgcttgcttgcttgaggaaatgctttgcttcaaaatgtgcaatttaatcttgccatagtatagaatggctgggtaatggggatttgagtcatgggcgttcaattaaaagtaggttgatatgcttcaatgtaagccaataaatgaaatgtgttatgtatgcgatcctactacttcttaagataagcatcttcatgtgaaactaatctggttttctgtgaggtgtgctgcttcaagaattttttctatcactcatgacaacactcattgccttggattaaatttcactaattgataacatgccactttgttgaatcaagtagctttaaactatatctgattttctatgaggtgtgctgcttcaagaaattttatatcaggaatgacagcatactcgttcccttgaaataaatttataaatttgataacatgccattttgtggaatcatgtagcttgaggtgggaggcctcgggatggttcctcttttatgctgggaatgtagcagcagcatttggctcagcttactatcacctcaagccagatgatgaccacttaatatgggacaggttgccggt

SEQ ID NO: 146489 - DNA, 722 bp, Zea Mays
gttgggccgatggcacggagagacggcgcaccgatgtggcacgggcggggcggtcgctgggactcgacacggtggattcggggacgcggggcggcttagggtaggcggggtagctctagggacgcggcatggcgctggtgagaagccaccaacgacaactacaaaaatcgagggtgtggcgacgggatgtgtacgcttgcacgggagagaaagaaacgagagagaggccgaggtcgtggattgtcggagacactaaaaacactaattctcgtcggcctatacagtgtagtcgatgggagttgaaaggttacgtggtcacagggttttgagtggggtccaaaaggcattaaccgtcggctgggttcgtggtcgacgggaattacataaccctatcgattgcgtgtggctgatggtaattcgtgttatccacgttaccttctagctagctgacagtagttcgttaactcttgttggctggcccaggagtcgacgggagttaatacgaccgacgggtgtaaggaaaatggaccttgggacatttggctaagggcatgtttgtttggtctgaattgggctaaattggaatttgattccaagataaacttgtttggctgcgcctgaaattggaaatcaacattccactcactttcctaacctgaatccgaagcccacgatagattcctacctcctgaagacggaaaaggattcctctccccctgaaa

SEQ ID NO: 146490 - DNA, 385 bp, Zea Mays
tgcgtagctactgccgctagttgcggcccgcaagggcacaacgagcaccgtcggcttcgtgcttggcgtgtgggcagaaaagcaatgccgccgctgacccttctatatgcgctgcttcttcaggaagccatgggtgatcgccgtgctttagtctctgcatctgatggcatgcgggcccgtcgagcgttgctacgagggcgagcaggcgtgccattgacactgtgcggacgagcccccactggtgggcggactggctgccgccgctgcacggatcgggcgagtggaagggagtgctagcgggagcagggccacatctttggtttcttcaggaaacttttcttccttttcttattgccgtatgacttacaccaacagtaaatcgcag

SEQ ID NO: 146491 - DNA, 1562 bp, Zea Mays
ctgcagtttagtgcacacaagggtgcaaaacgttagccaaatggtaggaagggaaaccctacaaagtaaccaaccaagagagctaagactacgagtctgcaacttaaagctgcttcttccttctctgagattttgtgctagcttttctccaaatttagttagtctttgataagagcagagccagtgcttagtgacccaccttgtttggccccaaagaaatatatggtagtcccacactgagtggaagaaagggttcgttttagctccagtaatcagcagaaaccagaatcttttagctacttcctaccgagtgaagtttgaccatacagattaaccgttaggttttgtagctggtaacttcttgtaactagaagcaggtgagcactgcttgagatatacagcatctaaccagtagtttgttgtactgtgtaaacatatggatgccatcagaagtgatgacatagagaagcaagatgaagttatgttacctggattcaggtttcatccaacagatgaagagcttgtcaggttttaccttaaaagaaaaatccagcagaagtctctccccattgagctcatcaggcagctagacatctacaaatatgatccatgggatctcccaagtaagcttctgtgcacctcttccccttgttaactatattctatttctctgcacaaatctgtaaagagctaataaagaaaattgtttgttttaagataagcttagttcgctacatgatgctccttttctgtacaagtaacgtgggacatgttttgatactatgaatcttagtaaatcttcaaaaacttttacatgcatgctcgtctgtatctataaggttttgtctacttgcaatactgagcattatacaacaggtaaaactggtcatagagttaaatatcattaacatgaatagtaaggtatgcacaaaccaacataatataagcttgctgtcctaatgtatttataatgttttgtctcggtgttaacgaaattttatgtgatcacataaccagctctgagcctatacgaacctgtaagttcttgctgagcttatgctttcaattgtatgctgttgtgttgtatagctgattcaggcttcggctatcaaagtttgagtgcatgtaggttggacatagattatatttgcacacatgaatgtgtaatgcatcttatcagttaaacaccttggcttcaatattgaaccctaaatttgggatctttgatcgtaactagtaaagacagcatgaatcttacatacagttacttacaaaatattctgtctcttttatctccataaagaactggcgagtactggagagaaggaatggtatttctactgtccaagggataggaagtatcggaacagcacaagaccaaacagggtaactggagcaggcttctggaaggctactggaactgacaggccaatctactcttctgatgggagcaagtgcataggcttgaagaaatctcttgtcttctacaaaggtagagcagccaaaggtgtcaaaaccgactggatgatgcatgaattcaggttgccatcactcactgaccc

SEQ ID NO: 146492 - DNA, 488 bp, Zea Mays
cccccgacttggctcaaactctgatctaagttgaggtcaacttgggtccagtctgaagtctgaaccagctcttcaaggccattcaagctgaccttaagtcctgatgagcacaacatgagtatgaacaggattaacaaatgtaactaaagaacctcaggacaaaatttgaatgttaggctgaccttcatgcagtactattcctcacccaaggtaaaaacacaagctgcaacggaaattgatagctttgcacacctgagagcaagactcattttgtcactatgtcctgccgtggcttgctgatgcattcttgacatctagatagccaactttccctattctaacatccatgctactccaatgttcagaagatttagcatacctccagcatttgcctcacacacaggaatctgtccggcatgttcgactttggctccatcgccaaactcttgctggtcgcctgtggacaccacacacaggtagtacatgtc

SEQ ID NO: 146493 - DNA, 827 bp, Zea Mays
attggttggtatataagcaggtggatttccctttctcattgttaaataataattgcaacattgatctacgtcacctcaccagaagaatattgaaaatagtgtcgccaggaaaagaggaacagtgctgtgacaaggcacctaggtaggtagctagctagctagctcgcattgtcgagattagccaaaggggactaatccaagagccacatcatcaatccctgcaaacaagagagagagatgcatagaaacactgctgtactttcccatgttctgctggttgttcatccatcccaaggcagaacagcaagctgcttcaaaagcaccaaactggggaacacctagaacagcatatgcatgcatcggtagaaagcccaaaacatgcaacaaatcatataaaacaagacaaatccagctgagagtaatataagaagcttccccatgcatataatgtaaataaacaaaaggagattagtgtgcaagcagcaaccacactctgtgtgatgaactgatgacgatctagctaggcagtacaagctacttattatatatacatacattacacgctactcaaggtaggattatactccgtatgcatgtagtattactgtagcttactagctagacaagatgatacagtggctatctagcactaactaataatcacgtgctgggctactactgcgtgtcaaatgcagctcccgtcatttgtggaatggggagaatataatggattcaagaacaaggaatctacacttgattgaaactcttgtctttgcattgcattaagaattggccaattagttattaatgaactcgaaataagattg

SEQ ID NO: 146494 - DNA, 667 bp, Zea Mays
actgtgctagaatgcaacaaaatgggcatcagaatttagacttgtcctgtctcttggtccaataccaaatgacagcagcagccaagagagtagtatctgtcctggcccggaaatcctaggctcttgttttttggatgctggtcacttcgattcagagtcttgtcctcgaattaagccctacacgacccatcacaattcattagactatggatgaggcatcatggatttaggaagctccataaaccaaacatcccctgaatcgcaaggatcaaaggtgcgggtcgctatgctatgcggttcagtccaaatatttgtctgttcattgaagcgatcgatttggacttgtctttagcattgttcgcttcacattgcagaccagagaaagtaggagggtaaagcctagatgcttttgcagcatttttacgctttctcatagtcttgccacggtagtatgataacggcacctgcatgaaaagcagaggccttttcttggtcggttctcgctccacttggatccgatggtcaccatactcggttgtgataagcagacaaatccaagttgattatgttcacaaaaaaagccttttttatccgtgatcctgtcggatcattcatcctccgtcctccctgtgtaccaaacaatatatccaacgcaatctgtaagatt

SEQ ID NO: 146495 - DNA, 465 bp, Zea Mays
ggatgattccccagccaacaggctaagcacaacatctatctcagcgtcatcagtgctggctggcatctcaaagtgagtctacctctcatcctcgggaagactccgaagtggagcaatcaaagcctcaatatcctcaggagagggtcacactctatgacccaggctaccgtcacgagcaggagggttggatacaaactcagagaatggcctaagtggcagcaggttccatccaaaataggccacaggagcaccagcatttgaaaccctgcccctcaggatcatgtccaggcgactcagcaaatcttcagtaggaatccttctgttcgtgacccgtgtagaatcgttgacaccgctatataagtaagcggggtaaaccctgtcctttaagggttgaatgttcttgaatacaaagtcaacaactacagcttcagcagttagacccccatccttcagcgagtagatctt

SEQ ID NO: 146496 - DNA, 786 bp, Zea Mays
gttctcgaatgttctgtcagaaagtgttttcagtactggatgtcattattattttcctgttgttagaattcaacagtagttacaattgtggaagtaaatgtagtgtgatggttttgaaatttcttcatatttcgcgaggcatagagatctccctaagatgagtaattgcaaacgtgattgtgttggattgagcagacgtgagcacgtcgtgccgatttaagtcactaccgacttaaaccgactgctctgttggtagggtatagtagtcaccctgaattacgcgtgagcatgtcacaccgccttaagtcgttgctgacttaagtcgattgctccgtcagtagggtatagtggtcaccctgagttaagtaagcgtgagcatgtcacaccgccttaagtcgttgccgacttaagtcgattgctctgttagtagggtatattggtcaccctgagttaaataagcgtgagcatgtcacaccgccttaagtcgtcgctgacttaagtcaattgctccgttagtagggtatagtggtcaccctgagttaagtaagcgtgagcatgtcacaccgccttaagtcgtcgctgacttaagccgattgctccgttagtagggtatagtggccaccctgagttaagtaagcatgcaagttgacagtaaacaatttgagtgcctttgagaatgaagtctttttattgatgatatatttcccaatttatagaatacaaggtcgtctcaatagcctttgaaatatagctaggggtaaaatttcctgagatgttctatattcc

SEQ ID NO: 146497 - DNA, 744 bp, Zea Mays
gttttatcaagactggatcattgcttcttagcgccttttcagatgcagattgggctggtaatttggatgatcggcgtagtaccgatgggtacgccgtctttcttggggcaaccttatttcctggagttctcacaagcaagctacagtgtcctagtcaagcactgaagcttaatataaagccgtcgctgatgccacagcagatgtcatctagcttcaggttcttcttcgcgaaattggcatttctcttccatgaccaccgaacctatggtgtgttaacataggcgctacatatctcatggcaaaaccagtttttcatcgtcgtatgaagcatgtggagattgattatcattttgtccgagagcgtgttgccatgaaacaacttgaggttcgcgccatatcattgaaggatcaagtggccgacatcatgataaaggcgcttcctactccggcattcaagcatttcagaaacaatctgaacttatttccacgacgtccagattgaggggggtattagacgaaaacacagtttgttacgtctactcctagattagagagagctgtgtctctctaccatgattcatagtgggttagttgtggattacgatcacatccatgtatatccctatcttctctcttctctgtaaccacatatatcagcaatatataaacaccggtcgtgactcctagagggcattgaaccaagccaattaactgtcaagggcaatgagcccgagggtaggggga

SEQ ID NO: 146498 - DNA, 651 bp, Zea Mays
actgcaaaagtgacgcggatttcagtggctctcggctaggtctagggctagcaaaagacgcccccaagatgatgagtgcgcgctgcctttttgccgctccaaatacacgcgatacgcctgtctagcactcgtacacggtaatgtatggcgggccacgctggaaatacaagaaacctacgagtacatgtttctttttcctttccttttaaaactttgtggacgtggagttgcagcgtggaacagcccgatgctggtgcagagcaaagctgcgtgaagacctatttggagggcatacaaaacctagagagagtacctgtggagtaccatgcattctgtggacacaggagataagacctcgatgatcagcaaaagaaagcaaggatgagatcatgactcatgagatagatagagagagagagaactgcactgctccatggagtacgtatattgacacccacgttccaccgtccagcaaaccgaaaaaacaacggggcaagcaacaacggcggccgcacatagtggtacgaaacttggaggctccgaactctgagcaaacgcgggtgacgtagatacgcacgcacgcgatgcacgagccggcagggaaaaaacgagagagagagaacgaaagatgtatgggcgcgtccagaccag

SEQ ID NO: 146499 - DNA, 1283 bp, Zea Mays
ggttaagggcttaaagtatcagctttagattgcaaaaattgcaaccggtaccttcagcttccatgttccaagtgccaaccaacaatttccatgtcgctgaactccatcgaccttgaaaactttgagtacttcttcatattcaacgtttatgcacataaacaacagactgccagcgaggacatgttagacatgtgtcgattatgcgtgcagttgggttaccttaccacttgagttgtattaggggttaggatagagctggagttgaattttatattccagggggccataaatgtgaggcaacctctgttgtaaccatgagatgaattggcagctagtttggatggcggcgagaccgttggatcgcttggatgccggtataactgcttttttatggggagctggtgaggcatgctagtagccatgccaaggggatgtaggcatatcgcaaacctagtgaggtgtgcctgttgtcatgccccagggatgtaggcatatcacaaacctcaataaaaaacattatgcctcggtgtcgttctcattcacatatttttctttggtggttatgcttcggtgctctttggtggttaatagatcctttcgggtttcgatctaaccgtgctctcaaacaggacatgttatgcatggttgctgtggagtaaaacagaagcatggggtgaaaggatattgattgactctgcatgtgatattttttttttcaaatcagtgactgcaagacatgaataatacgactgcaacacacacaactagcatgagtgggttacctctgattgtgcattacttattgcccaacatacattttctagatctaagggacctagtccctgttcatatatgctttgcacaacacaaaggttatatagactttacattcccaaattaaaagatcatggccatctactcacgaaaccacatgaaacaccaccacaccaggtgaattgcttgactaacttgcctactctcaaagcaaagtcattaccagcataacacatcacattcatacaattcagtaacaatgagttattcttctcacttgaaaacatgtgcggctgagagcacaccttccgtaaactttagggcagagctcctccaatcttctgacctgcctggagcttaccagcgatcattttcccaacaaattgatggcaaacgatatgtaattcaataaattcatacatttttataagttgttaattcgaacctcccctcctatatgatgaagaacataaaatgcaataaagtatgatgaagaacttaagataacc

SEQ ID NO: 146500 - DNA, 323 bp, Zea Mays
ctcaaaaagccttcgcaactccccctcacccatactcgccccaaccggcgaggacaacaattcctgcctaccagccctgcccacacgaaaccgaccatcatcaaacccgctcactctacgcttcgccactgcccttcgccgcctacacccaacactcggaccaggcaaaatttcagcatccgtaacacgcggagaagcctccgcctcagccacatccaaggccgcaaaataatctaagccttcatccgaagactcttccgtccacaaaaccgaactcccagagtcgtcaaacgcagaaaacttagacgtagacccatccgatt

SEQ ID NO: 146501 - DNA, 323 bp, Zea Mays
caaccctgcctcgtagagtgcacacagcatgtctccactcaccacactacatgcgtattccaggcagcacttcaccacactctgtcatcctccttagcagatgtagtatcgctccagcaagcagcaacaacacaacccagtaagactgcaacgcaggcagcataaagctttcagtcggtttgtagttttttgtttacaaaaaatgaagcttagttccatgtccaatccaaatgttgctcctgtagctgtagatggtaaaccaccaattctcatttgcaagaacacccaaaatacgcctttccactgctgtgacagaacatgtg

SEQ ID NO: 146502 - DNA, 421 bp, Zea Mays
gtttaaaagctgatgttaagacgtttgtcacaaactgtctgacctgtcagcaagccaaggcagatcgtgctcgtttaccgggcttgttacaaccattgcctgttcccacatcgttatggcaaatgattactatggatttcattgaagctcttccttgttcccagtcatatacctgcatcatggtctttgtggatgccttcaccaagtatactcattttctgcccctgaaacaccaatgagcaatatctggcctggtgacagtaagataaactaagctgccaacaagatgtctatatcaagatggatcctccaaaggtgtcccatcagtcggacgaagagataagtgaagatccataggcgtggcaacagtgtgagtatcactaagaccagaacgatcaaggaggtcttgtatgtacttgga

SEQ ID NO: 146503 - DNA, 281 bp, Zea Mays
attaaactcagatgagcattggaggttaaagtgacatgcactcatccaatggctagttttcaccattccaaagctatggtgctactattccaaagctccaatgctcacaacaagtgtgtaacatctacttcaaacggatagtgtatgcgacatcatctgaaagccatgatgatacaatttccaaatctttggtgtggtgcattatgcagaaatgtagtttgtgcacaacaactagttttggatttcgtggatatatgtacaccattgcttgtcaacttggc

SEQ ID NO: 146504 - DNA, 1388 bp, Zea Mays
cttattaaacttggtagagttaagtgagagtttatgcttattactctttgtgatcggcacaagtgagagtttctactaattactcttttatgatcggcatcacctagacggttcgatggcaattggagtgtggtgatcattgggagagtatgtggatgacctgtctcaggacttatacacttttgtgagcgggtcaccgtacagagtgacgaagaaccagctcatagagagcgattgatccttgcacataccaagaggaagcgacacacttgtgagggtgctccaacgaggattagtgaagagtgtcgactctctaagacatcagaataaatattgaggagtcttctaacccttacattggtttgaagcaagcaccttgcacgtggtaccaacggtttgccacctacattcgatgcctcggctttgtctccgccagctccgacaccttcctctgtctacaaggagggggccaacacagcctacctcctactatacatagatgacattgtcctcaacctcctcgacaactcttcttcagcacatcatgggtcgtctacactcagaattcgccatgattgaccttggcgccttgcaccactttatcaacatctctatcccacgctcatccgattgtctattactgtctcaacaatggtatgtacattatcttcttcaacgtgtaggcatggtcgagtgtcactccaccacgacaactataaacactcgagacaaactttctacttcggatggtgctctcgttgtcgatgcctccgactactagagtctcgtcaatgcccttcagtacatgatggttgatgttgcccaccccaacttgacatacgcggttcagcaagtttgtctcttcatgtatgatccctgtgagtctaacctcggtctgattaagcgaattctccaatgtgtgaacgacactctccttcattctccacattggcaccagctccatcgactggttgacaacatacttggatgttgactgggcaagatgcctagactccagaaggtctacctctagatactgcggctacctaggtgagaactgggtctcctaggctgtccaagcgacataccactatctcccgctcctaaggaatagtactgtgtcatcgcccacgctatggttgagtgttgttggctcctacagcttttctaggagcctcacgtcccacttgctagtgcgaccattgtctattgtcacaatgtcaatgttgtctacatgacagccaatctggttcatcactgatgcaccaagcacatcgagattgacatacacttttttcgcaagaaggtggctttaggacaagtatgggtgctttgcgtcttatctttgcactagtgcatggacatcatgaccaagggcttgcctatac

SEQ ID NO: 146505 - DNA, 1140 bp, Zea Mays
cgtccatcatcatcaatgatcttagaaataaacttcttacccttacggaacctagcctgagcatgaaataaggctgtgtttgcatctccatccttgatccagctaattcgggatctcaatctggcaatagttcgcctaagagaggagagagccaaacaatgcttcttgagtgtatttttgagccagtcttcattttcagcaagagctctgctgtcctgagctatttcaagttgatgaaggacctccttggccaaccaccactgactctgtacgtgccccaccttttttttactccaactcagaagaccttcggcagtggccttaagcttcaaggataaagtcactaagggacagggccctgtcaggaccaaggaccacccagtagcaactacatcctgaaaaccacccaacttgggccagaactcttcaaaatggaatctccttttaccatgtttaaaatcttgcaaccccaatacaagggggcaatggtctgaatcttgtgtggctgagttttgcaggagacagttaggaaaaagttcttcccaatccacagaacaaaagaccctgtccaatctaactagtgtgggattagcctgtccattagaccaagtaatcttcttaccaatcagcgggacttctttgagagcaagatcattaatccatctccaaaatctacccatcatagcccggtctaaatttgaattgttcttgtcttcatcttgaaaaatcaagttgaaatctccaaccaccacccagggtccagcacattctgccctgacctccctgagttccataaaaaactgaactttagcttcatttccttgagggtcgtaaacacatgtaagccaccaaggggaaccttgagctgaaccaaactgaactgatactgaatgcgagtcaattctgtataggccttgatagctgagacgatcacgccaagcaactaaaattccgccactggcacccaccgaaggcatgacaacgaaattcttgaaatcagggcccaacattcgtgtaaccagaaaacgagaaacctcagtcattttagtctcctgtaagcaaacgacatcacatcttaaggagccagctaaacccctaacaacatcctgacgagcgccggcatttaaacctgtaacaccc

SEQ ID NO: 146506 - DNA, 540 bp, Zea Mays
cacgggcacttcctcaacagcaggagctgaaggaccagcatcccgatccaagctagatactcgccgaagacgtctctttttctttttctgctcatcagcaggagaatcaagttgattggctcgacaagggcgcttcgggcgaacactgacaggcctctgaatatccaaggctttaccagcttccgggagagacgccaccaccaatgtcccaccaggagcggcatcagaagaatcctcggctaacatatcaagcatggcacttatctctgcatcactggaatccaaaggcacctcaaaatgaacctgccgttcatcatcaggaatttcttcaagcgaagcaaccaaagcactaacttcttcggcagagggtcgcactctaaggcccaaaccgccatcgccagcacgaggacttgacacgaaatgggtaaaggccttggaaggaggcaagttccaggccgagtaggcaacaggggcaccaacatttgacaccttgcccctaagtatcatttcaagccgactcaccaagtccacagcaggaat

SEQ ID NO: 146507 - DNA, 515 bp, Zea Mays
ccagattgtgttgttaataggaaggaaattcactagtccatagagatgaaggaccacggtaatattttctatatgttatatgttagctagttagaatgatgtgaaatgttttgggtattgcgtaagtgttactttgtgccaggtcatgtcttggatgggtcatactctgtacttgttgatagttgaggatcaatttgtttctggttttccactacccccttctgctattaaagaaaaactttggacactggcaatcttgtaaaatgcaatgtgggccactattgcacaacaacgacaacaagagactttagttgagttggttaggtagcttgagtaggtcctgaatttgactatatgtgggagtgaattttcagactagggttaaaaaatctcttcgtatgtctaggtctaaggtctggctttagttatagtcattctcacatagggctatcgtgccgctgtgtatgggtggggtaggggttcaaaggttttctcaacatatatgagaagttatt

SEQ ID NO: 146508 - DNA, 875 bp, Zea Mays
cggctctcggccataaactacccgaaagggggaacatttgagggcggtgtggtacgaagtgttgtaacaaaattctgcccatggtaaccactgtaaccaagttcttggacggtcgcctgctaggcagcgaagatacatgataatgatccgattgaccacttccgcctggcatcagattgagggtgaaaggcagaactcatgtgtagcttgacccctgctaagcgaaacaactcggtccaaaaagcactagtgaaaaccgtgtcccgatcactgacaatggaacaaggaaaaccatgaagccggtcaatgccatcaaagaaggccttggcgactgaggctgctgtgtatgggtggcctaatggaatgaaatgcgccattttggaaaatcggtccaccactgtgagaattactgatttaccgcccaccttggaaaaaccttccacaaaatccatggagatatcactccaaatgcctgttggaattggtaatggttgcagcagcccgacagggtgcaagtggactgacttgttgcgttgacatactgagcagcccttcacatattctctgattcgttggagggcatgagcattataaaatgtagcccgccaacggtgcaccgtcttctctacaccttcatgcgccccatcatgggcatcggccaagaggagtggccacatagatgatgcatctggtacgaagatcttgcctttaaatagcagcaacccatctacttcagtccattcctctttggctgttcctactgccagctgagcacggatagcctgcacttgggaattagtggccgcctcatctcgcaagttgtcaaacagtgagaatattgggagtgatatgctgtgcacagtgcccattggttc

SEQ ID NO: 146509 - DNA, 661 bp, Zea Mays
ttgcattaaatattagcataaatttcataaatattactcccttcgttttttttccatttatcgcggtttagtttaaaactgaagtactgaactagcggtcgataacggaggtagtatattgttatttactatttatcaaccaatcatggctaacgatagcgtctgattatgaaatggagcaagggtatgtgtcttctgtattccatcttccattgttcgtcatagcaaaattgacattatatagtactctgacatacgaatctaactggaactgtcaaatttgtccattttaaaagtttatagcttttgttccttctaggcatatgatcctggcaatattgtgaacgaggtagtacagtacaggttcttggcagttaagccaaaaatcaaggagtttgaatcatagagagcgcggtcaccttgataaaaggggaaggaaggcggttttcggaagaagaaacagagagcgtactgtttttggcaaaaaagaactcttgattaaaaaaattcctggtttactgaacatagtgccaccccttcttgattaagcaaacatttaagcgtcatttctgctcccatcttcctaaaatactaattaaaatcgatatcaccgtgtgttcgttcaaaggcattgcaacgatggcgtatcggcgttatgtat

SEQ ID NO: 146510 - DNA, 332 bp, Zea Mays
aaaataataaaatatacatactaactacaacactcacgtccttcctacttaaccgaatttaactcatacatcaggcaacaacaccctaagtataagttctatactttccctaagctatagcctatatcaaacaattaacgaaaattaggctcacgtttccaagataattaaactcaagactacagatagaaatcatttatagctttctaacccactacgctaattagctcatacagtacactagacaaacaacagtatcacgtatgactagactgaccacatcagatacgaagaaccaatttaattacacgctgcacaacttatatcttgaa

SEQ ID NO: 146511 - DNA, 835 bp, Zea Mays
gatttcttttcgaaatccagcagaataatttattgagatacggctatctgaatttccccttgttgtccaattgccgtatcagggatgttgagtcaaaatcagaagtgcggtattgaatttgtagctcataaatgttcatgtgtatctgcattttagctttggttagttttgttgcaagggtaggagcatagtgattcatttcatgtgttttgtacttttgtttagaataaactgcatttatagtaatagtgttcagtcaagtcatctagttgatcctagtcaccatgggactgaccaggcgactagtcgctattagtcgtcgaagattggccctagtcgtcctatacatatcaagactaacatacaaatcaggcatgacggacggtagctctagggtggtggccggtgggtgcatgtagggttgcaagttgggctgaaaaacatgagtccaagtggcctaagcccatgtcctaagctgcccagcaattccattatgtttctggtcgatgaccagaaaattaattagcctaatcgagtcatagcccctaatcgagtccagaatactggctaggacgattaatcgcaattaaccagatgatttgataacactggtagtgttatctatttgcatatataatttggtgagtacaatgtacaattaccttgtgattctagtcacagacgtgattgtattaatctctgctgggaagtgcctcacgatgtatttctggctaaattaatcaagctatcttaaaacaagaaaatagtaacaggtcataagacaatttacaagcttggatatccttaattttaagttgaagaaatttcaaaggtt

SEQ ID NO: 146512 - DNA, 1174 bp, Zea Mays
cctcggcccatctagtcctctatccgcgcggctctgttcacgtgcgaaacacgcccggtgtgactgccatgcgggcccgtgtgccaggtcgtctccctcctcacgattaccccgctagaatcgcgcgcagctaaaaaaaatcctccgctcgaatcgcggagtccgttgtagctaaagggcaaaatccaggcgggctggagaccctcggctcgcggtttgttaggctcggacaattaggggataaataccaggggggtcatcatcgctgttatcttgccatggccagttctctccttcgcccagccgcgcgtcaatttgtcctggtgttctctggtgaggacatcctcaaggatccgaacacatactcgcccctttccctctgttgacttggccgatgatgcactgacgtcctcctgggcctcgccctctctgtactctctccgtctctcttgccgctccgccgtccacagccgtgggggttgatgcagatgaccttcacggggcagcgcagcaactagcccaactccgccgggcggattgcaacaaatcgtgctcgcgggtcggggtttaaaactccacgtcctcgcgctccccagcttaccgaagatcaccgccatcttggggaggaatcgaccgtgcgccaggatcgcgggagcttcgccgctggcatcgaatccgtcccctacaacgggcagagctttgcggttggtcctggaagtgttgtcgggagccaaagatcgcgtccgagctccgtctggttcctgctgggggttgttattccggagttgctcgccgtcatacaaattccgccatgaatccgccgtgcgccgtggccagtcccctccatgctcccagagttggtaagaaactccccttcgagtccgcgatcacctctgctttgcgtagcgttcgtttaattggagtttgggcattggatttgtgggacggtgtcacaccagccatggcgccgccgctcagccttggggcgccgccgccctgtgtcctggtgtgggggaaagtggaagaacctggcccatcgacctattaccggacggtggtgatcaagctagaacgtactccttcaggcggtgaatcccaaccgttggcgcgtgatcagacgggagatagtgcatcatcggcatggatgattgttaaccgtggatctcggatccag

SEQ ID NO: 146513 - DNA, 398 bp, Zea Mays
cccagggacaaatggaaggatggaacttctgcttgccatgcccgtgtaatcttcgtgcgccctgacacccgagatctcggcgtgcagggggaagcttctcgtataagggatgagtacagtgcaccgcgtagcacgggcacactgtttcaacaatggactggacatgtgcgctgtctgcagggtggccctggcgccgcctgccagtggaaaggataggacgcaataaatgccatgggggcacatcatctgtcagaagggtggacaggcggcgtgtcctctccgcaataaatgcggaggccacgcggctcagagcccttacgtcacgctccgccggctggcctacgtcatggacaataagccatgttgctgctttagacccttgaccgagcggggggcgg

SEQ ID NO: 146514 - DNA, 321 bp, Zea Mays
ctgaatcgaaccaaaagattttataccatattggtttgaaatcaaaacaatatatcaagttttgtgaatggctgtatagtatagagatgtgttattaaaattaaatagagcatcaatcatgttacatttattttctttcttctctaccaataatcaagtatgtaccaacatcaatttaagcctcactttaaatacatcgacaactatactggctacaaaagaacagagctgcttttgtttgaatagctagaggtagcagaaatggattgcaagacaataattttaagtaattcgatgtatacatgtgaagatgcatatttc

SEQ ID NO: 146515 - DNA, 529 bp, Zea Mays
ccatcttggtacaacaaatatggtggctgagtttcgtattcaaaatcgcgtgataggtccttcaccaaattatctgtcaagaagacacaattaaacttttcaattaggaatctggtacaacgatcaacttgaatccacatgtatcagtttaacagcacaatatgaaaattgaagaagacagaaaaaattccgagacattaagcattaacccacataattaaataccataatagcagaccttcatgtatggaatagagctgtttaatatttagttctgaaaaaatctaagcagtagcagcagcgaggccgagcgtcattgaaattgatgattgttgattgcacactataggtctgttgtgtatagcacatgcaaacagatcatcgtgaactaagtctaattgctacactctgatcccaaatatgagtgaatagccatcttacagtccaatcaaatagaggtacatcagcaaatccaatgcaattattttatgtccactttattgtgttttccctatctaaacacacccaa

SEQ ID NO: 146516 - DNA, 445 bp, Zea Mays
tgtgcaggctgggcgaccgcacagggcccccaaagttgaagggtccccaagttaatctaaaacgccaaggtagacattcagcagcttctaattttctaggtcatcagtttatcacctcccaccacggcgtcattctaacttccagttccacaatagccggcgggactgcaagagccgagagcgcgcggccaacgccggaggccagagagactgcgggagcgggagcgcgccatcgacccgtcgtgcccagtgcgtcagtgcccaccggccaccgccaaggcgacgtcggccagccgccagccgtagagcagagtacgtaacgtacgcattgataattctatttttcagcaattctattgtctgctcgtctacttgtctagttgtcttatcctattttttaataattaatgatgtttttcaagtaaaaattatgtagcaggtacaa

SEQ ID NO: 146517 - DNA, 1380 bp, Zea Mays
ataatataaaagaaatatagtaaattccaaagtggaatttgagatctaaaagaaatcttagaatggagaaaagggaaagaaaaaatgagaaaggctatgaaaatataaataataaatatataactatatttctaaaagtgatatttctaaacttcacaatatgatgtggcgcaagtttgagttcaaattcgaaattcaaaatgaacttgtaaatgaagaaaagaaattatagcataaaacagaaaataatagaaggctttatgggccaactccacccaattcggcccagttttccccatgctcagcccctctgctcacctcagatcaacgacgtgtatcaccagatcgcaacaaactgcactggagatcccgaaatcggctgcgtcgatctcgctcgcccaatcacccgccgccgtgaaccgcggactcggccccgcgcgatcgtggagctctgggctatataagtgccgggcgccacaaacaccagcttgtgcagggaggcaaacgaagtgggagagaatgtcgtggtgaccgccgtcggtgagtgccatccgtgcggccggtctgtggtcgacgtagagttaggggtcatcgccggatcgaggtgatgctagatgcagagttgcgggatccagagatcaatcgcgtcgtccctaacccccgtcggtgtcggggatccaccgcggtgccgcatgaactcgtgggcaggaccactgctaccaccctgtacggtatgggctccatcgttagctttgttgatctccccgcaacgttttggtccgttcttcgatgagctttggtcaccggatgtcgggcggtgtcgcctcggtgcgctccaaggagcggattccggccacgccgccactcaacttggtctggcagcgagtgggaagaagacgatgttctgaccgttgatgcgtgatggatgacccagattagtttaagcgtaccgctttaggcgattggatctgtgctgtcgatcggatgatgggtggccacgaagtgattctaaagttttaaatccgggccgtgcattgcggatcgggtggcgcggatccgagcaagcctaactcttcacgcgatataatctgagtcgtccagatctaatccaatggccgaaatcagcccataccccttcgccgtgaccattttctaaaagagcccttggaacctttataaatcaacccgcggcccttccacctttaagattcataacaagcgggtcctgtaatctttcacttcagaccctgttttctttactaattatacccgagttcattttaattcataatgaatgaataaaaccctggaaactgatttttggaataaaaataattcctagaactttgaaaatccataacttgctcattttaagtccgt

SEQ ID NO: 146518 - DNA, 340 bp, Zea Mays
ccaaaactgagaagaatatgaagctgggcgagtctgttaaggaccttcagaataagtgtgtagattttgcgactcgatgtgctgaccggcttaaggggatattcaactcagttggagctgcttctgaaaagtttaccccttcgaccgaagacatccctggagcctttaatcatattgaaaacgaagttgaatccctcgacgaagttataagcgagcacggaaatttctgtgccctggtagcttctcgaggcgcagctgctgcttttatgaaggttggatgcactcacgccaagatggtcaacaaaccaattttcaatctttcgacgtcagttgatatccc

SEQ ID NO: 146519 - DNA, 1168 bp, Zea Mays
gtacagtagtagtttagggatctcgctaggctccggagcgcgcttgattggggaatcgtgtattggtaccgctggccctgcgtccgtcgtatcgggtacgatctggatccactgtgcgagcaccgacgacgcggtagcttttgtagaggagatgcggctgctttgttcggaacccagctgcgcgtttgtgacttctgatacctctccgagttgagcttacgaactgggagcaatcgaattgactggttcagggtttctgcgagggttttgatattgtgctggtttcatatttcgttggttgaaccttagttcggattgctgcaagttgtcaatctcggtgctctcttcgcgagtctcaacttttttcaagcaatgaatattctgtggttggtggttacttggttcctgactcagatagtaccatttatggctatgggttggacattgctgttctgcaatttgcaaaggtccatccttttgtttttgttcattgcatgctagtatttgcacaaaacataagataaagaaaaggaacttctagctggctgtggtgagaatctggattcgttccctgggactctgtaaacttactgccttgtgggtttatatatagcttgcctcacattcgttgccttcttggattgaccttgatctgggaaaggtggtctgtttgttgtccatcttttataaagtgaactttttccatccattcaacatttcttataaaatcctggacttgattgtatccttgtttactctgaggtggacgttgctttttgtaatatgttatgttttcttctaatatatagcagtacctttaaacaatgtccgtgattaaatgggacatttattttcttcttagttatgaatgaagtactgaatgctaaaatgcaaactggtccatgagccgtccaataaatgagtggaagggttaattctgttaaatgattaggcagagttcattccatattcgttcaacgcttgtgatcatagttctcatgtctgcactgaaatgtgggttgtcctagctattggtcaatttactctttatctgcaaatacatataattttctgtcacagcatgatctttaatcatgccattctgaataagtaccttattggcttattcctactttatcaagtgttttttatcactttatgtgaaaac

SEQ ID NO: 146520 - DNA, 641 bp, Zea Mays
gtaagcggttccatcaatgcatactacgcaatcaacctttcccttaagctgccctaataatgtgaagagagcagggtaatcgtttatcataacaaaaataatcgctctcagtgtgaatgaatgtttgcggcactcgtccaatatttgaacacatgtttctcacaatattttcatgtctcacattaaaggatccaaaaatacatccatgtcaactccaggttgtgtaggttcagaaataaggattgttagcaaaaggtactttgcttctacatcaaccatggaggaaggttgtagatgttgatcatcggccatatgttgtgcttgacgcttctctcagcaaatggattcattatgtcattacttagtgtgaactaatatttcttggtttgtcaacaaagtctcggtggttgtcattgaaatcttgccaccacttgccattggctagatgtcgaagcttcccatattttttgtgctcatcagaagcatgccagctcataagtttgacatccttagttaacaaacacctcaaccgattgatgacagaaaggtatcacatcactaaagcagaaatctttttgtacacataatagtatacttcttcttttcctttgtcgtgggttttaaactttgttgggtctttt

SEQ ID NO: 146521 - DNA, 595 bp, Zea Mays
aaacatctcagcgtctggtccactcgagctcggtcacggctaagcatgccgtactttcccccagccgtcggtcgctcggataaccctcaccgccgtcgtgctgtcaccgttgcgcaccacgtgccttagcgctggctctcgtcacgatgaatcatgcggtgcatgtccggtgatcaccggagttactgccacaccataggacacgtaaccgcgcgccaaggttcctctccagctccggccgccagcacggcccgaccgaattgatcaccaccgcccgtcctccctataaattgagcctgtgcctagctccgcaaggtcatcagctacccagccaccaagaattgctagcaatcgatcaccagtgtgcccggattccttgtttcccccaaatcctttctccgccaccgtgaagatccgttcgccgcgaccagccctttaccggtcagttcatccctcactctcacttgttcgagcactcttgacgctctgtgatgcttgacgaaccccaattcgtacggagtagctttagatcaccgggaacacgtaccaattgtcttcatcgtccgcggtttacgtgaacagagctcgagagctt

SEQ ID NO: 146522 - DNA, 469 bp, Zea Mays
tgggcatgaatattttagataagagagcagtttttgtgcccgggtggctggcgccctggatatcaggaccatccatttccatcagcctgatcaaccttaggcagagaggaaccagaaccaatgctccagttgttccgtaaaaactccatagcacaattcaatattttttatgatgcggaataaaatgactactcaagtgtctacaccattgcagaattttgttttttcactttcagatacatcatggattacatttttttcgtggtcaatgttccatcttctataaatagcactgaaatgttccatctgaggtagcattccaataaatcagtcatcatagaaattttggagagcttcagaaaccataatgaaacacattccagtgcgtggtgagaaattttaaccactgcacggtagaaaattttcacagcgtgaaaacttcagttaaaacgaatcatagaaaacacaa

SEQ ID NO: 146523 - DNA, 543 bp, Zea Mays
ggcatccgatggcttccagctttcttttaatcgtgcgcagccaatcgtcagcatcgaggggattgctagatctggcaaacgtgggaggcttgagcctcaggaaatctcccatcctgtcttgcggtctcccaccattcgggcgttgattttccagacttcgagtgaggacctcgatgagtcgggtttggttggctagaacttgggctaaatctaagggtagttctggaggtgcggggaggtgggtctcactttcctctctaccggcttctctttcagctctcagggggaaccctgctccaatccggaggcggtaggcgtggttttatccgaagccatctgccagggggagagagtcactattatgcacatgccaattgttttcaaccaagttattttattcattacaccaatacattacaagcatacggctactacaagtcgtactacacgtgagcgttctctgaggtacaaccgaactctttttctaaagtgtccccaaattccttgagaaggtcatcaaggctagctagggacatatccttg

SEQ ID NO: 146524 - DNA, 479 bp, Zea Mays
caaacgaggaccggatgcaaaggccaccatattttagcactagaataataggcacctcaactgctcaagaaaaggtcgacggcacctttggactcaactgtttgtctatggcgcggttcaggttgggtggaggagggggaaaaaatcctttgtggccgtgtgattcgttgagattgtcattgtcgccggtccgcgaaccaaacaccaaccacatgcgatgcgatgcaagaccacaatgattaggggatgtttagcccactgattatagagcaatagcgaaagtccgcagcctcttgcctgaatctctcccttcaccgcaacacggagacttgtcaggtgcatgcataggcatagccatatatataggctcccgcaacaaggagagtagatgggaatattcggagggttccgcgccggcagattctcggttcagctcatcatcattctgctgcctgtatagtttactttacttgtacggc

SEQ ID NO: 146525 - DNA, 416 bp, Zea Mays
tagagttcaatccatgtgaatctgatagagttcagtccattttacagtctgtttcactgatagagttcagtccatgtgaatctgaaagagttcaatccatttcactgacccagtccaaagttcacagtcagtggccaagttacatggacatctgttcatgtaactgaaaatgaactgaaaatctgggactgggtcagtgcagaaaataaccatgtaacttggtcatgcatggaatgcgcaaggaatgtggtgtcttacatgaagttgttggccatggactgaaatgaagctgttgggcatatttcagtcccagattcttcacatgggttgtttcctcctgaactgatgaactgaaaatctgggaccgcaatgataatgaactggaaatctgggactgggtcagtgcagaaaatgat

SEQ ID NO: 146526 - DNA, 537 bp, Zea Mays
ctcatttgacacacgcagcatcaagcgatcagagagctataaatgtgttagccatgcatagaaatccatgggccctcttgatcatggcacatgagagtcttgttaggttagtatggcctaggatgatttagctcaaagcaactagggttggggccaacttggtctgagtgagtgggttagttctcgcgtggatcaatttaaggttggagggcgacctgcacaagataactatttctatgtttgcttgaggcgaccgagatcatggtcgaactagtaaggatgactaggtcaatgccgctcgaggcgacctgggttggtattagacttggtcggggtgaccgtggttggggccactcgaggcaactaaggtcggggcaactaggtcggggttgctatgatcaggtcgacttcttagggatgacaaggtcggagccaacttggtcaggactgatttgattggggtgaccaggtaagggacgacttggttggaatgaccatatcatggctgactagactatctttggtctggatcaagtt

SEQ ID NO: 146527 - DNA, 459 bp, Zea Mays
agcagaaggcagaaggggaaggtaggcgacctcaccagtgtagcgtagagacctacccatgccaaggcgtcaactatgatggaggaagaaagccgacgatgaagtcctcgaacaggtggtggtggtgtcgcggtccgtgccgactgcggctccacaacgaaggacttgctctgatgatcctcacaccgagcacgagtctgcagcgagaccacacatgtgccggcgacgtccagagcaacaccacgaggatggaatggctacatagagaaaatttaccggtggcggctccaggtagttccttgcctctctctcctatctctcgcgttccccggcagctgcacgcataccactatcgtggggcacagcaacatgacgcataggagcatccccatctgtggctcgacgtgaagtccaccccgccggccagacgctctgccccaggtcacaatcgcggccggg

SEQ ID NO: 146528 - DNA, 404 bp, Zea Mays
gcccatctcaccagcaaaaccacccacgtcgcagtcctgcttttcccctccccattctcctcgcctagaaccccgcatgccacttggagatcgaaccacctggagcatcgtccgtcggtgtagccgcccgcccgcctgctgctggccgagcctcggttccgacaagccgctcgccagcttaggctccatcgagcgaccttccatctgcgccactatcgtctagtcctggctatggcgagcagccatcgctgccagccatggtcgtcggcgagtccgctggctgtctggagaccggcccctcatccctggtatgcgcaaggaagactgagaaggacgtcgtggagttacagccatggaagagaaaggtaattgctttttgtttatgtcgtgcgtgagatctggga

SEQ ID NO: 146529 - DNA, 1120 bp, Zea Mays
ccagaatctgcataccactcagggcccggcggagtcagggtcatggtgttgaaggagtgcgtcagggagtcctagttccaggacccgccgtgagtgggattccagggcgccgctggatacgccggcgtgggcacctagaacactggtggtgcaactcccccgtaggtgctgttgtaggtgctgggagagccactgaagccaccatagtgtggtacggcgtggaacgcaggtggtggtgttgggcgcccggatgggtcgtatggccacatgcgcacggtgccggcccagggatgggcgaacgacgggtgcatgcctggtgaagaggttccctgcccaccatgtgccgcaccagcgtgaggtgcaggggggcgccgccggtgttggttgagtggccaccacgtccattgcgtccgcgacgacggccgttgcgttggccaccgatgggtgcattaggtcgcgcaggggtgcaccgggtaccgctgggcgcggcgccgcagcgacaagggtagcaggcggggacagagggcgtgcgtcgatctccagttcctccatcaggaggtgtgtccgggcttccgcgaacatcgggaacggccggtgcatctttagtatggacaccatgtggcggaacttgccgctgaggccgcggaggagcgtgagcaccatctggcgatcgccaatggggtcgccgaacttggcgagggacgctgccatggactcgaggcggcgacaatagtcgttgatgctcagagattcctgacgaaaggtgcggaactacgtctcgaggagaagagcgcgggactccttctggccgaggaattcatcctcgaggtagcaccatgcatggcgcgctggacctgggcgcatcatcaggaactgttgtaagtcgccggagacggtgccgtaaatccatgtcagcacgtagcagtccgcctggacccaggccaagcgcgtggggaaggattcgtcgtcgaggacatggcgtgctaaggcatatttgccaagcacggtgaggaagatgccacgccacttggtgtaggtgtccgtggccttgtcgaggacgacggggatgagggccttgacgttgacgacggcggtggcctgcgcctagagagattcgtgg

SEQ ID NO: 146530 - DNA, 356 bp, Zea Mays
attgacttcaactaattgaggttctaacttctttttacttaacttttatgttggatcaacttcagtatttgtatgtgaatattattgtttgttcacacatgttatatgtacatagtgtacccaaatcaatcagagttcgtgctgcttaattgttttcaacatttttgcatgttcacatacaagtgtacatatacctggactagtatgcagtatcactttttttagtaatactaactgattggtattatgatagtactgacttcatgcacaataattgaccccttattcatttgttaggacactttgtatttgcttaattagccaatccacaaataaatttgaaataatagtccacc

SEQ ID NO: 146531 - DNA, 1171 bp, Zea Mays
atgagctttacgagcatacagagctgctaaaacaacacttgaattggacagagtcttacaagagggggttggccacggagcgcggaggacttaggcttgccggtgacagaggaaaggggaaaactggtgttgcggcggctctgggtgaaattgggggtggaaattaaggctacacggccataagaaactatagcttcaccgtgcagactcaatttgggagaagggggcagagacagcgcgaattttggattgcgatcagctcactggtgaagaggtaaacacctcgccgtggaccaccgtgctatttatagccccggcgacccgacagacgatcttcggccacggatagcatcacaagcgcatgcataccatgtcggaaagagatacagtgagggagattgaggcatgggcgacaccgcggcaaaatttactggtcacggtggccgccggtgaagactccgggtgggcttgggagatggcgccacgtacgggttatccctccccggcgttatccactccataccgcgcacgaatcaggacggcggtggcatgaatctacgcgcggagaggtcgccggcggtgagattgccgcgctcgcggtctgatccacttcagttactgtaccatggcgtccttcattcagttggcctgacatcccaagtttatgtttaaatttctcttaattttttgtggcaacatacctagagttctacagcaaagttgtagtccaatataccatcttcatcctttatagtatcccaagacaaattcttactggattagccacaatttgtctccaaaggtgatccaatgccactgatcatataatcttcagattgttttagtctgacagcccatctttgggcttacttatctccaatttcttctcaataactatgcttacactcttaagcaaagttgttctcctttcatagagctacaaagttgatgtggtgccctaaggtgaattctcaatattttgaaagttatagagctccaaagtggagtcaatatcattgatcttcagacttaacactagaacacaaaggggtcctttttgcaaataggtccaaaattcaaggtttagcttgcaaattcacatatttgtgaatcatttgacttagggtaccttaatgtcaaggtttttgcacttgagcccaaaagtggacta

SEQ ID NO: 146532 - DNA, 926 bp, Zea Mays
aaaaaaagacaggccgcgcagttaccgcgcgcgggcgcatacggtaaaatctaattcaaaggcccgaaccgattttttttcctttatcagtggcggggttcagtcggcaggacggggggcagggaaatgttgctatacttggcaaaacagtttggataaccaggcctattaatggacggggaagcaagcggaagcgcagcaggaggctggcgattaccgcagaggatcctaatcccaaggattggaattccaatgaagaggcagcggtaaaacctccccccgcagctttttttgccatttgggttcgagactccggctcccgcagcgccagcatatccggatggattagttgctgctgcatgaaagtaggggggaaatgcatggctgcagctacaagacaaagctacggagagaaagaagaagggtttgcatgccccgggtggggggatttgaattttcgaccctcctcctctttaactcccgaaaatttaaaaaggaaaaagttttgccatgcatgcatatatattttataaaaaaactaaaagcatgtaatggctagctcgttgaggaaacagttgcatgcaggtcgcgatgaacgcccgggtactaattccaaaaaaaaaatgcaagggaggtcggagtagataatgttccgtaacgagaatttttactgccttgtccttgtttgttagtactacgtacatacacaggatttaataccccggtcaggcaggaaggagcagacgaattatattaattatagcgatgaagaagtagcactgctccggagtcctggagcgggtgcgaaaatcatggttgggattgctgttacagtggcgcagattaggactcaatcagcgcctcctgctggcttataaaccctaatcaagggagtggcatgcatgcatgcatgcatgggtggaaaa

SEQ ID NO: 146533 - DNA, 432 bp, Zea Mays
aatgtgtgactactacattacacaaaaaaaggtggtatggctgctaacttttcaactactttcaccactactctccccatgatggaaaatgcacacatgaagtcaaattcaagcacaagtcgaagcatcattcttcagtgttaaactgacagggaacacttctctggaagaaataactggtgcaaagccagcatggcctctataagaaagctgaatcgcagaccctactgactactgttacaccattcacatcatcttcacagctttcccattgttcatatgcattcgtgtatggcagtgtgcatttacatttgacaaaagaaaagaaaaataataggaaacaccaggattatcatacaggctgatctattagtcaagtgccatgatttcactgcagaacatataagatttgccgataaagcaaaacaattt

SEQ ID NO: 146534 - DNA, 277 bp, Zea Mays
cagcgtcctgatcaaagctggatactcgccggaggcgtcttcttttcttcttctgctcgtcagcagaaggatcaggctgattggctcggcaagggcgcctcgggcgagcactaacaggtttctgagcatccaaagtcgtatcaacctctgggaggggcaccactgccaacgccccagcaggagcagcatcggaagaatcttcagctagcaaatcaagcatagcacttatatctgcatcactagggttcagaggcacctcaaaatgaacctgtcgttc

SEQ ID NO: 146535 - DNA, 314 bp, Zea Mays
atgtgcggccattggttggacgtttcatcagctggatatgaagaatgcatttcttcatggtgacctgcaggaagaggtctatatggaaattccacctgggtttgcaaatgaacagacagttgggaaagtgtgtagacttaagaagtcactctggtctgaaatagtcaccacatgcatggtttgatatattcaggcgagcagtatgtgatatgggctattatcaatgcaatggagatcacacggtcttctacaaacatcagggttcttgtatcactattctggttgtttatgttgatgatatagtgatcactgga

SEQ ID NO: 146536 - DNA, 387 bp, Zea Mays
ggaggtggcggttgtggactacggggaggaaggcgacgtggaagtggacgaccgcgccgagcgcttcatcgagcggttctaccaggagatgaggctgcagaggcagcgctctctggtccagcgcctgctctagagacattcgtccgttgctgctgcttcaattccttggtcgatcgggcagaaccagtcgtggttgtcgctgctatcttagctgcacttcggttaaatctctccgtatcttgcatttgcgtcgttccatgtttttttgcttctcatgtggcaattctcttgtctgtggaaggagacattcgtctcccctgctgttgtactgttacttctagtccttacctatataatccatccttgtgttgcaatgttcattttttt

SEQ ID NO: 146537 - DNA, 276 bp, Zea Mays
cttcagcttcatgcggttctgggctgctgcaagctgctcccgcaacatcaaggtgaactgagccctttccgttaacaactgtgccacatcaacgatagcatcagatgggatatgaggtgctgctgcaaacggagggtcataaccgtacaacactttgaaaggagaacaagccagggaagtgtggtatgtggtattgtacaaaaattctgctagaggcaaccaattcttccatttagaaggttgagcatggactgcacaccgtaggtacatctccac

SEQ ID NO: 146538 - DNA, 616 bp, Zea Mays
tgggcagtggcttgcgcttcccacccgagccgagtcatccccggcaacatcctcgggggctgggcaagtgtcaacaccatccttgaggaccaagttctctgcagtatccacctctaaggctgatggaccctcagttacttccatgggaccaagatgatccaagtcagtctcctgactctcaagaccgcgttctaaggttgatgaggcatgagatgacctcaacccagcatcgagcacatcagcacaaacctccatcataccatcatctgctggctctgataacagatcctctagaaccatatcctcaagagtctgatcaaaattcgccaggaacaactcttgcagaccaatgagggcagacaaagcaggagaaggaactccactactttcaccactggcgacgtactgccgactgttcttccgagtcagagggacctcatcctcttcctccccgtcgtcctcatcagcaacacagacaacacacccattggggtcagcagcaggtggagcacacccattggggtcagcagcaggtggagcagacccattggggtcagcagctggtggagcaccctcattaaggtcagcgtcagtaagctcaggcacgggaacttcc

SEQ ID NO: 146539 - DNA, 485 bp, Zea Mays
tcagattcagcatccgcggcggtgggtgttcatcagcggcaagcgcggctccgtgggcgtgcagattggagaaatcatttcagcgctacaagttcttcaccacggcgcccgtggctaagccttctgttcagacgcggttcatcttggaggcgatggcggatcaggagcgcggcgcgaaggaggattgggggcggatgatggagacgttggaagcagtgtgtgcgcggctgaaggatgtggagcgcgcacagcaacagttgatggtacgctcagaattggcggccacggtggctgagcgggtagcggccgagcgagtccagatgagccagaagatggaggaaacagagaagttggtggaacaactccgactggaaaacaggagcaaagaacttggagaaacgccaggagcagctgtggaaggggagcaacaccatcagccaccagttcctccattcaacaggccacgacaggaaaggagggaacca

SEQ ID NO: 146540 - DNA, 695 bp, Zea Mays
tgatgagacagcagtaaggagtcacgatgatacgacggggtgctcggatacgtggcataaggccgtgcgacgacggtttaccggcgaacccatcgaactttccaccgcggcatacacagtacggtggccggacttgtttatggctggagttatccacggcgaggatattatgtgacccaaagtgctatccaacttagtcaagcccaaatcgcggcaacagcagcacgaatcgcggcggcaggtcaccggcggtgaggaccgttgcgctggcgatctgatcccctttggtctactgtaccatcgcgaactgccatcagtgcgcctgacagtcaatgtttgggctcaattttctctcaaatttccatggcaacctatccgaggctctgtagcaaatttgtagagctacaaaccagcaacacttcgactataggggttgaactcatttgagcactggatcaaggttgaattcacactcaaagttgaccctgttacactgaaaagctgaatttcagaatgaaaccagcctgacagtcaagctttgagcataattatctccaatattttctcaacaactatgctcacacccttaagcaaagttgttctccttagtttggtctacaattttgatgtggtgacctagggcaaactcttaataatttggaagatgtagagctccaaagttgagccaatatcac

SEQ ID NO: 146541 - DNA, 380 bp, Zea Mays
tctaaccagagtcaaccaaacactctaactttaaaggtacaaactctatagagttttgagtgttgtaatatatacaaagttttggagtaactcttttgctgctctaaaattcttaaaaacaacttagacatggagtttgaaggtatttactcatgactttcacttgttatgagaattgagaaagcaatccaaaattcagagcagagctacttcacctagagttttggagaagagctggagcatagtcatgccaaacacccccttatttcctagctacatcgtctctgagcatgagtgtaatggatatgtttgtttccttgcaaaacaatttggtcttgctggtgtggactttaaagaaccactgaaccactctatagaga

SEQ ID NO: 146542 - DNA, 411 bp, Zea Mays
ctttagagttatctttgaatgcgttcactttgatgaaattaaaagcagaaaacagataatatctatgaccaaatatgacaatgcaacattttttgcagctgtttacttgttgtatgcatgattattgtacgttctatagcgtgacagatgaaagatatgcttgatttgttcatttttcctgctctatgcctgaactataaggattttaatgcatgacagatatcaatattcggaaatttgtctaaatatgacacctaagatgtcattgaaaatatttcctccatgttaagtatcatagacaataatagtaaagtgagcttgaattgtacgttgttttggatatatgatagttgctgttttgtaatgtttgttttctttaacttcattttgtctgctgcatgttgtccttaa

SEQ ID NO: 146543 - DNA, 352 bp, Zea Mays
gtcaaggatgagtgtctgattagatacgcaggaaaatgatcggaagattaaattggtatgccttcgagagatatgagaaaactaaaggcatcaaattcaagaaaaactattaggcattcctttcctaggttggtctgaaaaagcaacaatgtgatcttgatggagacgcaaactgaaatagggatatcagcttgcacaaccgatctaagggatggtttaggatgaaaacatgaccacaaagagagttacaagttaattgtcaagaacacggactcaaaatccttatttgaagtccgaatgcatcttaggtctaataaagagactatctaagcatttgtaggtatgagcttgg

SEQ ID NO: 146544 - DNA, 463 bp, Zea Mays
gagcggagccaatcaaatgatataaaagaagactacaggcgccagggaactcgtagaacttttggctaagatcggtacatgtttttatcagtttaataaatattttttattatgtgctatcagtttaataaatatttattatgactgtgcccgcggttgtacccgcgggtgccataaacccgcgggtagcgggtttggataacatacgctacccgtcgcgggtaacggatgcggatacgggtttaacattaatctcgcgggtacgagtttgtaatctctgtacccgcgggttttaaacccgttgccatccctacgcgaaacagcatgggaaaacaatacacgcgccaccgtgcgaaacaacgcgcgcgaacgacgcgacatacgaatagtactaatttgtgatgaaacgcgtaaaactatatttctaagatgatttagttaatataaataatttgcgtaagat

SEQ ID NO: 146545 - DNA, 510 bp, Zea Mays
caggtatgcgcgataagctttgtaagttgcgaaggggcgcctgttcgaggcgagaacttctggcatgcttcgcacgatcgggttactcggttggctgtgcatatgattgttggccaatagaaaccctgatgtatgactttagctgcaagggccctcggtcctgagtgtgatccgcatgtaccactgtggacttcgcggagaagctctatgccttcggcttcagttatgcatttcagcatgggttggctgattcctttcttataaagctgaccgttgacaatggcgaagtctctgcttctgtgtttaagccttttggcttcattgcgatcgggtgtatggtaatgaccttaaaggtaaagggtgattggagtccgctagtcttcggccattatcaggttgactatccaatgtctatcagcgtcttgcgttatttgcagaccttctgggtttcttacgactggtgtgccgattacacgataaaatacattagagggcaagggtccacccttt

SEQ ID NO: 146546 - DNA, 982 bp, Zea Mays
cccgactggccggagggacggcaacaggtcggtggccgccgacgtcgccctgaactcgccgccgccggacgccaacatcaccgatatcatcgccctgtttgctaaaaagttcaacctcaccgccaaggacgtcgccgtcctctccggtatgtattattatcgttatatggttaaactgaattacataccattatcatctgtctcttttattaatttgcgttgcttacgaaattcttgaggcgcacacacaatcgggaaggcgcggtgctccacggtgtcgccgcggctgtacaacttcggcgggcagaacggcgcgtccgaccccacgctggacgccaactacacggccacccttcgcggccagtgcaagcccggcgacaacgccaccctcgtctacctcgaccctcccacgcccaccaccttcgacgccgactactacaccctcgtcgccggcaacaagggcctgctctccacagacgccgccctcctcctcgacaccaccactagcgcctacgtcgcgagccaggccaacgccaccgcgccggcgaccgagttcttcgccgacttcgccacgtccttcgtcgccatgagcaagctgggcgcgctcacgcaccacaatggagagatcaggcaggtctgctccaaggtcaacccgccgacgtcgtcccagctgtccaacgcagccgccgtccccggtgggttggcagtgtcactcgctctagctgtggtggctctcgtgctaaagctctgagtctgacagctgacagccagcgcctgtttattatgatttgttccagtttggtgattcaatttcaatttcctctgatttgtgtttgcgtggcttcatgtgctgtgttagtttcatccatgatttcgcatggaatttgctttgcaaggtttctcactcgtgaattgcattattgggcaagtccagtcgtgatcgtgatttatcctgaaataaaaggggcaattcggtgtacgc

SEQ ID NO: 146547 - DNA, 563 bp, Zea Mays
cgaccagcagcagggtatgaggtagatacccctactttttgtgtgaatttggacaaagaacataggtctatcgattcttttcaacgtgaggatcggaacagcctgcccattcatatactgtacattttcgcagcaggtttacacagtaaaaaagaacaagaaataattgacggtcaggtcaggtccttgcaggtgtttggaggaaaacaggcctgtgcaaaaagtggtcggtgcatttgatccaatccaacatgaggaagggaagcaaagggaggctgctttttttttctgtagtctacagcaaaaagatgtcgaagagtggtaggcaggcagaggaagacgatggatcaaagcattggtccaggagcgtcacatgtgtcgtgaactggtgaatccagctcagctaaaacaagcagcctttggaggattctaatcctacaggaaagatgcagctgggaagtgctgttcacttgtttgttcatggccgatacgtactctattcagatttgcacctatcatggtgcagcaaatggcaacactatacacggttagcagagcaaatg

SEQ ID NO: 146548 - DNA, 533 bp, Zea Mays
ccgaagcatcgcaatacacatcgaaagatttggtgttgtcaggctgtgctagcacgggtgctgttgtcagatgctgcctcaatgtatgaaaggcattctcacatttctgactccattcgtactttactcccttcttcaacaattcagtcattggcttcgcaatcctggagaaatccggaataaatcgccgataatatcctgccaatcccagaaaactccgaatctgccgtacagtggtaggaagcttccaattcatcacttcttgcactttctcaggatcaactgatatcccatcctgagaaatggtgtgacccaaaaatttaatttccctcagccagaaatcacatttggacaatttagcatataagtgatgatcgcatagtctctgaagtattgtatgcaagtgcttagtatgctcctattcatttcttgaatataccagaatgttatcaatgaaaaccaccacaaacttgtacagttctagcatgaacactgaattcatcaaatacatgaaatatgcctgggcattggtc

SEQ ID NO: 146549 - DNA, 429 bp, Zea Mays
cggtgtgaatcaaacaacccaattttcattagaagtaaatctagaacaccagtactagctgaaagcgtctgaaacacaaaattcacgtgtctcgactctcgagcaacatcgctctcttaaattccgcgagaatataacacgattttcttaaaactttccaaacttaccctaacatgtcaggcggtcagcttcacctcactaggaatttctgctgttgccgtttgtttttcctcttttacgtcctgtccaacacgtacaagtgaacacctctaaaccctagtgccctgtaccgaactacggaatgcagctcagctgcaggcttcgttcatggaagtctagacaaaatttaatgccttccatcaaacattccggagaaattctaggatccgagcgaacgaaatctggcggcggcggagcatacggaggcca

SEQ ID NO: 146550 - DNA, 373 bp, Zea Mays
aatttacaggtggtgcatatatggtgaaaatttggtccaaaccactagatttccaatttttcgtgggtgcatgtgcaccccctaatttctacgtagctccgcccctgtctttgacatgtcaacgagaagggttggagggtgtgtgtagggcaaaaaatagctcgaggcttgcaggccggctcaagctccatacgactcgctcggtttatagtgactcacaaactctgaccgagtctatcatgtttctcaagtttgatccatgacttagccgagtcagctggctgtggctcgtgaactaagtccaaactggcataacagagaacaagagcctaagatgttgtctaactagacaaagcccaagacagacccaaac

SEQ ID NO: 146551 - DNA, 757 bp, Zea Mays
ccttccgaattattttgggcaccagcttgatagagcgtgcccaccaggaaaaaaaacgtgaatcagacactgagggggcaatgtcagccaagttcattgttaatgacagttatatgacatttgatacttttgacacggacagtcacaatatcctatattcagaaccgtcaggaacctcagttatgccttaaccaaaataatattggtctaatgtcattcaatactttaggcgtgaggggtcacaatgcctcaatttgtaagtgaatgacacaaccatcaggacttgtgtagtcttgagtaacaaggacagatatagtacctcagaaacatcccgccgaccttgatgcaagataagttctttgagcattcgccgtctgaaatgcttgcctttaagataaagaaaaacttgtaattaaatcctctacgaggtcatgcattctaaatcaagcatatcatcagcggacagtactaacagtgaacaaatcaaactgtaaagtataacagcagttgaagtcttggagaaaattacccgtgagaagaacaaagaccgcatgagaagttcaagttgaaactctgtttgcaccaatgatttaataaacaagtcaccgtagcaggacaaaaaggttgatatctgaaattgtttggcactactactaaccagtatctttaatatagaggaatatgtgatctacgataatggacaccaatgaagatcctgctgcttctgcaagctggcagacaagtagagtaataagga

SEQ ID NO: 146552 - DNA, 2959 bp, Zea Mays
cttacggccgcctcgtgctggtgacaggcgcggcgcgagatccgggctggaagggctggcgggtcccgttggtggcgccgtggcgtcggcgtgatctgagatgagattggacccggctgcgcggtattcgctgcggaggtagacggccatgacgaccaacaccaagcgcgcctacaagctccgtatcctcgtcgcttcgtttgcgctatttcgcttcctttttttaattccttgtcggggttgctgcatagtggtttttgtatgaccgatccatcgctgctgccgcggtcgttcaaccagtagaggggaacatttgggtcagcaagtttgagaaggagctcccgactcttaattttctgtttctgttgagttgttaaataggtattttgtggttgcgagattcggcaggtcacatttagctgttggtgattatcgagtagtcgttactgatttgtcgtttattatcctagaagtgcgattgctggcattccggcatgtatgtgaaaatgtctgaagtggtacattgatgcaaataatatcagtcatcgagggagattgggctgttaaattcgcacacattggaatgccttgacttgcatttggtgtagaggagtttgtggcgcactcgtccaatgttaactgcctcaagattgggaggaagacctcgcgggttcttgtcacaggaggagaggaccataaggtcaatctttgggctattgggaagcccaattcaatactggtaagactgtttttctagttctgtttctacgtatggactgattgtaaactgcggctccacagttgggtaggaaaacaaaactcttaactcacttgaaaaactattggctgacctaagtggttacaagatgagaacttcaccttttcaaccgctaacagatttttatgtagcacagttctccttatgccagtattcaattaatagaaagatacttttaagttagttatatcaacctaccgcacagcaatgcgttttgaggatggttcgtttatatagttaaaataggtgtcatgaataatgtttcttaaggacggagtactttatttaatccactttaactttttggtggccgtacagagcttatcaggtcacacaagtgctgtggagtcggttggttttgattccacggaagtgtttgtggctgcaggagcagccagtggaacaataaagctatgggatttggaggaggcaaagagtatgcagatatgaatatttaacttactatatgtgtatatgtatgaatcgttcagtaattgcatctcttggctcattttctatgcagttgtccgcactcttactggacatagatcaaactgcatgtcagttgattttcatccgtttggggaattctttgcctctgggtcactggacactaatctgaagatatgggatataagaaggaagaattgcatccatacatacaaaggtcacacacgaggggtgaacactattagatttacacccgatgggcggtgggttgtgtctggtggcgaagataatatagtaaaggtaagaatttgccaataactctatgctgtgtgtgttcaattgctagttcttctgctggaatttgatttttcttttgccttaatatttctaatgaaaaaaatcctttttttcccgaacatattacaatatgtttttctttggcagctctgggatctgacagctggaaagttattacatgaattcaagtgtcatgagggtcagatccagtgcatagatttccacccccacgagttccttctggcaacaggttagattcagaatttacaatgcttatctgtttcttgactgttatcttttctttgtcccttttggttgtacaatgtagtatgtacttgtttatggtaaaatatcagacttctgtcttggtatttgcttgaagaaaaaactcttctattcgttgagctagtaaattaatttaagtatttaggtgctctctaaaaccaagcttggcatttgtccgttaagtggagaagctgtttaaatatgatttcctaactagacctgaaccaaactgtaatggctgttcctttgatgttttaagtggtaaagtgtaatggatcatactatcgctgtaattgttgtctgccccaccgcacctcataataactttttgattgtttaccaaaaaaattcctagtagtcatatcttggcatagttcagcttgctgtaagtaaatcactatacatgtattgtgtaaaattttcgttatgagatatcatgcttgttttcgttggtgacatctgtaagagatgcattgaaattttgtacgatacgttctatataaactttctttccatgtcatcaattaacacatttcattttttgttttgttgtgagacacattctctcctgtcaggcagtgaagaatgtattcatatgtttgtgtgggagctcagaagactgtattccttttgaaactatatctctcttatgtaaaacttgttgcttcattcaggttcagctgataaaactgtcaaattctgggatttggagacatttgaattgattggatctacaggacctgaggtacatcggtatttggagctgatagttcacaattgtttatttcctttgcatttgtaatcctcagaatttaagcattatttccttaataagtagcttgggtggggatcccatctctaatgttacatcgaaaaagaaatggaaaatgaacataaacttagatgtccctgtttgatgcttctttatacaacaaacagtcatatgctaatgttttgcagcataattcagttcaatttgggcacctatttaattcatttggatacctcttttgtttccatcatttaattcatttgaatcacttcttggaatcacttcttgtgtttccataaaaaatactagacaacaggtgtccgatccatgacattcaatcctgatggaagatctttgttatgtgggctgcacgaaag

SEQ ID NO: 146553 - DNA, 654 bp, Zea Mays
taaagattcttttagttggtcaaaatctttcctatcttcatatattccttctgctttgctggagccagagactgagacacatccctttgtcatccccaagaagtgccctgatggcaagttccttgattcggtcctctcggaggaatctgctgacaacgcttctgttccctcagacccggcctcctcccccccaaaacatgctgttgtggaatctgacctgaggagaagcaagagacttcgtgacgcttgggctgggttcagacagggctcttgccagaagaagaactgtttgatgtgtcagcacaagtttgagggccctccttccctatcagctaagactatcagacgcttggggagagtttttgcaacctgtcagaagtggacctggccgacaaagctctgaagaagaagaaccccccctggctgtgttggccctaataagtcagggaaaaaagacaaggaggataagaaacaagactcttcagatgatgacaactaatctgatgatgctgctccgagtggggatattttgcaggacttactttcgtcaggctttttggctgcttcggccctggcgtctttgtttgtttattgtgttgaagaactccgtggtttctggttgtgctttgccccgttctaacagacactctattg

SEQ ID NO: 146554 - DNA, 911 bp, Zea Mays
gttcgtgggcccatggctttcgcccgaaggttgttcgacgaaagtccagtcagggacgtggtctcgtggaacacactgattggtgggtacgtgaggagtggcctcccgcgggaggcgctagagttgttttggaggttggcggaagacggcaatgcagtgaggcctgacgaggtcacggtgatcggagcagtgtcgggatgtgcacagatgggggatttggagctagggaagaggctgcatgagtttgtggacaataaaggggtgaggtgcacggtgaggctgatgaacgcggtgatggatatgtatgtcaagtgtggcagtttagagttagcaaactcggtgtttgaaaggatcagtaacagaactgctgtttcttggacaaccatgatcgtggggcatgcgaggctggggatgatggaagatgcacggatgttgttcgatgagatgcctgaaagggatgtattcccatggaatgctctgatggctggttatgtacagaataagcagggcaaggaggctattgcactgtttcatgagatgcagaaatcaaaggtggatcctaatgagatcaccatggttaatctcttatctgcttgctcgcagctaggagcattagaaatggggatgtgggtccaccattacattgaccgacataaacttcatcttagtgttgcacttggtacatctctggtggacatgtatgcaaagtgtggcaacatcaagaaggcaatctgtgttttcaatgaaatcccagttcaaaatgcactcacatggacctcaatgatatgtggtcttgcaaatcatggacatgctgatgaggccatagaatacttccagagaatgatagatcttggattgcagccagatgagataacatttataggggttctgtcagcttgttgccatgccgg

SEQ ID NO: 146555 - DNA, 633 bp, Zea Mays
gtctgatgtagcccttctctaacaactcatcaatttgcttcttgagttccaccaactctgatccggacactcgataagctttcttggaaataggggcggtgcctgggataagctctatggcaaattcaactttcctttcaggtggcatgcctggtaactcagggaatacatcgaggaattcggacacaatcctaattgcctcaattggattggactccttgtcatctactgataaatggtgacagactccttcttttagttcaggtaagtacagcttggttaccattttctttccggatggggacaccaacttaactgttctcttgtcacaactgacagtggcttgatttctgtgtagccaattcatccctaggatgacatctaacccttgagttcccattactactaggctagcggggaagtctacccccttatttcaatccttagattcgaacaaatcctatcggactgaacttttcccccaactgaattaactcttaaaggcgagatcattggttctatggggatgttatgtgattctacccaaggtgtagaaacaaatgaatgtgtggcaccagtatcaaatagtacttttgttgggtaggattcgactggaaacaccttgtcttgctg

SEQ ID NO: 146556 - DNA, 980 bp, Zea Mays
ctcaccgatcctcgcctcgccttccgccaccgcctgctgtgccgcgcagctgcacccgcacattctcaagaggggcctgctccactgcgagccctactcggggacctcgctagtggggttcttcgggcgaagcgggcgcttcgacgaggcgctcaaggtgttcggtgaaatgaccgtaaggagcgttgtcacctggaattgtctcatctattcgtttgtgcagtttggacacagccgcgctgcagtgtcctggttcagggagctcgtgagaagtggcgatggcttgtcagatggctcgtttgttgccatattgccttcgtttgggttgccagagcaagttcatggtgtaatgaacaaaattggaatgggttccctctcagcagttgcaaatgcattgctgaattcatactgtacttgtggtgcaatagatgtggcagagaagctattcaatgagataatgtttagagatgtggtttgttggaatacaatgataactggttttgcaaggagtcatgtcccagagagagcttttgagcttttcttgagtatgcaacgtcagggcatttttccaaatgaaattacatttgccagtgttctgtatgcttgcaccgttatagatggacacaaacatgggagatttgttcatgcgaaaattatcaagcacaatctcagcacaagtgtgtccgtgaacacttcattggttggtttctatgcaaattgtagtaggggtgatgctcataaagtgcttgaaggggttcatggaaatagcaccacgtgttggaatgctctgatttctggtcactctgattgtgatgatccaacttatttggttattgtgagacacatgctgcaatcagggattaaaccaaatgaagttactttgtcatctctcaaggatccatcactattggatctccagcaggttcactcattggtcataagattgggtcatggtggtaatgactatgtttcaagtgcta

SEQ ID NO: 146557 - DNA, 289 bp, Zea Mays
agtcgaagtcttttcttaaaaagacactccgtgcaaaagacgcctaagggtgcagccggaatagcacaacaagtgcgtcaatcgaagtcttttcttaaaaagacactccgtgcaaaagacgcctaagggtgcagccggaatagcgaagttttctattaaaagacactccgcgcaaaagacgtctaaggttgcagccggacaagcacaataagcgcgccatcgaagtcttttccgaacagacactccgtgcaaaagtcgccttagggtgccgccggataagcgcaacaag

SEQ ID NO: 146558 - DNA, 340 bp, Zea Mays
aaaaacatgtggtactaatgtaatctcttctgcagttttgtggtcaatttggaaactaagaaacgaattgtgctttcaggggactgtttggttggggttgaagatggtactgatcaagatttctaggatgctacgaagatgggctgctatgctcaagcacgaaacaagtccggaggagttcgcgaggaagatggaggagatggccaaccagccaccacagattttgtgggagacatactcgctagtgtcggtttgcttgtagtgttaggatttcaatgctgtcagtttaaggctccgtttgaatgtactagagctaataattagtggttgactaaaaaat

SEQ ID NO: 146559 - DNA, 340 bp, Zea Mays
ctggcagcgggatgaggaggcagaggccgcgagggctgagcggttcggctctcgccgagatccatgccgccccctatgcgcgcaacctcctggaggtcggctccttaaaagatggacactctctccctcccggcaacggactgtgagactcgctgctccatcttttctctccctgctcgttgatccgattgcagccgccatcgctggttgtgctgtggctgctgtagtgtggaggacttcatcctctctgttggatctagaggtggcactgtgcttggttgtgtacggtgttcctctctgttgttgtgctgggtacctgtgtggtgtcgtgcactctgtc

SEQ ID NO: 146560 - DNA, 347 bp, Zea Mays
ggaagttccaaggtcagtcaagcaggaacactcgtctgaataatgctcaaggttcgcagttccgctctggaaatcagggtggaaataattatcaagtgcaacgctctggacagcaaagccagagaagtaatcaaaaccagaaccagcaaaggagcaactcccagaccaaccagaggtctggtggaaatttacagaaccgtcaaggtggcaccaataacacgcaggccagaaacaacgcacctgtccaacccaatggctgcttcaagtgcggtgagctaggccactatgctaacaactgcccaaggcgcaaccagcagacaccccagaaaggcaataatcagaggaat

SEQ ID NO: 146561 - DNA, 670 bp, Zea Mays
cgcgcattcatcatgccatcacaatcccagggttgtgcaagctacgtgatgcagaccgggcactcaaggtgctagggacgaagagaggatggaggcagggttggagccgtgcgagctaacgtacaattctgtggtggatgtgcttgtgaaggtggggcaaatgggtgaggcaactagactcattcaagctgattgatggggtgacacaagaacagatcaaggtgtggctgggttctaacaaaagtatttaacagaaggtggtcagtgccttacatgatcgggcacttggatgtcaaatctatcggtgtgtcaaatctactttcagctggcctggaagggaagaacagatcaaagcatatgtgcagtcctgctaccatactgtattgggcaaatctccatttgaagtgctagatgttgcagcaagtcaaaatgcactcgcagcatgctcaaactccgatgaaacaccagctgatagacaaaagggcgcacagatcgtacatccgatgtgggtgatcgggtgtgtacttgaaattcaccctttactgtcagtcctcagtggctgaacgccagaaccacaagctagcgttccggttcttcgagccttacaatatgcaggcggctcagttcatccggtgtttcacgtttcacagctaaaactgtttgttaacgc

SEQ ID NO: 146562 - DNA, 347 bp, Zea Mays
ctatttcatacttacgcaatcacgccaatacaagaaaacgtggcttcacaacaatacgtactggcctattcaaacgttccttgctatctctgtgttccagcccacgctccacatatacataaacaagataaccatcccaaccactatgtttattccctcccaccatacaacttaattaacatggattgcgaaagagctcaccacaactaaaccaaactcccatgaaaaaaatcactaagtagaaaattgacaatcaatagcacaaatgttcatttttttctacctctcactataaaagcaatggtaacaatgaaatattgtaaaatcatctaaacttcatgatctac

SEQ ID NO: 146563 - DNA, 490 bp, Zea Mays
acttaatgtacgttggaatgtccgaaaccgaagggaaaataacttaataggtgtgtgcctatagagccgacgtgtggctagagcggagccgtgcgggggatgtagggggcgaacgcgagcaccaaggtggtccatcaccctaaatcctattcactgaagttcgagtttctctctaacttctgcaaggaatttatccccatttgtttatctgtcgaggccactcgggacaccgccgcaaccggttcgatgagagcttcgtcgttgtgcttctggttcgtcgatcggatctacgattcgtcgtcaatcttcaataaaccatcgggcgaggttcattttttccggtaaccaatcttcattatttcacctccttatttctttgtttttgttgtgtgttttttcttcttccccatcctgtagctcgtgggagctagtgcccactgttgtggtcgccctactgcgtggcttagcgccgcaccatctgcatcccggg

SEQ ID NO: 146564 - DNA, 484 bp, Zea Mays
ctccgcaaattttttgtctgactaatcggggctgatttcgcccttgtaattcgccaaaaaacaatcttgtaccggcccgcactcttttcctcccggggggtgaggtttttaacgaggcggagccatgtaatatatgtgcgaaaaatcccccgcaaaaacatgcgtcgaaaacagaccgcgacgacggccttcgatattcgaccaatccgaggtcaccgcgaggctaagcgctagccaccctcgcgtgcgacaaatccgcacagaagtcgcctaagggtgcagccggactaagcacaacaagtgcgaaaaaaaaatctgatgtctatcgcgaagactatccgcgcagaagtcgcctaagggtgcagccggactaagcacagcaagtgcgagaaaacccgaagtctgtcgcaaagactccgcgcagaagccgcctaagggcgcagccgaaccagtacaacaaaagcagaaacgacagcatcaacct

SEQ ID NO: 146565 - DNA, 1971 bp, Zea Mays
gatttgtttgacactatgctggcaaaaaaggttccgtcaaattcagtttattgtgttttcaatattctgttacacgctcattctttttttaggacatgtgtatttttatggaatgtttcaagagctcctccctgttgctcagctcaacatttgttttcgaagaaacagaaattttgataaaaagttcctctgttttggcaaaatgggttccctgctttcctgttgatctgtatgatacaatgccggcaaaatgggttccagcaaaattcagttatgtagaattttctgcggtttatcgtgttttaagatttcattgcacacacactgttttgttttcttttgcgagcactcagttggttttaaggaatgtcacaggagctccttccaactactaggtgactttcggtttaggaaatgaaaaaaacatctgatgaatccacaggaacataactctttggacattatctttcccctttttagttgaattcacacggtaaaccatccttggcaaaaatttattgttttcttagttttagggccttgctccagtcttagcattaagcaagacaagaaccaatacagcattcaggtggggcacacctgtccaaatctgctccagaagctaaatccaaacttgacaggctgactcatttgcctgatatgttggattggtgagccatcagccagaaactgtttcgcctcctcagggaactcttttcacctccaagctgtgctccttctgaaacagcagcctctcccagtcattcttcacctttcctagccaaaaaatcattgccggacttgcagctcggaaatcagctccctgagtcttcttcgctggtgtgcacagcaggctccatcctggtagcattactgctacctgcctcacaagctattccataaccttccaaatagtttcctggaagcatagagtgtttttgtagtttccatagctttcacgaaacaaaattttggacatgtttggatccattagcactaaaaattagcaaccaaaattagtactagtggaccaaacaagtctgctaatagacctaccaatcattagctggatgcctactaattattagttccattagcagatttagagttgctaataggcgttaactaatcggtagcctatgtcttactacggtctctatattcacaatatttacagtatctatctttgtagaacacaaacaaatatgtattctagtttgggagatagaggggtaggtatttgaaccccaggttctgtgcctattttttgtatttttctggcagtgcgcgtgggagggaaacgtggtaggaaatgcccacttaaatatagtagagatagattatatgcatcatcaattcactatcaatcacttattcgcaggtggatcaaaagaacccctgctaaaaattagtaaccattaactgttacctagctaattttgagtgttaatgtatgtaaagcgccctttattgctataaaaaatattgttggcaaagattacgggagcacctcccagtcccagctgcagtgctgaaagcagggcgccacaggacggatcactgggctgagggtgagttgtggcttgcctttccagtttccagctataaacttgtttggatgtccactttctttatcggtgtattggggtggattgatgtagaatctaaactatattttgtatcaactcatttaacacacgtgagttgaggcgaatatatggacatccaaacaagatctattattagggcttgttggcatgtggattgggtgaaatttgagtcggtttaaatccataatccatagtaagtaaaaaaaatcacctgaatacatcacaattccctccaatccacatggaatagaattttcacacgtggataatgagagagattcatcaattgtaccgtgatatactttcttcatttcgaattataagatgtccttatatatgtaagtatgtatagcttttactt

SEQ ID NO: 146566 - DNA, 912 bp, Zea Mays
gggggttaagtgcaaaattagtccacttttggactaaagtgcaaaaaccatgttaataaagcatcttaagtactatggttcacaaatatgtggatttgtaagctaaaccctggattttggacccatttgcaaaaaggaccccatttgggttctatgctaagtctgaaatcagtgttataagctcaactttggagctttataactttcaaatcagtgagaattcaccttagggcaccacatcaaatttgtagacctaacaaaggagaacaatttttcttaagagtgtaagcaaggttgttatgaagaatttggagataatcgcactcaaagtcaggctgtcaggctgttaaagtctgaatttcagactgacagtgtaattgcagtgactttgggcatgaattcaagcttgattcaataggaatttggctattgctgttatggaaaaattgtagctggtttgtagctctccaactttgctgcagagcattggttatgttgtcacatgaaattgggagaaaatctccctacaaatcactctgtcagctgtctgaaccgagctcgccatggtacagtgcgttgagtggatcagactgccagcgcagggacctcaccgccgacaatccctccgccgcgattcgtgccatcgccgtcccgattcgtgcccggagtggatagataacgtcgcggggtagaaaattcttcgccgccgttaagctggacgccactccggctagccgtcgtgcctcccctcttgctcaccacccctcggataagattctcaccgccgtggaaccatcaccgtcgtccgccgcatgtccagacgctttaccatgtcgcggctaaccaagcttagcatgacctgtgatcgtcggagtaactgctacagcgtaggacaccaagccactgcgccag

SEQ ID NO: 146567 - DNA, 515 bp, Zea Mays
gataaagggaaccaactttttagaagattggaagaaggaatcagctcaactgaatgcatgtttgggaaacaacggcagcctcgaagtcaaaccagtgctagaagacctcatatgcaaagctcaacacctagactcagagacaacaagacttgtggagaaagcttgcaaagaacaacttccggacctcaggacagatgaacaaggagccctttggttcaagaatcgtatgtgtgtaccaaaaggggaggcacgagaagtcctgctcgaggaagctcacaactcagcctactccatccacccagggactaccaagatgtacctagacctcaaaaccagatactggtggagagggatgaagaaagagatagcacagtatgtggcccggtgtgacacctgccaacgaacgaaggccgagcaccagaagcctgcaggcctattgcaacccctcccagtgcctgaatggaagtgggaagaaataggcatggattttgtaactggactaccccggacgcaaa

SEQ ID NO: 146568 - DNA, 445 bp, Zea Mays
cgaatcgtaaaccactaatctctaactcgaaaccatcatgcgcttacttcccaaatcatgaacacataacgcgtattgacccgactcaagatatagaggaagcgatgactactttggcatgtcaccacctctctatataagccaaaacaatttctactatcgactaagagttctaagtattaaacacattattactttccacgcgcaaataatcctcaacttaacactagtgacactgatggacttttttctaaactcatcatgcgcataacctcgtctcgtatacaaccatatggtggcgtgcacccgagacactacaatcattatggcgtgaccactaatatacgaactccgatactcatgttttaacaatacatcctccacgcaaactagcattttctaaactactcgtcacatcaataaatatatcccctatataatcacg

SEQ ID NO: 146569 - DNA, 594 bp, Zea Mays
attcctgcacagcatccaaatgccaggtgagaaattttcgtgcattcccaattcatataggattgcaattcatagccaactctaatcctttgtttttcctatacctatgttttcacattcctgtgttccaaagggggcctgatttgtgccgtcgtgcactggagccgccgcccagatcacaccacaccctcctcttcgctcgctcgctcaatcgactggagattctttacagacaaccgtggtccctcactcgctctcgcttctcttcctgcaactaccagaaatcgagaacaacgacggcttcacaagaaagaaaaaacgcgtgaatcgaatgataacgccttttttgaccgcaggtcgtcgctgctgtagcagtgtagcacgaggcgagtagcctagagtagactcgcatcatttgtaatggtagcagcatcagttggtgccacgccgtacgagcgtcactactcactagtggccgccacctcttcttcctcctcctcctcctctttttctagtagcacagttgtaatggtagacgtggagtaaaggcggcgccggcctccgcgcgacgacttccggtcggtgcctgaccac

SEQ ID NO: 146570 - DNA, 376 bp, Zea Mays
gtcatgtctgtcatgaactcgctcatcaacgacaacttgccggcgaggctgccaagttcatccgccacaataagatgggcaccatcacatcccaggacatccaagggcatcaaggccgtcaccaagttcacctcgtctttgtcttcttctcccgtgtgactgtcttcgtgtgagtaacatgttggttggtcggaggcttggctgttgtggtctcgcgtaattgccgcggtggctttttggcagaatggaatgctatggttatgtgaatgttgatctctcagcactccgtacacctgcttgccacactgttttggccattgtgtcggggtctagattgggactgacttgagagtgtttcaggtctgttcagttgggt

SEQ ID NO: 146571 - DNA, 487 bp, Zea Mays
cctaattcatatgagaatgttggggcattacacttgtgatgtaaacaatctgtgacttttgtttggtttccaggtaatcagccaaatatagtatgtggtatggagttcatatttttgctacttttctggtgcgacgatgtggcggaggcgatggcagggcctagaacggattggtcgtcctgctctgtgttggaagttatgtgaattttctacctcctagcgctagacatatgattttcttcattttgccaactccttgccattgctttctactgttgtttgtttattttagtgcagcaacggagcctatgaagaaaccctattttctgctcctgtttgccaactctaagcagatcgctcgctgaagaagcccaccctcctcgctatagaaggtatgtgtttaacagatatgaaatgttgttctgaaagagcatggaacaacaaagaaaaagaaaaataaaaaaagaaagcacaaagtctgaactta

SEQ ID NO: 146572 - DNA, 455 bp, Zea Mays
tgcatggttcaaggttgatgcatattctagttctaattcatattactccatgtgtactaagatcagtagattagcgacaatcacagcgcgcgctttttaccaacccacgcattaacaaagaaataaaaaaggccttaatgcatggtaaggagtcgaactggacacctgggttcaaaaaaacgtcgtcataaccgcacgcgctaagagagaataatgactcacaataccacgtaactctatttaagaggaaaacaggaaacatatactctaattaatggcttcttggcatgtaagaacatgtccaaaacgtcaagaattttagatctggaggcagtatctcatatatgccaaagtctttcataaactttttaaaaccatccaatccatacgtaatataatataaataaccgaacaagatctcatatattatataagcatttattgacatacttata

SEQ ID NO: 146573 - DNA, 693 bp, Zea Mays
agtgtaaagcgcaagatggagcataagtataacttttgttgaagaaacgacatctaagaccaaagggaaaactgaccataaacccacacgcatcgagatgtcactcttctaaaggatgcaaacccaccttaactgctctatacgcacgtggcacccaagtatcgaaacaaagtaacaagctgtgtgaaccaaagatgcagcatgcatagcccgtccctcacaaatccaggtatctggaacccatcccaacacagacacacgcaccaaagagtaagaatccaccaaccacacacggattgtgcaccggatgaccgacggtaacacagttcttgcaaagagcaaacaccctaatgcagcaagcaccaacggagccgaccctaatgcagatgcagacgacatgagggggtctagcagagcaaacgtggacttacggagtcacagacaatgtctacggggcggcgggcagcaggagcagaccacacgctcccatgacgacggtgggtgcccaaaccaaagtggcgaacaacgacaaagacgggctggagaagctatcggttccaggacctagtaaggcaaacatgaattgaggagagagggaagaaaatattaaaaagggaggaaagtactcaccgtcatgcagcacagagcgcggagccatgcctgtcactggtgaggcatgggagcgagagagat

SEQ ID NO: 146574 - DNA, 630 bp, Zea Mays
gatcaatgttcttgtactcggtgtgtgttgatcttgttagaaacaatagttgtaactttgttgtaccaagcatctttcataattgtcgaagagcccaaatactgtcagttccaatttcatcatgcatatggcaacttgtagtagtaaacaagaaagagctgcaaagttacatatatgcactattttctttcattaacctggagcatttaaaccatctggttaattggtaggagagaacttaaatcataaaaactgcttttctccagcagcattacatgaccaatacaagcaaattgtcaagcaccgcactgacctacaatttttccagttaagactttgctgatcagctttagtgaccagaggccttctagaaccataagccaccatttccaattagcactctctagaataagctacggttgttcagacaaacatttgaataagtgaaagtataacatcgatcattacgctagccagttctaaagtagaacagttcactaatctctagttcatctatcatctgaagcatttgaagaagaaaagtatgaaaagaagaaacttcatgactcctaaatggctgagttgttgtctgcgccgatgcgctcttatttgtttgtcgctaagcactag

SEQ ID NO: 146575 - DNA, 978 bp, Zea Mays
ggggcatctataaggagattgtattgatgcaagccaaataatcagcctgacctgatgatcttgctgttgtacctgcaaagctccagttaaccaggatcaaacagcatagaggcataaagcagcacagcaaggggggctgccgcagcccacctgaaagtagcagttctgatcataagaaaacagacgaagctaacatggctcttctggaaacgcaagagatcgttaagaaaacacatgaagaagggaaaaaatgtctcagggaaagcatactcaaaagaatctacacaccaatgagcacacgaactagaatctctaagaaccaagaaggtaagctaatttaccacagattttggaaagtcggaagcatgataccttttgacactagatggatatgtggtctagtgccgatttccacaagagcaaaaagtgaaaaaacaaatgccagtcaacaagtaactggtgtgattagcttgagaaattgctaaaactttctcacatccccaaatcataagcaaatcaaaacctttcttcagatatttaaacaccaactaacagagtagaaaaaaaaaaacaggaaggccagtccatcaataagtgcagcacatttgcattcaaattttcaaactaaacttgtcggacagaaaaatcaacccactaaaatcattattgcaccagccacaagtaactattttcaaaactcgatgctgaagtgtcaaaaggctgcttatcattttgcttgtaataaagcgcaatctatcagaagaggaacttctcacttcgctaccaggaaccgtgtcctctccagatagaaagatgccaaaaaagtacttattattgattgaatgtcattagctaacgaccatgcttatgcaattcacaaacaatttgcagctctatgtggtcacaaacattgcaaaaagtcattagtgttatattcaactggagtgaacatttaattagatcatgctgctcaaccat

SEQ ID NO: 146576 - DNA, 643 bp, Zea Mays
ctccaagatggcgcattttcttccattgggacatccatacacagcagcctcagtagccaaggccttctttgatggcattgtctggctacatggcttgccttgctccattgtcagtgatcgggacacggttttcactagtgccttttggaccgagctgtttcgcttagcaggggtcaagttgcatatgagttctacctttcatcctcaatctgatggacagtcggaagtggtcaatcgaattattatcatgtatcttcgctgcctagcaggcgatcgtccaagaacttggctacagtggttaccatgggctgaattttgttacaacgcttcataccacaccgccctcaaatgctccccctttcgggtagtctatggtcgagagcctccaacattgttgtcttactatccaggcgtcgccaaggttgcagcagtggatcgtcagcttcaggatcgggatgaatttctgactgaaatcaaagcaaggctggtgcaagcacaaattgtgatgaagacatatcagaatcagtcaagacgagaggtcaagttccaggaaggagactgggtatggctccgtttacaacagtggacagcagtgggtgtcaccgcagctactccgtcgaaactgggtcctcgcttctttgag

SEQ ID NO: 146577 - DNA, 334 bp, Zea Mays
ccgtgctcgtcctgtggcatccatgatagaggggtactgtaccgaagaggccattgagtcgggaggaccattttgcaatagtatactaaaagaccaggttgcaataggtctgcctccgtcacgacacgagggtagactgtatggaagcggtaggatgggacgaaaatccttcatcccaccgaattataatacagtacttgaggcacatcacaacatcctacatcagctagagataatggagccatttatccaacaacacatcaatgagcttcgcgagcaaaatcctgggcaaacagatgattgggtaatgaagcgacataagctgcggttcaac

SEQ ID NO: 146578 - DNA, 355 bp, Zea Mays
cgcgctggcggctccactccacgttggcgtccggtggctcgagcgtttcacaagctactccacgcctggcattcagatacattgattagtgttgctgattgattggtacttatgcggggcatggactgcagctgagcattccacttggaatgcagcatgttctagaatacgccatgctaatttagtaacagaaacaccaagcatctattttttacatttttatttacaaaacatttggattccctacttatttaacatatgtgctgatggcagtacaacggtggccactttgcgggatgaaacactaagatgactatgtttggtaatttatttgcagtccaagaatggaattttc

SEQ ID NO: 146579 - DNA, 810 bp, Zea Mays
acacatcccttttcattttccaagaggggacgagcctcgcctacctactgttgtacgtcgacgacatcgttctcaccgcctcatcctcggccctccttcagcgcatgatggatcttggcgccctccaccactttcttggcatcattgtcacacgctcctcagatggcctcttcctctcctagcaacagtacgctgtcgagcttcttcagcgcgcgggcatggctgagtgtcatccgacactgacaccagttgacactcacgccaagctatccgtgaccgacggggttcttctgtcagagaaggacgcatctgagtacaggagcctggcgggggctcttcagtacttgacgctgactcgtcctaatctggcctatgctgttcagcaggtgtgcctcttcatgcacaccccgcgcgagcctcaccgtgcgcttatcaagcgcatcctacgcttcgtctaggggactctctccttaggtcttcacattggcactagatctgtcgacacactgactgcctactctgacgctgactgggcaggctgtccagactctcgacggtccacctccggcttctgcgtctatctcggtgacaatctggtttcttggtcctccaagcgccagaccacgatgtcccgctccaacgctaaggcagaatatcgggccatggctcatgttgtggccgagtgctgctggcttcgacaattactccatgagctccacatccagctaccctccgccactgttgtcttctgcgacaaagtcagtgcagtctacatgacagccaaccccgtccaccacaagcgaacgaagc

SEQ ID NO: 146580 - DNA, 624 bp, Zea Mays
gtaaatccacctagataatttagattgataatagttgatctttcaactcttgagttcatgtgatgataatttcttaaactatatgtgatgacgtgatttagtgaatgttgtgcttgataaatgaaattatctcgaaaacccaaaacttaagaagcaagcatttgacctatgaaactattaattataagaattcaaatcccaaaggaaatgaagcttaaccaagaatgcaagactgggaaatggttaaagaatgggaacaaccctgatttttctaagtctaatcttgtacctcttttcaaatgccaacatgttctaaccaaaatagtcttcaaatcacattgccccaattacaaaagttgtggataattacttagggcacgccctgtaaaaagttggcaaactttcgaagtcgtttgacatgttttgacaccgttagacagtcagtttccactgttttgcgcagtgctgacaaaccaaagtttggaggtatatattttaaaatctagtagctaaaccacccggtagagaggggaacaaatcggctgaagcgggcgacgcttcgagctctccgttttgtctcactcgtgtctgcagtccgagcagatcgcgtccgcaagtggcgcg

SEQ ID NO: 146581 - DNA, 489 bp, Zea Mays
ctaatcggcgaagtcttcctgatttggtgcctgggggcaattttggtggtgtgggttctggtgatgtggaggcggaggtggggctgggacgatttgtacttcctgatggtgtggatatgtgtggttgggtgggtgctggacggggccgttgttgtaaggttgtgggtggtggtggtgatatgtgtgcgcgacaactctctggttgtcggctggttgtgctcgagacatcctgtccctggtggcctttgtttccgagcaatccctagttgggtgtgcacagtcctctccatgaaacaagcagtaatatctacgcggttgttgcgcccctcctggccccggcctcgcgtgccattgccgctgccctggggggatattcctggcggcgaggggcctcgccagcagggtgctggttggctatgttgtgcacctgctgctgactgcagctgtcccgtccggagtctgactgtgaaggccttgtccaggttcggc

SEQ ID NO: 146582 - DNA, 370 bp, Zea Mays
caactcccatcatctgggttgctgactctggcacctcataccacaccacttttgatcctggtactgccgctttaccccatccccatagccccaccttcccttcctccatcattgtcggtaatgcgtatactctgcctgtcacggtgtcacctcagtaggtgacacgatccttcctaatgctttgtacctcaacaacatccttgttgcccccaacatcatctagaaccttctctcggtccgtcgccccaccactgataaccactgttctatggagttcgatccctgggggctcaccatacgggattttaccacttgtgctttggttgctcgatgcgatagctccagcctcctatatcccattcgctttccc

SEQ ID NO: 146583 - DNA, 361 bp, Zea Mays
caggcatggttgaacaaggagtggaccatacacatacgaagccaaagttcatttccaatggtacttgttaaaaatctttgttcacattacattttcccccaccctagatgcccttgtcttttacgtggctcatattttcacgattcaggtgatgatgatgagggtgtcatattcgaagaggatgaggatgatgatgagaacgatggatacctattcggtgggcaatgtgcgtacctcaatttttattatgataccatgacttatataactatacgtgtcttaatcgttgttttccaaaaaaaatattagatgatgagaccgatgaggacatcgagattgatggtactcaaaatgaatctat

SEQ ID NO: 146584 - DNA, 1168 bp, Zea Mays
gccgcacaagaacgcatcgcagagagctgcccgtgctgccgcatagctgcagtgccaccaacaagttctaggcggcgcctgtgctgccgcaatgtcgccgccacccgcaagatccagttccaggcggccgccggtgctgcactgttgccgccctaggcaatgcccgccatcttcaaggttcgtcgttcaggcctagctcttgtgtatccgcttgcatcaagcgccaaaaagataagctcgtcttgagatggttatggtgcttcttactgctccgcttagtcagtctagtcgacgactaatcgcgactagttgactggtcggtagctatacgactagacgacttgaaaacattgtatatgacaaaactcacctcttgatactgctggctccatggtggtttgcccgtggccatttcaatgactgtgcaccctacactccatatatccgcagagctgagagaatggaatagtaagggtgggtatgccaaataagactaataaaaatagcatggttctgaagtagtttttcatttcaaattacagcaaattagttttttccttggtaaaggtcatacatctgctgtaacaacgaatcaaaacagtagaggactgatcaatcttaaattaataaatgttgttgctgtttcctaccacgtctctgtatttggacaacagaagttgcataactagtcatttagcaaatttgattggaaacaatactcaacttgtactggggagaatctacgtagttcagggaggacatttaacatatataatccttaccggctatgtttttatgctgtcttggaaaactataaattatatattacacataacttaaagcagtgctaatagtagcagattttcaaatcagctccacgattttctttacagaatgtttccaagatataagtgaggcatgaaaattctttattctaaacaagatattgttgctgatatatcatcatagcaaaactacaaaaacatgccttatttaaatccagaaaagcgataaccaaggtagtggagaagttttttagacatacaagctatgcccactcccaacaatgacttcaggtgccatccaatacggtgtgcctttcattgttttggctgctgtcacagtagcctggcaaagcatggcatattgttgtaagtgcattgaaata

SEQ ID NO: 146585 - DNA, 592 bp, Zea Mays
tggtcgaggtcgtggccgagggatgggtgcccgcttggcccacgggtttgcggcatttttctccatgtgccggaacattgctgcggatgtccatgaggtggctcgacgtcagagactgacgacaacctacgtcgtcaagcttcctctttgggtactccattcgccccccgctcgcctgacgtacctctccatcctcctcctccggagatcaacgagtggtaccagcaggcatacggggtgcctttcatgccagcagacgacatcgacgaagaagaagaagcttattttgatgatcgggagcagtttgtcccgcctccgtatcacggggatccgggccaatcgtcctcttaccctccgccccaggatccttctggcagtgctcctcccccggaccagtctggggaggaacactttgcctctcacctggcgcaccacctctttgctcctcatcatcctcctcccaactggtgatcattggattggcgtctctctctctctttttggttcttgttgccaaaaagggggagaaggtttattatggcagtaccctttatgcagtaccctttatttttgtaatgaacaatcggtctgt

SEQ ID NO: 146586 - DNA, 476 bp, Zea Mays
aataatttgttacgtttactccttgatcacacggccttgacagaaaagaaaagctgatcagaaaggacagaaaagaaaagctgatcagaaccaaagtgtagtaatcaaccacagattcccgtagcaagatgtccgcagtggcacttgccaacaagatcggacgacgattagtgatgctgcgggttgggaccaccggggctgagcctcttcgacccgtcgtacggtatccccggcgcctcctccgaccaggcagaggctgaggcagaggtcgtgttcccttcagggcccttggcaatgacaacttcgtctcgcagccagcgtcgccccatcgcagggcggctatcagagagcgggaccggcgacgaggcgatgacgagaacgacacagatgcagaagcacaggacgagcttcatggctgatgagaagtgtgctgctaatagtggaatgcggagatgatgaactagagcggccggctc

SEQ ID NO: 146587 - DNA, 1025 bp, Zea Mays
cagacattatggtggacgatgattatggcttatctttttatccatggtgaaggggaaactagtgttggtgttgctcggtagagcttcatgtctactttatatatgatcgtccactactctacacccatatgaatatggaactaaaatatgcatctagatttgaatccctaccaaacacattataagagttgcttactataatgcggttgtgccacaactaatcaatggtattgaatttatctacatctgttgggacaattgcatagagctcggccgctaccgccttattgaccccatggacaaagtcatcgtcatcataatagtcattgttgaccacactgttttttttcttagtattggtctccccataacaaacccccttcttgcgccaccttgacgttattgcgctccaacttaagctccttaatcaccattgtaggctgagtctcattgcactcctcatcttcctatcccagggctccaaatcatctttgcgtgtaggtccataaggccatctcaagcaagtcgtgtaagtggtcatgcaaagtactgttttgtaatgtaaattatattttttgcagagtgaagtttgaaatagagagtgagatagcgagtctgttaaaaatagtcggagtttatcctcgacaaggagcgacatgatcttcctctaccaccgtcatgatctctttgttatctttttcatcctcttacctatcatggaaagacacatgccagacaacagactcaaaggaaaataatgacgacaacaacatggaccacccataaaatagatttagcagagaccaatacatgggaaaatggatttaaaaaatgtacccttgattccgagcatcgtattactgtgaattgtgtcttaaagtgatatgtactgaattttcttcatcgaccacgatcagactatcaaaatgtaactgtctgtattggttgggtccccacacccctggcagataaataataccatcagcaaagatataggtggcgaatcataccatcagccagtaggt

SEQ ID NO: 146588 - DNA, 378 bp, Zea Mays
gttggtctggtggatttggcacctaaccatgacgccactggtttttcagtgtggtggagcagagctgtaagaagggtgcctaaagagaaaaggaaagggatcaattccctaactattttggtagtatggtctttatggaaacataggaatgcttgtgtgttcgatggtcgggatcccagtgtgtcggtaatctgtcaggaggtagaagctgagagtaggctttcggttatggctggagacaaggtgctccaggagctgctcggcagggcttcttagctgcatgcctgagcagctggtagggtcgtgttttgtgttgtttagggagtgagttgtaaccacttgcttttgggttgagggcttgaggcgaggtctaccccc

SEQ ID NO: 146589 - DNA, 333 bp, Zea Mays
accaatccctggcgccaaataccaccgcaatggcgtgcgccatggtgggaattgcagagggcgtgcggagccgccacataggtgcttcaagtcctcggatactggcctggggggcatcgtcggtgtgcgcgagatctcctcagggtgtctccacatgtggatactgactggagctcgcgagattcgtcatcggagcttgaagcacgccgtgattccgccctacgccgtgactatatcgattaccatcaccttttcgggtaagaagcacagaacaagtctctccatcacctttggtatgtatagcaccacttgagtcgaagctataagcataag

SEQ ID NO: 146590 - DNA, 345 bp, Zea Mays
atacaaaacaccacagccccattctttgtgcttttgcacaaggacactttgatttcaactgacaccttaccctcgacattgccaactgctgttcttgatttattgcaggaatttgaggatgtgtttcctgatgaggtgcccgatggtctccctcccatatgtggcattgagcaccaaattgatttcgttcccggtgcttctcttccaaatcgcccagcctaccgaactaatcccgacgaaacaaaagaaattgaacagcaggtaaaagatcttatggacaaagggtacgtacgagaatcactttctccatgtgctgttccagttcttttggcccctaagaaagac

SEQ ID NO: 146591 - DNA, 859 bp, Zea Mays
ctagtaggtatataataccaagcataaatttcacctcacacattaacagtgtctcagcactgtctttcatcactcactgctcaatagcctaggagaatttgccaatcgtccaaggtagcacagtccatgctagatatggccggttggatttacatcctactggcatgccagaggtactggttaactgttcgagtgtaaaagcgtaggatggagcataagtataacttttgttgaagaaacgacatctaagaccaaagggaaaaactgaccataaacccacccacatctagatgtcactcttctaaaggatgcaaacccaccttaactgctctatacgcacatggcacccaagtatcgaaacaaagtaacaaactgtgtgaaccaaagatgcactatgcatagcccgtccctcacaaatctgggtatctagaacccatcccaacacagacacacgcaccaaagagtaaaaatccaccaaccacacagattctgcaccggatgaccgacgataacacagttcttgcaaagaacaaacaccctaatgcagcaagcaccaacggagccgaccctaatgcagatgcagacgacatgagggggtctagcagagcaaacatgtacttatggagtcacagacaatgtctacggggcggcgggcagcaggagcagaccacacgctcccatgacgacggtgggtgcccaaaccaaagtggcgaacaacgacaaagacgggctggagaagctatcagttccaggacctaataaggcgaacatgaattgaggagagagggaagaaaatattaaaggggaggaaagtactcactgtcatgcagcacagagcgcggtgttgttccagacatgc

SEQ ID NO: 146592 - DNA, 845 bp, Zea Mays
ttttagcatgtttctacaatttcctagaaattctctaatcctggcagaaaaagaaaaaggaaaaacatgaatagtactgggccgaaactggcccaatacaacccatgcccagtcgaaaacacgtgcgccctcgcccgcgttgacaactttgcgctgaagaccttggcgatttgaataactggaaaaggggtcacgacactattcctgtgtttcactgacagctacaaaccccccggacttctatttctttacaacgtcaggtccacgacgtcgcacgacggcagaccgagcggcgagcctgtaccagccggataaatcaactaccggtgctcccttgcggttgacaccgaattgaacccttaataaccatttcccctcgatcaattgcacgatctgagctttaaatcaccatgtccctggaaacagcgcgacctaaggatgaacacgagtgttcctaatgatctagcgcgatttagcttaattgaatgggtcgaggagcattaggagaatctaaggacactgaaacagaagagcagagagcatgaacggacctggaatgagctagccacggtgaggtcactatgcgcagtgtttcggaccgatttgggggaaatcccaaattggggctctttggtgagtaattggaggcacgagcgggtggattggatgcttgaatacctaatagagccgagggtgtgctcaatttatagggcccttgagcggtggcccatgaatttgagctcgcgcggtggcggtcggagagaaagaggtgcactggcgcaagcaattggtggcatttaccgtggcaagctcaccggcgatcagcggatgggctaaggtgactc

SEQ ID NO: 146593 - DNA, 360 bp, Zea Mays
atcctccggttcaaataacactttcttcctatgcttgttcatgtttgcagccttgcacactactttgagctcaattgtttcattggtcttctcatgtatctttttatatatgcatcacgcttggaggcttccatattggttctttcattcattggagctggtcaatccttgattgctttcaccttggattcatccacttctattccctttcctgaaacatcaaagccaagaaacacaacatggtctgtgcaaaaactacacttctcaagataagcaaataatttctcctttctaagctcatctaagacttgccaaatgtgtttcacatgttcattaaaagacttgttgtaaattagaata

SEQ ID NO: 146594 - DNA, 515 bp, Zea Mays
tcagaaaacagcattcatctcacgcacgattcagaaaacaacactgaaaaaatgggtattcacaaaatagcactggttttgccaagggaatttataaaatgacactatgtttaacactagttccttcttcacacacaattataccaaatttctgatgatgtttctacggcatcattttttcccaactgatgatgcagccctttctttctcagatagaacaaagaggcgtttgattgggtagtggcaatagatggtcctgtaacattacatactcttggtcttcctttaacaaaaaaatccttcttcggagaatacttcctaaaaaaatattatcagcgggtagtgtatttggcctggcaaacgaatgattttttttgaagagatgataaaggatgaggcatgcgtttttctgactgctctcgctgcctgcagtgctatttcgtgaatactcggattcgcagtgttgtttactgaatcacctcacagaccagtgctattttatgaattctcccgtc

SEQ ID NO: 146595 - DNA, 386 bp, Zea Mays
caaatagatgcaatacacacatataaataaaggaaaacacttttctccttttatatgatctctttcaaattaggtgttacaaatcctaccccccttacaaaaatctcgtcctcgagatttaagaaggtctagggaaaagatggggaaaatcgatgcgaagctcttcttctctttcccaagttgcttcatcttctccgtggtgactccattgtactttacacatctttatcaccttatttcttgtaactcgagtcaatgtatcaagaatcttgataggatactccatgtaagtcaaatcaccctgaacactgagctcttccattggtaactgttcctcagggacacggagacacttcttcagttgagacacatggaacacattatgc

SEQ ID NO: 146596 - DNA, 637 bp, Zea Mays
cgaaaatccccaaccagacgcatcccaaagacccaaacccaagcgccgccactgccagccatgtcgtctcgcttccaccacggcggcggcgacgaccaccgcgtgggcgacgcgggcgacgccgccctcgcccgcgacatcgtcacgctccacaaggcgctctccctcgacccttccacccaccgccgccgcaccctaccactcccctccccatcccccgtcgtcactgagcagccgcgtaacaagccccgtctcaagccctcctcctcctcgtcgtcgtcgcgtaagctcctgccgtccacccctaactcctcctccgcttccacttcctcgtcctcgtcttccttctggaagaagtccctgactgccatttcgcacctgggccgccgccgcctcgacttcgcgttcgcgctgcatgtgcactccgtcaacggcctccccgctgcgctcgatgggtctgcggtctccgtacgcttccgccgaatgtccgtgtccgcctccacccgccccgtcgtggcggccctcggcgccgccgcgttcgaggaggcgctcacgctgcggtccccggtctacttctcccgcggcgcaaaggccgtggtcaagtacgagccccgttcctttgttgtctccgtcgccg

SEQ ID NO: 146597 - DNA, 746 bp, Zea Mays
tctgcataacttttctgccgactctgagcttcaagtaatcttttgcggatcagggcaactttctcttcggcctatttaacaaaggcaggtccttccagtgccttttcccctacgttggaccacattaggggggtctggcactttcgtccgtacaatacttcgaacggtgacattttgatactggcctgatggctgttgttatatgagaattcgacatatggcaaactggactcccagtttctgtcgaacatcaacacacaggctcttaataaatcctcgagaaccttgttgaccctttccgtctgaacatttgactaggggtgatagtcggtgctgaaatctaacttggtgcccatagcttgctgaaggctcttccaaaattttgaagtgaactgtgtccccctatctgacactatcttccgagggataccatggagtctgactatctctttaagatatatccgggcaagggtggctcctccaatggtggttttcactgggatgaagtgggctaccttggtaagacggtctattattacctagatagagtcattccctttttgcgtccggggtagtccggttacaaaatccatgcctatttcctcccacttccattcgggcactgggaggggttgcaataggcctgcaggtttctggtgctcggcttttgttcgttggcaactgtcacatcgggccacatactgtgctatttctttcttcatccctctccaccagtatctggtttt

SEQ ID NO: 146598 - DNA, 463 bp, Zea Mays
tgtgaataaacaccatcaaaaggggattgaataaccaataacacctaaataaatcatgcatcatgctgagttttacttgattatgcatttgtggctaataaaataaaggcaatgttaatatattaatggacacatggatttaaattctatttttggaaagcaaaattttaaagaaatgtggagaaggggggaaaagcattatccatcactaaataaaaatttcttaaaaataaattaatttatcccatgtcatattcaagtgggataattaatttggagacaagtttgctgtggaattcgaattcaaattcaaattggagtttgaattggaaaaagaagaaaagaaaatagaaaataaaatggaaaaagattaaaaccctgcctgggcctcggattctcctttcggcccaccagaagaaaccacgcgcgcggcccacgaagccacttatagcgcgcccacgct

SEQ ID NO: 146599 - DNA, 450 bp, Zea Mays
cgcggagctcgtgcgcgccctgtggcctgtgcgtgcagggacctcgcctcacaccgacggcctatagtgctagtagcacgtaaatattcagttatgcgagaaacacgagatatcaaacggggcaagaagcactcgtggctaatccatctgtcatgccgatctaggttatatatatcattatcagtggaagttcgttcgatttgaagccacgaggacgaggcatttcttggtttctttcaactgaaaccaccctgctcctggtgccaccaccaccagcagatgggataccaggcaggggtctcttcatagaaagtgcctgaccagatcacacactccgatactctcccatccagtgaccggcagtccactaacgtcctgtgctaagacatgaccaatccttggggggcacaaaaacgatttgcagaatcatatcgaatgcttgagttgacg

SEQ ID NO: 146600 - DNA, 537 bp, Zea Mays
gttttaagaatccttacccggctaagtattcttccaagaggggtagaatcataaaaggacattggtgcacggaataatgagttgagtaacttagaaaataaggatcttgatgtcttgaccccaagaacaacaactgctaatgatctaaatagcaagaagaacaccgagaagattccaattgcaatgtacacagaagtcaacttaagagtactaacatcaggattctcgacattagtagccatccatgaattctgtgatatttggccacatacgaaaattatatgggaaataatacccagagaagcatagaagaagcctttattctgacgcaggtagagaatataaggcttgagaccagtatcacccatttctctttcttctgtcttaatcagttgatctgttggtgatggtttcaaagactctttgtatctgcttccatgaacatcaattgtcttcttgatcaatatttcattttctctatggggaggcaccctgttaagatctgaaacaccaatagtgtctttatgggcatttaca

SEQ ID NO: 146601 - DNA, 445 bp, Zea Mays
gctagttattgctttatatttctgaacaagacgtttctgtctgttagaaattgttgcgacatttgcttagggattcccatgtgccatgttactagttacactgctattgctggtgatgttctaactcctatcggttgtacaatttaattctatgttcccttttctccttactaaatgcttcaagcatcactaattcttggtgtacaaatttgtgaactgatgagacagttcttcggtgtagtttggttaagacttagtaaaaatatagtaggtcaggagctttcatgtttacagcaacatcaacctgttcttgtgccatttctacatgaattagtgattactgctaaccagttagaaagtactaggacctaaaatctggtcatcgattttggctcatttgctctttttattaataattgggaacaatggaggtacaactaggtca

SEQ ID NO: 146602 - DNA, 1928 bp, Zea Mays
cctgcagattgccagtggaatcaatataggattgaggttcttcttgtgtaggagcagctttcatcaaacccttaacatttaagccctggcgtttgagaagagcttcacaaagaacacaattgatcaaattgtgaagggtgtaaagcatttcataaattttaaaggcggaaaactgaacctagaaaatttgtaaatagcaacctgcaactttgcctcttccatcctccgatgacaacttcaactcaggtgtctgtggccactccttaaattttgacttgaacgtaacagtctcaaacccttcaatcactttgattatatgtgttcttgttcggtttgaatcagagagcaatttctacataggcaattaaagtattaaacaaataaataataaacatcacaacaacatagtcaacaaaaagaagtcattctgaaaatatgcaatatctctaaatatttctaattagcctgaacaagtaactaagcctctaaaagatagaggaatatagatccaaaagacagccttaaaggtaaaaactgaaggagacagcctacgccatgttacaaaatcaatgagtccatcagcaagtctcagcaagactcatcagcattttcaatagtgtagcactaagaatacaatgaaatagcataagtaactagctgaacaaatgttacctcagcagcttcactagcaccctttctctccatcagggatgtaattctacccatccaaacatacaattcagcaccacagtctaagaagtaacacttgtttgtctcaagtaattcatgtgctaaagattggcagtcgacaggctccagctttccttggtcaaaactgaaaagtaaacatttcatagattactaattgatttcaggtagaaactgatttagttggcaaccaaacaaaaggagcttccgtatacagaataaaaactcagttgattaccatagcaatttgaaagcagtttcatcatgtttctcattgccttctgcaggtgccctcctaggaagaggggcaaagccgccaaaaaaaccccagaattcaccagcttccgcatcagccatcattctaccatcctctaagaaaagtgaaaacagtcatatctatagatttttaatttccagtaccacacaaggtgaatagatgctcaccaacagatgcaatttcacacttgccctcatgaaatgtatctttgatgtactgcacaacttcaagagcttttgctcgctcttgaatggatgagtttgagccactgaactggaaaattttggacttcgtatccaaaataaatatgtcatcatgattaagggatgatcgagcaaagggaacctggttgtaaaatggcaagtcttattatacgacatgaatacccatacttgaataaaaaagacagtcacgcagataacttgcctcgttaacatgaacaacatgcttcccatggcagacatataagtgggtcttgtaatcctgctcattgacctcaacatggttgaatccagatgccactcctcctggctgtggcatgatgcatggtctaaaataggacaggaatttttctgtttcattgccttgtatttctcggtactgaacagcacgcccgccaagagcagcatcaagctctactgttaaaatcgcagcagttccagcttcgtcctaccatggacaaaattggagtcaattacctttccaaaacagtatcaccaaatgacatgagaaatttacctgactagtatctttaccaatccagtaatggatatcatggcgaagagaaccatttttcaaggctgttgtctgtaagaagggaaaagatgcggaagaagttacatgcccgtgagcaaaatccaattgaatccccaagcataccaaatcaaataaaaataatgataccatatgtatggaatgaaaggagactaaaatgttgattaag

SEQ ID NO: 146603 - DNA, 676 bp, Zea Mays
ctggttataccctgcattaccatccaaaaaactaataattttattccccgaagcctgattaacaagttcatccgctataggcatcggatattcatctttcggggtggctctgttcaaatctctaaaatccacacaaatcctgatcttccccgtgttcttcttctcaattggcactatattggagacccactccgcatacctgcatggccttatgaaatttgctttcaacagcctatcaacttcttccttaactctgtcatggatgtcgtggttaaatcgtctaggtggctgcttgtgtggcctaaacccatgcttaattggtagcctatgctcaaccaactccctactcagccctggcatctcagtataatcccatgcaaaacagtctctaaattctctaagtaaatcacataccttttgcctctgaccggctattaatttagcacttacaaatgttggtcttggcacctttccgtctccaatgtccacttcctctagttcatcaacagatgagaacccctgtcctaactttccaagatcatcaaaatcatccaccacctctcccatatcgtttttgtttaaacgatattcatctgtcctctcctgtaaccattttaaactatcgtgttcattcatttataatgttgagtcattgagccgtgctatgtcagccggt

SEQ ID NO: 146604 - DNA, 731 bp, Zea Mays
ggcgcgaggacatgctgagggtggtgcccgtggaggtgcccaaggcggcgccgtcggcaacaagaagccggcacgagacgacggctgtcacaactgcggcaagcttggccactgggccagggactgtcgacagccacgacgtggctaggccaacgtcgcacaagcggaggcggaggaggaggctctgctcctagcacatgcaagcatcgagctatctcaagcggcatcggccgcagcggcactcctccaccttgatgagtcgaaagcacgcgatttcctcgacgacggctccagcaaagacatgatcgaaggatggtgcctcgacaccggcgccactcatcacatgaccggccgacgggagttcttcaccgagcttgactctagcgtccgaggctccgtcaagtttggggacgcctccggcgtagagatcaagggcgccggctcagtcgtcttcaccgccgcatctggtgagcacagactactcaccggagtctactacatccccgcattgaggaactctatcatcagcttaggacagctggacgagaatggttcgcgcgtggaggtcgagcacggagtcatgaggatctaggacccctctcgtcgccttcttgccaaggtacgcaggagtccaaatcggttatacatcctcaatgtgaaggtggcacaaccttgctgccttgctgctcgtcgagacgacggggcatgacagtagcacgagcgcttcgggc

SEQ ID NO: 146605 - DNA, 708 bp, Zea Mays
caagaactgaggaagttgtgttcgacatagttggcatggagtatcccgataatgcaactgttggaagagggacaatgaatgcctttaaagtcgtgctacattcaacatacctttacaggataatccatccaatcaaggcccaatttccatatttggaagtcaagaatctacaggaaaagtcgaaggaaacttgacagactccaaggtcattcacaacatagatgaagccgaagcccaaaatcaacagaagcacataagggacaaggcaacttcggcggatcagccaaggctatacttctttgtgaagatatagccgatcagaaatcactctttggaacacaattatcagaagagcaagaaaaaagcttaaaagttcttgttcaacaatagagacgtatttgcttgctcaactgatgatttacgtggagtaaatagaaacatcattgagcactctctcaacgtggatccttcaaccagaccaagaaagcaaaaactgagaaaaatgtcaaaagacaaagctgaaggagcaagagcagaagtcaaaaggcttctaagtgttggggtaatcaggaaagttacttacctagaatggcttgccaataatgtaattagatctgatcatgggtcacccgacccgaccaacccaacccgctcaaaaaaagacttggtctggctcgatccaaccaatgcaacagacgggtatggatt

SEQ ID NO: 146606 - DNA, 350 bp, Zea Mays
ctcgggtacacgattggaggcaatactttgtggttgggtgtgtgattacactacggagctgacggcgcgctcaatttataagaagcaagagcggcagccgggaatttggatgacgacgcgcggcagttggagaaggagaggagcactggcgcaagcgcttagtggttttcaccgtggcgctccctccggcgatcaccggatcccctaacgtgactaatcgtgacgtggtaaagtgtctggacacacggcacacggcagtgatcgatcaacggcggcgaggtcttatcccgatccaccgatgagcaagggggtacggcgggcttagccgcgaccgagctcgggctgatccc

SEQ ID NO: 146607 - DNA, 287 bp, Zea Mays
ttttccattgctttgaagatgtaaagcctcgacccactatatgtgacccaatcctcaatacatagtatttggtttgaagacgtgagatagtcttaagctatcatttcttaagatggagctactattgactctggaatcaactgactgagtatttttgttttcccatatgcaggcgcatccattttatgattttgaagaaccgatggactcagtcttagatgattttgtgtattgatggccttttacctacttgctatttggtctcaaatttagtttttcggccaggt

SEQ ID NO: 146608 - DNA, 324 bp, Zea Mays
ttcaaattatagggtttttgccctaggtcaccacatcaaagttgaagaccaattataggaggacaactttgctaaagagtgtgagctcagttgttaagaaaaatttagagataatcatgctcaaaccttggctgtcaggctgattaatttctgaatttcagacaagcagtgcaactgcaagcactttgggcatgaattaatgcatgatcgagcaagtatttgcctaggattgctataacaatattgtagctggatcttaggtctagaactttgctaaagggtgtcgatcatgttactgcacaaaattggaagttattggctctg

SEQ ID NO: 146609 - DNA, 589 bp, Zea Mays
aggtagcggagggtaggactgaaccggattgaggcgtcgtttgtgttatggctcaaggtcggaattgccggaactggtgttggaggccaccgcttcattgagtggatgtgctggtgaagcactgaagccatgttggaacaacatgaaagcacatcaatgtgcaccaaagctcccacctgtctcgtcgaatgttgtcgatacgacatcaaggtaccaatggtactagagaaatttgtagatttaaagattgagtgaggggcataggctggaggcctgctggatcagggcactgtcacagcaacaagcacacaaacgatttatagaggtttgagccgcgtgtgcgtaataccctatgtcctcattgttgtggatgaattgatggaagcaaagacgaaattacatgctcatacactatctgaactagaggaccgactagcctgccccctactttggttctggtgagagttctattctaattaccaaaagtgcaaaagtctaagaaggtttggactaagccagaccctagactgacttttttccctctaagttagacctagaatgagggcatggcctagatgctctaatcgat

SEQ ID NO: 146610 - DNA, 316 bp, Zea Mays
gtggcatgaaggccgacagtggaggacggctggcatggaggtgggcgatgcctgctgcggagagcagggaggtggggaagacgggactggggggcggtcacaggggaggcgccgcggaaggaggcgtagaggacaggggtgggggccagaggggccatgtgggggaaaatcatttcgcttacaatataagcgctttccaggccgcgtactagaaaatcgggatggacgttgtattttggatggtgggctaagcggcttgagaattaagcaaggtgtttgggtggacttatggcttagtttcaccaataagcgggaa

SEQ ID NO: 146611 - DNA, 385 bp, Zea Mays
ggctgaccagctaaccagccaggtaaactgtgctcagccgtacactaggcatgcatggagagctagccattgtacttattacgttgcggctcaaaatgtcttgttttgcagatcccactgctaagacacctcaagttcacggggtgctacttcatggctgaaactttcagaactcacgcgtatggaagttgtaccagcagctcccaatacaagaacctggcatatgtgctctctttcctgccatactactggcgagcaatgcaggtagattgatattgaacgaatctagcagatctatctgctcatcagactaactaaaatggtctactgctgcatgctagtgtctgagaaggtacttggaagaaggccacgacatgaaccagct

SEQ ID NO: 146612 - DNA, 509 bp, Zea Mays
gcaaagggagatcgtggaggaggaaaagcggcacggagacggagaacgggtctcaacgttcttgggccagtaaggacacagcagtcagattaaagctttttttagtaaggcaatcattaggaggtctgatgcttgacaatggtggagctgcggtgcatgtcttgtcggcccgtgcgagagagaaaactgaaggcgtcttctttcatgtcgctggaggttctgaatgatggatggatggatacctctgcaatagaagagatttagcacaaattacgaaacaaatatgagacggagcaaacgtggacagaaaacgaaaaaaaaaggagagagatggattgatgtcggagatggtgtgtctttgtaccaaagtgccttcattttatatacatggcgaagatatgtctacgtatgacaacttcatccattgtccatcagatgactacactcctgctgaatggacaaccagcgcacaagatcaaagcattgtcgcgaaccgcaacagggaggcc

SEQ ID NO: 146613 - DNA, 575 bp, Zea Mays
tgaagaaactagtatacgtcattgaccggggtaggaagtaggtgattggtttaattggccatcgacttccttatcatcgcacaaccgatatatatgtatatatgacatggacgcgggacggacggataagaaggtcgcagccgagcgtcagcacacggtctgtggaagcaagtttggaattcctcctttcagcggcgggcaagagccaagatggaaacaggctgagttcgagaagatatagtacacgtacatatacggtccactttggccggatctgtgttcatttatttttagaactagtttagaaacttaaatcctcttgggaattgaatatgattgaagttcattttcatcgtaatcctccgtaattctaaaggggatttgagaagtagactttcatgtagtacttttcaggcgtgcaacgacacgacttttgcatgcagccatgcaggggatgattggagttagctgatccatcggaccatctatcacacagcaaagggacgtggaggacgccagttcggagacaggatgcggagcaagaacaagaaaaaagtgggagtagctagtacaca

SEQ ID NO: 146614 - DNA, 577 bp, Zea Mays
aaaaatcgtaccactaagaaattgctgtcctggacctggggctccggtggcccgcacctcggtgtgtgctccttcgacggtggcggtggtgtggggatcatcaagcgcagcgctacctcgtcgccgtcctcgatctcggtcttcactgcgatgcgagcacatacaattgggcggttacgcagcttaccgtccgattttggcggcggccgattggagcattagaccttctgcgtgctcacctggcgcacacggtacgacaccagctccttcccgacggaataatccttgtccgcacgcttcggactggcgtcatcatcacgcgagggcccggtcctctcgcgcgccgacagcgtcgtcgcttgttgctctgccagccgcggtgcgtagtagcaggtcttttgctcgacgccgcctaggggatgtgcttgcagaagtctggagagatcttttgcaagcggcagcgcggcggcggcgcggtggcgcggcagaggcgcggcggcggctcggcctaccctaggtgagaggagcgcgtgtgtgtgggcgggatgagacagggggtgagagagagagccgcgcg

SEQ ID NO: 146615 - DNA, 755 bp, Zea Mays
ggtattcttgtttggttgtattagagctaatttgctttaatttctcactagctaacaattagctcttatgtcaaagaggttctatgataaatcagaataagtttatcagatattttggttgatagtttgtatttaaaaatatcgtccttgtaaaagaattgatgtaaatgatatattcttcaaaaaattctattgatgatgcatcaggttagagggaatcttctagcaatagctcttgtggtgatgtcttcctcttctggctagaaaacaacctcaaattttgtctcaccgtggcttcatcctcattagacctattcttgtggcaatgaacaccatagggctggcagcagtaggctagtagcaggctttctgatctcccagtgacacttctaggttctcattagttagtgcttgtgcatcttgacttctgactatttccttggcgatgttggtggggtattcttgcatttgctggctcagtgctgtgaattatgatacttgttttagtttttggatcttcatcttagctaacttctcccactcaaagggttgaggcgaagatatagctgaggtcactgggttgtcgaggttctcattgttgtgtttgctcttgcacatcatgacttctgatgaaaccttttcctgaagacatttcaccccctgagatgtggcctgcaaaaaatgattctccatcctcatgaactattgcatcggtgattgggtatcatctgttgcacaaacatcctcagtccttc

SEQ ID NO: 146616 - DNA, 876 bp, Zea Mays
gcaggaggatgaaaattaagtatgaacttatggaaggtgtctaccttcccatgatgttataagtagaagcactcagacccttatattgtaataatcactctttctacattgtcacatgtaatgtatattaagttattgtaactctttctacttttactctgatggtgtgtaatgtttgtgagatgttgaagaagacgtaagtcctgtcaagctactgcgtgcatctgcatgattgtctaaggtccttaggacaaagatagctgtaggtgggcctaatattttgggaggttccgtcacagaggataaccgaagatcgtgggattcctcgccaggattgagagtcatggcgggcaccacaccagggtacacctacatcagcgcttggccattggaaaccgcccaggagacatcaccagggtacacgaaaatcgttcgaggcatctcgaggcgtgtatcaggaccattggatacaaaattgctcaccggagttctttcgcgccaccgcgacacagacctccgtggtcgacgtacctcggggcacctataattggtgagaactcctttctctcgttcaccatttatcctacattgtttagcactagttttcgtgggagtctgggcaccagggcgccagtccgacgtgcgacggcatatgctttgccgcgtggtgtggcagcaccgccctgtctcggtaaggaatgggggcaaatggatcggatgtcgttctccttcaccatcgcaatatgtagcaatagttcgctagacaaaatatgctcctcagactcagatggcgtgcaccacccagtgtggtcgataggaaggaggaggccacctggccgtccaattggctatgggcggctaggattagaagacgca

SEQ ID NO: 146617 - DNA, 353 bp, Zea Mays
tgtgactgcgggggggtgttagatacccgtctcttgtaatgggcctggcccagttatttggtctattaatacactgcccaaccctactctagggttagggtttccattccaactgttaccactctcgtgcaagaaattttagcgcttcaattggcctcttgtgcatcgttgatgatgatcttcttgtccttgcccttatcaattgcattaggccgaacgaggactttttatcatcaaagtggatcatatttattgggaatggctttgtgtccacctgcatttcttgaaatttcaatcggacctcgttgatggccgattagacctgtcgttgaaacacattacaatcattatgg

SEQ ID NO: 146618 - DNA, 491 bp, Zea Mays
cgggtaccctatccaatacttcaactcctccattattgtcggtgacggctcgcttcttcctgtcatttccactggctccactactttacatggttctttacatctcaacaatgttcttgtgtcacctaaacttattaagaacctaatttccattcgctagtttactaccgataataactgttccattgaatttgatccctctggttgctctgtgaaggatctactatctcggaacgtgatcagtgcaatagctccgggccactataccccctgtgcctccctgctgcacacaacttcatcgccagctccactccgtcactttggcatcgtcgtctcggtcaccctggccacgagaccctctccaagctcgcatcaatcgttcccatgtgtaataaagatgctagctctcctttatgccatgcttgtcagttgagtcgtcatgttcgccttccgttcgtacgtctacttctcgtgcggttaacaatttcgat

SEQ ID NO: 146619 - DNA, 507 bp, Zea Mays
gtaaagctgagagaggtgaaaagcatgattgatgtgctgtgccgagcttggtcatggtataatatgtacaaataagcatctagtagtgagccctagttagtcatgatggttagctagttcaagagggggaattggcgaactaggttagtctttgctgctagggatgggagtgatgcttgttacgacaaggttggtgagtgtactggattgtcacctttaaaaaaacaacagccacttcccaccccattaaactcactccacccaaatcttccaccaaagctatgagagatggagtgtttgagcaacctctaatagcccccacctcaaaacaagtgtggattctcaaacctaaccattttaagcgcccacttgatgctttgcccaacgtctctagtgtccccttcctagagcaccactaccatccaaagtgaaccatgcccacaaaaaagaactccacccacgagagaggtgaggtaccactatgtgtattgcaagatggatgaccat

SEQ ID NO: 146620 - DNA, 408 bp, Zea Mays
gctccttcgtcaaatgcagatggaaacccaaggtcgggacctaatcttatggaagtaccaaaccaaattagggctccgcaacactccccagttgggaaggaccctccaaggtaacgggaatactctgacccaagggctactttctagctacgaccgaaggagcgcctcccccagtgctggaacatctctgtaagttctatctataaagcaggtctgaggggttgagtagtttcccttttgtaactaggtagcgcatacgtgtacgccaacctagcggggtctgtccccataaacccggcctgttggtccacacacatgcatgataagttataaaggaaaactaccctctcagatgcgcctctatgatagtatcgtcctactgctccacggtcttatcctgcagtcttc

SEQ ID NO: 146621 - DNA, 767 bp, Zea Mays
aaccactcaactgcttgtctagtctctttatggaaattcataaacctgcttattccagaattctttgcaaggagcatggtatggttaactatagttgatgtttgtagatttatttgctcctagttatgagctatttgtatttcattcataacatttttctcaagctgatcttcgtgatataattctttaagtgtttctacctttaatttttggcttgagcacttctgtcagatatactgctatgagctgtttatactgttatttgcatgacacaacatggttggccatgtggcattcatcttgttattcagtagctctgatatgttgttcaccaaatctaaagttactatttggcttgagttacctcagctactaggcatgccatgtactgtcagtgatcacagagttatgctaaagaaagaacatgtttaagtagtatttgcaaaaacattatttgcacgtccaatcgtccatggtagtgtgctgattactctttcaccctttgcatcccttagaaaaacattgttacattcttgtcttgagcaaagaatgttacaatgttagtagttgtgatttccatgtgtacttttgaaccatttgaaacctggaaaccattataagggatagtgtagttgcatacatggcgttgaaaatattttcattcatatgaagatgttacagatgtggcgctaactgctaaatgcatattaatgccaccaaatggatggatgaagccatatatgtaatgatggattaatgtggtgatg

SEQ ID NO: 146622 - DNA, 306 bp, Zea Mays
catcagcccatatatctccaatccggcaatcgtcccaagtagtaactgtatcaggatctctccatatccctctctacagagggagcttccagcacaccaaaccctacctgtgtctgtgtgtgcctgcctctctttatcatcaggagcttccactattccacaccttcctctatctcctgcccggccccctcgccacctccaccgatccagcgccatccgggtacgtccatggcgtccaccaccagcgatagcctcccctcctctccctccatccccaccaccgacggagccgccgaccaagagttc

SEQ ID NO: 146623 - DNA, 619 bp, Zea Mays
taacaaccgaggttcgcagtttccatttccaacctgatcaagtatgatctgtcaatgtaggggtatcaggatggcataagcaatgatctctaactctgagaaggaacgataggttcagacatttccacatgacagcgtagatagtaaacacatgcatcatgctaggcttcaacagcaactgaagtcagccaggtggttgtgttttagtcgcttggagcatgtagtaatttagtgtttggtaaatttattcagattctcaccataatcttgctctcttagtgaattgtactccaattgtagtgttgagttacattgcccgcaagagccgcaagagtgaaatttgttggcttcaacgattcacaaaggacaatctctactaactatttagacactaatgtagactgcccccacctccctacgcccgcccgcccagcactattattattattgattattctactgtttttgccttctgcaattcttcctattgtttctttgggagccgggtccaactgttagttcattctcataatgaaaatggatgtgagatagattcaggttcttgtctcgacacatgagatggattcacgtagcttgcttattattattgattattcta

SEQ ID NO: 146624 - DNA, 735 bp, Zea Mays
cttcactctgcaaacggtatagtatacaatacaaaacaatgttttaggtgaccatataggtgaactgttggaaacggtcttagacattgaaatctcgattcttatagcaagaatcttggttcgaatgcaaggacaagagacacccgatcccttctcgtcctccgcggcttcatgattgtcgtctacttccgctgcctcaaccaacaccaaggattggcgcgacatctacatagtctcctcttgatatgcacaataaatttatgagctcctcttagtccgcataacaaccatatgaactcattctttacctctccggcacaatgatctgattacaaccgtgtacaaacttgaattggatcaccaacaaactctctgactgatcgtcgtactcttgatcatcaccaaactgtctagaacatgtcgaccaccgagagtaacaagcacaaacttttcacttgatctaatcaaggctagtgagaacagtaggtgcacactaactattctcaacacgctaatgaaatcgctaatcgagtgattatcaactctaaaatccttcattagacaaaggctcttcctcacacacaaatgagtttcttcaacggttagaatgggcaagagagcttagagaatgtaagagttgactgtatatttgtaacctctaaccggtcaaatagcggttacattactatagaaaaaagttatggcccctcaaacgttggataactaagagtcgaa

SEQ ID NO: 146625 - DNA, 646 bp, Zea Mays
ctcaacggcggtgaaatccttatccccgagcggagagcaaggggaggaaagcactacagctggccggagtggcttacagctcaccggcggcaagggttcataccggctgtgcatatccgatgaccaccgagcacgaatcacgacgagccgcgatcaacggcaacggctaccggcgacgagcacgggggagatcttcttcagttaatcaggcactgtaccatggctaggaccaatctgatggactgacagccagagttaagggtcgattttcttccaaatttttgtggcaacacaaaccaaactctgcagcaaagttatagatctactaaccagctacaagtttgtcatagatgccatgggcagattcatgctggatcatagaggaatctttgctcaaagtctctgtggttacactgtttctctaaaaattcagactcagtgacctgacagtccaactttggctgagtttttctccaaatttctcataagaccatggcttgaatccttaaacaaagttgttctcctataattgggcttcaactttgatgtggtgatctagggcaaaaactctatgctttgaaagtcacaagggctcaaagttgtgctcaccacactgatttcagacttaggctatacaaaggtcaag

SEQ ID NO: 146626 - DNA, 401 bp, Zea Mays
acaccatatcaagccaactctcttcatgaaacttgctatccttcagataatctttaactttgctacatagagtagggctcatactccatgggattaattaccacagagctccaaacagataacccaacactgaaattcagtcttcaatacactgaatataactcagtttcagtcacctgacaatccaactttgagccagttttactccacttttcgtgtagaatcatgttatatccacttactgaaaactattcaatatcatatggtctttatttcatctacaaacaatatagcctaaaaccctatagaatagccacaaataggtttcaaaactgctatcaaaacactgaaattcagttttagttactgtttccaatctgaaaattcagaatacagcagca

SEQ ID NO: 146627 - DNA, 572 bp, Zea Mays
ttcgaggagacattttccaaaacaaacatggtaagtacaagtaccgtggggctacaaaaaaatcgaaacttgcaatgtgaactctgaaacttggtgtgtgacaacgtgtcttgtttgtccaggatgagcttcagatcggctccatctttcagcagctgcttaacgacggcgacgctgccaggaggattccaaggcagaatcagaaagccagcttcggcaccgagcaacacgaagagaccgctccctgcatgttgccgcgtcgacaaggcggactacgagtggtcattcatgatcgctttcccagcgatggcgcggagaagaaccggggccttgcagcgggaaagcttatcctccttccggattcgctgcaagagctgatgaaagtagccgaggtgaagtttgggaaggcagcgaggagggtgctcaccgtcgagggcgccgaggtcgacgacgttgcggtgctgagggatggtgaccacctggtgttgtgttcctaggactaaccactagcaagtagtacaagcacggccgattcgcttcacctaacgatggcaatggatacacgaaactcg

SEQ ID NO: 146628 - DNA, 658 bp, Zea Mays
ccggaaatgccctgcggtcagcagagaagcttcaacgggcgctgagcagctggaagacagcgcgcgcagaggagctgggggtcgcgagctgcaacaggaaggggccggggcgagttcggtcgggcagagggaaatcccacggcgagggagcacgacttgcaatggcgagcagagaatggaagccgcggggaagagagaagcagggaggattgccgacgaacaaaagctggaggaagcgctgcggaggatagagataaggaggagtatcgcgacgataaggctgagcggaagaaatatcagagcatacagcggctgagcggtcgggcggcaagatcttcttctccaagcacggcggcgcggcgtggaagaataacaggggaggctgcgagagggataagaacgatgacacaggaagagataggaacgattcaagagaagaaaaatctatgaagatattttcatttcttccccttttttaaataaaattgcagatattttgaattggtatttttagcgatgattaaagggtcgaataattaggattgacagcaacaattgggtaggatttgatttggcgaattttccggaatcaattgagttttcacccgtgatttgtatccggagattcagatcgagacgagaacacaccgaccgaact

SEQ ID NO: 146629 - DNA, 764 bp, Zea Mays
ctatcttgagaaacaagagggcagaaagaagaggtgtctggacagagccgctcgtgcagcacttgcaacgacagcagcaaatcaggttgagcagggagggtagttgagtatctcctataatcagatcgcctatcgcgttcgtcgtctcgagtctcggcctcgctcctcactgctcgctccactcctttcgacccagtctccactccacctcccacttcgccagctcctgtcgctcacgagccatccaccacactcgctctgtccaccacctccaccactctagcttctactactcctgctctcgtttccgctttgcctattcctccacctcgcttcagggagcgtgacgagaccgaggtgagaccgcttgctgctgatcctcgtcttcttgatcttcagcgagccacagctgcctaggtacattagttcaacacatacccgtggattctcggttaccagcttagagggacccagcagctgcgccactcttcaacactaggactcaagagtccttcagggcgcagttgtctgctcggattgccctgagagcacaccagcttttggatctacctacttttgtgtcagcaaccggtgcagagttagagggtcatctctcctatctgccaggtttactttctcttctgaccttcagtggtagatacattgaggagtgggtcagagtactctatgccacagtatggatagaccctgatcatcagtggctgaggttcaggtttgagcgagaggatatgactttgcatgct

SEQ ID NO: 146630 - DNA, 485 bp, Zea Mays
ccaaactcgaaagagcactcggccttgtgaggtgcatttcatcgtgcgctgatcagattcacgaacgacaccaacccaaggagacagcggtgggaccgtcgtgcccgcccgacagtgaggttgcgcacgtactcccaggacctcgtttgactcgtgatggcatcgccttgtcgagatcttgacctagcaagcttagcttctcgctcgttttcgtcttcccgatacacataaaccaaagaagaaaaaaggatcaaatatatatgagcactgcactgcactgcatgcagatcatcaactggacacaattctgtttgcagcagcagcagcagctgcagatgccattattatctacaaccggaaaagcttcttgcacgccttgaagatgccaccccgccgcttcttcttgtccctccgctcggcggccgcttcctccttccctttccctgccgccgcgtcctcgtctcgctgctccgtcttcttgttct

SEQ ID NO: 146631 - DNA, 386 bp, Zea Mays
agcagctctggcacacttgtccgccagggcgaagagcgtggggacagtctccacatcatgtgtggccagtttctccaacattttcttatcacgtaccccctgtcggaaggccgtgatgatggaggaatcggaaatacgaggtatcgtacctcgcaccttggtgaagcgggagatgaacttccggagggtctcccctggatcctgcctcacagcatggaggtgggcctctacaccgtgctgttgataagcactagcaaagttcgccacgaaccgcacacagagctcttcccaggagtagattgatcttggggcgaggttcatgagccaagtccgggctggtccagacagggcgacatgaaaatatgtcgccattacggcggtgtttc

SEQ ID NO: 146632 - DNA, 543 bp, Zea Mays
attggtactgggagcagctaaaaaggaaagacccttagctcctgcaaccatccatttctccctttcctcagcagtggcctctaagattgtagtgatattggggggggatccgttaaacaccactctgtttctgaacttccagatcatccaggctcccagaatcaaaagtgaatttacccccttcttggtcatgcctgacacaatatcagcaatacgtttccaccactgcaggaagtttgtgtcatcttggataggggcaagaatgtggagcctgaatttccgaagagtgatgtaccaatataatctggaaaagctacaagaaaccaaaatatggttgatggtttcaggctcttggtcacaaagagggcatctaggaggatgatttagtcctcttttttccagtctgtttgcagtccagcacctattatgagccaccagccaaaggaagaaccgacacttaggaggtgcccaagatttccagaccattttgtaatgctcaaaaccaacagagccagtggagaaacccttataagccgagcttgc

SEQ ID NO: 146633 - DNA, 451 bp, Zea Mays
gagagaatatagggggaccgatgcgggagatgaaaaagtagaggtggaatctagctaaggtcgcacaaaagtaggatatatggggagaaatttaaagagaaccgctttgtatagcctaaccctctgccatcagccctcacgagtcatgcccctgcccctacatctgcacagctacccataaccttcgccgcctcattggccccacccctatccacgaggtgtcatgccccggtcgcacactcactctgccatccgaagaagcacggttctcatatcgttggtgccacctctaggctccagcaggtgtctgcctcctgggccacaaaaatgtggcttctaagactgtctgcagcggtctcctctttccctcccctacgggctcctctccgacgcggtccccttctctctcacgccagatgaagcggtgcactattgactccccagctcctgc

SEQ ID NO: 146634 - DNA, 1326 bp, Zea Mays
ggtatacattcgccaccatgatcgtcgaaatatttacaggaccagttaggtatccagaataatattgtttactttttatcaaaacttactagttgaaagaccagtgatcaccatgccacatttaagtggttgatgaaaatgaaattaagaatttgactaatgctacagcctacagcaacacagttgggtacaatattttcgttttgtatggattttattattaatacagaaataatcagtgtcatagagtaaaagagtaatgccacatgcaatttatacaccctggcaacatgtccaaacacttatgcaggagaagatactaggttgtggcaagcaataactaatttcatcatttcattattgtcctgctcgcaagagtagcgagcagaacgttacatgtgccatgacttccggggcctattagctaacttctagctaacgtattcagtaagagttgatagatagtgttcagtttccaggtaccataatcaattcacacgaccagcagctgcacccaatttgccgttttttagtttggtcggctaactgatatcctaagaatgtcccacccaattcacacgaccagcagctgcacccaatttgccatttttaagctcggtcagctaactcatatcctaagaatgtcccacccaattcacacgaccagcagctgcacccaatttgacatttttaagctcggtcagctaactgatatcctaagaatgtctcaccccattcctacacgacgcgccaaatccagcgaagtctagtataacatcagttcaagcactaggtacagcatctgcaaactgcatcacgtccattacccggtccttgggtcgccagttggagacgaggccgctggtagagagcgcggcggtggtagcttcgtcgatcccctcgtggcgatagtcgcacagcacgaccacctggggcaggtacgcctcggacgccggcttctccacctcggggacctccaacccgttcttgggctccggcccgctggcgacggggaggtcatccgcgacgtggttctggtggtggttgtggtggtgatggggtagcggcggcaccggggccaatgacggcgacggcgaggacgaggagtggccgaacctggacgccatgagatctcccaatgccatcgacgtttgctgggttggtgggggaggggtttagggttagggtttagatgcggctgggaggatggagagagggggggtgtaggtaggtgggaggagaagcggcgtctcggactctcggtgcgggaggaagcaggcgacgccgagcaaggagagcgattgacgacgagaaagtaaaataaaa

SEQ ID NO: 146635 - DNA, 590 bp, Zea Mays
atttggcttttcagctttatctttatcagtcttcaactcagccagctcggttgagggtaccttcggaattataactggttcatcagttttctgtgtgggaggaacatgttctcttggttcaggcaccacgactggttcaatataacgtggccggtgggtaagtaccttcatctttttgcttgtagccttcgacacaggttcagccgaggcgaccacagcagtagctttcctcttcttcccttgcccccgcagcggatagcggtagttaggatagacgaagccaatagcgtcaaaaactctgttcaatctcttctttcctcgacttccgaaggctgtggacaatgcattatcttctgccttggaatatgatccaagcagttcatcacttgtcacttcgatgcattttaaccagtcgtcatttggcttgtcgaacttatccccatatctgaaagtatacttcagctggaccagctcaccttcgctagtattcggcgacagtttccttcggcatttctcagttctctacaagcggccatactctgaaggctatatgctcttggattaaatctcttgtaccaatgaaaaaacag

SEQ ID NO: 146636 - DNA, 627 bp, Zea Mays
agactcaggaacatcacattctgaacccatcctccactgaaagttacaaatttgcatttttttactgacacaaagggcttcattcttacatgttgccgggtattcacaggagggactgacttctaaatcaaagacccgtgcacacttgtcgataaaaaatcctaatggttaagttcttaaaggtaccttttggtgagcatagtacctttgcatcatcaatgaatcacttcagttagtcttgaagaacagtgaagttagtctatcactctgctgaaccggagaatgaatcgctttagttagtcttgaagaatagcagagtgatatccaaacttttcggctaactaaaacggagcaacccaatccttgaagaacaacagagaactggtttgcgtcgatgaacatccaaaatccaaaaccaaataagcagaatgaatcgacggattgccagagaagagtgtgcggcggctgttgagatgctcggctattgagattcgaaactagtcaacaactcaacaatctgagggagataaggggagattcggagagaacctttatatctgaggggtcggcgaggacggcgtcgcccgcaacagccgggcgcggatgccgtggacgcgaggccgaggc

SEQ ID NO: 146637 - DNA, 294 bp, Zea Mays
attggtttgtggtgatatgcttaattcctctcaggcgatgctcaataactctctctcatagcttcatagtgtggctcatgagcttaatccctcgatagttggtacaactttgaatatgtcccttgttcttgaagattggtactaatgtactcctccactcatcaggcatcttgtttgatcaaaaaaattggttgaacaacttggtcagtcaaacgacagcaatatcccgaggtatttccacacctctattgggatagcatccggtcccatcgccttgccccctttcatcctatt

SEQ ID NO: 146638 - DNA, 454 bp, Zea Mays
ttactattccccgattgcctaaccgttttgccctaactgctcatgagcgtttggttcccacctgtctgaacgcaacatgcaacgacggcaggaagcccacaagtacgccaaagtatttgggagcttcgaaagggtcacaaggcatggcagaagtatttagaacctacatcaagccgaagtcaaacacgttcaatccttcttggtcatatatagaatccacaaggtggtttccactgtccaccgacaccaagaggtgatagaggatgccacaacttcagataaaaataaactcaaagcacacaacaacgaaagttgtattgtgtattctgtcgagaaaacaaaggccacacaaacaaggattatgcaattacaatacaaaaataaagagaactagtagctgctaattaggagaatcagccaaaggaaatatgtcacacgacatcttactgtcccc

SEQ ID NO: 146639 - DNA, 787 bp, Zea Mays
ctccgctcggcccactccgctgtttcccctgcgcggcccaagacgccagccttccatcgcgccgactactgggacccggttgtcagcctcttttctcctcttcccctttctccttctgagcgacttgcgtgtgggcccgtgatgtcagctctcacccaaactccgtgtggcccacttaccagtccatccgtgcggcgcgctcgctaccagccatatccgacatttggaacccgcgtactagtcacattgtgtgagcacgggctctgccggtggcgcgcttgtgtcaacccaatcttcctaggcgttgttgcaatgccatggatgtcggatctgccgtggactgagcttcaatagagtcacgcaattctaggatcctctgcatgccaggcgatgattccgcgcccattgccccttcccccatgtacacgaccgatcaccccctggttggcccacgtacgggtcatgcccacggcaaccatggatgcgaaatccgcgggaatccttgccaacgtgcgctacctggccggattataggtgtataagtaagcgagctctacggccacctcccccacccgttcatgtcgtcgaagaccctctagacaccctcaattgacacggcgacgtgccagtattaccgccatccgcccctccctgtggccaagccttccccgcagcttcaatcggcggtggtctccatgtttgaattactattccgatagcaaatcacgagttggttagggtcgggatgcaccagcacgccgatctggcatgctccggtgatcctccg

SEQ ID NO: 146640 - DNA, 1009 bp, Zea Mays
cgatcacagccgcagtagcaccagcggcgccggtggccggaggaacaggagggcgtgaccatccgcagttccacaccgcacggcactatcgaaaatccacaagtttccccctttttttccccattatcattaccactagttctatcaatcagtaccagcagtagcttcggtttcgctcagcagtccgtccgtttcccaacaggaatgaaacatgagctctagatccctccctgcttcttcttcccggccggagctctacataaaaactggaagcgttcgccggttttccgatgttcacgttggatggggaagtcgtcgtgatcgatacgtcgaacgacaatcatatatttgagctgcagcctgcagctgatctgcgacatttttttctttctttgttggagatggtggcgtatccttgtcaagctaggagaagtagaaaagagacgagcatagcatttttttctcagagcctggctgcaattgcaacgaacgatcgatagcggagcaggtgagaccgtgactctgtctctactctcaacgtgagaggagagtagcaaacgcaggaaggaactggtacgcattgtatgacgcgacgcaatgaagaggcgaattaaattccgggacgccaccctccatgaaccagcacgcttccatctgaatattgcgagcatcgcccaccttaattgccgctgcaccccccggccccttggtcaactttgccaccaccaccgccggacgatacattaaatcatggccaattcatatatgtatatagatatagattgtatattacgagccttgatattctaataactaaagaaaaccctggctcaatggtgtcattcggttcatctgaatcagagtagtctcatacggtatcagtgtgcaaacaaattaagttacagtagctagaccagttgaacgagccgagccgaccagatagatacagggtcgcaaacacgccctaactgcgcttgaagagtgacctttcaagaaccgaacgttccca

SEQ ID NO: 146641 - DNA, 504 bp, Zea Mays
ctagcattgcaagaattaaagctatgctggacaaattaattaccatttccgaacagctgcagaggacgtattctaactttgaagtggcaaaaaaacaagacgaagaaagcactactgaaatcaagcaggcgcttgacattcaatgggaagctcttcgcactgttgatgaggaattggcctctgctgaaaagcagcggacagaaaccatgacgactattgagaaacttaatcaagttttaatggaggtagagcaaaagagagcgtgacttgaagaaatgcgttctacttcagatttggaggtgaggaaattggagcaggacttgtgtgatgcaattgcagacgcgagcaagaaggctattgatgtttttcagaaggaaacaacggaactgaatcagcgggctgagcaacttcttattgatttaaatagctgtcgatctagcaataactagggtcccgactgtttgggacgatctatgaatgttatttctctttattattatcaaa

SEQ ID NO: 146642 - DNA, 316 bp, Zea Mays
ctcggagtggtgcatgttttctttgcctactaatcattgcatgttttgtagactcctccaccgctttgtgattttgagtagtggattgacacaaatctcacagaaagacaagaagtggttggaaaatgttaaaaagtgggatgcagaggacaaagagaggatggagaaaagacgagaggagcttgctgccgagcaacaacgggaagacgagcaagaaatgaggcgtgttgctgaatgcagggaagagaaggagaagaagcttgagcatgcatgtcgtgcaaaggaagcaatggaggagaaccctgatgcatttcgc

SEQ ID NO: 146643 - DNA, 406 bp, Zea Mays
caaatctctaaagtccacacagatcctgatcttccctgtgttcttcttctcaactagtactatattggagacccactccgcatacctgcatggccttatgaaatttgctttcaacagccgatcaacttcttccttaactctgtcatggatgtcgtggttaaatcgtctaggtggctgcttttgtggcctaaacccatgcttaattggtagcctacggtcaaccaactccctactcagccctggcatctcagtataatcccatgcaaaacagtctctaaattctctaagtaaatcacataccttttgcctctgaccagctattaatttagcacttacaaatgttggccttggcaccttaccgtctccaatgtcgacttcctctagttcatcaacagatgagaacccc

SEQ ID NO: 146644 - DNA, 459 bp, Zea Mays
ccaggttcacagtagttcactaccaattcagttacataataaggttatacaaatactaagataaccttacaaaagctaactattacactgaatgcacatccagtgcccattcaacaccagcaggactggcctacttcatctgacgatccgaaagctcttcagaattgacatcatccagtgcccattccccaccgcccatatgttcatcttcagcaaattggttattgaaatactcagataatggtggcgacggaccagcttcaagatcttctaaacgatgtgcttcctcctcaagtgactgagcaagctcatacacgcgccacattgcaaagttcactgacacctctttggccgtatctggcgaatccataatctcgtttccggccaaatctttcaactccctcccaactacaagcatttttgcaatggcttgtgcgaggtcactacgaaccgtttcaa

SEQ ID NO: 146645 - DNA, 657 bp, Zea Mays
gttcaaattggaggctcggtaagcatcacagggtgacaagagtgctcaaacaagggagggtgagggctgaacggacctagaaagggctggccgcggtgagcagtttcttgcggtggcagaaacttgatttggggagaactccaaattcgcggattccagtgaatgactgtggctgattcgtggtggctggacagcttactagcctacggagttcggggaggggtcaatttatagcgagggtaagcggcggtggcgaatttgaccgagcagtgctggcggtcggagctggagaagaacgtaggtacggtgaacacgtatttatcgcggtggcaggctcatcgacgctgatgggactgcagtagggaatcacggggatgcaatggcgcggttaggacacacggtggccaacggcgagggcacgtcggcggtgagcagctttatccacgacggtgagcaaggggaggggtaccgcggctggccgggatggcgtccagctcaccggcggcggggatttgtaccaagctatgtttatccgatggccacgacgcacgaatcacggcgagcggcaatcaacggcgacgaaccaccggcggtgaagacagccgtgcggcgaccttatctgattcagttactgtaccatggtgcattccattcaac

SEQ ID NO: 146646 - DNA, 292 bp, Zea Mays
aaatttcaacggactgaatttggcacaggttttcttgcactccgtcagcctcattgctggctcgacgtagagtcacgagacgccatctcgcgacctagctagcaacttacttaggcatcttgcattcttgcttatcagatgagtctcccatgctactaatcagtaaccaatactggaatgtggccgtcaaagccatacatacacacgaagatgctttgatatacgaatgctgcagtcagccatactgcccccgccaaagtctgaaagcgtaggagccatgtgcgtgcgcgtg

SEQ ID NO: 146647 - DNA, 611 bp, Zea Mays
acacaatgataataagaagcaaaagaaccaaagagaaaagaaagtgaaagaaagggaaaactctgtcatcttaattttcttgctgaccttgtggtaatcttaatttctagttattattagctctgatcaaatgtatgtctgcacatatgccaatggattagcctctctttccttgctcaaatgagctccctgctgatgaagaattagcagaccaatctagcatgtcaaacagtggatccaagtccttggatattgctttctcgtgatggccacgatcaccaccacttggtttcgcttccatgtactctttggagaagattaagctcatgggatctgactccagctccgcgaggtcggagaagaagtcgtcagggtggccggcctccggtatcatcggcctgtagctctcactgaacacctggtccatgagttcaatgttgtggtctgctactgctgtatccatgacttgccccaatgcttctgatgatccagctgccaacgtctcctctttcacaaccgctgccggagaaatactagttgtcaacgtagtaatcgtgctagtggctgtcgtcgtggccgccggatccttgggctcttccttgacgttgctt

SEQ ID NO: 146648 - DNA, 312 bp, Zea Mays
tgtcagcgattaactgaattttgaatgcatatttctgagttatttcttaatgacaagctctatattttaaatcggcaactagatttgaatgggttgatctcttcacaaaagagaaaaggatgactaattctatcacataaagagtttcctctattattcttgtcctcactagtagaaaaatgtattaaaaatacatgattacatgaggtgaacatatttgttttgtctagagtgttgtttatatgtgctggacaaatatggaaaaaggagatataatactcaagtctcagtttgaagaagattagatattgt

SEQ ID NO: 146649 - DNA, 458 bp, Zea Mays
gtagtaccacgttccaccaaaacagaagttatcatgaacccgatggaacattaaggactccattatcataacaaatagcgtattaggtaaccttgtgaataattctgattccttgtttggggactaggtagaaaattagtaaaaacatgatgatttggtgatgtttggatgtggggttgtactggttgtactttgggccacttggaaaactaggaatgatatgtgctttagtagtaaaatgattatcgatccttctaatgtgatatttttgtgctatttctagatggattcaagtttattgtgtgctaaaatacccgctgttgggggtcttcttctctgccgaacattttttattacttcttttggatgctgaacaatatagaattatgttttgagttgaataaattagaattttgatctaaaattttgtgataattggtctaattttcttagttgaa

SEQ ID NO: 146650 - DNA, 430 bp, Zea Mays
gtaccatcttatttgtctcctattagaaaattgtgagactgtgaccctctccaagtctcttgtagtctgactcagttctctccagccgttccccctttgcatcaggtggtggcacccatgcaatggctgtttgtttcaagcgcgagcgcgagatcttgacgccacgtgtgaggtccgtgggtgggagggagcgcgccggagcatacaggaacactctatatctagcagacgcttgtagcatccggtatttgaccaaatgcaatagcacgtgctgttggagccttataggttataggacaacaccgaacgctaaatctagcgaacagaacgttgtaggctgtgccctgcatccccctacaccttcactcgagtcctcactccttggtcctccaaaggtgaaggtgaggcgaggcccatctccccaatcccc

SEQ ID NO: 146651 - DNA, 315 bp, Zea Mays
cggcgaccatttgttctatcgttgtgtactttactgaacgcgagcttctaactgggattacaggtgcaactcgctttctgaaccgtgttgttgcgtcgacattcaaaatgatccatatgcatgtcattagtgcgggatgatagcattcggttcccaacaagtcccaacatcatgccactgttgactgagacgacagtatttggttcgcagcaagtcccaatatcatggaactgtgtaattttgtcagtaggaactgctgttttgaaatctggaagctagaaagcctagaattctttagtaagtagtattgataag

SEQ ID NO: 146652 - DNA, 420 bp, Zea Mays
taatttcaaaacgcagttcacattttgccttaaatgaagaaaactggagccaagcaaacagatgagtgaatatacgcacaaacaacatagtgaaatcacacatttaattccttatggttaagaggaagtaccttgtggtaagcattgatgcatcacgagatgaggaggcagacattgctcgatcaatctcctccgttgtgaaatccatctcctcctcttcctcttccccctttcttgctcgcgcgactcagaagaaatcaaaatcttcctttctgcacccacaggaacaagagtcagatcaatcgtcgtctcatcctaggcctcccaagcaacaaactccggcgaaataataaatatggaattttttcaggcgcacgtacctcgttcaccttgtaccggtcgagggtcacctgcaccagc

SEQ ID NO: 146653 - DNA, 1081 bp, Zea Mays
gatttacaggataagctcagcataatttcagggataagcccccgtaacagactatgcgtttacatgctaatctaaactgatatagctataaactaggatgttgttacatatcttgatacacgctaacagccccccgcaatcttaaccggtagccacaaggttgagagtgggtcttagtcgctgcaacatttgtttagtagctggcttggtgaagatatctgcaacctgatctcctgaagcaatatgtcgaacatccagatttcctaatgcaaccttctctcgaacaaaatggaaatccacttctatatgcttggtatgagcatggaacacaggattagaactcaagtatgtagcacccaaattgtcacaccacaaaacaggcggtcttgactgcataacatgcaattccttcagcaatgattgtatccacgttgcttcagctgcaccatttgctaaagccttatactcggcctctgtagaagatcgtgatacagttggttgcttgcgagcattccatgagataaggtttggcccaaagaaaatggcatagcctccagttgaacgccgatcatcaatgcatcctgcccagtctgcatcggtgaagatgcttagtaaactagatcttgatggtcgtaatgacagtccagtattcaaagttccttttacaaaccgtagtatgcgcttgacagcctcccagtgcaggactgtgggtttggagaggaattgacatactttgttaactcagaatgacaagtcaggtcgtgtgagagtaaggtattgaagagcccccactgtactccgatagacaaaagcatccttgtctgtaagaggtttcccaattgctctagataatttttcagtggcacaaagaggagtggcagctgacttacagttttccatatgaactcgactaagaatatctctggcatatttctgttgagtgagtgtcatgcccccagaattgtaagtcacttcaataccaagaaagtaatttaactgacctagatccttcacaggaaaagagactgagagttgctgcagtaattgccttgttgcttcaggagaggagctggtaatgacg

SEQ ID NO: 146654 - DNA, 644 bp, Zea Mays
aggggtttggtgaaaatgtcagctaactaatgatgggtatcgatgtggcgcagatcgatgtcacctttctcagaattgtcatgaagaaactgaaaatgaacataaatatgcttggtccttggatgaagcacatgattctttgcaacacttatggcactcgtgctatcacaaagcagaggcacctgataaaaaaccaagccaaaatcacataaagttgacatcatccataacaactacgagcaacatctagcggcagcaacatatactcagcctctgttgtagactgagcaatgctagaatgttggcgcggagactaggaaaccaacaaagtcccagaaactgacaagtcccagaagtagacttgtgctccaagcaacatctcgcaaagtcagcatcaaaataaccgcacaaagacataacagaagaagaagagtaccatagaccaaactcaagagtgaagcataggtacctcataatatgtttcatgacctgtatttgagaagtgtgtggtatgcctagaaacaagcgcacaaacacattccaaagcatatatttggccccattgcagttaagtacatgagggagccaatcatgctcatgtactccttctggtccatgggctcgttgtcctcatcggcatcaag

SEQ ID NO: 146655 - DNA, 670 bp, Zea Mays
tttagctcaagagacatagtatatctaggtgtatagaaaaaactatgtacctagaaaaccaagaggacttataattcagagtacaatttacaatagcatacatggcaagcttatatgaaaagcaaaattaaaatcaacattcttcttaatacataaacaatcgcatctagcagcttaaagtttagctgttaggtcttgcaattcaaccaacgatatccatttcttatcactcggtttagttatcctcactgtatttaaagtcttatggcactttcagtgttctttattaaatcatctggtttactgactctgagttatcctgaagtttggacaaaaatctcaccctacacttggtgtttctgatttgtccctttgcacacttagctcaagattgatcggaagattctctgtattccgagtactgtgtctaacagtagtacttgtttgctcattatttactccttgtccatacacctgaaaatgaaaaagaaacgatgttttgtgattcacatacactagacatgtggaataaaacaaaacaaaattaaagatgagttctactaattgcatcctatttcgtctaactatttctagatgcatgtacctttctccgtaattcagtgttatgttgatgaagaaggttaactttgttgtatagttccatgctttc

SEQ ID NO: 146656 - DNA, 408 bp, Zea Mays
caaagttcgccagagataattcttgcagaccaatgagggcagacaaggcaggagaaggaacaccactactttccccactagctatgtaacgccggctgttcttctgaattagagggatttcgtcctcttcttcatcatcctcatcaacaacatggacaacacacccattggggtcagcgtcagacgggtcacacccattgggatcagcttcagtaaattcaggcactggcacttcctcagcaacaggagcagaaggaccagcaccctgatccaagctagacacgcgacgaagacgtctcttcttctttttctccccctcagcaggaaaagaggcttgatcagctcggcgagagcgttttggatgaacattgacagacttctaagcgtctaaagctttgtcagcctcag

SEQ ID NO: 146657 - DNA, 1242 bp, Zea Mays
attgagaccaagcaccttgtcgtgtcaatcgtggtgtcaacattttgcaggttagcataagcatacgctgtgcatgagcagttgtccctgcactctgcagcgcattggtcaaggcttctgttcttgatgtataagaacttgtcaggagtcttcatgctgggcaaggtgaagaaactatctccgtcaccacatttcagctcatcctttctccgacatcctttggaagaatcaagaccattgggctcaaaaccatcaaggcacttgcatgcaggaacaggtactgtgtcatcgcagtagccaaatgggccacaagaggcatacctgtcacatgatggataggggaattggctaaagattttccacgaagacgtgttgttgttccatcttcggaaagtggacatgcctgtgtaatccaaagttaagcgtatgctaggtgagccatcaggcacagtcaattgcatgtaatacccgtctcctgtatcgacaactgtctggtacatcatgaagcttgtgttgttttggaatatgccgtgcaccagttcaccaccccatgcggctcttctccagtatggctgtgtcccattccaaacgataatctggagacctgagctagggtcgccacccatggagaaatcactactggatgggtcatcaggtcccttccaggcaacaaggagcgtagcgctggaagctacgttcagtgaaaaatttacattggggacaattgtgtcagtcgggtaactgaagctctcccatatgtcggtgccatttggcaaccggataaccaagttccccgagtcgagcaggatggaagcagtttcaccgcctcctcctgcggtatagttgtttgtcgtcgtccagatggtgcggcctgtggagtctaacaagacaaggtcagaactgttggtaaaaactagcttcccaggcacattggtggtaattgggttgtcgcggttggcaatccacacgtatgtgcgctcgggaatgttgttgtaccatatgccgacataagaccttgaagagttcttcagggagaagaagccaagagcaaagacaccaccgcctgagatgagcacctcgttgggcaagagtggctttgcaggtgttagcctgtcatcggattggcataagacaaccatgaacaggaagacgaaaacggggaggtaagccatggccatgaagccttccttggcaagttggtgtatatatggttgtggagaagacaaacaaaggagatagcac

SEQ ID NO: 146658 - DNA, 592 bp, Zea Mays
cttgtgactagacaaaaaatttggtcatctggtcaccgggttcacttgtgacactagggcgggggcaaaccccttagccttagagcaagtccatcgagttggttcatttagtgggacaacctcttggtcagacaaaacatgttttttggtcatcctatgaatgcatcatgtcatatcctttttataggcatgatcgagtatccttcgttgttgttcccatttgtcccccatccacatgtgtttgtgttcctagagtgggtggatacgctaacattaccaaggctagtgtgaatgccgtgcttgtcaagctgcaaatggatagtctgagtgatacctagggattcgactagtgaggaatgtaccatagtaggtggtcccacattatgggtgcctaacttgttaggggcatctcaatatataacccttccttacttgacccagtccagactcgatgacaaatgagctcaattgatcatgtggcctaccactcgaagggttccataagggagtgataggtacggtctcagagacacacttgatcgactagccaggagatcccacacgtaaaagtgtggttagtcaggttccctat

SEQ ID NO: 146659 - DNA, 370 bp, Zea Mays
ctcgatcataagaccctggatggaattatggatggtggccagatcccacaaagaaagattttgtgcaatgtattttctgtcagaagatagtccctgcaggaataaagcggttcaaacagcaccttgctggtggatttggtgacacagttaaatgtgcaagtgttccggaattggtgtcaaaggaaatgcttgcttatcttagaatgaattcaagggctcttcctttgatcaatgtagatgaagaagaagatgcaactgaagagtttgcagctgcagaacctagttctgggacaaaatgcaagcaagctaagaagagaagtgctcagagtaccatgacatcgtttgttgtttctgcagcaacaaaaccaat

SEQ ID NO: 146660 - DNA, 527 bp, Zea Mays
cttggtgggcaaactttgtggctgtacaaccagcaggacatcaaattacttgggctgaatttaaggaagcttttagagcacattatattccagatggagtcctgcaaatgaaactggaggaatttttaaggcttaagcaaggtcctgacacggtgatgcaatatcttgtgaagttcaatcacttgtcccagtatgttgttgatcatgtgaacactgacggtaaaaagcgagattgtttcatgcggggtttgagttttaaactgcagaagaaaatggcaacttgttatgacttgacatttaatagagcagtcagtgtggtgattgcagtagaagacaaggggcgggtgcaccaaaatgcaaaaaggatgtggaaaggatctagaactggatcttcctaagatccagccaagcatcaaaaggtaatcatcagaacagctggctctaccaacactccctatcgttcagccacttaccctgctaaaactcctatctacattcgtcccaccaatatgcaacgccaatcacta

SEQ ID NO: 146661 - DNA, 287 bp, Zea Mays
cccggtgctctgccctatctgctagaagctgttgctgaagggtgtcctagtggtcctgagtagtctgaaacatggagagcatccactcggacaaatgttgctgcatcaaagactaaagaatgtctgccagggctggatgaattgctagaggtgcagcactggaaccacctgcctagtgatcatgtgagtgaggtggtacatgaggtggtggtggtagaatccctagatcatcatcatctaaatctaaagaagtatcagcaataagaggttccataccctgatactca

SEQ ID NO: 146662 - DNA, 528 bp, Zea Mays
gctataaatattaccttgtgattcttgatgatggctctcattacatgtggatttttctgttgcgcttgaagtccgatatgtccccccatgctttctcatttctttgcctgggtgtccactcagttcggtagcacctgccaagccattcagtgtgataactggacagactttgacaacttttctcgtgccatcttcctcaatcgtggcgtccatattcagatgtcatgcccctacacttctccctagaacagcaaggctgagcgcatgattcgcactaccaacaacatcatacgcttcctgctcttacaagtctcgattcatgttcggttctaggctaaggctctctacattgccaactacctgcttaatcgtctgcctattgaggcgatctgtgctctcacccctcactttgccttatttggctcacttctacctatgaacatcttcacgtcttcggatgtgcttgctatcccaaccttttcaccactgctcataagcttgcccacggttcgacaagttgtgtctttc

SEQ ID NO: 146663 - DNA, 563 bp, Zea Mays
cgagtagcaactgctgcatatcatcgatcgatcgtcgacgacgatgccgatgccggagtcacatccgcacgctgttgctgctgctgcggcgggtctggctctggcgtcgacgtctagccgtcggagcctcagcttgggctcctccatctcgcagtcattccggcagatggacacggaagaccccttcggccgggcgcagtcggaccacgacgacgaggagaacctgcgctgggccgcgctcgagaagctacccacctacgaccgcatgcgccagggtatcctccgccgggcgctggacaacgatcaacagcaacaacagcggcagagcgtcgaggtcgtcgacatccacaagctggccgccggcggcgacgggggccgtgcgctcttggaccgcctcttccaggaggacagcgagcgattcctgcgccgcctcagggacagaatcgacatggttggcatcgacctccccaccgtcgaagttcgctaccaccagttgacggtggaggctgacgtcattaccgccggtcgcgccctccccacgctctggaacgccgccaccaatt

SEQ ID NO: 146664 - DNA, 1213 bp, Zea Mays
agccccttagcccctgtcgcttcccaaaacaatctctcctcccctgctagccatatagataaggccaaacctggagtctagccctcgaatacacatctatttcgaagtttccaaattgtccaggctcaaaggcaattaaggagttgaggccttttctgggcaagccagccatgactcctatgatttgctcctaccagttcatgaaggaaaacagctctggctgaggagccaggctttctaatccaaaaggtctcagaagatgaaaccaaaaccctcttgtaaacacacaagagacaaggagatggttcaaggtttcttcttcctggtcacataagaggcatatcgtcgggtgatccatccctctcttggcaagtctgtccacagtccaacatctcctgtgggcaaccaaccaaaggaagaaacgacacttttaggggcccaagtttcccataccaaaggataataaccaaaaactgttgagcctgcaaagaaaccttcaattgttgttttggccgagtatttgccatctctagctaaactgaatatatgattatcctctacttcaggttgtaacaccacttctgatagcaaatcccacaactgcaagtagtccactatggctccaactgaaagagcccctctgatgtcagagatccattttctgttggttaaagcctctgaaacagttatattatttgcaattcttttggtataattgcaaacaacctaggagccagatcacttactctttgacccaagatccacttgtctgtctagaacagatcaacagagtgtgggctccattctccacttctgaaatcaaaacagtggaaagaaagcctttgccttttttggaacttggataggaagatttgcccaagtacgtcctggatcagatttatgcaagcaaagtcatctcatgcgaagggctcaatacaattcctttaagctagatattccaagacctcctaattgtagaggccgacacactcttccccaggctatcaaacaatgttctcccttggcatctttgcgacctctccacagaaatccccttctgatcttgtcaatagcatctagagcccaagaaggaagatcaatggtcattgctaagtagacaatcatgcttgtgagcacatgttgcattgcaccataacttttctaccgcctttgttacaaggtctgctttccagcttggtaggcgatcaacaat

SEQ ID NO: 146665 - DNA, 320 bp, Zea Mays
catgccgtgtgatcacggtgccacgctcgcgctgaccgcgtgggggccgctgcacagggctttctcctacctcctacccgcaatcccgcatgttgcaacaaacccaggatgggttccatccggattcttcgccaatccgaactcaatctttctcttggcgcctataaaaaccggggccatgaacccctcgggcattcgtaccacgccgacgtcgagaccgtgggggagaaaaaggaaggtgggcgtctctgtggcctacggtcaccttacaaccacaccatggctcagaggatgacaagcggagtaggagcatcaccgtg

SEQ ID NO: 146666 - DNA, 654 bp, Zea Mays
acagttatggccctgtttggcaagcctgctacttagggtttgattgtatgtgtatgaactctgtcacacacttcctacaagcacaaacaaccacacccgagaacacaagcggaaatacaaatacatatgcagtatgaataagcacgaggcaaaccaatcaggagacgcaaggatttgtttgactagagaacgggccaccacaactccacaaggcgccctacgtctccattgtggaagtcagtgagggacccatcaaggtctactcttggtcagacttgaaataacctctttccaccaatccactaagaagtcttctttccactttcagtgggaagactagcctttcttacaagaccaacgcaaacagcctacacaccctcgggtcctgctggtgacattttcccacctaagaacaaagttccaagagaaagatagcaacgaaccaaagatcttcgacttgctcaagttctcgaggatgggataactctcaaagcttcccaagctctgtattgccacaaaggcaagctcacgaagtttgggacaccccctaatcaaggtttaagctttctctattcaaacactcacaaagagagggagaggaatgcccaaggactattctggtcgttgataagagtggggaggatcaacaacatg

SEQ ID NO: 146667 - DNA, 496 bp, Zea Mays
caaacacgcgtctgtcgtccccgtctccgctccaccataactcccggtttctctgtgcttgcagcacaccttcccattccagcccgtaaaataaaataaaataaaacccattcacttctctgtgcttgcagcagcatagtggtagtggactagtggtagatgcacatcaggcgggccaacgcgttcgtgcaggcatcctagccttgcattgcagttgcaggaataaatgggagccgaacggatgtactagccaccatcaacgagtccgcgagatcacgagtgcacagcctcacacgcactagcaggagcgagatgaacgaacggacggacggacgagcgagcagacagcagatgctgggcgcttgatgccaggaacaggactggcatggctgaggcagatgcatgcactgaaatgcaatcgagtagcaagtacgtagggcccgtttggattccaaatgctaaactttaacatccctttgtgttaaccaagcagtgc

SEQ ID NO: 146668 - DNA, 515 bp, Zea Mays
cctttcaatcaacagttagcaaaataatcgagtattatcactcaaaatcccctttttgtagagtggttcaatcaactgtcgaccaaaatcaaaacgcagaaggaaactcatgaaactacaaactgcttaggagtgaagtaaaactgataattataacatggcttctctgaactcagtcattattgaaccaacagtacagatgcatgtattgtacatttagtagatgtagatcaaacccaactctcaaagcaatatgatggtatggtccagagcaaaggtggaaggagcgaattaacaactccatttggaagtctggatcgtcggctgagattgggagatagtaccctgctctttttggttgtgctgttgtgcagtcgagataaatctgtgcaggtgcagtgtaaggggaagagttagggattgctttgtaatgtggagactggagagaggtcagagaacctttattttagtcttgtgatacatttgagtttgggggttcgtctacacgtctgctt

SEQ ID NO: 146669 - DNA, 817 bp, Zea Mays
cgccgccctgctgctttgggttcttctccctcccccaccatgccttcaccagtaccctcctcgccttctctctccctctctctcctatcagctgttgccttcccgagttttcttttgcccttttccccttttccggttatcgtgagtgcgtgacgaaactgtccctagtggtcagcaaaaaatcctttcccttcgtcgctccaccaccaccaccatcttcgctttccttctctcatctcccaactctttccctctcaaacacacacttccaaacgagccatccgctaacctcgcccctccatttttttctctctcaatgctaagtttgcttgacgcggacgtcaagtcccatctcacgtttcgctttacagatccgcattcacattcctctctcttttttctattaccttcggaatttccaaattttgcgttggattagacatttgataagtacttacaaaggaaaataggttcttcgctttttttttccttccttggtgtatgtgcctgtgtttttgtttaattcatttatgcgccggtggttgactcttagacgtggggttaatttagggcaagtagtggaagccggtgggtgcggccggagctgggccttccatggcttccgtgccgccagagctgcccctgggcttgccccacggagcgctcgttttcccgggggggtagtccggtcattttcggccttccttttatcccccggcgcaattgctcgtgtggtgggagcgtggagcctgtgggccccgagtactcgggaggtggagagtggagacggagtcaaatgcgggagttaaaacgcggc

SEQ ID NO: 146670 - DNA, 517 bp, Zea Mays
gtgataggcggtgctgaagtctagcttggtgcccatagcttgctgaaggctcatccagaattttgaggggaactgtgttcctctgtctgacactatcttccatggaataccatggagtctgattatttctttaagatatatccgggcaagggtggctctgccgaaggtagtttttattgggatgaaatgagctaccttggtaagacggtcgattataacccagatagaatcgtttcctttttgtgtccgaggcagtccgattacgaaatccatgcctatttcttcccacttctatttgggtactggaaggggttgaagtagacctgcaggcttctaatgctctgccttagttccctggcaagtgtcacaccgggccacatactgtgctatctcctttttcattcctctccaccagtatctggtcttgaggtctaggtacatcttggtggtccctgggtggatagagtaggctgagttgtgagcttcgtcgagcagaactcctcgtgcctctcctttt

SEQ ID NO: 146671 - DNA, 360 bp, Zea Mays
gccagtggtttccatcccacccaccagttttcgattcaggttggaatcagctggtgtctctgtcagggcccaagagggtccgctatggttagataaagataacgctagtttgggataagatgagaattagagataagattagatctagtgtttagaggtcaaataaccctctctgtataaggagaaggattgtatcaattgaagggaagcaagagattagaaggaaatcccttctctcttgcaggtcgtgggcaaagccatgtggctgacctccccagcgtcccatccttactcgttgtgccacgtccccggtaggatccgcaacatatcaacccaccagatcctgatccctaacaatct

SEQ ID NO: 146672 - DNA, 761 bp, Zea Mays
tatatatctcaagtcaattatcagcaactatggtcttcttagtttgactttgatatcaagtgacgattgtggctttcaatacataaccatggaccaaaactaactgcctgatacctcaccatgtcgcctaaatttccctccatacctcacctcgtcgctcgccggaggagaaaacacaaacaaataagcgcagacaagagggcgaccaatctggcgaagctgctggagcctgctgctgtgactgcatggtgaggtagacggaactgccaaaacctgttgctgtgaccatacggacgggcgagagaccaagacgcgtcgagtggtgatgcggttctgagcccgtggttcagggcagctggaggagaggcagcgctccgctgcaggagacggcgcgtgcaggcggaggatggtcgacatgggcacaacggcggtgtttgtgggggagggggatgggattcctggctgcggcaacgacgagggggaagaggatggcactggggctctagcagttgctgttactcatcattgtcgacgccgacgacaaaaagaaaaggaaaaaaatgctttggatggttaggtcattgccttgttgctagatttttcctcgacgacctgactgaacggcggcaggaacggtgacggtgccctcctcgtatgcccagcagctggcgcgctgatggccacgggcttggaactgcccatgggcgatgctggtcagctggtgggaggccttgagcgttgggtgtgacctgtcgagccgg

SEQ ID NO: 146673 - DNA, 641 bp, Zea Mays
ccgagatgcttagtagtagtgattgcgttaagttgaaccgaagtgtctcgagtgcgtgccacaatatggttgtatgcgagacatggcaaaaatagagtgtgctcgatatgaatgtttggtcaatataggtagaaattgtcttggcttaattagagaggtgatggcatgccgtaagtagtcatcgcttcctctataattataagttgagtctatacgcgttaggcgttccttaaattgtgcttcacaaataagtgtatgattgtgcttatgacttgaatagatgtcttcgagtgaactgataggttcctaaggcaaatatgtgtaaggtgtttatagtaacactttatcccgaaaggtgttaagcctgcgcaaaaataagagataagtgtacttgttttatgcatgtgatcgacgattgggatagtcgaggcgaatgaggagtatgattaatccggttagagtcactatgttgttgatgccttgtgcgtaacctggggcacgtatgtgcgtgtgtgccgtggtgtattatagtggtggtggcataagatatttgattgagatgtgcgggtatatgctgtgatatggttatactcgcgatgatggaggatgtatgccttgggaacgcgacgcttaggtcgctg

SEQ ID NO: 146674 - DNA, 278 bp, Zea Mays
ttcagttgtgacacatgaaagaccggatgtacttgtgcatccccaggtaattccagcttgtatgccaccaccccaatcctcgatatcaccttgaaaggaccaaagtacttaaatgccaatttagggcagggtcggttcaccacagtcttttgtgcataaggttgtaatttcagcaaaaccagatcacccacttgaaactccctgggagttctgcccttgtcagcatactgcttcatgcgaagctgagctcgtgctaactgctcctttaacatgactga

SEQ ID NO: 146675 - DNA, 356 bp, Zea Mays
tttacccttcttgtcgtcgagaagtcttttcatgatggcagtgaaaatcttgtcgttggcgcgctcgatgacgccgttggattgtgggtggtatatcgaggcgaagataggcttggtgccgatggagaggcagaaatccctgaagtcctggctgtcgaactgtttgccgttgttgactgtgagctcagatgggactccgaatcagcaaacaatgttttgccagaagaacttttgggcggtcttcgacgttattgtggatactgccctggcctcgatccacttggtgaagtactcgacggcgacgaaggtgaatttgaggttcccttgagccgtaggtagtggtccgacaatatcta

SEQ ID NO: 146676 - DNA, 801 bp, Zea Mays
ggcaaatgacaagaaaggatagagcacagagcggcgtccaagaggctgctgtatgatgaacagaaatacttaaagcaaagcacaagggagtttctcgccctctctcgattatgcccaaactgcatttgctcttttgtcctacagcctgaactggaaatcagttgacaagcacaagggagtctgagctattgtgaaatcggacatgtgattgtggccgaagttagggatacaagaagttaactcagggcagaaatctctccgatacaggcaaagaagagcttctctactgaagtctggacattgttttgtctcttttagtatgcgactctgcacttcgatggtccatggggtccaaaaggaaatacaagcttttgctcataggaggttcacagatcgagtcaacatttcaagtgaacccacatcttagccaacagcaggtagactctttaagaatctggagtagcttttgctggtgagccgaagtgatagactcaaagatgtttagatcagattgtcaagtgctccgaaattagtcagttctattctatcatctcaggccagagatgtttttccctttgctgctaaggctcttctgttgaagcagtatggtttccttcggcctttccctcgccagctgcaagcacagtggtcaaccctttgtacttgctgtgcgtccgacgatgccaatggctgccgccaagcaagaaggcagaaaagaaggatgctgccatggaggagggagaaaaggggactgaatcactgaactgagtttcaatctggtaatgtcgactaggtacccgc

SEQ ID NO: 146677 - DNA, 468 bp, Zea Mays
cactccgacaccgaaagatgatgaagtggtagttttcaaaagctttttcagagcaggattacggtttccgctgaacgagataattggagaaattttggataattatgaaatctttcttcatcagctgacccctaacaccatcgttaggctcaacattttcatctgggcccttcgaagccaagggatggacccaaatgccgaagctttttgccgagtgcatgagctacattaccaaacgaaggctagagaagacgggctacatgaaaattttggctgttataacttcgcgtatcgcaaggatacgaaggcttcggtcctcagctatcgcaccaagtggccaattagctggaagagtgagtggttctatatcaaggccgatgagaagaagagggagaagttgaagacgatggtcatgagcccactgagtttaagcttcgggatgaccagacccttgtgcaatatgaagct

SEQ ID NO: 146678 - DNA, 289 bp, Zea Mays
gttgattggaaaccctgtcacatacctcttggtctattcatggaagatagattgcaatccttattcagagtgttttgtgaagcatatatgatgaccattatcttttatttgaggcttggccgttataaaccatgttcatcactcaccgttgaaataggagattgaattatgcagagtagtttttctttttcttatgtttgctggattgctgatttgagttattgggcaaacaactgttttgttcttcactcctggtcccggtggcttcctcaaccattgctgctcatta

SEQ ID NO: 146679 - DNA, 774 bp, Zea Mays
gtcttcacggtgccctacgcatcacctgcaagcactgctgccgggccggccgtggagcagcagcgcgcatcgccagcaggcgcggccaactgggctctcagcgaggagcagcagaagctgtgcggccgcaaggtccgggacaccctgcgtgggtccttcgacaggagcgtcctcgtctggcacatcgccaccgacctctgcttccgcatggaacaagttcctcctgacgccgacaaggaagaagactcgcactggctccgcatcaagtgcacggaagcgatatcctgctacatggctcgcctgctcgactcccaccccgacatgctgctcaccggcagcaggcggcacctggtcagcgaagccttggatgaactcgagtccatctttgaccgcaccatggtagatcgcagcggcaagccaccgggcaaagacgacctgcacaagatcatcgacgacgtggcgcgggtacgtttccaggtgcccgtcggcgtcgctcatggagctgcagacgacgacggggaggaggcggtacagtctttcttccacatccccgaggcatgcgggcttgcaatggagctgctgcagcttgaagcgtccacgcgctggagggtgatgtatcgggtgtggctgggcatgctcttctactccgccagcatgtgcaggggctacctgcacgctaagagcttgggtgaaggtggcgagttcctttcctacgtctggctcgtcctctcgctcaagggggccaagaccctggccgacaagcttcagatgttg

SEQ ID NO: 146680 - DNA, 437 bp, Zea Mays
gtttgggtgtcagaattagaggtgtggacacttggctcatgggatagcactcgtttttgtttcgaggtgttgccttcaccctctggctcggtggtggcttttggatcattggacaacgacgagatttcatcaacgaaggcgacctttccctttttggtgctagggtgagggctgcatttgctgcctcgaattcgggtggggagctagcacgggtgctctttttgggagacatcgtgggattggtcttcgtcgcatgaacattggtcgtcaaatgttaggcctcgacatgtgaacctagacactcaggaacaggtgagaggcacgatgcacgacaagacttttggtggggaactgtagtgccttgttatgtgtgtctcatccagctacaggacgggggtatttatagagcaagctgtgagaaggtggccccgaagtat

SEQ ID NO: 146681 - DNA, 406 bp, Zea Mays
cgcgacgggcgcggccgtgatcgtcatcgcgcaggcggcactttcggagccaccaagggaaggaaagagacgatccgctgatcgccggacgactctcatccgttctccaacaaagcgggctgattggcactcctgctcccaagttccccactcccttccccgaattccggaccgagtcgatggcggcgacggcggagagcccctcgaccggcggcttcgtgctgtggctgcacggctccggcgggtcgggcgacgagagccgcgcgcaggtcgcgccctacttctccgacccgggcgtcgcctcctccgtccggctgtccttccccaccgcgcccacgtccttcatcccttgctacggtgagcgccgccgccgcacctgccatcccatccagcctataatgtttac

SEQ ID NO: 146682 - DNA, 438 bp, Zea Mays
cggtctcccaccacagctgctctgctcctcacgcaactcgaagcgcaacggagggaaacccaacaccccactgccacactcccctcccctcggctttgtccagtctccactttttttctcccagcaccaccagatcgcgggaaatgtccgtatagcctcagcaagaagcaagaagcaagaagcagtcgggaggcaatgggttgctgcatcagcaagaagtgcgacgagccgccgggcacggcggctggggaagtttcccggcgtcggtcggaggcgcgcgacccgccgccgcccccgccggaggaggagacggtgaaggaggtcctctcggagaccccgaaggccaagccgaggcccagtccgaggcgcgtggctgcgtcggcggggaaagaagcaggggagatgggggccaatgcgaagcttggcactgctagggcg

SEQ ID NO: 146683 - DNA, 469 bp, Zea Mays
tcctgcgccaacggtcggccaggtcgatccgccgcgccgccgccatcgccgcggacggcgccggtccgtgatcggtgccggcccggcgtggttctagggtttcggcaagacggcgagcgagcgcgcgggatagagacgtgaatgcgagagcgcgggagtgcggtttcggaacggaaggatttgcgaatggtatggtatctgccgggcgaggttataggcaatggcggccccttgcccggaaccgctcctccgtgcccgccactttgggggaagtacgctgcgcgttctcgcgcccggcgcagtagccgaatttcgtgttgttttccccctttctctttctagagcgactctaattctctaaacaactctctaaatcttattttaaaagtaaacaaaaaatagtttttaatagttctctaaatagatttgctaattttagttacttcctatccaaccatagttgccgtta

SEQ ID NO: 146684 - DNA, 498 bp, Zea Mays
tgtgcggctacgacaaatcggtcccgactccgggagatctatcacgacagaatgagcatcagaaaggaagcgtacgttgctgcactgatactgaacttcacagctgcactgcacacatgcagaacagacaacgagttcaaaggctagcagcctagcactaagtcagaaagctagcagcgtgccctatccagaattcataattaaaatgtcaactgttttctgtaacttccggtcgcatcttgctctcaatcacagatgcccagatcagtcagtacgcaaacgcaagtatatttttttttacagaccagacctaacaaaaccaggctggacgtactgagggagaaagatcaacgtgcgaaccatgcatgcagtgggcacgtaatcaaatctgactgaaacccatctccagcctattttttcaccaagtggacgcgaaaaaaaaattaagcaaagcatcgccatagccatagccgagagttatcagcagatgagtcctac

SEQ ID NO: 146685 - DNA, 670 bp, Zea Mays
gtctcttctcgacttgtttccaccactaggtgtgtggtgacaacctccatcagtgctgacctcctcgcattctttgcgacccatttaggcatagatcggcacaggtggagggtgtgctcacagctctagccttaagacttcttgcgctctttaaaactgtgtccaacagatcgtgtatatggtcgtgcaaaatatattttttgcactagagatataacacaatttgtagaacgaagtttaaaacaggaggtgagatagataataggataggagtgcttttgggcacaatatccgtagactccagcaaggatgtagagctgaagactatgatggagaagaggggcggatgcgtgatagagaaagggccacgatgcatgagggagggagaggctcaatgtgtggcagagtgtagctagcgtcgggtgcagagtgggtatgagaagagctagggttcatcgtctcttataaattctaggttgatttgggtcaacgactatttatttaagaggcctatctccgttaattgattttaagagacaatcaagttttaagtgtctttgtaaatggtttgtctgtctccaaaaaatcaggggacattttagaagacagtgagattttatgtccacctctgttaatcaaatcgtttgtcttccaaaatcatctatgtaat

SEQ ID NO: 146686 - DNA, 442 bp, Zea Mays
caacgacgacgagggacaccatctcagctggccaaccgctacgcattcacgacaagctcgtctcccagaatggaaggtacgccctagggtttttcgaggcgggtagctcccaaaacacaagcaactggtaccttggcatatggttcaatagcatccccaaatttaccgtagggtgggtagcaaacagggatgccccaatgaagaaccacacctcactggagctcaaaatctcccacgacggcaaccttgttgtcgcaaaccgggccaccgactccattgtctggtcgactgaggtcaacatgaactacagaaacaacaccattattgctgttctgctgaacagctcaaatcttgtcctaagggacgacgatgcctccaactcgtccagcattagtatatggcaaagctttgaccacccgacagattcgttgttccagtgggc

SEQ ID NO: 146687 - DNA, 715 bp, Zea Mays
ctgatagaattagcaaagagtgagatgtctacctggaaagcgcacactggaggtgacgatccaggcagaacggaagacggcacacacaaagtcactgaaatgacagaagaggtgagcacgtattagtcacatagtcataagcatatgaaatgtgaacaaatacatacacaaagagatatggcacgagacggaacgatcgataagtcaaaaaccgtgaaaacgacgtttgacggacaaatagagacatgggatgattggaattcaaaatgaggcacaaaacgatatgggattgagccgatacttcacgaataggtttatataggtcaatatgagtgaagtgtgtgcttggtttgaatttaggcgaagaaatagggttttgggcactcggctcggaaacgatcgtgcaaaacgagaattttggttaaatttaagcttgggatctcggattggtgtgaaatttggcaagtaggttactggaagtgtggtgaaggtgcctgaaaaatttgggttcaattggagcaagtttggctggtttgggcatttcaccgaacacttgttgggcgaggatttagggttttaggtatatggccatttgaggtgggaatgccctcccgaagaagctaagagtttgcagggatacacaacagagacaatagagcacaaatcaccaattggattcacaggatttctcagagattggaaggattggcaaaag

SEQ ID NO: 146688 - DNA, 1285 bp, Zea Mays
ctcttttgtaaggttgacgcagtgaagaggtacagagccatttcggccgttggattagatgtgatcgcaccagattaaatccgaaccaaaacgaaccggtacgcatccaggatcgctcgatctgagattggtggctacggttttatgagatccagatctaatcggagccgtccagagagcgatcaacggccaacgcctattgtttcccccacggtggtcggatctaaaactaacggctctgatgtaatacaacgaaagggataagcccaaactaatctataccgtccaaagctggatttgcggtccctaggctttcttctacctcacgatggctagggacagcggagtagaggccgcgacggtgtatgattggcaggattctcgccagtgccctagtgtacggatccgagattaactaggtgctacttgatacgcgcagtaagtataactagatggatggggttctcaccggaggttctggcgttgtggtctgttcggtgtcgaagttcctgcctggtgaggaatcggcctcgctcgatctcttcgcacacacggtactctctctttctgagtgcgacagtgaacaccgcctcccttgctggattgcaagcgcagcagcgaccccgtggtcggctttcttccttggtgcgccaagaacatgaggtaagcgcggcgggtgcaatgattacctctccatatcagttcacgttggtggcatctatggctcgatctctctctctgtattggcggtagtgtttggcttctcaggatgattatggctctatgggtcaggagcatgcaccaggctcctaatatactccgacgtattgaccagggaatacatatagctggcgtaacaaccaacagctggatacgggagggcggctgggtgatccgtgtttgacgcatgagtctgttacatccgtagaataggagattctattgaatccagacccacaagcagcgacctaggaagcttagatcacgttcgtgaggacttctgatggcttgcatgctgacctcattatgatgatagggtgacgcaggctccggcaaggagattaaagaattgataaaaaaactacatgtgatcatgggctgctatatggagtgggctgcgcggtacaagggagggctgggccgactaccgtggtttggtaagtttttttctatataaattctctatttccaacctttataattattatcttattattatccttattattttatgtaatgcacaaacacataaaactccaacaagatgcactttcttttatttttt

SEQ ID NO: 146689 - DNA, 311 bp, Zea Mays
tcggcgattcattccggatttcttcagaattgctaaaccaatgactgagttgttgaagaaaggagtgaaatttgattggagtctgaaatgtgaagatgcctttcacgccttgaggcgacatctgacaacagcacccgtgctagcacagcctgacaacaccaaatcatttgatgtggattgtgatgcttcgggcactggactaggttgtgttttgatgcaagacaaccgagttattgcctacgcatccagagcacttaggcctcatgagcaaaattatcccacacatgatctagagttagcagcggtagtcc

SEQ ID NO: 146690 - DNA, 483 bp, Zea Mays
agacgtacctctgtaatttcttcttcgccatcagacttgggagtatgttgatatgtgagggggttactgagcggtggatatattagcttccttgtagcctaaaagtaaacattgtataacataatttagttgtgagacgttacctaggtagcaggaaaaataaggtgtttcagtatggtcatatgataacctgtttgggtggtggagtacttgtggataaattttgaaaaggatttgatggtgagttctcgattaactgcagttgtaacttgttctgtggtgttgatgtaccttctatgatattggttggcttcaatggtagtgcatgttgtctaccatgcgctgcagttatagagatgatgcgaagggcaatggggacctggtcttggttatcgaaagaactgtcatctggtattactctaaaggtgaatttcagtgaaacaatctgagctaaatctggaggaattggtgtcgctgcatttg

SEQ ID NO: 146691 - DNA, 681 bp, Zea Mays
tctgcacttcaacacttatctgtggtataagctttatttgaagtgcaggacattttgagacaggatcttctattccgctgcaacctactcgaagggtcttctcactccactgtgtactaagtcttcgagtagagtaagaatttaagttttaaagtgataagttttattcgcctattcaccccccctctaggcgacatccagatcctgttctcgggtcaaagggaactttcaattaggtagacgaggcaccatcgaagaagagcggtgcgacaactgggtgtgtcggagcagcatcctagacatggctcgtagagacgatggctgctgcacaagtgggctcgtaagagagaagggctgtggaagagtgcacggtgctctcaaaatgggcaggatggtggttgcgattgcgacgaaacccatggcagctgtcgtggtggtcgcggtcgaccctgagaatgcaaaggcggttgcggacctctcatcaaaccgccggcttcagctgtccgagcaggagcaggaggaggaagtagggctcgaatctcctgatcgacccgcgaaagcccatggagcagctcatggagctcgttagtgcagagatcgtctaccttgctgcagacaataagcttgcccatcctcgacccatcccggatcgccttgacgcgcgccagggactccgcggcc

SEQ ID NO: 146692 - DNA, 612 bp, Zea Mays
catgctaaatacatgtaaatgcatgatgccctttggtgtaaatgtagatgcagagctgttttgtatgttaaagtccctacatcctatgtttatgataactgatttcagaattgttttgtatttgtttatatatgtggctcatgccgtttaccattggtttgctgcaacttgagattctgtaaatagaaatggctgattgtgtttttctgcagaactatttagaacccatagctcttattgaattgtacattagttttgtgactggaagtcgtgtgtttgcagtcaattgcagacacatgatgatcttgtttgttattgcaagaacctgagtcttgttgtacttatctgctctcaagatgttcttgtttagattaactgaatctgtctacttcttctgatactttatacgcagtctgcctgtccgagctttagcctgagttcctaatatgtgctgcaccccctccccctgtccgagctctagcctgaatttgtctacctcttccgattccttatatgcggtaacaaattgtccacaatgattgtagcatattactcattaatatacacttgtgtgtgaacctgtttgtttgcttgtctgctgcctgcccagct

SEQ ID NO: 146693 - DNA, 581 bp, Zea Mays
ctgacctttttatatgtttttcattgactataaactattgtgtagttttactatagcaggagctaaatgtttgtacaagtagaatcataaagcataatctggtgatttagacgcttgcaagaagcaagagacgtgtgtgctgttttatctatctagattctagatcgagctatcaagcctattttatcttggaaaacaaggaggagtgtgtgggtgtggctagctactaaacaatccattctcattcctcgttctcaaacaagtaagggtacaacaattaacttgttcttcggcgtgcagctgctgctaggatgaggtgcttccgcatctgctcagtctggtagttggacaggaacttcatgcacataggcggctccaccttgaagatggccagcagcgaagacggcagcgcccagagcccatcgccacagatcaaaccagacgccaccacgaccgacagcaggttcgctgcctgcttgttccttctcctccacaggatgactaggaggctccccaggcacatgtctatggcgaaggtcggccccacaaagaaggggatggccatggccatgatgtttggg

SEQ ID NO: 146694 - DNA, 282 bp, Zea Mays
ttttttgacccgcgggttagacccgtatccgatccgagataaagtgggcatggatttggatattaaatctcacccgtggataatccgttggatatccgaaattaaccattagttcattattgagcccaggcgccagcccaccaaagtaacattcagcgcaccaaagcaccaagccaccagcccaccataatccctaatttcccaatccccatccgaccatcccctagcctcaatcgttcaatcccagcctcccagtcatcctgcagcctcaagcgcaaaagc

SEQ ID NO: 146695 - DNA, 509 bp, Zea Mays
cgactgcacccatacacacatatacgcgctctggctggctgcctgcctggcttgcggagctccgtttcggccggccatctctcgctacgctacgagcgcgcgcggcccccgcgcccgtgtcttcccgctgtcgaccgtcgtgttgatcgtacatgcagctgctagtagcgaactatagttgcagaccgcatcagtgcgtgacaagaggatatatattatcagacacgcacgcgatcgcgcggagatgaaccagtgcgtgccgagctgggatctggtggacgacccgacggcggcggtagctggcggcggaggcggcctaaaccatcaggtctcgacgaccgggggcgcgcaccggggcctgctcctgcaggcgtcagctggaggagcaggcggcgggggcgcgttcgctcccgtcgtcgtgcccatgtcgaaccagtactacgaggtggcggagctgacgtgggagaagggcaacatctcctcccacggcctgctcaaccgcccggcgc

SEQ ID NO: 146696 - DNA, 340 bp, Zea Mays
cccagatgtttagtgccgtgattctaaaactatatttacacatttcgcagccctatctatcatagtcagatctcgtgcatggtggcatgtgcatcgagcaaattagtctggaatcaaattagtctgtaatcagtgtcaacatgcaagcacgtatgatatcggcattacctagcttcaaactcacttccatttcattgtctattccaagtcagtcagtgagatggacggtcctttcttcctaacaaacacaaccttttcttcctcttctcatcttatatatatgcttgatcagccttctcttagcagactctaattgccatcacgcaaaagatctgtgcgc

SEQ ID NO: 146697 - DNA, 282 bp, Zea Mays
ttttggcaatgacatgcacggaaatatcaggccagtacgtcgtcctcgtcgatgcacacaaactatagctatatacctgatgagcgtttgttggatcggagtcactatcagttgattatttatatcaacaagtcgatggcgacgctgctggctagctaacggacaacaatgggcaccactcttcgtcgtcctggacccacacactagtcttcggatagtctgtggacgaaaacgaaccaaccaccaattgaaaccagcggcgttatttcgtcaaatggagat

SEQ ID NO: 146698 - DNA, 910 bp, Zea Mays
taaaagagaagttttcattttatgaccaaataatatatttttaaactagtttgactcgcccaaattcttctatagttgcatcttttatgaacgtagggagcatcttgaaagagggatacgtcatgatccactttttccatttgccaagaaagcaaattccacgaagctatcacccaaaataattcaatgtgatgttgcttgctgcatctcgaattaatttctgtctatatgaataccctattcgcttggctttaatttgtatcggcttctattctacagtatttttgcctctataaattacaattgcaatagtgcaaacaactgattttattctgaagcgaacaacctatagacataaaatttatacatgttcgagccctcctgagcgataatacctcacgtccagtttaccggtggttatgttctgattattttccgtgccccttgggacatctccttcttctttttatagttgaaacaaggagtctggtaggagttttattggaggcggtctaatacccaggctaactattagctttaggacgttctaaacagaatctagcgtggaggtttgagtgcttggaaaggtcttaaatgcaaatttagattgcggtagatgaaacaatttaaatatttcaaggaattaaaacgagtcaaaattttgttcatggatcaacatagaaagagattattcaggtattagaatatagttctttttagataatgatttctttggaacccaaaaaacacatatagggaaaacaaaggattggatctaatgaaaatgggagaacacaattcgtttcaaagtgctccttatttaagaaatcaaaatcttaaggctattttcaacagattccctatcacatctcctatctcatcttctatttcaaactttagtctacaaaca

SEQ ID NO: 146699 - DNA, 311 bp, Zea Mays
ctcgaagggatgtcgaatttgttgatccaccaacgccgtcgtcatctcatccccaaccatctccgcctcctcaaactttagtacctttacatccatcatcacctccacaatcttccgatgctgctcctcatcctctttgtaatccaccgtctccgccacaaacatcaacatttaggacaccaccaccttctccacagccataaagggattcacgacaatcaaagaaatctaaattccctctaccaaaattggtgtccacattcgagaaaaagaagagtaaagctactactgctggcacagctcgatttttg

SEQ ID NO: 146700 - DNA, 473 bp, Zea Mays
cagctatacaagaaagggatcggtcaacccatgctcaaatgtgtcacagagaccgaaggcctccagatccagcgcgaagtccacagcggcacttgcggctctcactcagggcctagggccctcgctaccaaggtgatccatcaaggtttctattggcccgctataatctcgccgcaaatcgagtcacgaggtcgtgcgaagcctgccagaagttctctccccgttcgggcaacccctcgcaattcacaaagctgatcgcccacacatggccacttcaacgctgggggctagacattgttgggccactacccacggccgaagggaacctcaagttcacctttgtccccgtcgagtattttaccaagtggatcaaggcaagggcagtatccacaataatgtcgaagactacccagaaattcttctagcaaaacattatttgccgattcggagtcctgtctgagctcacagtcgac

SEQ ID NO: 146701 - DNA, 429 bp, Zea Mays
attggtgctgcagcatctgcctgaaacaaagactggcctttctcagccatgcacctggtgaggtcttctacttgtgcttcagaatttgcctggaccagatagttagttttcgagttacattcaagtgactgaaattttgtggactggggcccttgtttgtttgcgtccagactcttcagaaagcagaggatttcttaggaccgatcagattgtttgatctgctgttgcggaactagcaagtcacaagtcaccgagtttttcgtccttctccgaccgccattgatgcacatggggggaagaggaagaccacgagctagtgggctctatccaaagcattatcgcttcgaacacaaggcaggcaacaaccaacattctatacctctgggctctggccgttgtccgtaacatgtagacgctttgtctccagta

SEQ ID NO: 146702 - DNA, 332 bp, Zea Mays
aaggagttaaaatgcattttctaggaattaattaagttcctataattattctcacacaaaaatgtattttctaaatgaattcctttgattttctgttctctggaccgagcgcaccatttacagaaaacacagggactacgtcgcaaatattccaagactcagtgtacagccgcataggacggcgggtttatttttaaactaatcagggactcttttgcaatgttacgcagccgaaagggtttcgtgggatctcggccgcacaaattacaataaacggcccagattaaatgatgaatcggtacgcacccggggtcactggatttcgatccaac

SEQ ID NO: 146703 - DNA, 504 bp, Zea Mays
ttgtgggctgaatccctagttggtcggcccatccagcccatttttctttccagcagcgcgcgcactcacttctcacgccgacgtgtgggctccactgctcatcctcactggcaccggacgctctagcacctaacacactggcgtgtgggaccagcctgtcggattcatctcctcttcgtggcgaacgctgctccgtttggaacagaccgtcgaaatcgcggggaaacaaaatccgggcccactcctctagccgctccccgcgccgtgtcgctagctcgtggacccgccaggactggtcgttctccttgctcggtttgttgcatgctccgctagatctctgcgactccgccgcacgcatggctaccgaattcgccgcggaatccgcgcggaggccaaatccccgcctctgtcgcgctttccctctgactataaaactagccgagcacctgggaccccccccccctccatccacccgtgagccgccactccataccaccatcgccg

SEQ ID NO: 146704 - DNA, 550 bp, Zea Mays
tgggccatgctatggaccggactgggctgcgggtcgggccgacaacccattgctcgctctcgcttacctctaatcaaattttaatcgcaaatcgaaaaccgaaacgagacgaacgcgagattagacacaacatcggacaaaataaatatgcttcggtatgatgcaacaaccatgtcaactcaggttttttgtttacatgcgatacggacaccaatctctatattgctttgaaaatgggaagaaggagcgagaccggaagagaaaagagagtaacacctgaattttttgaatatcaaaaacataaatttatacccccgaattcagggcgttacatgtcatctcttcacctaagacgggcttgcacacacctatatgaacaatctcccaaagacttgggtccacaccgattacatgagacttcatcttatgggtccactcgtcatagttcaacttattaagagttggaagctttttgaggggtgctaaagagaatttggggacaaattgtgagaataatcgaattgaactctgcaaaattcattacccttgc

SEQ ID NO: 146705 - DNA, 439 bp, Zea Mays
ctaatcgctcgtctccggcgtgctgcgccgccgcacggtgctgtggcgccgccgctttgttgacagggagaggagagtttgggggaagggacgtgggtcgttgaaacggagatgtacggctgggattgaatctggattttccctgggtcggtatgtgcgagtccatccgatggcaatcgtagggtcagcattagatctcagtactttaaatcaagaccatcgatcctcgatccaagggtgaccggagtgtaccgtttcattgttaggatgaatctaatcgtagccctagattcctgatcgtgcggccagcgcgatccgataccccttcggcgtggtaatttcgcataagagaccctcggcttttcctataccaacccgccgtccacctagtttatatcctgtgtcttggaattattacaccgagacccatgcacttcat

SEQ ID NO: 146706 - DNA, 575 bp, Zea Mays
gttgatctgtgctttgtataaaagtatctcatattgtacatctgatgggaattgaatgttcaaaatccttctcttcttgaccctgtgaccctagagttctcctcattcttttagtggcctgatatattttcaagacctgatcatttgactgggtgcctctttatcattctttactactatactcactttgtagtttgaagattctgttgaagcatagcatattagaagaaagaacaaagttgcatcaatgtttgaactgggatgtgttttcaaattcgagttacaattgttgtacttccccaggcggtagagaaaagcaggtgcatacttgacaatgatagattgttaccacttgctagataactagaacaatgttctgtgtttcaactagtttatcgtggtctacataattacacaaggtagttcttttcgtcgtcaaatatgccattaagttctgtcagctgccaactcctagcttcagaattctggaatgacgactgagaacctttgaacatcttcttaatttggtcctttcttttggattggattccattgatgggccgtttcattttttt

SEQ ID NO: 146707 - DNA, 666 bp, Zea Mays
ctttagcttcggcatgttccattcactcagcgtcgggaacaccctataggccagatattcttggactagatctctggtctcgatctgctcggctaccacccagaattctgccacaacttgttggcatggtgaccccggctccatacggcacagaggcctagtcagcccgaagcttaagctctgagggctcagcactagcgtcttgagcttctccctcttcttctcatcgaccttcacataaaaccactcatttttccaactagttggccacttggtccgatagctaaccaccggagtcttcatatctttgcgataggcgaagttgtaacaaccaaagttctcatgaagaccatcttctctggccttcgtctgataatggagctcgtgcacttggcagaaggcttcggcattcgggtctattccttggcttcggagagcccaaatgaagacgctgagcctaacgatagcattaggagtcagctgatgaagatagatctcgaagttttccaaaacttctccaatcatttcgttcaaaggaaacctcaatcctgctctaaagaagctcctgaaaactaccacctcatttttttccggtgtcgaagtggtttcttgtccgccaaaacgaatcagcttcttctcagcttcaccatcataggcatatcagcc

SEQ ID NO: 146708 - DNA, 385 bp, Zea Mays
agcagaattcacatgcaaagacagagtaaatatacctattgagtttctttcaagcattaggcaactttggtctatcccttcagcagatcccacttacatcgggcactgggcctatcctttctcccctagagttaggatagcaaatttgatcttcggtaatcttgaaagcatccggtgctgatgaggctcctgtccacgcctacaaaattacattaccacaagtgcgccaacgaattaaacctgcttaacacatgccatcggttcaaacacgtcaaggaaattgggtactctcaatcaccaaacacgattgtggtaatccagttgcacagaaccactgaaagcttaacaaacgacgcgactcctcttctaagttgatggcaaagcc

SEQ ID NO: 146709 - DNA, 296 bp, Zea Mays
cagcgaccgagcctgatgttgacgacaacaacggggcgggcgatcgggagtggaggaaggagctgaccgacgaccacacccggcgagaaggtcagcacggggcgggcgatcgactgggagtgctggtgatgtgcggcgtcgcgtgaggccggattgacagcacagcgctggcgattagattggcaatactccaggcgatggcgtctgcgactggagcaacgatcggatcagcgacaggcgcggaataggttgcggaagagtagcggatcggaaccacgattgataccatgtaagag

SEQ ID NO: 146710 - DNA, 896 bp, Zea Mays
tgaacttgctggcaatccacaccaacttaaataccaaatccagtttcacaaatgggagatgaaaaagctcatagacccaaatagtaactaccaagttttgtttcaattaatcacgaaaatgaatatttaagggcaaaacttctaaaatggccttgccgatacaggaaaaaaaagttgctgataaaaaaaactgaagcgacctatcaattaaatccaatccaaaacaaaggacaaaattagtaagatattcaaaggttctcagtcctcattccagaattctgaaggtggaagctggcagaacttaatggcataaacgatgaaaagagctaccttgtatattatatgtaaactaggataaattagtcaaaacaacacggaagattgttctagcaacctggggtagagcttcagtttgtcatcagggacagtcgaccccaacagattttgaggaatccaatggaaaattagtgaatatagtgctaatacttcctaatgaccccacctattttcggacaagactctgatgatcgtctggcctagactcgcccctgctagtaacaatctatcattgccaagtgtgtccctgcttctccctccctcctccctcctctcaacaattctaacactcccatttcaaacattaatgcaacttggctctttcttctaatatgcaatacttcaacagaattttcaaactacaaagttaggaggatagtgacttacaatctcagacattgtaaaagaggcatccagtcaaatgatcaggtactgaagagatacctgagtacctgaccactaatagaaggatgaaggagaattccagggtcatagggtcaaaagagaaggatttggaacattcaattcccatcatatgtacaatatgagatgattttata

SEQ ID NO: 146711 - DNA, 285 bp, Zea Mays
ccacatttgccttcctcgggtgataatgaatagacaaatcataatctttaatcaattcgagccaccgacgcagcctcaaattcagctccttctgagtgaaaatatacttgagacttttatgatcggtgtaaatgtcacaagcctcgccataaagataatgcctccacgactttagagcaaaaaccaccgcgtccaattcgagatcatgagttggataattcccctcatgcttcctcaactgccttgagccataagcaatcactctgccttcctgcatcaacacac

SEQ ID NO: 146712 - DNA, 488 bp, Zea Mays
atctgttgtggattacgttccataagtcgccttggcttctgataattagttgaaactaaatcaattgagatgttgctgcttgcctactgctatgagatattttttggaaacttttgttacgtagctatttctacatacttgtttctaaccagtctaactttgtagacctaacaataccttatatgattataccatgaaatggttattcctcaaatgcagatatatggaagttgtctattggatttggttatagatggctaaaagggctgggtcaaatgggtgccatgaggcatggcatggcctgttgaggtgtgccgtgcttgacctttgcttgtggtgtcgatgtgagcactgtctgtttactggccgtcctgttaagtgtctgtttcatgaaaaccctaactaccatatcgcccctcctgtttgcctaccctgtttgccaatgtgctcacattctggtacgattacccttccctgtgggctttggt

SEQ ID NO: 146713 - DNA, 1041 bp, Zea Mays
caaaatccataatacagtgttgcggaatcctgctttcttgcatcgcactaaggaactccatgtatttgggatcatgtgtcttgttgcactgtaactgattcttttctgtatccttcctgaagaactcatgattatgttccaaatgaatcagatcaatctgcaccgaaataatattctctttggcatcgtcatagattttttttaagtttcattctagctttgcattgtgttcgcttggaacttgtattacgcacttttggattaccagatcctcttccggcacgcttgccttctattgaacaattcaaccacttgcaattttttctctccctatatctcttcaacggaaatccaacttcatatgcatatcggctatagaattggtacgtcttgtccacattagtaaatgtcataccgaccttcggtaccaatcgttgatctatactatcatcctattgaattaatggagtcatcatgcattgcacatatacaaaataattttatagcatgctgaatttctaggacttcataacttgcacggacagtatatcaaatatgcacaaattctgacattatcttactgaacttacatggctttggagaatgtggtgtgtcctgctcatgatcaccaattgtcctcatgggtatccggtgagttgctcccaccaaacttggatgaactgtgttgctgtcatcaaggaatcatggcgccggtaacgcagccagtggagttacagcatgacgaccatcagacccacaaggtaacgtcgtcgctgtagcctctccacactgcaccgatccactagtcgtcgccatcgtgtataccctacctctcctaggtcatcaaacaaagcggcgacggtgcgtagcccagtttttttggagttatcctactatattcgccaaaaccgtccttgtcgatattcatggcatgttccaaatatcccgcacgattcgcatgttgcgagatttccgtgagtcgacacggttacgattacctgccaattgtgttacaacaccataaacacggctcaaccccac

SEQ ID NO: 146714 - DNA, 615 bp, Zea Mays
gttggctctttctacttgcccgttggctcttgggtgtgccaccgaggcatatttgatctgaatgcttttttgttcacagaaatcgaagaactctgagcttgtgaaattggatcccaggtcggttatgatgctattcggtatcccgaacctgaatattatgtcctgtatgaattccactgccttagctgaagttagagaagcaatgggtttgaactatatccacttagtgaatttgtcgatagcaaccagtacatgtgtgtatcctccttgagatttcttgaaaggtccaatcatatccagtccccagcacgcgaacggccaagttataggtatggtttgcagttgctatgctggtagatgctgttgttttgataagtactgacaagcttcgcacctctggactaactcggctgcatcactctttgccattggccagtagaaaccagacctgaagaccttcccaaccagagtcctagatgctgcgtgtattctgcattgcccagcatggacctcatctagcggttgctttctagtagccgaaagaatgcatttcatgaggactcctgatgcgccccttctgtatagtgtttccccaatgagagtataatgagctga

SEQ ID NO: 146715 - DNA, 547 bp, Zea Mays
ataggcctgcctgctctctctctctctcaatcagaatgaatgacgcccaaatggaagaacgctagtgcagttgcagcagcaccgccgtcgctagctagagcctgcctgacgtccaacagctggcgcctgcctgtcgtacgtacgtcttccgcatgtcgctagctacaactgatcatttacgagccgaaatacgtgacggcgccatcatatcagcccctgtaatcaaggagcgagatgatgtagacccgtacgattaatttcgcgctgcaaacggcggtagcttttcgttcatgctcagacatgattatgctttacgatagctctgaaacccgtcagctcctaatgtcctacaggcatgtaacgctgacgctggtggataaggattaccacgtaccttagtttatttgctctgaccagtgatatgtcctctagcttgctgcgattgttttttaagcacacaacagctggaaacgaagacaagatctccgaactggaccgcaagctgtcagcttggaactcccttgtcttttccagcgccagccaacca

SEQ ID NO: 146716 - DNA, 1052 bp, Zea Mays
gcaccatgcatgacttatgcaacttatatgtgacattgatttatggagatgtaaagagcttcagttacaacagagtacaaaaaataaatagaacatcaagactccagtatgtgcagccatatagtcatcagatttgaaatgtaaaatagttgaggtttcttttttgttcgacattatatgagaacatcacatctacactttcgtactttgcattgtgaacaccacatgcacttccgtaattcaccattgagacattgccacattgattcgtacagcctatgtttacaaccaaaatgcatatatgtattcataaaggatatataatttgacgatagactgaagagcaggaaagcataagactatagacctcaacaagaaaatgtcagaaaaccaattaaatgttacaaaagacatcatggttggtacttggtagagtgttaatcaagatagcattacaaagccacatacctgaacgcgactccagagcaaggggacagcaactttggcacgatttcttacaaaaacatttgtccacagtggttgatttggaaactccaaaagaagagtgtctgtttgtgtactcagattgttgttactgacaataagactttttggtactgcttcataaagagttccagcagctcctgcattatctggacagcctgaactccttccccctgaaaaaaatgacagacattaatttcaaacaaaataaaacaataaggtcatctcatcttaacaataactttagacgtgtggtctgtatcacaatcgctagaaaaataccaagagtaggagtttcatggcacacatttcacatatggaggttaagagttagagtgaaaaggaacagtacaatgcttctatagataactaaaaaaaattttattgtcatgatacaagcagcacatggcatgcagatctcctgcaaatgtagacctgttaaacctaaatcacaagaatacaagagagaagaagtagagatcaattcagagcggatcctagataggtttagaatgaagcaacagcatacaaccaaaggtaaaatagca

SEQ ID NO: 146717 - DNA, 328 bp, Zea Mays
tgcatccatgagggctgaggctaaattgtacatttatagtagaataaggatgcttaagtttagaagagggtttcctaagctgacaagtttatcttctacctggtggctgttttacaataggattaaattttaagacatctgtaacaatgttataagtatgttctttttctgttgagatagtgtttatgttagcatcctctgagattaagattacctttaacaactgaagcataatttagttgctttgtttgttgcaaacttgcaatacattgaatgtgtgtcctattcttctttttcttgggcactcatacgcaaaacaagagcaaca

SEQ ID NO: 146718 - DNA, 722 bp, Zea Mays
gcagtacttgtgttgctagtagtttcttcttaaataatcagcgcagacagggcagaaatcccccaaccatacatctgtttttgtcgttaaatcagaattgcccttccacatgtacaggtaaagactgaacaagatgaaaactcagaggaacgagattttccaaagatcaggaggctttcagacctgtactgtaggccttcggaggacagcactgaattttcccagcgtatgcctgcacgcttgcccgacaagtttcaggagcagagacccgagaaacgtcttgtgcatccacgggaggaggtcgggcggcgatgatgcctgcaaaggggccgatggcagcatcgccaggtggtcgtctggatagcgagtgcgttgtatgtggtgaagagttccccgcagagtgatttctaggattacctcgacaaagggtactagactgctttgtgttagtgattatcctgttcagcggcaatgatgtacatgcctggacaattagcatgctgagcttgtgcgtacaggccagcacttatcgtgaagtccgtgctacatcatcgaaacggttaacgatattgggtagttttggtgaaacccatgcatcaaatgtgatggtcgagcagcattactgtttttatagtgggaccaacctatcaaatgtgacgaaaagggtgaaattctattctagatccccaaatattgactattgaagagcatataaactacca

SEQ ID NO: 146719 - DNA, 1206 bp, Zea Mays
cgaaaaggtgatttatcccataatatcatatgtcaaaatgcaacctctaatttatgtcaaagttccaccgtggtacttcccgatcaccaaaccttccctatccatggtgtttggttcaccatagagactcctgccaatcatggcacattccataagccaacaaagcaaactactgctgctccacacttaccatcaccttagtgccatcatcaccactaagtttctctgtcatggaagtgctatagtccactcatctctacacacatgaagttattgcttctccacaccatgatttactataggcattaacactgtaactggtcatccacaatggcccccataatctcgatagcctaaacatataagagatcacctcaactctaaacctagagaattgattactaaggtcacagtgaggttgtagtgtatttatttttcacatgaagcaattccatctagcttctataatctccaccaacctacaaatgggcacccaaaggcatattcatagaccataaaagttccttggcattgggaacaaaagctagtaaatctgtcatcatcggatgttctgatgtagtccatgtatatgtgaatcatgtaaggaaaatagaccatggcccatttgataaataaaattttggtgtttgatgatcaacatgacatttgtactaacaataattactagtgttttgttatagctcaaaggatacaacatggacttgaatgaaggagaagtggtgatcgatatgatcaacacctcaaacaaagacattagaagactcattgaagatctacaacatgcaagtccaagacacaatatggaaactgttggtgtaaggttcacaaacaaacaatagatagaagatattacggggggcataagaccatactagcactaccagacacagttgctttgctgggtgctataggcacgtggcaaaacccagaaaacactcggaaaactcttttctgagtgtaactctcggtatagaggacttagtgaactatacaacggcaatagcttctttgtcgagtactttttgtcgggcatttgtcgaagtctttgctgagtgccatctagtgcttgacgatggtgatagagactttgccaagtgtactcaatggcactcggtaaagagggagcctttgtcaagtgcctactggcctagcgctcaacaaagaaggctacagttagcccacacg

SEQ ID NO: 146720 - DNA, 720 bp, Zea Mays
gggcagaaaaggtgtcggatttgaggcgcaaagggaatgtccacagaaaatgggagtaatcgtctaaaatggcaagatagtatttatgactagagacactagtcaaaggggaggtctacaaatcacaatgtattaactgaaaaattttagtagccctggaggtggatgtatgaacaggaagacgaacatgatgtcctaattgacaagcatgacataaaggagcagtggcactcttattacaagaaatgattgacgactcggctaggtgggataagacagcgtgaccagggtgcccaagacgctggtgccacagagacatagtagattttgccgaagcatgaagggtggtagccgggagcggaagggggtatagggccaagtgctatcacatctgaggatctcgcgccgagtaggaagatccttcacagagcaaccaagtgggtcaaattcaacagaacaattgttatcggtggtgaattgacgaacataaatcaaatccttaatacaggatggtgagacaaggacattattaagggatagattatgtggaaggtaagcggtgccagtggaagtgacaggaatgagatgaccattaccgacaacaatatgtgaaggaatatgacgagaaggaggggttcgagagatgataccggcgtcagagatcatgtggctagtggcaccagtgtcgaagtgccactcatgctgaacaggttgttgaag

SEQ ID NO: 146721 - DNA, 464 bp, Zea Mays
tctagcgaaggtggtatggtttatttaagatacacctatcgctatagaagtcaatttgacgagccgaatgatgactggcttgaggtcattgtggctaccagcgacgagctgttgggagcttatacgaaggcagaggacgaagccatgaccactgccttcggcgctcgtggcaagaggagactgaacagagtttttgatatgatcggattttttatcctgattacttctttcctgcccaaaaacatggttcgaaaagaaaaatgggaacttcatcttcttccaccgcgcctaagccgaagagagttaaggttttgacttgtaggccgaagccacattctttagaaaggatagctgcagtgcttgatacagaaagatggagattgctgaacacgccgaagccatccccttgactccggagaaaattcctgctatgacggttgaagctagtgtcagtccggttgaag

SEQ ID NO: 146722 - DNA, 334 bp, Zea Mays
ttatactgagggtacctagaatttgtaaacatatggtaaattcctgtaatgcagctagcgtgcattacattgaaagcaactaatgtttcttgaggtagcagtgtagcacaactgttgcttatggtgttgtatcaaatactccgtgctcactgatgcagctcggttgattcagtataatttgtaaatgtcttttgaagcatatgccatctttatagagtagggtggtttttgcattctataaaataaccgcaactgcagagccctttctgttgctttaatgacatatttctattccatagagctgctttatgatgtatgggtaataaaatgtggc

SEQ ID NO: 146723 - DNA, 462 bp, Zea Mays
gatacattctcctggtttgctgcaacctttgcccattccacagggagcttggcaagatcttgcaatggattttatagaaggtcttccaaagtctgaagggtatgacacaattttggtggtggttgatcggttcactaagtatgcccatttttttcactaaagcatcctttttcagcttctatggttgccaaagtgtttttggataatgtggttcgtcttcatgggactccaagatctgtggtctcggatagagataagatatttactagccatttttggaagtctctgtttcaggctttaaacaccaagctggctcttactacagcatatcatccccagtctgatggacagtccgagagggttaatcaatgtttggagatgtatttgcgttgtgctatttccaacagtcctaaacagtggagaacttggttaccattggctgaattttggtacaactcttca

SEQ ID NO: 146724 - DNA, 295 bp, Zea Mays
gacgaagcagaagatggccagagcgaccgccgccgcgagagccgggaagaggacggcgttgatgagcaccttgcgcattggtctccgttctagacttgggcgcgcgctctactctagatcggagggagggagggagcacggaccgcggcgtgcttggttgctcttgcttgggggggcaaatgggcaatgtggaaggaggaagggggtgcggtgattgtgggggtttggaatttgagagaggtttgcttgacttggtgaaccgtgaacgtgcttcttttgggctggcctgcttctg

SEQ ID NO: 146725 - DNA, 494 bp, Zea Mays
ttgctgacatagtagaattttagtgtccaaaccatagtacacgttttggtccccggaggccggtaaggctatttttggcctcccgtgacacatgttttcatcgtcaaacgacgatttcatgcctcccgtccgccacccatgatttggccactgagactgctaaggctgattatggcctcatccgacctgccacctacattttagatcggagaggccgttacgacattttttgccacaagtgagctatagcgcatgtttttatggtaacctagacccaagatccaatccctaaaccctaaccttaaacaccgacactaaaaggttttagtgtccaaaccatagtaaaatgaagtttgagtctccaaaccatagtaagcttgcaggcatggtagaattttagtgtccaaaccatagtacacgttttagtccccggcggcccgtaaggctattttggcctcccgtgacacatgtttttgtcgtcgaacagcgatttt

SEQ ID NO: 146726 - DNA, 492 bp, Zea Mays
atttgagcttatcagacggactcttctgccgaggatgggatacagggaggctaccacacatattcagctctggctccttggtgccctggtctctcactttgagtttgacgccgtggatttccttatttgtgagatcaaggacaccgttttggatgggattcgtgctcgtcgacagttgccatatgctcactacttgtgccacatctttgcgcagctgattcagcctcctcggttttagggcacacttgaggcctcacgccttgtttttggatcctaccgtcctgcgcctgaggctcctgtgccagcttctgctcctgtttttgactctcaggccgaggatgcagctcttcgtcagttcgacacagctgttgatgatgatgatgatgatgatgatgattttggggttcctcctctgcctccgcctcctatgcctccacgctcacatgatcatgaggctgggagttctagtgctacccctgttgcccctccagc

SEQ ID NO: 146727 - DNA, 712 bp, Zea Mays
gttttgctgctgctgttacggtgttagatgtttccatgttgttgatgttttttgttttgttttctttgctgtattttttgttttgttttgctgctgctgttttggtgttgcttactttcatgttttttgtttgatgtttgttttgatgtattatattgtaataattagtattgtatgctactatgcttttttgttccatgtatgattttgttttagtttgtttttctaggttcttaaggaatcaagtgacgagaaaagggagcaagctgaagagatgatgaagtactaggtatcactccctctgcccctttgattttggttcgcatcattgtaatgtctatcatgatgtatgatttgtttgtgagttgttgctttatctttttttctagatttgtgtctgagtagcaaaattccagaagtgtttggcatcatgcaggcaactactgttatgtgagcacataaaatttgtgtgtgttttttgtggaagaggtcatttttgctgttctacatccatctttctcaacaagaaaaacaagacaacatgttaaatattaacacatcaacttgtattattatttttgtatattaggtttattttttctctatttttagggcatttttattatgaccattagatcttgatctagtggatatgagatgtgtgtgttttgtgtttccaaaacacacagtttttcttaaaagaaatatgtgt

SEQ ID NO: 146728 - DNA, 603 bp, Zea Mays
ctcatcaaacaagaaacgaaaagaagtgtttactgttgtccataatttctctccaatgtcttcaccaaacattaccatggtagccaactttacataattagaaagctttatcttggatcaattgcaacgcagaaaaaatagccaagttgagtttctctccgtacttctccccccaatatttataatattttgcaatcattctcttgcccatttcagcacataggttgtcttcgctacgacaccactctcgcaataaaaccaaaacatcagcaatctcatggaagtaagaatgtgaggttggtttacttgtgactgaaacacgaagggtaagttcatagaagtgctctaggaattcagccatttttcttgccttttcccaatctgatttctcaggaacaccgaggccattttcaccttctaaatctagcctatagaatggatcttcatcactatacctttcaaattccttttcatattgttgtgcaatatttagcataaggtatgttgaattccacctagtgcaaacatcaagggttaaaaatgctttggtctgtactttttctaattcagcacatttcttaaatttgactagcctagatggtc

SEQ ID NO: 146729 - DNA, 314 bp, Zea Mays
aatttttgtggttcaatcttcagatcgaggtattacattatttcctcatgtttttactcgatctcacccgttcttgattatctagtgtatcgtttcaaggatacattttagtttaggtgcttgcaacacttaaactatcttattttgtctcgaacattgtttgagtttagttgtttggtattgttcgttgtagttgaaccgctcgcatgaacggttgaagtgcatgctcaatatcatacgcgtctttactcaaacgtgtttgttaagatccttgaacatcgatctcctcactcatcataggttctatcttttat

SEQ ID NO: 146730 - DNA, 477 bp, Zea Mays
gcgaggttataattcaagttattcttcagcacactccgtaagatagcaaaaatcaaatgtgtttagataaccgataaaaatttctcggatttcaaattaaccaaacaccgtctataatgtcgtagccgatatcgcttgagtctgacgctcaaatcctaatcttagagttcggatgggtattcctttgttaaagattatggaaaagaaaatatcttctcttgatttttaccctccaccgccttatcctttctcctatccagaaccgtcgtgctctctgggatttttctcaccgtcgtttccttatccccttcgtacatccgcctcctgcttccttcaatgtttttaatatgccaaatcaatatcaaggatttgggagttggattgttacgaaatgtttttttaaataatgtagtcctgtaaacatggttttattgtaagattgactaaactttagtggcaacatatcttagtataaaa

SEQ ID NO: 146731 - DNA, 619 bp, Zea Mays
tcctacgtcgtcagttggatttgggtgtgtcgaatggaaggattcggtccgttgtcggagtctgggtggttgtgacggagctatggcggatttggatcattttgtgtgcggcagatctcgacttggtagcttgatccagtgtgcctcggtcgttttgggtttgaaacacagggatttctcagcagagtcgacgttttgacgtgatgcgtaattattgctgcaattctgtgtttgttatgacgaattgggcatgttagtgaaaatgggtcaatcatcgtccgatatttgggattgatttctttgaaggggttagaacgctgacaacggcgcagctttgacgatcaaattgcactgttgcattgcacaacatatttgaatagaaggggttgattttatttgaattgagctcatggatggacctggtacagagggtgaagcttttgcttgagcaaattttcagcctggttgtagttgttacaatggtttactgttcatttttatttttgctgaggacactactttgcccattttgaattgatggttgcattttttgttgaatcaccttctggaacaacaacaatccatttttgttgaatcagtctgctgggacttttataat

SEQ ID NO: 146732 - DNA, 511 bp, Zea Mays
taagttgctagccaaccgtcttcagacagtgatgacctcccttgtccacaaaaatcaatatggcttcatcaaaggtagatccatccaggattgcctagcttgggcttatgaatacatccatttatgccatgtttccaagaaagaaatcattgtgctcaagctggactttgagaaggcctttgacacggttgagcacgatctgatccttcaggtgctgtccttcagaggatttgggcccaaatggctgggctggattagggatatcctccattctgacacgtcctcgattctccttaatggtgtgtcgggcaaatcttttcattgcaagtgtggggtaagacaaggagaccccctttcgcctcttttattcgttctagcggcagatttgcttcaaagtataatcaataaggcgagacagcagggtcttctccagctgccactcactgagagctgtggtcaagatttcccgattgttcaatatgctgacgacactctcttgatcttggaagct

SEQ ID NO: 146733 - DNA, 970 bp, Zea Mays
ttctgatctagagatccataacttttcttgattttctaaagcacctaatcatctgctccaaatttttttatctgcagcagtcctaaacgggaccttaataaattcaatgcatgtcttctatctcgactctcgagagaatatacgtctttttgtcaagagacttgtcttgagttttttttacatacattcctcacaagtcaccaactctaaactgaaaacactaattgtttacatgccgtggagtagctattgacgtgactgggttgatgggtgtggtgactgaggctcatgttaggggtttcaactctagcctaacatgtttaacctaatctgacttgactaggacttgtgttgggtttcaagtctagcttggctttgttgggttttaactctagtctatctcagtttttttttgttggatttcaactttagcctatcttgattttttgttgggtttcaagtcttgcctatctcgacttacttgaattagaggccgttatcttgacttatattgggttttaacttggaattagagaccgttatctcgacttatattgtgttctaactgtagactatctggacctgggattgaagaccgctatctcaacttatattggggtttttgaactctaggctatcttgacttacttgggtttgtagaccgctatcttgacttatattgagttttaacttaggccattgggacttcgttattgttgttgggttttaactctaagctatctcatcattttaattgggattaaaaactgttattgttgttgggttttaactcttgggattaaagacgttgttgttgttgggttttaactcgactaccttatcaattaacttgggattaaagactgttattgttgttgggttctaactcttatttgggattatagactttgttattgtcgctgggttttaactcatcttatcaacttagggcttgttcgctttcctctca

SEQ ID NO: 146734 - DNA, 454 bp, Zea Mays
cggcatcatcgacaccgacgaggacgtggcgctgctgcggcggcgcggggtggtgctgaaccggatgaagagcgacggcgaggtcgccaagctgtggaacgggatgtcgcgctccgtgcggctcaccaaggtggcgttcgtggacagggccgtcgaggaggtgaaccgctactacaactcgcggtggcgcgtcaagacgaagcggttcatgcgcaagtacgtgttcagctcgtggcagctgctcacgttcctcgccgccatcgtgatgctgctgctcaccacgctgcaggccttctgctccgtttacacgtgctcccgctggttcggcacggtgacggtcgcgacggcagagtgattattgctgatcagattcttgcgcgatcgcgacatgatgtgggtgggttcggtctggctggataatgtgatcggggatgttcttttgtgttggttgcta

SEQ ID NO: 146735 - DNA, 532 bp, Zea Mays
gagcttatcccatctgtagcgcgagcggcgccgtacaggttttgttttgacgctgcgtcagctcacgctcatctcatactatctggatatgcatgggtgattgcacgagcgataagcttgaaaagtctatttccctcctgggttttagaataaactcgaggattacaatgcctggtgggttgccgttaagttgctcctccttgctgtggatgaggtttcccgtttgtttcttctgttttgatgagatgtgcttgctacaaagactgaaagagagcattcatgtatggcgtgattggttgctgtcgggtaggcgagccgggagtccgggacaggggaccgggcctgggtagagcgaggcatgatgagagcgtgcgttcttgtttgtttcgtcccaacttaaaccgcgtttcaaacttctaaaaccaatacttagcacctaaaattactcgtgaggtttcgaatggtcagctaatagaccaattaatttccaattaattgttagttatacgtctctcaaatagccattagctgc

SEQ ID NO: 146736 - DNA, 472 bp, Zea Mays
ggagggtcgggcgcaggctcgtacgctggctcgcacgccgactcaaacggaggaggcgcaggctcgtacgcgggctccgacgccggctcgtacgctggatccaacggtggaggttcaggttcgtacgcgggctccaacgccggctcgtacgctggatctaacggcggaggttcaggttcgtacgcgggctccaacgctggctcgtacgccggctctaacggcggaggcgcgggttcgtacgcgggctccaatgccggctcgtacgcagggtccggcgctgggcctcactggggttctggtgccggctcgtacgctggctctgaggctggctcgtacgctggctctggcactggtccatatgggggttctggcgctggctcgtatgctggggctcgtgctggctcttacgctggcagtgggcacggcaagtgagccgtgaagcgaccttgggttggaggatgcggtgcacatg

SEQ ID NO: 146737 - DNA, 2625 bp, Zea Mays
tcattgctggttacagggagaggggattgttttggtaaagattctcttaggatttaggaagtttctagcattgaaccctccaaagttgttcattgtgtataatagtaggcctaaaattcttcggacataaaaatagatgttttgtgcaattttaaatgagaacttcgcctacgtaggaaggtcagatgccatgttagcttggaataaattttgagatggaagggacagatgacaagaaaggttcaattgttttcagtttgcagtagtctcctctacctttgggatactagataaggtccatttacattttgatgcactaccagttatatacaaaggactaaaggagtaacaaggtagaattcaatagtatgtgcagaatgctcatttggtagtttcttttcccatcaggaggactgttgaatttcttgctatggttccaatgtgtatgtatgtttcccaacagaatttttataatgttcagacctattatacaaacgggtccggtgttatgtacctacataagtttttcttggtcttgcgggttgttgatctagctctatgtttttttttgcttataacccactagaaatttaggtatctgtcatgtaatatattcagaaaaggagaacatacctcagaatattagcaaaaggaatttgcatcgtcactatatttgtataattccatgctagaatggttcaagcggtaaaatttaaaatgtcattgtcacaaccatgcgggggggggggggggtgcttgctgctgttatgtggggtgggagaggaggggatgggagggagcaatggctctatgcttgcttaggctaactccaacagagtacctatcgtgacacctaaatctattatagatatctaaatgacactatagcatctcgaacaggtaatttaaactcgatacccattttagatgtgatgtgggagagtacctatatattgatggccattttctcaaacgtgtatttgggcacaaaaatatttgggtctcgtctttcggctgactgcataacacgaacgtgtatttggattcccatttttgcatattattgttagagttagccttagattgaaaccgttacattacctatatatttatagcccctattggacttgtattaaaaacaaactagagcagtagtctttatagatttggacactcctttcctaacaaaccaatattctttcctaaataaactttattttatttactccaaacttatcaaaggctttctttagatttcatctattccatattctcctcaactggatggacttctggggcggcaggggttgcaacccctcactcacgcgcctcctttacgacacccaaggtgagattgcggttcacaaggggccggtgttgggcctccgttgcccgctaggcccaatgctgcagcccacatttaggcctatgacatctcccccttctccactcagcgtgtcctcgcgctctattatagtctagttgttgatgcagtttgagggaagaggttctccaaatgggattgcctagatcctgacaatgagacgatcgtggatgatgttagccaagatctagttgtcttggatcctgatgatgatgagctcaaagtagtaacgatagttgctagaggtgaggatcgatcggtgtatggctacgtcaagagtgaatatctgcatagcttaaggagatctctcaaagctatgtaccttgttgctgcgaaggatgaaggctgccatacgacgacaaattgtcaacatgatgcacatagattgtgttgttgttaggtctagcaagtcaccaaacatgaacttgccccgttgaagttgtttggcgagaggctcgagtgtctcaagtcatggatggtgttgatgtgttcttggtagcgaggaagtggcaattggcgatgtcgaagaagatgaaattgacgaaggaatgataccttgcggccactcacggatcataaggatgctgatagggaagctgcaggtgatggctgcagtcgttggtggcgtgtagaaccccaacactagtagtcgtagattcctcatttcgccaatgacgacgtgtctcgaagaggtcgagcaatagtggtaatgtcgtggggaggtagaattgtccgttgaagaagaggagatcttggtccatggactaagttgatgcagctctcccgcctatgatggtggtggtgatggcgcgtagctcgagtaccattgcctatgatggcgtcgtacaatgctgattttgtcgagggcattaggttgacacggttgaattgccttgctcatgttacatcatggctgcgatggagaccatgatcgtgggagaagtgatgggtgtcgaggcaccggtaggattggcataagacaggaagaacaagcaaattctatggtgctcaacggtcagggacattgacgaagatgatggtatgttcgtcccattagaattgcttctctagggtcacaaagttctagatgatgttgccatggtcgaccaaccatggcatgtcgaagatgacgtcgatctggaacgtcttggtgttgatgtgaagccaagtgttgaggcaggcttcctggcgagcaatctcattgccactgttgacaagctttatggtttggatgcgctgtt

SEQ ID NO: 146738 - DNA, 583 bp, Zea Mays
agaagataaaacatagcagagataaatcccgaagcatcttcttttcttcacataaattccgatgccaatccgcttgcacttccatagtattccaactgcagcattccgcaagatctcaagaaataaagggaaccatgaccagcagagacagatgcaacaagatgaacagaggtggcgcgccggccatcctagtatgcatgcatgggttttaagggttcttgttcttggcaaatggcaacagcatcgagcttggtgccgtctctgataatgcatgcttaaaagttaaaaagtgtgcctgccgaagcaacagcagcgcagtcttgtttttttcgagattcattcgctatcagacatcctgattgcaatcagagactccaacaggttacggatgctggccggggcttcagaatataatgccattccgccgttccagtcataccaatagcctgcctagcaatctcatgggcaatactattacataatctatactagtaacatgcaagagtcagctcctctatctccctgagaatcggtgtaatgactggccggcgtgtctccctggactcccaaagctgcaccagct

SEQ ID NO: 146739 - DNA, 498 bp, Zea Mays
gatatatgctacgttgcaacgtgtggacacgtttgctagtacacatattgaagacactattcaaccaaatacatatgatggcgcacaagcatagaaccacatttaaacaaggattctattgagctttaatacttcgattattagtaggtttcaagatattttagaatattttttatgaattttgcagatatctgatgatatgtttttttatggtgagaggacatccttcgaattgctcaaccccgcaaagcaattgaggttgtgtcaaactcctctagctcaaccttaactagccagcaacaaaacctccattgactccatcgagatttataattagtattggattatttccgatggtctaggacttatttccagttcgtcggttctaatatgtgaaaataagcttatttttaatggtgggcgtcagacatagctaatgtccattagtcattagtggtcgtcgtcgttaaaactgtgcaacaactgtgacgacgtcta

SEQ ID NO: 146740 - DNA, 543 bp, Zea Mays
cagggagtggcggctggtcgcctgggagaagaaaaattacaccggctctggtaccatgttgaacagtgaaaccctaaccctagtagggttgggaaatatatttatactaggaatagttgggcctaggcccattacagagggacccggtaggggtaaaccctaatacacctaatatagttctaaacagaggacatggtcacatgggcgctagggagggaggagactgagctggggttggaagacgagggcatcgatcacactgtgttgtcttatatagttatattattcttaatgcctgttgtttagaatgactgacccactagaatgacttgacttatctctcagtagttctcattaatgactgaggttaaaagatgaaatgactgagtttgttcacttcatttcttgtaatacctatttttagaatgactgactcactaaatgcctcctatctcaattattctcaagaataactgaggcaaagaaatatgaaatgactgagtatttatataataactgagtttgttcactttctttcttgta

SEQ ID NO: 146741 - DNA, 751 bp, Zea Mays
ggccgtgccttctaccatgctgatactcatcatcatcatcttggtcccagtcccggcgaaccacatcccttccacaacgaacacccgaatattctcttttctcaccaatggaatcagggacaccgtaggtccattcaaactctctgcaaggcttacggtttggaggtcccccctgatgtccctcccgcgcaagaacgagagatcttccactatctcaatgtgattgcgcaatgtgtagacatggccctttttcagatctgatagaacatcataattaacaccaacaagcggtaaaggggtggaaaccggagggggttccctgtcaggttaagtgactgtaagccaaacttccttagggatttcacaaggatcagagcaccaggcccagaggtcaaaggatctcgtgcgctctctgcgcctagcacgctcttgaacatagtggatggcacagctcttccctagtacccttgcaaccacatcctccccccagcagtgaacaggaacaccttcaactcgaaccttaactctaaactcgaagaaagtctttctagcataactatcttcggaccaatccccaaaatgaaagacccgaccacgatacgagaccgtattacggtcaagagcccactgctttgatctcgaatcagagaaaatgatgaagaattgttcagggaaatgcttgacaatttggtactgaccatgctgtagattgaacttttccctgagcatgtcacctgcctgaaggctgtcc

SEQ ID NO: 146742 - DNA, 387 bp, Zea Mays
ctcgcccgagcccaattcgtgaagcgccgccgtcttccccctctccggtgagtccctccccctcttctctctccctctctgttagcccagcaagcgattgagttagcctagcagcttcctcacctggccgcaacgcaatacaccactcccccaccccgattgctcgcccagagctcaccgacggcaaccccgccgcgaagctccgccacctccccgcgggcagccccctcccgacctcctctgaccaaattgagcccacctctaggtccgccatcccctccccacgctaaggcgcctacacattgcccaagaaccgggccaccggcggcaaaccgccgccgagcccaccggcggccgagtcctccccgcggacggccggttcacccc

SEQ ID NO: 146743 - DNA, 333 bp, Zea Mays
ctccatttatctgtccagaagagagtgtttgcctcatttccaacaatagaacaaacagaggctgcgaagagggctgtagcaaatctgtgcacctttatttcaaaatcagcccaaggcctatctggttcagttttctggagccaaagccatctcaaatttaaagaccatcccatcacttccaaattatgaattcccaacccaccaagggagatgggtcggcagaccttagaccacccaacgacacaatgacctcctcttatatcagttctacctttccaaagaaaaccccttcgaatcttatctattgccttgatcacccatcttggacattgc

SEQ ID NO: 146744 - DNA, 335 bp, Zea Mays
cggatcggtgcggacggctgagattaggttagagaatccccttcgtgggattcggtcttgtccatcggatcacgatcgggcggtcgaggatgggtctggggcactttaaatcggcaccgtttatttctaatccagcgcatagcattgcttaccggttcttataatgcgtgggctaatcctggcggccggtttctaatcggacggctccgggcggaagataccctttcgctttggcatatttgctaaagagcaccctggtaaactgaaaatcaacccgcagtccctcgggcactataccctgtgtcttaggattcttaccccgagccccctgtgtt

SEQ ID NO: 146745 - DNA, 683 bp, Zea Mays
ctttctgaatctgtattgcctcttcttcgatgtgactttctggtgcttgcaggcatttgcagagctgggacacttgaaacacattgtggatatcagacatggattctggtagatcaagacggtatgctgcgggtcctactctgccgatgatgggatagggaccgacgaatcgcggtgctagctttcctttcacttggaaccttctgacaccacgcatcggggagaccttgaggtagacgaagtctccttcctcaaatctgagttctcttcgcctgttgtccgtataactcttctaccgactctgagcttcaagtaatcttctgcggatcagggcaactttctcctcagcctctttaacaaaggcaggtccttctagtgccttttcccctacgttggaccacatgagaggggtctagcattttcgtccatacaatgcttcgaacggtgacatcttgatgctggcctgatggctgttgttatacgagaactccgcgtaaggcaaactggattcccaacttctatcgaatgttaacacacaggctcttaatagatcttcgaggaccttgttgaccctttctgtctgcccatctgtctgagggtgataggcgatgctgaagtctagcttggtgcccatagctttctgaaggcttgtccagaatttggaggtgaactgggttcctctg

SEQ ID NO: 146746 - DNA, 409 bp, Zea Mays
ctggatttatagactccgggggcggtggctctcaatttgaccgcgatgtgttggcggccggagacggggaagaagcttggcgcgcggttacgtgtcctatggcatggcaaggccttaggtaaaagaaggacggcgtatagtaatcgactgcgacgtggtaagatgaccgacggcgtggcataacagcaaagaacggcggcacgccggtgatggccgtgcggccacgtcgccggtaaggggagaagtgaccgagtggccacagtgctccaagtttatccacggtgagatcttttcaaggtgagcaacatccacacggccgcggcaccaatcccggcaaagaggtcgccggcggtgagatcttttctacggcggtcgatctgatccggttagggcactgtaccatcaggag

SEQ ID NO: 146747 - DNA, 381 bp, Zea Mays
ttgtgaacttcagtaggtcgagttgcattcgttgtaggtaatggcggtattgcgattgaattctgcttcgcttcgcacatgcattgttagttgttcgtcgtagtgtagataatccaatgcctaatccaatatagtcgtcgaaggcacttggtggttattgaacgttcttagagcagcagtgtttgtgctagtgattattttgtagatcttgctgtgttctccatccagatttgtgatgttaaactcgggggactattggcacttgacatgtgacatgtccatactcaatcacggaattttcaaatccaccttctgccacttgacacacaatcagtgaccagctatatgcaaatgaataggggtactcagattcaaactgtg

SEQ ID NO: 146748 - DNA, 719 bp, Zea Mays
accaaaaagcatagtgtggtctaagaatgcatgggtctcgatagttcaaggcccctgaaaacatctaaaaccagtgagacaggagggtatatacggggtcggtcggcttctgccttctgccttctgccttctgagatgagctctgatctagcaataggctgcatgcatggttctgttctataatatcacagtagcagtagtgcgtgctcgcatgggtggcagtggcagtggcaccgagcctgcgcccctgcgtgcagaaaccctgtgcttttcattgtcccttctcacgagtggacggatggatgcacaagatccaaacaaaatctaagatagattcatctctctctctctgctctttcggctgtgcgaatatgaacagaatgatatgaggctgttcgggtttgagtttcatggtaaatttcctctgcggagtgtcttttcgtgcatctaccaggattgaactttgttatattgcaagaggaaactgatctgcagagcgttgtcaataatcagaggcaattgtaagaatgcaattgtggcgggcgcacctacagcagtgttgccgcctacagtagctacggcaggccagtagctacggctcgcacctacagcagcagtgtcgccgcctcgccggggacgacggatatcgcgggcgcggcaccccgtgctcgttcccgtcctcgttcgcttgtctgattagatccccatctggccgttcg

SEQ ID NO: 146749 - DNA, 578 bp, Zea Mays
gcaaacatactcttgtgttaagaacaggacatgtgggagacaaaataaatgatgtcctcaaatgttgcatacgaatatgacatagaagttcctagaaatgtgatatttctaatagtagtagtaaccagataatgatgctgctaagacaagaacagaaactaaattaatgtggctcccaatgtatggtctgtattgatttgcttgtcgtcttaatcaccgtaaacgcatctatcgtcgaacagattaacatagagttgtttggtcacgccgtcggtttgtgttcatgaaaccctaacctaaagacgaaatgtaaggtaacttaggcggccacatcgtactggaatccgttcattcacattagttcggtcaactacggaactgaaacataaaaatttccaaaacaaagttacaaacaaataactacgaagagggggaacaccatgttcgtacctgatgagctcaagatccggcccgcaacaacaagattcgaaccgatgaactctggatccaagcgagccctcgaaggacggagaagaaatccaccgatggcgagacgtaccggcaaaacggagtgggat

SEQ ID NO: 146750 - DNA, 521 bp, Zea Mays
agcatcaggcaatgatgaagtcgctcgtctcgtctccatgtgtacaagaggtgtacatcataaagatgaacttcaccactacagaattaatgtttgttaggagtgagagtacgagtacatcaaacataaacgctcgcgttcagcggaggtacctgactacggtaggtgcagccagcgtacctagcttctgctgtggtaagaggcaaactcgtcagtacagtacctcaaactgaacttcccagtcactactgtcccggtacatgagatgaactgcattgtgctggcactgataacactagtgtgattccgtaccagctctagtcgtttaaactactgtgccactggataaaaaagagcagtgcaatggtccacctagctcttctaagatgctgtcgctttttacggtctgcagcagcagcagaaccagcagccagatatcagccctttgcgcacatgcgctagcacatggttaaatgctaacggggtcatgtgtttgcagacctaaagcatatgtgactaag

SEQ ID NO: 146751 - DNA, 416 bp, Zea Mays
cgtgacaccatctactgtccttagatccacataggaagtggcgccagtcacatggtttaggagaacacgaagatagtagcgctccccctcggccggatgagcagagactattctaccgacttgtccacccgtctctcgtttcctcttttgccatatttttcccttaccactctgccaagtgtaccattcagggaagtcacgatacaggattccacgagcctccttgtgtagactattcgcctcaaaatatgctgtgagcattgacctatcaacacctggacggttgacgactcgctcgaccatttgccgctcgtgaaacgccaccatgtgcatgtttggaagatggagttgcagctgcatcacaggtggagatatctgactaagctcaaagccgtatatcctccataaggcttctg

SEQ ID NO: 146752 - DNA, 282 bp, Zea Mays
gttactaccatgatacatgagaggctctggtatcttttactggcttttatatatcttgccaagcaaaggtcatcctgagaggctaaggtatacgtataaaactatactgttgcaattgttctttagtgactccagagacctagccatccagatctaaatggctttctgttcatagctaaaatgcatagcaccattattcattttcaacactatcattttatttctccgagctattcatgtactgcttggatgccagtcttcttgactctaaggttatctcca

SEQ ID NO: 146753 - DNA, 752 bp, Zea Mays
cgggcacttgctgcctcactcgcaccccgtacccgtagctgccatgcgggccccgtgggtcatacgctctaccgcggcgagctcagattcgactgacgtgtgggacccaactcgccacgtcgctaactcctggacccgctttgcattagctcctcctttcccctccgcacgacttcgcgtaacaacctggttcgattcttgtgggagtcaatctccacaaccccggatgaattggccgccttgatcgtggtgcatataagttgcgccccagaacctctaatcccacgtcggaatcacgtagaaccaccgcgagggagagagagagtcgatcatatcgtcgcgatcaaccagagtaatagcgaggggagagggagagccgctgcggcaaactcgggtgattgacctccagtctacgccaggctgctgggggaggcgctaggatcaccaccgaacgaagaagggcccgagattccgaggatagttcgtcggcgtggaagcttcgccgccgcgccaccatctgcgtttgggagccttcttccactgacccgctctctggtaagacctccagatagtctctacttgttacaaggatggtgtagcgcatgtccgggggaggaatcgtgcacccaagggccagattgacttgctccggcaagcaaaccatcatgggtgcgggcgccgccgtgtcgggattgctggaggatggtggcgccctctgatcgttgatatgtagatgtgcggctaagattagt

SEQ ID NO: 146754 - DNA, 449 bp, Zea Mays
aaagcctttcggttcaactaattttctcaggtctcatcagtaagtaacacaatttttatttgtattaagagtttcgtttttttttgttttgagagaaatatttacctttcttatgagacccaattaccatctatgtttcatgataaattggtgtcacaacagtgaagcttcgcgtgttcatcgttgctgtcctgattgtgatcaacttgggcacctgcatggcaaaggttggatcttacggcacaactgtgtcagcgtcaccgaggcaaatccgagtacttaccgccgcaactgatggaagaaatggacctcccagcaatgatcaccagtgcccgctcgggacctaccccaattgttaagcaatggatgtatcaaaacactgaggaacagctcaaatacgttcacgaaaattacacccgtctgtgctgttaggggagcatgaatatcat

SEQ ID NO: 146755 - DNA, 433 bp, Zea Mays
gtttggatgtttatgcaaaagggaaagagacagattgccttgaataaaggctatattcaacccaaagaacgtataatattagtgcagattttgcgatattgcagaacgttgggaaatggggtttcgacggcaacacgccatgttctcacatgtgccccatccattagcggtagcacacacaacaacagggatgccaaactaacagggtcgtatggaagggaagataccacaggcatatctctgcgagaaagtaggcagttggcgggaagaggaggaggtcccatgaaacgctgggaagccagctaatgtgctcgacaatagctgttcgaagatgaaacagatctatggttgtgtaggctaaagggaaagagttagactggcataaccaagggccatattaaacctaaagaacatagttataccagtacatacc

SEQ ID NO: 146756 - DNA, 378 bp, Zea Mays
ccgctaaaaatgtttggtttgctcttaagtaatgtagacttaccatggctaagctagagatgacatgtgtgttttgttttatatgttcctttctctaattgattgcgatataggagttctatagacattgacgcttatgtcctttattgaatttgtgttgtcggtgatgcttgtgcgcgatcaataggagaactaatgaaaagtcgtatccaaataaacaaaatgcgcgtacttgtgatgtcgtagttgtgttgcgtaaataaataaattgttgttgccttttcaatggtgttaatgttgaacgccgataacgtacgaatagctagcgcttgcgtgtagtcgttgcagtgtcttactaattagtgtttggttcgctat

SEQ ID NO: 146757 - DNA, 914 bp, Zea Mays
aaagactactgttgattatatgattgattgttaatgttggtttgccagaaaggattgcaacagggcaaaccaaatcatgcgattagtgatatgaagagacttgaagtgcctgcatgttttgatggtattgtaatttcatgtggttacaaagctggtattctacatcatcggtgcagcagtttttacttactatgcttcctgtcttgtacagcaaccaggaagctgactgaagataaatatcagcaaatgttaccacaagagatataataaaacttatccagtaacatatactgatctccttattatttcacatgaaatggtggcaaaataaaacgtatccaggatgaggatggagtcaattcaaaactgctgctgttccctgcatgcataactcatctcccagcacccatccggtagaagtactggcggtataaacacatcatgacaaagctttcatgagaagatctttgaccttccgactaaagttgtctatttgaatctgctcacattgagatagttctatttgcagacaacaaaagattgatatggagaaagggctccttgaacttgtagccaatggtttgtgacttataaagacaattatgcatcatggacaaaattttatctagttcttagttttgatcattcctgaatgttcttgtttctaatgagagctatctcactgagtcaccaggtcgtgacttcaaagcaatctctccatatttgcgagggaagacttttttgcctcattctctagacctcactcatgttggagcctccgacattgggtctgtcctgcctcgaatgttcttgtcttagagccttcatagatgaagggtatttattcagtgatacagtagtggggttcattatctacaccactttgatcaataaattaatgttttatattcaca

SEQ ID NO: 146758 - DNA, 570 bp, Zea Mays
ctcagtttctcactctcgctacccattttttcccaaacgctagtggcggcgggcggcggtcaccggggagtagtcgagtaggccaaccggaggcgcactctggcgtgtgtcgtaccgagggcgccaggagcctaccagtgcaggctacagcagcgcagcgccggagcggccggtcgctggccggctatcgggaccgcggccgcggccgcgtttggcccgtgctgatgcactgagaggagggtggaggccgcagggtggccgtccggcagcgtcgcgctgcacgtcaactgctctgaacctgtgtgacacaggaagccgctcggggctaggtgccaccatctgctctctaccaattggaggggcagccgtaagttcaaattgtaagttaatttggtcaattgtcatacccttttaatatattatccactgcgatttgcaaatgtttatgatacattggaactgcgacggtggctgaatgtatgttggttaaaataatttattgattcgccaatgtttatcattttgttgtttgagatgttgccgcttttatatgttatataaacaattggt

SEQ ID NO: 146759 - DNA, 441 bp, Zea Mays
atctagtcatatccaatctaatctagattttatctaatctattatgatctaatctagggtaagttacttaatgctggtacaaaagataaggccatatccctcatgcacttaaaactaaactggtgccttaaaccaactcagccacatgcatgagatctgacccaaccaataaagtcatgaagaattgtataatcattccccacctagcgtcaaaccaacttctaacctacatcatgtagtctatctcacctatatctatcttaaccatattcccccaacttcgatgatatacactgaccccgactcaatgagacaaagaccggaaaaggacaatatcaacctcgtcaaggaaggagagaagtcaaactcaatcttcagatgcattaccactcaacacggaattctttcctaccataaacttcttacccttagctattcttg

SEQ ID NO: 146760 - DNA, 548 bp, Zea Mays
gtggtagcggggcccatgcagcttgtgagtggcttgccgaagcaactgatgttgtggactgctgattacccacatgccacatattcggaaatctatggagaataacacgtagcagtatgcaggacctacttcagctgattctgtcgtgctttagcttcaactatttatttttgcttttggatcgtgacttggcacatccttgttgtgtgtctcttatcttctccgcagaataagcaaaacaaccttctcagttgagagctgaaccttccaccaaagcttcttcctcctctgcctcttagaggtggtggcctgaaagaggtttgttgtgtccccgatgactgagagctatgctgatgcccttgagtatgattgcccctgtcatcacttgagctggggttatgaattgtcctgactttcctagggtggagtcttcctccaaagcccctagtcatctaggagtttctgtaggcctcttctcttctatgctgaaagtcgttgtcagccctgatatattcgtccatcttttgcagaagcttttccaaagtttg

SEQ ID NO: 146761 - DNA, 401 bp, Zea Mays
ctgcagggcatctgatcaaacagaagcctcgcatactcaacctcatcccatccagcaaagccagtgatcatcacattccacgaaactacattcttcactggcatttcatcgaacaccttgcgtgcttccaccaagcacctggacatgacatacacattgataagggcgatgtgcacataggcatggaactcgaaccccttctggacaacgagcgcatggagctgtgcaccagctcgatgccaccccagacccgcacaagccttgagcacgaacttgaagacaaatgtgtcatcagccaggtgctggcgcgcgtgcttgaagaggtgcagagcttccaggggaaaggaccgtgggagtaggccttgaggaaggcgcgccacgacgcgggactttggtcgaac

SEQ ID NO: 146762 - DNA, 422 bp, Zea Mays
actttggcttcggctacctctgaaaaagtgggagactccacccagctaggcgtgcgaacgtctggttgccttcctgaccgaggggggagggatttgccgtgattctccatggtgaaccactcgaggcgccatcccttaatgctgtccttgagggggatatcgaggtattccactttcctccctcggcaaagttctaaacttgcgccgccgacgagctgatgctgccctctagccatcccgggccgacagtgatagaggtacctacagattccgaaatgggggagaattccaagaaaagcctcgcaaagatgtacgaaaatgacaacttgaagaatggagttagggttcaagtgtggcagattcaaatcgtagaaatcaaggagaccgcggaaaaaaggatagatgggaacaacaagtccgcg

SEQ ID NO: 146763 - DNA, 735 bp, Zea Mays
atgatgtggcgcaagtttgagttcaaattcgaaattcaaaatgaacttgtaaatgaagaaaagaaattatagcataaaaacagaaaagaatagaaggctttatgggccaactccacccaattcggcccagttttccccatgctcagcccctctgctcacctcagatcaacgtcgcgtatcaccagatcgcaacaaactgcactggagatcccgaaatcggctgcatcgatctcgctcgcccaaccgaacgctcacccgccgccgtgaaccgcggactcggccccacgcgatcgtggagctctgggctatataagtgccgggcgccacaaacaccagcttgtgcagggaggcaaacgaagtgggagagaatgttgtggtgaccgccgccggtgagtgccatccgtgcagccggtctgtggtcgacgtagagtcaggggtcatcgccggatcgaggtgatgctagatgcggagttgcgggatccggagatcaatcgcgtcgtccctaacccccgccggtgtcggggatccaccgcggtgccgcatgaactcgtgggcaggaccactgctaccaccctgtacggtatgggctcatcgtagctttgttgatctcccctcaacgttttggtccgttcttcgatgactttggtcaccggatgtcggggcggtgtcgcctcggtgcgctccaaggagcggattccggccgcgccgccactcaacttggtctggcagcgggtg

SEQ ID NO: 146764 - DNA, 427 bp, Zea Mays
gccgttatgcagtcaaatacagaggaaagccacacacaagtccaaataccactgtgcagagagggagacgcatgtagaacaagctacccaccaatgcacaggcacacactcaatcgacgccacaagcagaatataaatgcacacacacggatacaaaccgtgggagcgagggactcgatgatgaaccttgagttctccctcccgcgccaacccttgtccttcctgatgtgtgtaggcaatctgtaacgctatcctcttttcccgcgcttcttgctgctcagtacttctggctccccgggaggtttgtagtgtgtataatggatcctatctccgtctctatgtttgtcgatatcttctttcaccttgtcaggtagggagtgcccgatgagctcaagtttcttcaacctcgtaaggttctcgatgctgg

SEQ ID NO: 146765 - DNA, 411 bp, Zea Mays
ttccggatcttaggacagatgagcaaggagtactctggttcaagaaccgcctgtgtgtaccaatgggagaggcacgggaagtcctgctcaatgaagcccacaactcagcttactccatccacccaggaaccaccaagatgtacctggacctcaaagccagatattggtggaaagggatgaaaaaggaaatagcacagtatgtagcccggtgtgacacctgtcagcaaacgaaggccgaacatcagaagcccgcaggcctgctgcaacccctcccagtgcctgaatggaagtgggaagaaataggcatggatttcgtgatcggactaccccgaacgcggaaagggaatgattctatctgggtaataatcgaccgtctcaccaaggtggcccacttcgtcccagtaaaaacca

SEQ ID NO: 146766 - DNA, 326 bp, Zea Mays
gaagaaattagggaagggtaaagaccctattacatagaggacacacacaactgtcacctgatacaatcaaacactaccacgaccaacacactaaaagcctaaccaccgacctggagagaggagagagctttagcgtcggccatagaccagtacacaagcccctccttagccattctaacagcagaaataacactaggacgacacttatcaaacacacacttattcctatgcttccaaatgatccaaacgcccaagatgaccatggagttgagacagttcttcaggtggactgcaactctagaacaactattcttccaccaggtttc

SEQ ID NO: 146767 - DNA, 502 bp, Zea Mays
gccaacaactaccatggaatcagttttgactatgcatgtggtcacttcgagggctcgcatcttgcgaaggcctaagatgactacttcgtattcagcgatattattcgtgcatttatctgagtctagtgcgaaacaaagatgcgcggcatatctatatttgagtcttgtgggtgatgtaattattgctgcagcgctggcgcctgcttgacaccatgccccatcggagtggatggtccagagagtctctgcatgaaactgttgtggctccgaaggccctgtccagtctactataaaatcagccaaaatctaggatttgattgttgtcctaggttcaaaggtgatgttgtaaccagagagttcagcgtcccatttatctattctggcggacgcctctggatttctgaataactctccaagaccccgatctgaagtgactcatactttgtgtgcctcaaaataatgtcttagcttacgcgaagccatgatgatagcgtacgctatc

SEQ ID NO: 146768 - DNA, 1224 bp, Zea Mays
tctactcccaatggctgtggactgcaatcttcggcttcacagccaacaatgtttcctctggaacctccagggatgaaagattctctgtctgatatgttctcaggtttaaatgtgtctcctttggaaacaattcgagcttcttgggatgaagagtccaactgcatttatcaagcgaaaaactgaacgaacaaaagcatccatcctccaaggaaaagaagcagggccctgcatcaatttcattatccatgtatttcaccgggagcatagtgatggataagttaggagcacgatcattgtcagtagtagtgacactgatgcaataagcattgatggatccatttccctctgacaagccaaggaataaagagccatgtggggtggcgcgaccaacgaatggtagccccttggtgtcaattttgtgccactcgactgaattggtgtcaaatgcatatgtgccccaaagttgattgaatgataccagtatgtaggtgtcgaccaccacataagacgtgataagtacaactggcagcatggtataaacaaatggggtaatcttccaagggaagcaaggtggatgtggtagctcaatccaggagcatccctccaggtgggagcggtcgtcaacaatgacaactttggctttggaaagatcgagtacctcgaaccagggtgggaaatcggggtctgtgaaccagcagagagtcttgcacagagcataaaccttgtcccccattgttgttaggacagggcaccactttgtagaattgagagtcggcccgtgaatgaccttcttcgtcttggtgtcgaagatgacggtgtcacccggatcacccccgaccctaatgatccacgcgcggtgcactgaccgtagggacgtgaaggtcataccgccagcaacggtggtcagacgggtaactcggtgcaggctcttccgcttcacccgcgaaggaaaggaagtggcgacgcccatcttgtacacgacgtagggcatggaattcctagaccaatcccagtggcatgccacaaggtaggcagatcagacctggccttcatacaactcatcgctgacgatcctcgtcgggtcgagatgttctgtttcttgcatcagcggatcgccgtcaccgccgcacacgatctctagatcccccatctgaatctgatccggatcttcgcttccttccagctccactgatggcttgacccttccatgacggtcgcccgtct

SEQ ID NO: 146769 - DNA, 715 bp, Zea Mays
gtccgagtccccttgtaacgttgcatgctcccccttttatagctcaatggggcatgtacaagagtgctgagccccgacatgtgggcctaggagcatgatggatgtaagacttggggcaacaatagtcgtctgctggagcaatcttcccgcgctctgacagccgcggttcacgtagtcttggtgtgctggggaagcttccctggtaatgctcaagtgctcgtggacatagcgtatctgcgtatcctacagcacgggcatattgttcggattagacaggcacgccgcctgctgtatggcctgggcaccgtctgccagcggagtggataggacgcattaaatgccgaaggggcacatcacctgtcagcagggtgggcaggcggcgcatcccctctgcaataaatacagaggccgcgtggcctagagtccttacgtcatgctccgcccactggcctacgtcacaggcaataagccatgtggcagtatcgggccctcggccgagcggggagcggaggcgtaccgcatagagcctggacatgtgtcagcaccggacccatgcctaggccacgacacttcctcccccgggaccttgttatgggtggtccagagcttacttggtggggttcgaactccatccaatggctccaggctgctttacttcatgggtctggcttgtgcgcataggggtcctacgccttattgaggaggtctgagcttg

SEQ ID NO: 146770 - DNA, 1448 bp, Zea Mays
tcgggcctgtattccactgttatatcatacccaaatagtttgctaacccaagtatgctgagggattgttgacagccgttgatcgagcaagaattttaagctatagtgatcagtgcggactgtaaagggtcggccccagacatatggccgccagtgtcgaactgcctttaccaatccaatcaactcccgctcatatgctggcaatttttggtgatgaagggacaccggcctgctgaagaaggctatggcaccatcgccttggtgcaggactgctccaaatccggagccggaggcatcacagtcaatgaaaaaccttttgtcgaaatctgataactggagaagtggtgctgtcagcaaggcttgtttgagttgacagaaagaatcagttgtttcttatgtcaagtggaatgcatctcttttcaggagggctgtaagaggagctgccactgacccatatcctgctataaacttgcggtaataccctgtgagtcctaggaaactgcggagtactcggatgatcctaggtatggcccatgattcaactgcgccaccttggaagggtccatggcgaccccctgcgcagagacaatgtgtccaaggtaagtgactgcagatttaccaaatgagcacttagacttcttaagaacaaggttgttgtcccgcagtaattggaacacatgcttcacatgttgcaagtgctctgtccaggacgagctatatatcagaatgtcatcaaagaataccagggtgaacttccagatgaacggcttcagtatatcattcatcagagcttggaatgtggatggtgcattagtcaagccaaacgccatgactagaaattcaaagtgaccacaatgtgtacgcaaggctgttttgtggatgtcattcgggtgcatcctgacttgatgataaccactccggagatccagctttgtgaagaaacttgcacctcggagttcatcaagtagctcgtccaccactagaattggaaatttgtccttgattgttttttcattcaattcacggtaatcaatgcaaaatctccatgtgttatctgccttcttgaccaatagtacaggtgacgagaatgctgatgtgcactctcgaatgatgccttgtgccaacatctgatcgcactggcgctcaatctcgtctttaagcagttgagggtaccggtagggtcgtacagccattggttctgtaccagctagcaaccgtatgtgatggtcttggcgacgtgatggtggcagtccctgaggatcctaaaacaaatcagggaaagaggacaacagttcttccagacattccctgttcttgtccatggatgcaaatcccaacactgagtccccaactcctgtcaagtgtaccaaccttcccttcctccagaatgccattgtgtgtgtcaaagttgcagaccaccgatcctagagatcgcagccactgaactcc

SEQ ID NO: 146771 - DNA, 296 bp, Zea Mays
caagaatgtaaagcattcacaaccgattactgaccctggatatgacaaattgttgccagggagacctaagcctaataggtatcccagatcatgaataactgccccttggattcaagtaaacagggatgaagggggaaatcagcattttcctcatacaaggataattgctgatgatatatttaaagcataaagacatgttacacatggcagatttgggttttgcaatttctaatctaaatttatctagatggacaaaaaactattggctggcataccttgtgcgtcggatgagtcct

SEQ ID NO: 146772 - DNA, 565 bp, Zea Mays
tccggaacaaaagcatgacacttgttataagttaggcggccacacaaatacttaaactgtagagaaaagaacaaccatacacttgagtgcacctgttagagtgttaggaagtactgatgtactcctgttacgaaaaaaaggatgttcgttccaattcggtgtgaaattaaaattacatgcctaagcacgttttgcatttggacaacgacagctagcacaacgagatgagctctccagcgaatagtagcacaggatgcatggcgccctagtagtactgtcctgcagcctaccggccagttgcgcgtgcatggtgcatgcatggacttctccgtcgccgttcaactccggacagtttgtataccaaaccttgttgtacaggcgtcacgaggtggtggcgtggcgttattcaaacttgcgaggccaaatcgataccaaacctgccgtccacgctccacgtacgtgtgtttctagagactagagagtgtgcggtgcgcggtgtgtgcgtcaattgcattggtccatagcacctcgctttttcagctcgctcgcacagtgaacggcccat

SEQ ID NO: 146773 - DNA, 347 bp, Zea Mays
gtcctgaaaccctcctggactcgacgcctcatgaggacaataaagttttcaattcggtatgggagcacatgtaaagtaaagaatatagatgacctctatccctagagtaggacgcatcctaaaggtataacactatgttcaaacccaacccgtcaacctcgtggtagtggttatcttgataaggctcatttctatcatgtttaatatgatgggcaatgttatggttaaataggtgtattgttgccccgatataggtagcaggcatacgcaagaccactatttgatatgtgtcatcgtccgtatagccatgcttgaacgcgtcagggtactgtaaagtattataaagt

SEQ ID NO: 146774 - DNA, 382 bp, Zea Mays
gaaaggacgggacaatattgccatatcgggtgtatgcgtacgcatgctggaagtgacatgggaaccatgacagaaaacaaagctgcaccaagcacgaccttgagctccaccataagtctaccctatgggacccaccagatgccactacatcaacatcgaacttgctacaaggacccgtatgccaagtggacaaggcggtatggcataccataagtacgacagtgtatgacccaacagacaacgttaggaggactacgccatccaagggcaaccgtccggacacccctcgtagaatacaagcctccagtgtaaagtcatacccttgacgtataaaagggcaagaccactttctttctagacacacgagcacaccagttgtaac

SEQ ID NO: 146775 - DNA, 419 bp, Zea Mays
caagatgaaaagattattgaagaaatcatggttagcctatatgatgattctgatggtatcgaagaattcaactttgaagaggataatgcatatgtcgaagatcggccatcccgcggtatctccggtggttggagttcctgatagtcttcgacgatgcgaccactcggacaagatcccgcatcccggacctacccctttatcatcgagctaatcataacctcaaagtgcctatccaaggtgctaatgaatagggggagcaacctcaacatcatgtatgttgagaccctcgacgacctagggatcgcacgccccacgttgcgccccatctcagcatcgttccacaccatcatcctaggccaccagtcctacccgcttgggtgaatctctttgcccgtctaaaagtcgcctagagggaggtg

SEQ ID NO: 146776 - DNA, 504 bp, Zea Mays
tgttaatggttcgtgtaacgtatcgtatcatttgatgaacaattcacaaatcacaaggtacaatgtgagaattggattttgaatcttaccgacgaggtcattctgtgaaaggtccacaaaaatcagtttagtcatgttggcgattgtatttggtattctcccagagaagctgcaacctcgaagtattaatactgtcaacttgttgagatgtccaattgtcggtgttatagggccagataaaccttgatggttataggatatttgcaggaatcttaagttttctagattgccaactgaagagagtaattgaccagtaaaagcacaatcagagattgtcaaatattccaatgtcgtaaggttgccaattaactgtggaattggccctatggaaccacaatacctgatatccaagcttctcaaactggttaggtttccaatccaggagggcattgtcttggtagagtagcaatcagaaattttcaatgttttcaagctctggagatc

SEQ ID NO: 146777 - DNA, 279 bp, Zea Mays
cctatccttgctttgaattgagagaaaagattattccaagttgctctgttaggtagagggtgctgaatttagttcagttagctgaattgtgtagtttcgtggagttccaactttggagctctctaacctgaagcctgttgagttttagctagtatcctttaaagtaaagttggagagtgatcatagaagagcaactcctagtaggaaagtgtatcaagccagcatagggagatgagagaaaatctgattggaacttctaggattgtaatttgatgtggt

SEQ ID NO: 146778 - DNA, 638 bp, Zea Mays
gcaagatcaatgttggtgttgtcaatgtcttccacagatgtctgacgctaggcaccatggaggcaggagtgctcagtaggagcaatgtgcccatcatgaggaggaagcccaatagcagcagctacctcccctgccatctccgttgatagtggaacagatgctcttgatgcaaactcaggcagtgcaagctattgggcagaatctggcgaccatgcaactaagtggagaatgacctgaacaagtgaattaggtactacccatgttatccgagtcgtagtgcaattggcaccattgtctcaccgataggtgaaggcaatcttaggttcagggttcaggtcaaccttgttgtggtcctaaccacggagctggaccatgccctggacaagcagagtagagcttgtgagtagatgtgacaaatgggtgtagagttggtagatcctatctgcgctaacaccctattccagtcatcgtccgacaccacctccatcccgacgcatgaccctgtttaagcccacccccttcttgttgcctctacccactcatcatcgtcgtgacgccgacccacccgataggcctaatatggctcgtcgtgacaacatggcccgtccttggtggccaacaagcttggtaaaccgtag

SEQ ID NO: 146779 - DNA, 321 bp, Zea Mays
caacctatgatgttgtgtgcagttatgcatttttcagacctagtttactaattactgtaattatttgttgtatttcgtaaagatatttgttacaataccataacctagctagaaaaatctaaaaacttgcatggaccattcattttggtgtacgatgttgacaaaatagtttcaactcattcggacaaagtggtgacacacatcctaagaaaggcatacatctctcatataaggctaattactaagtgagagatgttcatgcttgtgatggatctatactagcactttctccaaaccattttaaactttaatggcatgttt

SEQ ID NO: 146780 - DNA, 659 bp, Zea Mays
attcgaagtcctttctgccatgccggtagggatcactgaaaagtatagcgatgctagtcagtcttcctctgcttcaactcatttcaaaagaaagaagcctcgtaagcaaattccttctggtcatcgcccgataactcggagtttgtcaggctgtcgttcagatgattcaaatgccataagcaacgatgacttgtgttccccgctaaataatcaggatgggccaagccgtgtggagcaagtccttgcagcaaatgatggccactcagttgagcagcaaatggcccaacttatggctactcttcaacaaaaggaagatgaattggttgctcttcgtgaacaaatggctcgtgaacaagtggctaaccacagccataataatgacagggatgcctctaccagccataaccaacaacattctgaacctgcactcactcttgaggcgatacaaagaatgatttctgagggtgtgagagcacaatacatgcaaacatattattccatgcgtccagggtatgtgaaaccatatccaccagaagttgacatggtacccttcccaaacaactatcgccaaccacagttcagtaagttcaatggaactggatctccacatgaacatgtggctcatttcttagctgcttgccaagacacctcccataatg

SEQ ID NO: 146781 - DNA, 714 bp, Zea Mays
cgacaggatggtgcaccgacgactcgttacgagagcgggccagggcatggagcagctcgtcggaggagggacctgtgaaccggcctgcacatgccgctggtagacgcgggcgggatcggcaaagcgagtcaaagggggtcggagaggtggggacacacgcatggcacggtcgaaggcgtcgggaccgcgtagggtgtggaagaagtcgtcggaaccggtggtaaggagagaggagagatggcaacaaaattggcgtcgaggagagtcgaggtctagaggtgaggagccaacaaggggaaaagtgtcctcatcgaaaacatgtctagagatgatgatgtggttggtgagaagatcgaggcactgataccccttgtgatcagaggattatacaaggaaaaggcagcgagtggatcggggcacaagtttgtggagagcagtggcagaggtattacaataggaagcacaacaaaaaacacggagatgcgtatagaaagaggctatgtcgaagagggcgaagaatgaagtgggatgactggccgccttggcggggaggcagttcaggaggtaggtgcaatgtggaggccctcagcccagtaacaagcaggaaagaaggcatgaaacaggagggtgcaaatgaggttggtgatggtgtgaatcgtgcgatcggccttgccgttctaaggggaggtgtaaggacacgacatccacaatcgc

SEQ ID NO: 146782 - DNA, 870 bp, Zea Mays
tttggatggcaaacaccagcgctgctgcgtcgtcggagccggagaccaccgccggagaagccacgcttgacaacactggaaacttcatcctctggagttcacagggcgccgtcttatggcaaagcttcgattacccggccgacactcttctgcctggcatgaaatttagagtcacccaccgtaggcatgcactgcaacagctggtctcttggaagggcccccaagacccagccccgggcagcttctcctacggcgcagatcctgacgagctcctgcagcgctttgtcaggaatggctcgagaccatactggagaagtccggtgttgaatagttacttggtagccaggtcatatatcggaattctcaagtccactatctacctcacaataagcaaatacgacgacggtgaggtctatatgtcctttggcgtacccggtggctcctcatcgtcaactgccatgaagatcaaaatggactactcaggaaagatagaaatcctaatctggaacaccaacattttggaatggtacgtcctggaggcacagcctatgaatgaatgcagtacatatggatattgtggtccgtttgggtactgtgataacacagagcttaatgcgacatgcaagtgtctcgacagtttcgagccaataagcaacgaaggcaggagcaatggaagttttacagaaggatgccgccgcaaggagacactaagatgcggcgaagaagatactagtttcttaactttggcggacatgaagattcccgacgagttcgtgcatgtcaagaatagaagcttcgacggatgcacggcggaatgcgctagcaactgctcctgcacaggttacgcttatgccaatttcagcaccacgg

SEQ ID NO: 146783 - DNA, 622 bp, Zea Mays
cgcctatatatgcgcgcgcactcattgcctttgcccgggtggtgacgcgacgtgcctctagcttgttccgtcgtcgtcgtcgaagaagagcgctctccccctctgcctcgacgaccaccagctcccttccggccgccgctgtcgatcggcaggtggtggacgacgatcgagaggatgagaggagataggagtaaggccacacggccgctggcgccgccaccaccggcgatcggcgagagggacatggtggaggaccctagactgctgaagcaggtgagggagcttcggaggctggtgccagcgtgccgtgagccatgcgggctcggcgagctgttccaggacacggcgacctacatcgaggacttgcaggcgcaggtccaggtcatgcggatgctgctcgacaagctctccgatgaatgacgagttcgcgcgcgcgcgcctgcgcttatacgcgatcgagatgaagtctgctcttcgatcatgtgtccatgcatgatttaggatttgtccgtcgacaggaacatatactagtaccagtatatataaattataaaacaatttattcatacgaattgtttgatcaatttcttgcttcaaaaattatgttcattcaagatttatg

SEQ ID NO: 146784 - DNA, 532 bp, Zea Mays
gccggaggtcgaggaggggcggcagccgcggccgggacttcgcgccggacctcggcgccattgccgagtaaccaaccgtccgtggcagccagctaggagaacgggggaacctaattaacagcagtcgcgtcggcagcccgcggcgacatgaaaatgaaaaaaaaaaacacatccatctgtagctacgcgtaaaaactgatctactggacgctttgactaatgctagtgtagtgtaggtgtagtagccgtgtaggaaaagaaatgcagtccatcttgcatctggtgtgtacgtagaatactagtacgcgacaggctgtgcgtgtagattacgcacgcgagcatgcaccgcgatccggacgcccaggaggccaggacccgggtgtgtgtctgactctgactcccggggcccgcattgtgatgagctgagctgtaagccgctgggcctgggattcgtgtatgccaatcagccgatgtggcgagccaatgaacggcaaacgagtcaacgactcggatttgccagcctgaggagcag

SEQ ID NO: 146785 - DNA, 693 bp, Zea Mays
ccaggtcagggatgtggttgttttggacaacgtgctgtggattggtgaatgccaggactaccagaccttgctggtggaaatcatccgagaaaggaattctactttgactgaggtagtatagctcagagcaacataggtcaacctaatgcagcagttgaacaatgcagaagcttggaacactaatctgcatgaggaggttcaccagcttcatgcctagctcagtccaatcaacccgcttgaaccagaagaagcagatgtcgctgcagccaacgatggaggtgtagtctccgagaccagcagcgtgcaggtgtagttgttagctgtcgctagaggatatgctaacccttttggatactgttactaggagtaggaacaagacttatggagtaaggctgatgtaatgatggcttctgacgcaggtacgcgtgtgtgggaaaacactcttttggttggttgtgcatgcgagcggaacaatttgcctgtatgtacatttaaatattatgaagtacgtgatgatgttgttgcgcatgtgggtatgtgattctcgccttatgattttttcacatgaagttttcttctatgaaatatgtacgtcatgatttccttatttcacacatgtgcaacgtgactcgttgcttactcataatgaaaatgtgcagatggtgacaactcgccgcattaacccgggggcca

SEQ ID NO: 146786 - DNA, 509 bp, Zea Mays
cctgggtccagcaaggtgccggaggtcgtgaaggcagccggcgccggcggaaccaagtctgcctcggccggagccgcgaaggcccgagaattgccttcgccggggaaacgcgttgctgatttcggcaccaatattagtgtggacgattatctcgttcgtaagtcgttggcccaagtttttttttgactgttgatgcgttgcaggatcgggcgaggggcaacttgttgttgttccgcctgcggtggcgaccacggtgtctgtcgcggtgcctggggcgaagggtagcgctctcagcgctggcggtgagatttcggcgctcactgccgtcaaggacgaagcgggcactgtgtcctgccggctgagggaggcgtcgcagcggctaagtcaggtaagttgagctagactttggtgtttaccgctttcttggggattgtggtcttatgtgtgtcttttaggcgactgacttcgctgactgcgtggagtcgagggcccttacggcagttgtgtct

SEQ ID NO: 146787 - DNA, 336 bp, Zea Mays
gtgggattgggggctctggtttcgtgatgatgtagcgcagctgcctcggccttcaatttatagagggcttaggcggtggcgcgtaattcggccgagcaattctggcggccggagaaagagaagagcactggcgcagtggattggtgtcctgcatcgtggcaattgctccggcgatcaacggggagcaagagtgagtcacggtgatgcggtagacaggctagagacacgcggcggacaacgacgacggcttaatggcggtgagagtccttatccgagggcggtgagcaaggggagaggtaccgcggctagctggagtggcttccagctcaccggcgg

SEQ ID NO: 146788 - DNA, 481 bp, Zea Mays
ctgagtgctagtgtgcttaaatatggaccctctattatgttagtgtgctattgtttagttggttgttttggtattatgcccttgtatgtttttcctttatgtagtgtgctattcctcaattaggaggataattaagatcttcctcataagattgggttgtgtgaattgtgttagtccaagaccattaactccttctaaaaggacattcaagcaagaatgcatttcattagcagttccatgaggaaacatcccaagatagatttaattttctcataacaacgtgattatgttccacaagctcactctttgttccctaatgcagcgcacaaatgttcgaccatattgcatgggcgtccttgtggttctgcacatagttaaacatctctctgcaaaggcccctaaaatggtgtttctagactttgcatttgtactgaacctcatcaccgcttaggttagtgggatcctaaggtttttggaagcc

SEQ ID NO: 146789 - DNA, 534 bp, Zea Mays
acctacgaggctgctgttatgcagggtagggatgtttggtgcttcaattaggttggtaccgacgaccccgacccccgaataatgggcagttcagctgagagcaacctgcgtttcagccctcaaggtcgtaccattctttctgctgtcatctatatacttgccatccagacattttcaaatttcctcggtcgctagcatagaaactggttaatttttgtccacaaacggtcgacggcagccgacggaaattactgactaacaaaagccgatgaaaactaggtagctttcgactatcttttaaatagttcatcgtttcgctctcgctgtctctcacgaacacaaccgcaacctgatatgatatatctaacgagtgaagctcatctgccaactttagtctttataatcaaatatgagtgggcatcatgggtggagtaagagtgaagctcatttttgaaagagtgaacggttaagactaagaaatttatcgatcgggcattagcgctaaaattatctatatcattggcaagagaaggg

SEQ ID NO: 146790 - DNA, 424 bp, Zea Mays
tgggtggataaggagtaaaaaactactataattttttggttcaaatacaaatgccacagttttcacagatgcaagtatctttcaggtggaactaaaatatctgctgattaaagcctgcacaccataattcgcattatctcagtggattagaagatccggaaccattctcagcattagtagttacatatgccaaaagttacatgcactggtttcagttatcaggaaattttcttgtgcccgctttcctaataaaccacatcacacattggtttggagctttatatagtttattatggtccattgtatctatctaatgacacattgttgcctacttttaactagttgaatctttttgcaatcatggcatgtagaccaagattagatttatgtcatgcaacttgcttaccactataatttctggcag

SEQ ID NO: 146791 - DNA, 280 bp, Zea Mays
gttttcttgaaaaataactcaccaaaacatttggcaacacgtgggcattattgattttggattggcaatagtccccagacaataccaaacatctcatgaaatttattgttgctcgagtgcttgaaagattatcagattaattagaccatacatatgggaggtactattgttgaattaaataggactgttttgacgtgcgacaatatgtacattaatttcaattattaaccatcaggtgccattaagagtttaagacagtctcaatggaaggttgttcatg

SEQ ID NO: 146792 - DNA, 612 bp, Zea Mays
tgacagtccaaaaggcaagagctagacaacattccagacttgtatggatgcgtctgggagatgcaaacacaaaattttttcacctgatggcaataatagaagaaggaaaaatttcatcagatcgctggttcgtgacgacaggttactcaccagtcaggaagataaactgcatgaggcccaccatcatttcactgaagctattggtagaaggggtgagagacagagggccgttcggtggggtaacctaggctatagtccatttgacttatcagatttggatttcttgttcaatgaggatgagattaaaaatgtggttatggggatgcactctgaaaaggcgccgggtccagatggttttatcgggatcttctataagagttgttttgagctgattaaagatgatctatcaagtgcaattcatgatttctatcaccatagatgcaaaaacctaaacctcgttaacgaggcaaatatcgcgcttttacaaaaaagggagggtgctgacaggattgacatgtttaggccgatcagtctcatcaatagcttcatgaaaatattgaccaagattttagcaaacagacttgcaccaagaatgaatgagattgtctccac

SEQ ID NO: 146793 - DNA, 472 bp, Zea Mays
ttgttcctaccctctccaagcaattcctgaagccaccaaatcctaatcatgtccatcaaaaaattgaaaggaatcctaggttttatccctacttcaaggtgatcacatggattatcctatcatatgtcaatcatttctttgacctagttttttttttctttgacctagttttttctatgcagaattgcattggtgcaatcgatggcactcatgtgcctatatcgatatcacctgacaaagcccctccatttaggaacaggaagggcacccttactcaaaatgtaatggtagcgtgtgattttgatctcaatgtaactttcatatctactgggtgggagggatccacgatggatgctagagttcttagagctgcaatgaacagtggctcccaagtacccctgggaaagttttatttagtagatggcggttatgccaacacatcatctttcattaccccatatcgcggagtcag

SEQ ID NO: 146794 - DNA, 1004 bp, Zea Mays
agacataaaatcaaccggaataccaatgaagaatcttgagttttctaaccggtaattaatttgtggtagtttgtagctttgtatttggagttagcgacttgctaaaatccaagcgcctgaactttagtttttgttttcaggctatgattagtacatataattcataatgaacttatgttttcggaaaaaaaacatagaaacatttatgagcggtgtcatatatttgtgaacgaatgtactaatagtttttaatccacataagaacattttttttgtacgacatattttattatagaatcatgacgcgtcgtcggtcgtcgctacgggacagtgacatacatacgagcaggggcgccagccaggcacgtacacgttacaagtgtacgttttggttagctagccttttttccggtgggtgatcgtgttctatttgatttgagtttgatacagcagtggacgcgcgcgcacaccacctgtaattatcgtgcttgatctagactcccccatacatacgtgacaactaaccgacacgtacaatatagctagcgtcggcggtgttagggagtaagctaagcaactttagttgctgaagcaaccccgctgtacgtacgtgcgcgaattggtgtactcgtgaatacataagcatgccgtcacggatagctagcgtagcatgcaaaacagtgatccaccagatgatgcgttcattgacgaagcctctcaactcatcatcagtctcagctactcgatcggtctactcgtactatattacgtaccacttctaacaaaaaattgactcgacacacacaaaacgcgcgctaccgcgcagcgcgcgtcaactgcctgccgatcgagggccgatcaagtcagagtcactagcgacatagggatactagctagctagctgaagcacgaacacggacgcaccgaccatctgtcacgcgtgataaacgggacaacaacaaccgcgacacggctgatgactcgtcgacccgcgaggagaggga

SEQ ID NO: 146795 - DNA, 765 bp, Zea Mays
ccaccgtccttgtagcctgaacgcagacggtgtttgttcttctcaagccagtcctcctcggcgagaaggagtcgtcctgccttatcgacgaggtgttcgacctagtcgtcgaatcgatcctcggccgcacgcagacgccccaccagttcgtccaccgagagctgcttgagatcacagaacatttcaatcgtgacaactacctgggtgaagcgcgccggaaccacccgcaggaacttcttgacgacgcggacatcttccacgacctcgccaagtgctcgaaggttgccgacgaggttggtgattcgcatcccgaaatcttcgaccgattctccgtccttgaacttgatgttctcgaactcttggagcatcttctgggcgttcacctccttcacccgatctgcaccgagccgcatcaacttcactgcctcccacgcctccttcactgtgctgcgcgcgccaagagactgccacatctctttcggcaccgagcgcaggagcgcgctcatggcttgacggtcatgcgccctcttggggttgatacctggactgatcacatcccagatctccagcgcctcaaagttacactgcattaacatcgcccactcggagtaattatcacgagtgaggagtggccacatcagtgaactctccttcacgccgccaccggaacctgatgcttgattcatggtgttcgacggctgtcgtcgagggagaacacgcttcttcttcgccggttctcgaggagggctcaccgatccgtcgtat

SEQ ID NO: 146796 - DNA, 302 bp, Zea Mays
acccaaacagtttgctgacccaagtatgctgagggattgttgacaaccgctgatcgagcaagaattttaagctatagtggtcagtgtagactgtaaagagtcggccccagacatatggtcgccagaatcgaactgcctttaccaatccaatcaactcccgctcatatgctggcaatttttggtgatgaagggacaccggcctgctgaagaaggctatggcaccattgccttggcgcaggactgctccaaatccggagccggaggcagcacagtcaatgaaaaaccttttgtcgaaatccggt

SEQ ID NO: 146797 - DNA, 416 bp, Zea Mays
gtttggttggctccgctgtgtgcatggcgcaacgatagcatcctagttgtaaatagaaagaatacagcctctttaggactagtcattgcgatcgtgttgattgatccacttgttgcattattggccctctttatccataaaaccttaagatctggttttagctatatagacttgcaacttacatgtcgaccataatattgtggttctctaaagtctaaactctgaggaaaagtgacgcctatttaaaaccctgtcccatgcataaataatagagtttttgtttgtctttgatgcatgaggtgctatcgttcttcaccttttcaatgcatttctctgttttgcaccttagtaatgaaattggcattcttatggtgcttgaaattgttgagcgaatagttttttcatctaatgttctc

SEQ ID NO: 146798 - DNA, 698 bp, Zea Mays
gcacgagctccggccccactgtcgcaggacaagcagcggccttatcctccgccgccgtcacgggcatgagcggcagcgttgcgagctggcgctgctgcggccggggtggcggcgacgagtccacggatgacgtccccgacgaggacgaggacggcgacgaagacgacttctccttgtcgcagtgctcccggcagtcgcccacatcttgcgccgccgccgtcgccgcaggcgctgcagtcaccatcgcaactttggccgccttcttgggcttccggcccctcctcccgccgcctccgcacgcggcctttcgcttccctctcccggcaccggcggctgatccggtcaccggtgccgatgccggtgccggcgcgggcgccatggccgccggcttaggcgcaatcgggcggaacttgagcatgatcctccccatctgccaggccgcgcctgcctgctgcgcggccgcggtggcggcgtacctcggcgcgaggcagcaccctccctttctctccatcccctctcccgaccgcacacgtctcaaaaaccaaccaacccggtatgagtacgagtacgacacacttccttctactttctcgccgctcgcacgatggcactatggcagtgagagagataagatacgaccaccaccaggacgccgacgacccgggtgcggcttgaggcccggcgctttaatacagcgc

SEQ ID NO: 146799 - DNA, 1318 bp, Zea Mays
ataagaataaaaaaacagcaagttccaacattaacgaaagtcagctagtcacctgattttgcacaataagacaaatggagaaatatgaaacacccacgtacagctttgcaggccacaaccttaatcttttaaggtttggcatgaacatacacttggtgcacaacgcaatacattatgcttaatcagtcagctggcataaaagtgcctccagaaattgacaataaccttcaggtgtgagctttgttccccacaacgactcggctagcatttgaattggtcattatacaaagttttcaaacctaaactactatgtcatacttgatcttcggatacgcacattaccaaacagaggtccgtcagaccatcatcacacaatctaaaccactgaacctaaacttgaccaatgcagcactttcttaaaaacataaatctggatgacattgatgtgatcttcatagatttaattgaatagggaatgaataaccaatagtaacaccgtttctgattggttcaagagtggtgggttcatgacatcaaccttctatctcattatgaaaccagtaggacgcagagtttggcatagatgtgcttccctactcccagtttgaagtcatgaaatggcaatgcactttagtacatggcatatactcatatagcaagtcaactagagatacacattgtatctaatctatccatcaaattccaaaccaagaggcaaataattggcacaaagaatctccaacaatagtatcaccgtgatatctttctgatgcagtgacaatgcacttccgtacatgactctagagatagaatagcacacgttgctgatataattttctagtatctcactgagttcctatgtgacgtccaattgattagcagtataggtgttcatctagatctattagcataggggccaaggtgcagggcggcactgttcaccgccgtcgagtcgggagttgtagcgccagcgtccagacgttctcctcctccctacaggttagggatctatggaggtgcgtcggtgtaatgggctccaccgacgacatggtagagcggttccgatcactagggcgctaggaggcgatcggggccttggatatgtggcggccagggttttgcagaggggaagcgttggcttctatgttggtgtcttgcctcattaatacagcgttcgtgactgagggccacatccagaggatagggttgtgcccccgatcagaccacgggttgttaggagggatagaatcgggctagtcttccttgatcgagccagagaacacacacctaatagttgtatctaagaggagcctatcca

SEQ ID NO: 146800 - DNA, 290 bp, Zea Mays
ctgcgcaacaatgtatcatatctagaactggcacaatgaagatttggattcccaagaagacaaacctaggggagagagaaataaagatcatgaatccggttgggattccaaagctaaaggtccctcatgcgactcgtcttctggttcatgcatgactagacccataggagcagatcctaaataacaattaaaccttagctaggtcaattgatagctccccctccttatagtacaacaatgtctctctaggattccgttcttgaatgtgatgttggaaatttagattcccc

SEQ ID NO: 146801 - DNA, 285 bp, Zea Mays
tgctctacgtccctccgtcatcacttgtcctccaggagatcctagccgccgtacatggtgacggccacaaaggcgtacaacgcaccctccaccgcctccggcatgacttccacttccccgacatgcgccgcatcgtccaggacttcgttcgctcctactccacctgtcaacgatgcaagaccgagcacctccacccgggcggcctcctgctgccgctaccaattccgttgggtgtctggacagacatcggcatggacttcatcgaggcactaccgtgtgttcgcg

SEQ ID NO: 146802 - DNA, 782 bp, Zea Mays
tacataggcaaaaaatcttataaacaagtaataaataaaatatatgtatagtaacaaaactataccatggaaacaacaatcctacattgacaatcctcatattatttcgacactacatcttgagaaaaccaaattgattctaggatcgagtcaggccattggcaaattcatattagagcggccactttactgacctggcaattgttttgcatgtgtccactaagattatagaaattaacagcctggcacatgtttagaaacaataaaatagaagataacattaacagacttatctcactagtaactattgaataaatgtcagtcaaaatcacattaataaactcgagtacttcaggacatcacacaacattaccactgaattcacaagcataattggtgtttatatttcaccatcatggaacaaatgaaatagcacatgtattgtttcctcaatatgttttatgatgcatgtcaccatgcctattatgagcaaaatgagtacaagtgccgaacaataaatgccagacccttatacaatcatatatagttgcaatcaatctgggccacagttactacttaaagctgcatgctcattataatcaggaataacatgtaagcacactcctcaacaaaccatgaagaggtggagccatctacaagcacaattatctccaggtagcaaaaaattatcattaaacaccaaggaggaaactctttttctactacaaagagtgcatatgtacacttcaacctgccaaacaatgtatgtatccaattctatc

SEQ ID NO: 146803 - DNA, 669 bp, Zea Mays
tgttgatcagcctcgtggctaggacgcgaggaggggcaacactagaggtccagcccacaagaggggcaagtctcaacatcagcgccaccatccctatcgtggcaaatcctctgactcgggtacttcgggaggaagtactcagaggtttcgggctgttcctaagcccgggctggggctagtgtgtttccgttgtggtgatgcgcatcgccatgcagagtgccagtggaacggtaggtgttcaatctgcagtcaagaccataaggatgtggtgtgtaggaggaatcccaatgggaagctcagatgggagccagtgacttcctcctcttcttagggcactgtcaacatgatgtcaagcgctgagcagcaattttcagttccacctcctccgcagcagttttatgtgcctgggacttctcagttcgtgccagtgtagggttgtccttagtatttggctgcgcctactcctgcaccgactactcctatgctgtcttagtttggagcttcgcatctgcctcacccggtggctcagtggggttcttctattaatttcactccgagagcttcctcttctgcgggtattcccggggcttatgtgctacccgctgcggatggcagagagcaaggagacgtggtgacaggtacgatttcagttgatttgtttgtggccca

SEQ ID NO: 146804 - DNA, 316 bp, Zea Mays
ctcaattggcagagttatatatggctcggattgtgtctctacacggtgtaccgaagaaaatcattttggatagaggatcacagtttacctctagattttggaaaagttttcatgagaatacggatgcgaagttgaattttagtttggcctacctcagactgatggacagcctgaaaggactaacccagtattggaagacatgttgagagcttgtacccttcagcatggtagtagttgggacaagagtctaccttatgctgagttctcatataataataattaccaggccagtctgaagatgtcactgttcgagact

SEQ ID NO: 146805 - DNA, 512 bp, Zea Mays
aacgtggtttactcgtgcccttccttgatactgggtcttgttttgctggctgatggaggagggcgccttgggggcgagtgctgaggtattcttggggccattcaccgagttggagtaagcaggtcctgatgccttcaactaggggcagttgtttttgaagtgactggggtctccgcagtgccaacaggcatttgctggtggttggttgcttgcaaccgagggggcctgaaaggagctctgactctgctggctgaaacatgacgaagtgggtccagctggtctattgaagcttggtcccttgggtggaaacccaaaggatcgagttctctagtgccattcctgttgctgagctcggaggacttggaatttcctcttgaggtgacctttttcttcttcccttgccctttccacttgtatggctttgtttgagaggtgcgagaagctgaggaaatcttggctggctaggatggtcttgagttctggtctgagccctttcaaaaagtgggccatct

SEQ ID NO: 146806 - DNA, 474 bp, Zea Mays
gtccagtcttgggatgaagtataagaagattgatgtgtgcgaagataattgcatgttgttctggaaggaatatgaagcgaccacccattgtcagaaatgcggtaaatcaagatatgcggaggtactaaaagaggatggagctacttttgctacaaaagtggcagttaaacagcttcgatatatgcccatcactccaaggcttaaacgtctgtttttaaccccagaaactgtgaagctaatgttgtggcataaggaaggagaacgtgagatccaagacccagacattatgatgcatccatcagatggcgatgcttggaaggctctagatcgttttgacccagaatttggaagagacgctaggagtgttcgtctaggcttgtccactgatggtttcactccttacgacaacagttcaacttcatactcttgttggccggttttcatcatgccctacaaccccctcccaacaaatgc

SEQ ID NO: 146807 - DNA, 891 bp, Zea Mays
tcccatcacagccgtaggtgcgggccccgctgccatcgcggctgcaggcgcgcggctccaggcgcgcggctccaggcgcgggggggtctcctgcggggctgccgggcgtgtggggaggcctctggccaggtgtcaggggtgcccctggccgtgggccctgtttccttggctttgactaagggtgctctaggggcacctgcgtcgtccctgccgtcgccgtccgtcacgttgactgacactcttgaagcaactcctgatggggtgccgatctccctcgggttccctccaccactcgggcctcacgagactggatccacagcttcagaccctccccctccggcgactatgtccgtggcgcattccaccctcgtcgttgttgtcgctgctgcccattcgtccatggccatcgctcaggcacgtgagcgggttgcggctctcgcttgggagtaggagcgtgtttctacgaaggctctcgctcgccagctagccgaggtcgagctccttcttggtggtcctccgctcgagcccgccaccgatgagggtccctgactatgtggcttcggtggtcgccaagctccacgcccaggccgccggtgtccagaacatccggtccctggtgcctgtcgtccccgacaccacctcatctgcctacgctcgctggtgggatttggtccccctcaccctgtagcgctacgcactcgacaaccatgttctcactaaccgccccacgcctcgcctctcctggttccggatggacagtgtcgtcctctcctggatcctcgagactctcaccatcgagctgtaagacatcgtccgcgagcacaggggtgcggctcgccaggcttggctcgctcttgaggcccagttccttggcaaccgagagaattgtgc

SEQ ID NO: 146808 - DNA, 344 bp, Zea Mays
caaggaccggtgtggacaccatggcctgcttcaacctctgaaaagccatctctgcctctgatgtccattggaatgcccctttttgtaacagcctggtgagaggcctagcaatggcaccataaccctgcacaaaccgcctgtagtatcctgtcagaccgagaaaacctctgagatctgtgacattcaacggcttgggccacttgagcatagcatcagttttcgtggggtcagtcgctaccccattcccagaaataatatgacccaaatatgacaactcctttttaccaaagacacacttcctttctttgagataaaatttgtggtgtcgcaaggcagtgaaaacc

SEQ ID NO: 146809 - DNA, 282 bp, Zea Mays
gtcggctctagaggctgtatctggcttcgaactgttgtgttcgtttcttcattatatgctcttttcaattatgacagtgtagctcataaacataactgttgacaagcctgcacaatatcaaaatatacttcttgtccggatagattcagagaagcgattattatgattacaggagctactcatacgaacagtgaaatgtgtgtgttaactgttttgcatcgtcataatctgaagccacccgaacagcatagtacatccttcccatttccccctgattcgtta

SEQ ID NO: 146810 - DNA, 542 bp, Zea Mays
aaaaaatctaaggaagttattggagtagaaggtaaaaagaggggaggggtagaatagggtttcaaacctggtttagaattttgggatgttacaaacctaccccacttaaaggaatctcgcccttgagattcagacggggctcgagaaaaggtaagggtattccttccttagagagtcctcactttcccaggtggcttcctcttctccatctctgctctactgaaccttacagagcctcacttccgagttgcgggtccttctgactgctgagtcgagaatcttcactggcttttcccggtattggagatccttttgaatctgaattgcatctgcatcgatgtggttttctggtacttttaggcatttgcggagctgagacacatggaacacattgtgaatatctgacatggattctggtagctcaagacggtatgctgcgggtcccactcggctaatgacggggtagggaccgacgaaacgtggtgctagctttcctttcatttggaaccttttgacaccacgcatcggggagaccttgagat

SEQ ID NO: 146811 - DNA, 937 bp, Zea Mays
gcccaaacaaatcgtaaagaaatattttgatcgtgatccattaccacatctaattacatgtttaaccgtcatcaccaaaacataatttcattgtaccttgtgtcacacaattttatggctagtgcgactcagctaaaaaacgaacatctgtgcaccatgtgaaacaaatctgaaactaaaacaagaaatcaatcacgcaatagtttgttatcaacccacaactacttctacacatgaatatccaataatccgagtagcagtctaaatgaaacgtttgtcgtcatttatgctataatcattgaaataagaggttccataaagatattaggaatcatgtatgttccctgtgaaaagaaatctatgacattcttgatcaaataaataaacattcctaaagatggcaatgctgcaattgtgaactcctgatgcaaatactattacggctttactcacaaataaaattccctttcgtttatgaatttactgtgaattttacagaagatatcaagactgaataaattagcattattcctaaagcagcaccggagtgacttctctattcactagggtctaggtatgtaacagcaaactagaaatgcaatgctttgtcaaagccatgtgcaacagacacacttgattctgcaactaattagtagaggtgtcctgctttgaaaatttgtctcgtctcaaactcttcgtctgactcacgcatatgacttgtcagttgtcatggcacagactgcagttcaattgttgtgagcaggattcagaaaataatgctgaagcctatgtcctgacctgattggcacactatcctgcaaaagcaaccacgcggtggtgctccagtttttaaactgcattcctacgtgaaacaagccaatcggtgcccctgagtatcattagtaaaccaggcactgcaagtcaccaacagcaactc

SEQ ID NO: 146812 - DNA, 729 bp, Zea Mays
caaggagacatggtgacaggtacgatttcagttgattcgtttgtggcccatgctctttttgactctggcgctagctattcatttgtttcggagaattttgtgtcgcgggctggtttttcggtgcagaggttgggtcacccaattttggttagttctgctaatggctccattagtagctgttcagtttgtcaggggtgttccgtcattcttgctgatgaggtctttttggccaatcttgttgtgatttccttgggggcattctatgttatcttgggtatagattggttatctcagtatcgtgcagttatatcctgtttttggaagatagtgttattgcaggcgccgtcgggtagggaggtggtattcttgggaagttccccaaagttcacgttatccttgttggcgcaattgctttcggatcgccggtcaaggaagttgggaatctttttctccatggtggtggagggtgaggctgccttgcggatgcaagacatccgggtggtgtgtgactttgccgacgtgtttttggcagagcttccaagcattcctccagagcgcgatgcagtttttgagatcaagctgattctgggtacgcaacctattcataaggccccatatcggatggtcccaaaggagcaggttgaattgaagcggcaattggatgatctgctggctaagggtttcattaggcctagcaggtctccatgggcttccccagtattgtttgtt

SEQ ID NO: 146813 - DNA, 508 bp, Zea Mays
ggcacagataagcctatacatagcagagaggatcacaaattgggtgtagggatccttacccaagttggggtgtagaggtgccccgccacagcacagggcggactctggtgggggtagttcgcgtaggtgaggaattccaggtgctccggccgtctacacgcttggtggcaccccgcacacaatcgatgccccagggagacacccacgaccacaccgcgggctcccagcgacagtggagccgaggaactacgacagcgacgatttttatctcttggtaatggcgagctcaatctctctctcaatctctgtggaatggaccgtgtagcgtgacgaaggcttgaggcaaacgcgctaggctttatgttcggcatggccgcgagtgagctgctggagtttgttgcgccagcaggcaatcacgaagatcgcggaagggcggttaggaaacgcggcatagacgcggcgaagaagactttgacaaggagggcccaaactcggcgtgagcgcacga

SEQ ID NO: 146814 - DNA, 672 bp, Zea Mays
atgaaatgtcgacattctaatacgaatgtttcgctaacagattctaaatttcgaagacatatgaatgcaatcagactccataaaaggcagcaagtccaggttccaaaggaattccgacctccaccgagaaattgatgaagggacttcctgtgtgcttgcgtgcttcaagaccgtgaaacatcaaatgctaccgctacgactggccacttgcatcgcgtgcccccaacgtgcggcggggtcggcgaaggcgcccgagtcggagcaggaactgagacgtcaatttgcagctagagttgatggcgaggtggatggaggagcagcataatatccatccgtctacgacgatgccgcctccatggtcgttgaagcctctcttgccgctttggccggacacttccctccttcctccaccaataaaacagcgcatgaggcaaaaataacgtggggaagcagctagctgaccgcgagctgtggagattgggagacgatccacgacgcgcatatttacatgacagcaggttatgaatgtgggacgttaataatatagcaggaatgagggaactgttggacggctaaaattgtgtttttcctctaaagccacttttagggttggtttaagggttttcttatagatgcttttaatatgtgcatagatcgtgtctgttttatata

SEQ ID NO: 146815 - DNA, 570 bp, Zea Mays
agacgatacattaccaacttgtggaggtgagggcgcggaaggagacttttagggaggaacaggaacagccacgaccacgatgagtccttggcagtgcatgccgtcgactgcaacactactacacgtccatcaggtaacagatgcaacaaggcgtctgccgcccatcaggttcagtcacctaaatgctccaaatccaagaccacgtccaggtgtgtgatccatcaactattttttcaaacaaagatgcagagaattagcctgtcctgtccaactgttggtaaaaatgtttgttactatccacatctctgtcctgtccgcaacgaaccaaataatcatcgtgggaagaacccccaaacctattgtggcccttgtaatttcttctgtagctagtccatatataggatctaaattatgactgatcatggcggcatatcctactctcatagctggatcaatgtatacttgtatagtccaacacataatgacccaaattatgactgatcatgggtcatacttatttgagctgacactaaaaacagtattcaatgttgattgtacgtggccactata

SEQ ID NO: 146816 - DNA, 425 bp, Zea Mays
cgttggattaacattcaaaggttcagattttatgaagcttgcgttactctgagccatccgatacgatcctacggcccagattctatccaatgaaacggtacgcgagatgtgatcacggtcgtcgatgactgatcgaacagcccacggttatccaacccaacccaagggagtccaggcggcggcgccgccgccacccacggcggaggttccaccggagacatccaacacggtgcccaggtgccccattcgcaaccccgcacggtccaacacgaagctactgacatgggtaaagtgttggagcgctatttacctgggtgaagatggagcggtgagctgcccacgagcacagcggttttggatgcgtcaacacgaacaccgacgagcaattgggattgacacagtggctgaacctcctagtctcggcc

SEQ ID NO: 146817 - DNA, 509 bp, Zea Mays
ctttctacccaataatggtcttccccattgcagtgtttgacatatttcaatctgtagcatgtatgcatctctggtgcacactgccgcaccccgacccgcatgcacaggaagcctctgtgcttcagcccacctctagtcaaaaccacggcacaacagctcctccacccaaagctgtcacaaactcacaacgtagctcagatgtactcaatgccaaagtcgggtgcctcagctcagatctactcaacgccaaaggcagcatcgagagatgattctggagctcagatagctcaaatcagaaggatctcttcatgcccaaatcgcaaccctcccacccacacacacaaaactaactgtacaaaataaagctccacctcacccaaatcacctttatgatgtagatctgggcagaattgaactccctacccaaaatagagcaacaagctatcaaatagcacattgagtactctgccaccaagcaagcaaatcgcagcaacagctgaggctgaatc

SEQ ID NO: 146818 - DNA, 411 bp, Zea Mays
aaaagagatgtggctgcacacgtggctatgtgtgatgtgtgtcaaagagtcaaggccgaacatcaaagaccagctggactattgcagcctcttaagatacccaagtggaaatgggaagaaattggcatggatttcattgttggactaccccgcactcctgcaggatatgactccattttggtgattgtggatagactaacaaaagtggctcacttcatacctgtgagaactaattacacgggagccaagcttgcagagttgtatatggctcggatagtatgtttacaaggagtgcctaagaagatcgtgtcagaccgaggatcataattcacttctcggttttggcggaagttgcatgagtgcttggatacacagttgaattttagttcgacctaccatcctcaaactgac

SEQ ID NO: 146819 - DNA, 835 bp, Zea Mays
aactacatgctgtgaaggggtgtcttcataacctatagacaatatggccttgtactttgccgttgacttgggcttgcttgttttctgctgagagcagaggccgaggctgagggcttggtcacgtacccgagccccctggcgtgggatttcccataccgtagtggttgacatagtgcctgtcatgggaaaaagcttcttatgggatgcgtcagctctactatttctgatgatgttgggaagtcctctgccataggtatcgagggaagaactgagctcgggcaaggcggaggtccgtctgaggttgcgaccgagtcttgtcttgagatttgatgacgtgtgccacactcgatggagtggccttccacgggattcacaggggacaggtagccgaggctgggttcgagcgaggcggagcctacgcccaaggtcgagttctgtattgggcgaggcgaaacttgcgcccgaggtcttggtccgcatcatgtcatattacgcgtcccatcaagggttatcaagcggcatgcacatgcgtaatgatgttggtgaatctttgataagaccgcggtcctgttgaacgattcgcctgtagcccaacgtgaggtaggtgtccgcattgaatgcggttgtctcccaacggccctcgggaaagttttgtctttatcgcctaaggcgggcacggacaaggtggacatggctgccctaggatgagggagcctcagccgggacgaagattctcccgagcttacatctcgcccgagacaggcctcgggcgaggcggagttttgggaagacccctgaggggaacctcaggggagacagagttttggttccttat

SEQ ID NO: 146820 - DNA, 912 bp, Zea Mays
tttctttgttggtgaagtagccttgaggtttgctgcactagcatgaaggctttattgatatccactgttcttttgttcttgtgtgctagttactctttattagtagagtagtagttcagcatttcactgatatcaatctgttgccctaacgtttttagatgatgggggaaatttttcttcacttctctggaccaacttctgctctgccagccatgttacaaatacttgcagattttgcgtcttctgaaggttaattacatttttaattcatttccatctgattgagttggactactgaatttgcaacatgtgtttgtttctttgaagctttgcagttcaccccacggttgaaggacgtgcttttgcgtgttttacctatcctaggaagtgtgcgagatggccaacggcctgtttttgcgaatggtattgctaatgcatttcccgaatcatcagtgattctcctctaatgtttctgaaaaattttcaatatttagaaaaattgcttattacttttgctctcttctgttttgcagcattcaagtgttggtgccaggctgcatggcagtacctgggagatgccccctctgagcttcctcttgataacgatgttatgtaagctttcagtttgtcaaaacttgtttttggaggtaatggaagttggcatgccatttatctaatatcttaatgacaggtccttcatgaattcagtatttgagttacttataaaagtatggacaggctcacgtgatctaaaggtgcgtccgaattttggctttgagtttttttttcacacaacttataacaatataatgtctcaacttataggactattagccatggatttcaatcgcctgatcgtctggcctgggcgatcagccgattagacgcgattagggcgacgattagtcgccc

SEQ ID NO: 146821 - DNA, 821 bp, Zea Mays
ctactggcgaagaacaataccgtaacaacttcggttgttatggatttattgctcgccccaatgcaagccaccctgtgccaacattccggaaaagatggcccgaggcctggatggaggagtggttttacgttaaaaatgatttaatgacaagggaagacatcaaagaaatcattcagcgccccatttagtctcgcttcgacctccgaaggccgaaggtggaaattgatggcactgttgaagcatgtcagaaggcctttatcactgtgtgtgtgccttcattggcacgagggatttgattcaagagcatgtagtcttcagggtatggccgtttgtggagagctgtgatatgccgaaggagaccaccgccgattccattgagggtggcctggtccgattgaagtataccttcagatttagggagacatttgatgagccaaacgatgactggctaaagtgtattaaagctactagtgatgagctacttggggcatacgccaaggccgaagataattctttgtctgcatctttcgggggtcggggcaagaaaagattaaacaaggtatttgatgctattggcttcgtataccctgattaccattacccgctacgagggcaagggaagaagagaaaaactgccgcttcggccaccaatgtcgtgtcggctgcaccgaaaagtaagaaaataaaggttctgacccatcggccgcgatatattgaaccgaccgtagtgcctgaacttggtgaaggggcctcttcaactgccgaagcaagacaagctgctccaattgcacagagcgttgaagagccaactatagtgccga

SEQ ID NO: 146822 - DNA, 680 bp, Zea Mays
ggcttaaaaagtgaggggttctctctgtacaaaattatcaattattagggcagaaggggtattttgaactataactttcttttaacagtgtgttattctctaagacttatttttgctggcatttaaatgttataacatgactctgtacaaattttcagccactaaaacttattaggtattttattttgattttctaaagtttctagccaaatgggtgctttctactaggatgaggacatcctccactattacccgttggcaaagacgcaattggcccagttggcccaattgtagtcggacggtgaccgtgtgagccttagaattatcccacctcgcttaacttgggaggaggaagccactttaaaagggagagccacccttcccccattggactagtcttttgggggcaattgggcctttccctgagttgggtgtgcttaatgaactgttgggctccgggcaaccctaatttgttgggcctcggccaaccccacctgggctgggtgtatcatctggtatcaaagctagggcccattttaagaaggtgggaatgatgaggacatcctccactattacccgttggcaaagacgcaataggcccagttggcccaattgtagtcggacggtgaccgtgtgagccttagaattatcccacctcgcttaacttgggaggaggaagc

SEQ ID NO: 146823 - DNA, 1534 bp, Zea Mays
ttcacgacgaccaccatgaagtggtggagaggacccaagtccttcatcgcgaacttgcgttgcagagaggcgtccgcgcgtcgtagatcgaggatgaagttgacgcgcggggtgcggtcggagacgactgggccacgcatggcgcgataggaggtgacgaggccttgcggggcactatcgatatcgaaggcgacgagaccgcatgaggcacgatcggaggtgatggggccgcatgtggcgcgatcggtgtcggtgggaccgcgggtaaagaaatagaggggacaatgatagggttggcatccaggagggtgttgaggtcgataggtggggaagaaccggtgaggtgaaagagggtttagagtttagggtcgattggtgggatgactgagcaacttggacggaagactgttgaggaggtaggtgacagtgttcagtgtctcaacccagtggcgggcgagaaaagcttggaagaggcggtaacacaacatgttagtggtggtgcgaatctgcactcagcccgtccgttctaagttctgaggggaggtgtgaggacactggacacaacatctgcagttgtatgctgtgggagagaaagaacgtatgagatgtggagttatcaaactcccacccgtcatcacacacactcagaatgatgcgatcgaaccgagtcgacagccacacaaagaagtgagatagattggtgaaggtgtcactgtcagacttatagcagaggggaaaggctcataggtagtgagagaagtcgtcaaggatgattagatagtacttataaccgaagatgctagggattgaggatgtccaaaggtcatagtggacgaggtcgaagggggagtggtgcgagacattgaagaagggaagggtaagcgagtgtgatggccaagctgacaggcatggcaaagcaatgcatcagtgtcgtgggggctggtgatggccgaggtgcctaggagtctagagaggatgttgtgactagggtggccaagacgacggtgccaagtggaggtggaggcagtagcaccgagagcgtagggtgtgggaacacatgataagggagatggggcatgaaagcaaataggatatatggtgcgggagatgtcgcattgggcgaccacaacacgagtggtaagatcccgtatggtgagcccacaaggatcgaactccatataacaatggttgtcagtggtgaagcgacagattgagagaaggttctgtatgatgttggggagcaaggatgttgttgaggtacaagggacgaggaaggaccatgtcacctactgagatgacaggtataatcgacccattgccgacaatgatggaagaagggaaggtggggttgtggggatggggtaaagagacattattagggcaggagtggtgtggtacgaggcgcctaagtcagcaacctagttggtggaagtagcaggagtgggctacggtgacatggggtgcgaggggagagccaagggaggcacccccatagagcctgcaggatgggcgttagggccgcctgtgtcgagta

SEQ ID NO: 146824 - DNA, 690 bp, Zea Mays
gggatctgagctttgcaacctgtgggagggaggcccgggcccgggtgcgttccctatgcgagggacttctgctaccgtgctcaccgtgcagtgcacggggatgggccacgccggcaatgctccaccgcgcacgcgcgcttatccgattccaccaccattgcccgatttgcgtgtcgatgaaacacctgaatatccgatcggctatccgacatcaacggacaaaattgaccggcaaatgcttcaggtgaaactattcaggtagagcagctgcgagccttctcttttttttcatagcaatcgttattttattttctgggagccttctctttgaacacgaaaatgatggaagaactaggagcaatcagaagcagaaccataacgattcccctacaaacaggagttgccttgccttaagaggaaagaaaaataaaggggctcctgtgtcgtgtaggcttgcagttgctctctgacctgacgggtgcacgatgatcagtaagcctccaactccaacactaccaccagagatcattctaatatatttttcgtaaaaaaaatgtataaacatgagggatgcaagaaaaaaaaaacacctcttcatctgatctggagttctggggtgaacttgagtgcttgacgctcatcaataccaccttgcacccaatgttgagaagtgatgctgtccttcgaatt

SEQ ID NO: 146825 - DNA, 924 bp, Zea Mays
tgttgtttgctcatccactaaactctctactgtcttgtccccatttctttgcatgtcatggcattcaacattcaactaatacaacctatgcattcatgtatacactgttattcgtgtatatagtttgaaagaggacttgcttgattccaaatattgttatctttacaaccatgattgatggtttctgtaaagcgaagaggttcattgaagcaaaagatatgttttttgagatgcccaggtttggggttgctcctaccgtccatgtacacaacagttcgatggatggagcttttaggtctggaaatgcacaagaagcattgacactttatcaggagatgactcgcttaggcttgtgcccagatgggttcacgtgcaacattgttatgagacaccagatcaaatttttagagcaaaaaccagttcaaaggttatgaaacattttagtcacaggctcagtcatcaatatggtataccgttctgttacacatgtgttgtgcaaccattgtaagttcgttatttggaaagccctatgcttattgaccttgttctcaatgcaaataaaaactaaatgtattgtaatggtttgaaacatgtttcaatatctattcctcatattaatattaatatcatcaatattaacgttatggtgatagtttgtcacgctgattttgcatatcataatgatgtttattgttttgtatatatgtttcatactaattttttactctcatgacaacgcatgggtatattagcctcaaagaatgggggggtaaatttgagggaatacacaaaaatctcaacactagatatagctcactaaaagaagagtatattagcctcaaggtcaaccatgacaatctagctatttcatatgatcttatgtctaatgaaatacatgattgctactaagcatgttgttgagat

SEQ ID NO: 146826 - DNA, 452 bp, Zea Mays
gaaagaataccgcgagaacggaattgagaagtgctctatggcagtctacctgggagaaagccaaagttacccaaaccaccctcctttccaagtcaccttcactggacaccacttcctagacacttgccagaatgttgcccgaaaagccctccaacagctatgccaaaactacagcaaagagggttttgaaaccccccttcgttacttcccacctagcaacaaaaatacccctacctggaggaaaagacttcaggccctgtcaggaagagatcctactgaggatgaccccactatcgtttacatggccgaatatctccacactctcgataaccactatgatgacctttcctcccactgcgcccacctaaactaccgggtggaaagcttagaccagcaagtcaaggaacttaaaaaggagaaagcatccctccaagagagtctcgatatagtag

SEQ ID NO: 146827 - DNA, 456 bp, Zea Mays
gcgacgccgagctgggtgcgcgcgcggcgcgcgaggccgtgcggtgcgatccgcgcgacagcggcgcgtacgtgctcgcagccagcgtgctggcgcgtggtggagaccccggccgcggcgcgggcatcaggggccggatgagggaggccggcgtcggcaaggtccccggttctagcatgatcgaggttaacggcgtcgtgcacgagtttgtgagctagcgtagccagtagtgtagtgtactaatccacgatacattgggacaagctacatttgtacatctacagtatagaactagttatgtatatgtgacgacaaataactacggttaaatgactcgaatgcccgaaggcattggttgtacaagcgtaaagagtaatggtcagttccgttgaggtaatgtatggacatcatatgtacactcagagcagttattatatagcacatgttgtcataaat

SEQ ID NO: 146828 - DNA, 497 bp, Zea Mays
ggtcttagggttaggcttactctagtaggtcctgcaccgcgagtgcgaaaacacgaccgtttctgcagtgggtcccacaaggcaacgcagatagaagagcgtgtgttccagcagatcatgtatcgtgttgcgtgtgaagactggggaggaggagagagagcacctggttgtctgcgatggaatccgctctctcctcttttacgcgctcgcgtccggtatttgttgcatgcttctacagttgcctggcgtcgtgtataacacgcgtctgggactggatacgggtgctgctggagtcggccttatgggctaaggttttggacacctaacactcctctcacttccaggtgggccccactcgtcatctttgtccctacctctaggtgtctttccatccatggctgccgaagcacttggatgaggcttcgtctaggtgcaccgctccctctcctgtctgcagcagccacggtcaccacgcatcaagccttcatcaccgacac

SEQ ID NO: 146829 - DNA, 366 bp, Zea Mays
aaacggagcactactgattctgctaacaaaagaagagaaaaaattactaattctagccatgcacggtcagactcgagaccactcatgagaagaaaagatgcatggagaaattaacagctggcttcatcaacattcagggacagatccaggttactagaactccagaagagaaacaaaccgcaagaagacgagctcttttgtgctcgacaagcacgaaccatgtttacattctcacaacagggacaggaaggaggccgcggcggccaggaacagcagagcgggcagcgagctccatccggcggtcctgctggcgccgcgcgcggccgcgccggagggcggcgcgtcagccgagccggcggcgggcgc

SEQ ID NO: 146830 - DNA, 507 bp, Zea Mays
agaaagagcacatgcattggggtgggggatcaacaatggcaagaacacaatcgagagggagtgaaagaaaacatgcatgacacaagtaaaaatatggcatgaaaccaaaccttagcgccatggcttatggtgtcaaggtcgacgtcatagttatggcatggaggtcataacacgtcaatatccacgatggcaagtgacatgagtgagctatcttaacaccatagctaaggcgctatccccaagataaaaaaacccggttattgttccactggtgatctaaacgtgactttgtttttaaaatagggctaaaagaagaaaaaaatatcagttacacggtgcatgcaggaaagttgaggacacgaataaggttttgtttggatctcattatttaaagtttaaccacgaaactttagaccaatttagttcttgaactttaatcgaaaattctaaaatattagctaaagtttagacaatcttgcacaacacaaatgcaatgaagtggtaatt

SEQ ID NO: 146831 - DNA, 463 bp, Zea Mays
ctcactcacaccccctccccacgctcgctgcattgctttgcttcgttcgcaccgcatcacccatactacatgccgtccgtggaggtgcggagctcagctctgcagtgtgtgctgtgctgcctcgggtgggtctcggccgccgtgcgctccattaacctgtgtgtggctagatgctacccagagtagtaaacaaacatccacgccattatccttgtggaggttgcttctgtgctcgtcgtgtttcttgagcccgtgcggcttggctatatatgacagtgtctctcggccctcctttttttttttgtctttgattcgtgtttggtagagcacggcgtgcgttgcagagcctaaactaaacactaggcgacaaaagaaccgcgtcagtgtcagagacttttgtatagtcttggctatgcgagctgcctctattcaactccaacagggaacaggcttaccaaactcg

SEQ ID NO: 146832 - DNA, 591 bp, Zea Mays
gctggcaccagtccatctggtggaaacgatccatctcctcagttaaaagaacctcatggttggttattccccagctggcagtagggaacaacaacttattgaacagtatcaggaagaaggatctgatgcttagatcatcgtcagaccctttcctcagacgatcttgaagagctacaaccccaaaatcttctttcgataaaccaagttcagcccttaaattgttggcagcaacagcttcatcaatgcccaatgtcgttcctccaccagcatttggtaaccccaaaataaggtgcaccgtatcctttgtaattttgagctccttccttgcgccggctcgaattgtcatgtcattatggtcaagcttttccatcagccaagctaaatgaaatctactaccgagtgcgtcaactctcatatcaagaatactggagaaccccctccgtgcaatagcttggcgctgtctgtcatttaatatctggatgcttactaatacgtcttggggattgcatctcacattaagcctctgctgaaaaaatgtatacaatgaatagcgtaaacatttacatctgcataatcgcaacttaatgttta

SEQ ID NO: 146833 - DNA, 822 bp, Zea Mays
atttggagatgggtggggtatcttgtcgtgcttccgaagaggtaggggtgatcagttttacgatggtctgaatcctagtcatctgagtggaccggaaattgtccgagatgacttagccaaagctatcttccaaagtagcggtggacgttaagcttcagaggcacaaaagtttttggtagcaggtagttgagggcggtaaatgtgatccgcacccactcgttcgactgtttttatactgagaaataggcacgaagcggcgcaagtcgccaaaaaacgttcccatgcatcacactcagcttcttctcgtccgtctaactttcagatcaattgtttttattgaatcgatctatcttcttcataacgagtttcggtaaagtgtttttcggaccttcggcacaagacctcccaattttttgtgacctaagctcattacgaagaaacaaactcatcccacaaggtgctactgttgggggtctacctttgccgaaggtcctcatttaaccttcactgtaatataaacaagcgtgtttcagatatacttcaatcaatggacgaatctggccttcgtctgaaatagcgtataaagaagcttattctatgcacgcaaataataaaggtgtgagccaaatttgatatcgtcggcaaaaggagaaatgcttcgaacacaagccattggagaagctttcacgcgaccaaggccaagatctgcgcagcaaaggaaggacaaaatacaatgttatcctgatgtcatttgtaaacaatgtatgtaaactttgagggacatgattataattttgtacgaaggcggttcatcttccctat

SEQ ID NO: 146834 - DNA, 987 bp, Zea Mays
gtcgagccacagacggggatgctcctgtgcgtcatgttgctgtgccccgcgacagtggtatgcatgcagccgctggggaacgcgagagataggagagagaggcaaggaaccacctggagccgccaccggtaaattttctttgtgtattccatcctcgtggtgttgctctggacgtctctggcacatgtgtggtctcgctgcggactcgtgctcgatgtcgggatcatcggagcaagtccttcgtcgcggagccgaggtcggcacggaccgcaacaccaccgccacctattcgaggacttcgtcgtcggctttcttcctccgtcgtagttgacgccttggcatgggcagggctctacgctacactgatgaggtcgcctaccttccccttctgccttccgcgcgccatagcagccgagtgcctcagcccccccccccccccatgttcttagattgccagcgggacctccaccttagggattggcggcgccgccgtgttcctgtgtctgagatagaagattgagtttgtggtgtggatcagaaaatgggcgggtaggattgacggagcgatgagagaagttgttcgccgtaggattttcatttgacgatcaggatcggatctaggcagtcttgggtcagatgggatctaaaccatagaacttggatcctggggtcgacatcgaataccgattcaaggtgatactagatctaatgctgaccgtacgatatggatctagcggttcacattccataccgattctcttacaacgcaacttaatctggactgtagatcagatccaatggcccaagattcgcagtaccccttcggtgtacacatttacataagaaaccccctgttttcgtagaataaacccgtagtccaactagcagtgttccctgtgtcttagaactattaccccaagacccctgagttttccaggaattgaggcccagtccagcgctgttttaaattgaataattgaattggaa

SEQ ID NO: 146835 - DNA, 846 bp, Zea Mays
gaattttgcaggtgttcattggttttgacctcgtgcgatggaaaattagtaatggtagatttatcaactcatgtgctagcctcctataatcttcttgcacaccacctaatatttgttgcatttcctcttgttgttcttctacgtgagatcgaagagattagatgtcgtcgaatttacttacagtgcgttcaaatgcagtgggtcaaagatttgccaggttgtattcccactgatggacgagcttcttgttttggtcaaccgtgaaatcaggtaagaacagcttgtcaagttcatcatgtgcttctttttcctggcgtctgctagcctctgatattctttaaccgacaagccgtccatagtcagtttgatgatattgcatggggagagatcagaattatcccttggactagcaatatggggccgatctgatagatccaatattagtttccccggtggagtcgccaaaatgtgtattggtgcggatctaggcgccaatcactggtagttgttccgcttggtgggctctctgtgtcggcgcggatagtttgtggcctagggacggatggttcgtgtcctggcaacaagagcgggtttccctgcgtcgaaccggacagttcgcgtctagtgaccggatggtccacgtgtgtgcaggggcggcgacgttcgccaacaattcctatatctcgtcttccaagagggaccccgttagtgatcctagggtttgtcttaggattggcaggccacccaagacgccttcagatgacatagattcgaagagggatgaagatcgagatgaagaaagctatgttactaccaactcctagggaaaaagtaaagcaacggaag

SEQ ID NO: 146836 - DNA, 518 bp, Zea Mays
atagatcttctatcctaggcaatgggtacttgttcttgatggtgacctcattcagagctcgataatcaatgcacatcctcctagtgccatctttcatctccacgaacaggacaggggcggcccaaggcgtggtgcttggcctaatataacctttctctgatagctcatcgatctgcttcttgagttcaaccaactctggtccagatactctgtaaactcttttagaaatgggggcggttccaggaagaagctctatggaaaactcaactttccgctcaggtggcatacctggtaagtcttccgagaacacatctacaaactctgacacaaccttgatagtctcgagtgaatctgcctccttgctatcaatagccatctgatgacaacctcctttccttggctcaggtgagactaactcagctaccgcttcttctcctagtggggacaccaacttaattatcctcttatcatagctgataatttcttggtacttatctagccaattcattcctaggatg

SEQ ID NO: 146837 - DNA, 478 bp, Zea Mays
aacgagcttggagcagggcggcctcacgcagcccgactggcggcccgggtggtggtgcttctggcgctcatcgtgggcacgtcggaagctctggtcatagtgctggtacgcgacctgtgggggtacgcgtacagcagcgaggaggaagtggccaggtacaccgccaggatgatgccggtcctcgccgtgtccgtcatgctcgacggccagcagtgcgtgctctcaggtgtagtgaggggctgtggccgccagaaggccggcgctttcatcaaccttgccgcctactacctcgccggtatccctgccgcgctcgctttcgccttcgtgcgccgtctcgcgggaatggtactctcctgctctctttgcaacttcgattgggatccttcagtttgtgaattacatcagggaagttcttgtgccaactctgaacacaacagggcctctggttcgggatcttgtgcggcctggtggtgcagat

SEQ ID NO: 146838 - DNA, 777 bp, Zea Mays
ggctaatactttcaagtagggaatttggtagtttgattcatctggtagggttacatagaaattgaaacttaaatggtttggtaaaaagtaaatctgggacaaaattttaccattaagaacctatatgagacgatatcgcttgtttgattcatcttgatgtaattaacaaccatctattgatgaattctaaggggtaaaggatacaaacagaagttaggatttaggattgacacacttctccccttgcctttttctctactcaactgaattgcaatgtgaaactgaaaattcgtatgatggtagatccttgagtactacctttacagttgttttagaagttttcatattatcttttaggaacaaaatgatagtatttgtcatgatagctagtgtgtgatctgctcatctgcattatgtctcatggaaatgtacatcacaaattatagcttattgataaatattggaaggctggatggatgatacctatgacctaggaaattattgttttcatctgccacttctcttcaaaaagcaaacttctgtttactgcttttacttttcaacacagaaacacacatcgctacctgggatagcaacagtgcacagactctgagagtaacaattaaacagttgcaatttttatggtgtgggcattttgtttgcatggacattttttctcttattttttatacaagatgcatgcagaagaatgagttagcattgtgtatcagaagattgatgctgttctatcagcagttgctaacattttccttggat

SEQ ID NO: 146839 - DNA, 306 bp, Zea Mays
gggctttctagccgttcgatctaacactggcggaccagattagaactccaatattatcaatcggtacacgcttactaccgtcggattcaacatctacggctgatcatctaccacggtgcgatctgatctactccctccgatctggttacaacggcccagatcaaaaggtatcatggctgattcttaacggtccgatctagatcgagggtccggattcaatctcgaaagggtatgcctaggatccgatctcagccgtacactctacatcctacggctcgcactgattcacccccaacccactctttt

SEQ ID NO: 146840 - DNA, 335 bp, Zea Mays
ctcgctctccgtggctcaccggagtaactgccacggcagtagacaccaagcggctgcgccagtgttcttctttccctccggccgccgcgcgtcttgctcaaaattcgcggccaccgcccgctggcactataaattgacctcgcccgtagctgcgccatgtcatcgtgaagctgtagcacccgctcccaccctcgatcatccaccagcacgcgcgaatttccaattccccccaaatccattctccgccaccgtgaaacgagcttcaccgtcgccagccgtactccggtcagtccccgtcctctgctcccttgtttaagcattctgatgcggctgtg

SEQ ID NO: 146841 - DNA, 440 bp, Zea Mays
cagtggcactaagatgaaattgagctccatgtgagtctcaaaggtacgataatcattaagtgaaacacgatcaagaagaccctaaatgtactcctcttgagacagatagaagtccacaagtgtggtggcctcaatcccgaggaaataataaagaggaccgagatcagacataaaaaactgctcactcacgtgccctcatggaaatatactatggaccatcaccagtgataatcatatcgccaacataaagaagagcctatccacaagatgatgtgtgcacaaaaagacttggatcatgagcattagcataaaaaccagcagaagaaaaacactctaaccaagcccgaggatcctgcttgagggcataaagggagcatcaacagacatgtcgtcgcagctgacgggcgaactctggcgagtggtcatgaagatgagcgcca

SEQ ID NO: 146842 - DNA, 454 bp, Zea Mays
gaatcctagcagaggaaaaagcagagacacgctgcactgcggctccgtgctgtttgcttcgctttattccccttccttgttccagcaccagctctcctctcccctgtcactctccatccggccatcccgccgcccaccctttcccccatccgccgaacccttcgcctgctgcgtccgtctggtccgaggcgtttccgttcctgacgccaagaacgagctcttctacgtacgcctgcacgctgaggtggtttctttgctcctgcctgccaccgtcgtcgattcttcttcttattcttttccccttggtccgtagccattgttggttggtgtcatatactttcatgcttcgtgtcctcctgctccttccattcctctccttcccgtagccattgttggtccttttacctgttatatattggtagtgccatcttcttgctgctacttctctttcccc

SEQ ID NO: 146843 - DNA, 450 bp, Zea Mays
catgctcagactccctcctcgctcccccaagaaatcctatctacaagctttgcaagagagcccttgtatggaagcccgttacccaggtgatcctcgggggaggccagctcgtgcggccttcgccatctcggcgactggaccaattcgtcgacgcagggacgatctgatcagcaagacggtggtctgttccttcgatggtaacagtcatgaggttgactctctgttcgctggggatatgctgcgcgaaaaattcaaccttcagcatggtcagtaccagcttatcaagcactttcctgaacaatttctgattattttctctgatccaagatccaagcggtgggccctcgaccggaggtctgtttcttatcgcggtcgggtttttcattttggtgactggtcagagaatagctacgctagagaatctagtttcgagttcagagtcaaagttag

SEQ ID NO: 146844 - DNA, 412 bp, Zea Mays
tgagagtgcaagtatgaccgaacaaggaagtggggttgatcatacccagtcgaagccaagggtcatttccaatggtaattgttaataatctttattcgggctacatattttccccaccctgttatcacgattgcacatgtattttatgtggcttgtattttcacgttccagttgatgacgatgacggtgtcgtatttgaagacgatgctgatgagaacgagggatacctattcgctgggcaatgtactaatttcaatctttgtatgataccaatgcttatataaatacatatgtcttactcattgtttccaaaaaaatatcagatgaggataccgatgaggatatagaggtcgatggtagtcaagatgaatcgactgccactgatgttcctgacccatacgacaaggtgtac

SEQ ID NO: 146845 - DNA, 364 bp, Zea Mays
cctggcttgccctggcggcgccatccccggcgacaagtaaatcggccaccccggcatacaacttcactcacacaatcgctactcgaagaggaaggtcgggcgaacgacatggttggcttcttaccggctgtagagcagtagcagaccttgaccacgaaacgaagcggctccacggcgatgatgtactctggcgacgaattcccaatcactcactgatcctctatgctaccgatctccaccaatggatctgtgatggtccagcgattcccgagagctaccaatcgaggctccagtgatgcctttccgcgaggatgtggccggcggcggtcagggtccctcttttgtgcgagctcacgattcgtgg

SEQ ID NO: 146846 - DNA, 338 bp, Zea Mays
tctcgactaaaggctactggtttaagtgtagcatgtctctactgaacatgtgattatgtagtgcagagaaatgttggaaagagactgcaaataactcaatgcactcgctatgttagcttcataagtggaaattgattatacttaaatcttggcactgtagtgctcatgtgttgtttagcaacttttgtttactgtttacatgctattcaaatggcaattttatcctaactgatagatctactaaggcacagtcccctttaatgttctaagctctgtgagtccatctaattacatgtgtgtacatgcacctgccaccttcgatccctttcaaagattat

SEQ ID NO: 146847 - DNA, 559 bp, Zea Mays
agtagtgcttaccaatgtgacttgagtaccttcctgctctttcgcctgtgtccagtgcccttcttatcagtctccaaacataggtttttacgatttccacgccctttgtaggatttttggttcacctgtgatgagatgccgcgatccttgtgtaagttgtacctcgaactgagagcttagatgtgtgtaaacaaaaaaaaaatgctttgtcatacaatctccctttttgccgatgtccatctcagaatgtcatgctcctgagtctgcaatagcttgaacctgtacagttgcctgaagaccttgctggccaaacacgttagcgatgaaatctagattcccggtatgagagtttaggcagcaagagatcggctatagtactaggcagaggagaggcagatgactgacaggatgaaggtgaggtggtccataaagagatgggcagatgactgacagcaagagatcggctacagttgtccataaagagtttctgggaaatattcaactttgaggatgctagtgtgaaagtgttctcattagtagcaatgtcccaagcagctca

SEQ ID NO: 146848 - DNA, 4490 bp, Zea Mays
caggttataggtttttttgcccagccctacaatggaacgaggggtgcacgtggaaccctagaaaacaaacagggagtcaaagccaagcagcacctcatcccaaaattgagagtggacgacccaccaagatgcgatcgtcggatcaaaggcacacccccgataagcaataagtgtcaaaactaacatgttgctgaccttggtgaacaggctcgagtcgaacagaacgcctcccccaaaattagatgacacctagatctggcccatgtgctaggcaacgaccgtacgacgctaaggcctgaccaccacgcgaccattcttgggtaagatggcttgtcctatcttttcaattcataatactatctcctcctgcagggaagtaatcggtgagcccatgctgaccacccgctgcgaggaggcctgacttgggttgaaaacttagagtttgaaggccatcccaccaagtgttcgtggccgctcccaaaaccaaagagcgaggggtgattaataagtgagcacccaacgaccaagaccctagctcacaagctccaagggcaattctaaattgtgtttgagtcctagggaacgtttgactcatggtctgtcgcgaagagatgcagcgagctatcaaatccaatcgaacagggatgacaactatatgagttggcacctaagagtatgaggacgattcatagcagaccctgcgcctaaatcatgtgaaaggagtcggggcctcacttggatcacccgtttgaagctcgtcgagcgccatgatctcgacgattgagggaagcatggtacaactcgcccttccccttccggtgaacgagatgcgtgggaatgtgtagtaaaaaatacgaggcatgtccccctaaacggatctgctataacgaacaggggactcaggggctcgctccgtaaaaagggcctcacttggatcgccgtttgaagctcgctgaagtgctatgatctcgatcgtcgaagggaagcatggtacaactcatccttccccttccgatgaacggaatgcatgggaaggggtagtagataatatgggcacgcccctaggatatatccactataacgaacagggggctcgggtgcatgcttcgcataccaaaaaaggggaccaaacaacccaggaggtcacctccacgcgaacaacgacacgacgaaccctaggcagaaacacaaccccgcaacaccacgaccaagttccccacttcctcccaatgcaacgttctcactgcttctaaaggcacacatacaaacgtagcccagtacagtcgccctcgatgccaccaaatggagtgtgatcagaagatcgttgaaattacaaacagggctccaaagcacatacatcaaagcccatttttgtgttagcctcaagcgcgctagaaaaggaacaagaaaagaaaaggtgtccccactccgcggccaatataagtgacaaaaggaattcatgcattacaaggctcaaggctgaggacatgtccaagtgatcttgcgatagcagtgacctatggtcatgctatgactaaggggaaccattgataacatcctcctgtggaaggaggttgaccacgaccttggtagccacaccaaaatcatcctccatgtcctctagagcgtcgctagccacatcctttgataggtcaccgatgccaagctcgaagctcgaccggaattgaacgaaagccagtgcaccgacagcattgcgacaagcgccacatcgaacagcttggcgaacttggttcgagacgtcaagatggcgctttaggcatgaacaagggcaataaccctatcctcgccctcacgaagacccgacacctctagctctagctttgggagaaactaaggaaacaagggtggtcagaatactcaagagaaatctccataaggggaaaatacgccactaacccgcaacacgacagtctgcctcttctaagtgggcgcgaagactgaacacctcaccatcgacagcctcaagggcaatatgggcggcggccagactcccccacagatccgatggggtctgcatcgagagaatgggaaccccgcctaggtaaaaaggcgtcctgaaatccttcctctagcccatcaaaatcacctagttgcgcgaggcgtgaaaagtgtaaaagtagaatcaggatcctgaggattctgtagcaaaaaaggaaaacccataccccaaatcaatcatccgtgcacaaggggtcttagcaccaggggacggtcctcttttgaatattcgcctggatccatggatagacaggaagtgactgctcctgtttcgacaaagagggcagatctaggtatggcaaggccacctggaggaactgtttataaaaagacttagggcacaataaagcgacatgattgtcgatgccacatataggatgaagcgacggttcaacacctaatgcgtgaactatggaagtttgcgttaatacaatgggcaatggatctgatgcgccaagaagtgcgctgatcgaaaaaggacacaaggaagacaccatctgtttcccaaaaaacaatgaaaaagattaaaaaagctcctaggaacgcgcctacccttctgcgttgggcgactcttgggtcgtccctaatggggacactccgaggcaggacgctcgccatggtccatggtcaaacaagggatccccaaagggttcaagcggtgcagccttccgataggttgccgtttctaggaagacaaaaagatgacacacgatgccaataacgaaagagagtggaaggacactttacctatagcgactgactggccacccgaaggctaatggaaagtctcacgaatcctaccaactgaacttggatcaaacgcaccctaaagcacaaaagtcaaagcgcatgagagcaaataacatctgaaccagaaatagtgcacaggataaggacctctagactactggggaccaccgatcagtggggcaataagggaactatctcccctagaagcgcacacccccggataaaccctgaggcactgagcctcgaatcgagcgtggcagagctagacggaggggggggtgagcgaaccgaagggaagccactcgagtggattccttacctagtacaaaactgacccgccataagagaccgatcgcattaactacgcatgtcaccgaaccacagtagcgggttagtctgcctcccactcatgacatgtgaaaggccctcggcctgcagtgcactcatgacctacgagcccctcgggcagcgacgcactcatggccaatcgagactaggcttgagcgcacaggccatctacggggtccgcaacatgacgagccacaccgatacctaggctatagaggccaggggtcgacgtggcgtagaggtagtaatgatggtgccatggttgtcggttttaatactgacaacacgctacggagttggccgcgtagcgcttttctgtgaaaggcgatgacgatcgcaactcgatggtacgtgaagagcacgtcggagacacaagcgattgctcaggttggccactcggtggcgtagtaccctgcgtcttgtggtttctgtctgtgtgcggttgagttctctctgaagtataggggaagtctagaggaagaagatgaggtttatgggtgtctatctcgatttcgtaggctccccccttcagccttattgctgactgaattggggttaaagagaaactactacgagtccacgatctacacgttgtgcttgttttgcctctcgtcgcattgggctacagtcaaatgagccgtccaccgatttccgcgcgctgcacttacaagacgcgactggtttctcacatacgtgcacctacaccttcctcggactccaacgactcacgttcgaccgaggcccaccaagggcctttcggatggcccacgaaacgtcttcgggttgtggtggcccgggggatatctatccccagaagggccccatgtcgtctgccataatgagcacgagcagagacgaccaggcgaccaagacgtatacagacaacacgacctcaccaggataaaacacttggttttaccatgatatagtggctccttctcgaggcagccactgacggttgaccccccaccttgacctatataaggaggaggttagtcataagacaagggggtgggacccaagggattcgactctcagaaccacgacgctcgacagaaggcgatgacacacacgagatccgaagacctgcaagtcagagccaaggcttagtataggacgacttttaggtccacccgcacataagagacttgggagctcttcttccccctctcgcccgcttataacctacttgtaacccctactacaagcatcaactaacaaaggtgctggtagggcgagccaccgaagattgaatgttgggacttttaccggaaccagtataaaccttgcacccaccgagcacatcatctggagtctaggacgcgcgcatagaaatttacttatcagagcggagcttcaaaacaccgacaatt

SEQ ID NO: 146849 - DNA, 680 bp, Zea Mays
tgggtcagcaaagttcaggtaccggcaagacgacagagcaagtcgtgacagaaaaatcaaaatctcctgtccctgaagccttatctgaggatactgattacattgttcgacatgcttcggggaagaaattatgtgaagaagaaatcttggaggccaaacactacgcccaaagactgaaatatccgaagggggccttagtgttcaatggtagtaacgaagatgatttcttgtactgtctcctatataacaaagaaatatttgtttgccgggagatggctaagagtatgggatttcctaaacttgaagaaggcctttcaaacttatcgaaggatgatcttgttgacagcctcgcgtacaatagtataaaggtatagaggttacttttgaagctagaaaatgaagtattttattgctatgctcaactctttcttcttctttgcagggcttaattcttagtaatgccttgagggctcagaagagcgccgaagatgaaggttgtacaatggctcttaacaaccttcgctctgaggtgattgaattgagaaacgaaggtctagagaaagacaaaattttgatttcattagtgaacaaagtaaaggaggacgacgctaattacaaagctcaggccgaagcccagaaaaccgaaattgaagaccttcggagacaactggccgaagcta

SEQ ID NO: 146850 - DNA, 590 bp, Zea Mays
tgagatttctgatatcgccatatataatgccaacataagtcatcagaagggattgcaaggcacaataagctaggacaactcacagttcgtcggtgcatcttccttgctcacgtggaaggacattttcggtctcatgctgaaggtactggagctcatcgtgcagctctgttatctgcccgatcaaaccatatgatgacacatattctggtgacgttgcttgggaacctacaaaaaaaattgaaaacgtgaatggattactccagcttggtagtcaaaagaacatcccaagcacatgtggatatccctcacagcatgaagataagaatcgctgtcgtcaactgatccctcttcaaacattttagatgctgcttgatcagtcaaattgtgccggccctatatatccatgtagtagatactctattttgtaagaacacaagtgaaaatgacaagaggctaaataatatgctgtcttaacggatgaactcaacaacaataccaggcggccatcaaaagctgagaagtagccctgcaattccaattctacagctttcagaaatgagtaggcactcgatatttttatctgttcttcg

SEQ ID NO: 146851 - DNA, 333 bp, Zea Mays
gccatcacgaatttgactgccttacggccgtggttgaacgtggcaagctctcggggagcgacgtgctcggtgccatcgctgatcgccagcttgggccagcactggttatcatcgtaaccgcggcagtggctcacacgcggctataaattcaccccgccctcgcccccttctctcaaatcaaccgagctccggccttcgtctccaaattgcgaagctgtagcaaccattcctgtcctcgattagttaccctggccggagtattgccattttcccctaaatcggtccgccgccccgtgaagagcagctcgtccgtgaccaaccctctctggtaag

SEQ ID NO: 146852 - DNA, 339 bp, Zea Mays
cgccggcgtgctgcagaggaggggggcggcttgctgcacaggaggggcggcggctgtagaggaggggtggccggcggcgtgctgcaaaggaggggcgtcggctctgtgctgcaaaggaggggcgccggctctgtgctgcagtgaggggcggcttcaggtaagttagggtttaggttttgtaatgggcctttggactggttgggccgaactaggaacaagtcggccgactttctagcccaagtcgacgactagtcgacttagatatttcagtcgttggcaagtcgagcgacttgccagaaaattcgagtcggtcccccaagtcggcctctcaagaccgcc

SEQ ID NO: 146853 - DNA, 727 bp, Zea Mays
gagagggccacctgtgcgctatgaatttctcgccgatggagatcctctgccgctgggccactacgctccgtggttgtgctccaccacttacgtccagctctcgttgatcgacctgggaggatgcgcagcgcacacggatgttcgtcgcagcttcgcctgggtggattcattctcggcgcggctggaatttctcaccgatgtgagctctccgccgccaaagcttcacctgccgtgggcgggcctcgtcaccacctcgcactccggtaagaagcctcactatgatccaccatattgcactcctcgaatagcactgatcggattggagtttggggcacggggcgtctgtggaccgagcgccggtggtgggcgccaccattgtggctgatgcgcctgaccggagttttgggggtgggatggtagaaagaagacaacgtttggggccgttgatctgcgattcggcgcacacgattagatccaggcggtgtcttggcttcgggcatcgtggaccgttgatcgttcatcgaggggaggagattgatttcggctgcattgaattcgggccctcggatcttgatccagtggccgttatttcaataccggttcggggttaatacgttctaatcgtggccgtagacttgtgatccaagggatcaaatcgcttgccagttcgttgttttaatctgagcttttcatctcagatccgacagccatagatcaccaatacccc

SEQ ID NO: 146854 - DNA, 781 bp, Zea Mays
gtggaagtggcctgcatagaggagaaggatcacgagctctccaaccttcgagctaaggccgagagtttcgagagcgaggctacgcgcctccggtcagggcatgatgaggcatgcggcaacactaaatgcctccatggggagaggacccagctccagcaagacctgagcgaagcgacttcgcgggccgaagaagtcgagtcgaccttgcgagtggtgaacgctcgtctagaggaggcgaactcggaacttcgacgtgagctggaggttgttggaggtaggcttcctttgttttgagcacacttttgtcagctgtcaatacacatgatcgtgattcgtagatcttcagaataagttctctaaggccaggatgctatgaaggcggttgaataggcgaagaaggcagtggaggatgaagagcacaagctctcgatcacttgcgacgaagtcattattgtgtaggttcaagtgcaaacttcgctgaaggagtacaacatcgaactgcaagagcctcaccaagtcgtgagtgaggtgtgcgaccaccttgctcctccaccaccgacccaggtgcctctgcgtgctagctgcggtgctacccggtcatgtggagcatggggtctttgaaggggtgttccacataggtagcctagccttgggtcagatgatattccacttcgacgagatagacacaggcgtgatcgtggaggggtttgccgccgacctgagtgatgaatatttggacactattgaagagcaagtatgtcctcacgctcaattgctcgcc

SEQ ID NO: 146855 - DNA, 624 bp, Zea Mays
ggacatcctactgctcagaggtggaagggtttccacatcttttgcgaagttgtgcgcttcgcatgggaatccgcaagaagccggaatacgtctggaaggagtatcttgaaggcggaatggagaaatgctctatggcagtctacctgggagaaagtcgaaactatccaaaccacccttccttccaagtcacttttaccagataccgctttccagatacttgccagaatgttgcccgaacagccctccgacaactatgccagaactacaacaaggtgatctttgaaacccccctttgctactttccacccaacaacaagaatacccccacctggaggaaaagacttcaggccctagcaggaggagatcctattgaggatgatcccaccatcgtctacatggctggataccttcacacccttgataaccaatatgatgacctcaccctccactgcacctacctaacttcccgggtggagagcctggagcaaaaagtcagggaactttcaggggaaaaggcgtcccttcaagagagccttgcaatagctgaaggcgaggaaaccaatacccgtgaggcttaccgcaccctgaagatggactatgacaagaaactgaagaagctcgccc

SEQ ID NO: 146856 - DNA, 317 bp, Zea Mays
cgttcctagtgagccagcactgaagaggaaaaagatgaaggttcttacgcaccggccacgctatattgaaccggccacagtgcctgagtttgtcggtgagacctcttcggccaccgaagccaaggagccgactcccctgtcgaatattgaagagccggccaaaatgccggagatggaaaaaatagaagaaccgagggctgaagagacaaagacatcggaaattttaagtccttcagcaagagttgaggtgccaatgccgatggcacaaaaagaccttacgacaacccccaagaggaaaagaatggttaacgtgctag

SEQ ID NO: 146857 - DNA, 549 bp, Zea Mays
gcttgttgagccttaggtccttgcttaagtccatacagagacttgttgagcttgcagacccagtcggggtgagcggagtcaacaaatccagcaggctggctgtaataagttgtctcagtaagggtgcgagaaaaaagcattttgacatctagctgatagactggctaagaatgggacaagcagactgcaccaatcaccattagactgaaggtctcatcataatcgacgctcgggcgctgggtgaatcctcggagaacccaatgagccctgtacctgtccagatagaaatccacttatgggtctaaacccacttgctagccagcacattgccgcatggagggtgcgacaccaagtcccaggtgtggttggcaagaagggtgtcacactcttcctccatggtgtaacactagtgaggatcagtgagggcgcgatggatagaagatgtcacaggggacactaacgaagaggaggatgcgaaaaggacaagacagtcgccaggatgaagaactctagcgtcctgataggtaaccattggttggacgtgacggt

SEQ ID NO: 146858 - DNA, 356 bp, Zea Mays
ggaaacagcgacagtctagaagtcaaaccaatgctagaagacctcatatgcaaagctcaacgtctagactcagagacagcaagacttgtggagaaagcccgcaaggaacaactcccggacttcaggacagatgaacaaggagtcctttggttcaaaaatcgtctgtgtgtaccaaaaggggaggcccgagaagtcctgctcaaagaagctcacaactcagcctactccatccacctagggactaccaagatgtacctagacctcaaaaccagatactggtggagagggatgaagaaagaaatagctcagtatgtggcccgatgtgacatctgccaacgaacgaaggtcgagcacca

SEQ ID NO: 146859 - DNA, 714 bp, Zea Mays
atccagagaaagaacactgatgtgtaatcagatgcatgtttaccttacgtctgtatgtgtatatggcctgtttggtgaagctgccatccggatccggagcatatttttttctctctctcgcaaataatggaataaataagttgttactaaaatatctctaatgataaaataagtcagaacaaaaataaataacatttatacaatttaattatttatttaaaaaccgcaatgtgtattttaaaaaacggagggagtgacagattcggtgatatgctcgcacgcacgataggtggcagcgccatcagtctctttcgcctgctgctctacgccaagtgcatcagataaaacaaagccagagcacaaaaaggcacgcaacaggatctgggaaggcaagcaagctctgagaagcaaagcaataatccgatatatatgccatcaacccctcagcttgttttggatgctgggtcaagttgggaccaaccaacgccaagtgcgtgttccttccattgacgcccccctctcccatgctctctctctctgtatttgggggacccagtcatgtggccataaatcatgacagggacacatcgctgtgtgtgtgcgcgcgcctgcagaaactaaacataatcaagtaacaacatgctagaaccaaacgggtggtggcatgggaatgatgaggtagactgcaaacacaggtaaacagcactggaaaac

SEQ ID NO: 146860 - DNA, 440 bp, Zea Mays
cgcgctagacctagtgcacaagtcccctacgggcacggccggatcagcgaaggcacacagcctcatcatacaaattatagttacatacgtacagcgagggcatcacaccttacattggttcaaccttcgggatgatacccatctccctatagttaaacaacattatcctcagctcctcaccctcaaaaagacttcgcaactccccctcacctacactcgccccagctggcgaggacaacaattcccgcttgccagccctgtccacacgaagacaaccaccctccacctcactcactctgcgattcgccaccacccttcgctgcctacgcctagcactcggaccgggaacctcagcacccatcacacgcggcgaagcctccgccgcagccacatccaatgccacaaaataatccaaatcctcatccgaagactcttccgtc

SEQ ID NO: 146861 - DNA, 473 bp, Zea Mays
ttcggatgtgcaaatgtgcctaggttggtttcaaacataggagtatattcagtacccatttattaccaattcgtaactatcttcttcgacttattgtattcaagggaccccttgatatgttagacaaaaaagaagaagctacattaacaaatatcgaaagcctgtaaaatcttttaccaatagatggtgctgataaggacgtagtgatagatttcctacttgtgtatgggtacctcctcagacatagcaaaattaaagcctggtccagctatgcccaaagtacaaatgtgttgggagaagtgagcagcaactgtacttgaggaagaacttgtatcagtggtaaagatattatggtttcgggacccattgcttgcactcttacgtccacgttcggtgtattacatagtgacattgccatatgaaattgtaaaggtaatgtactgaacacgtgcacctttctaattcctcaccag

SEQ ID NO: 146862 - DNA, 332 bp, Zea Mays
attttgttaacagagcatcgttcatatatcccagattcaaaacacctaaacctcctagacttttaggagaacagaccgtattccagttgaccaaatgcattttcttcgtttgagagccgccttgccacaagagtcttttcctgaacaggtccaacttcctaataacagatttaggaagttgaccaaatgcattgttgttattacatggctatcatgctctggctgaccacaggcaggcaactacttccacttggggtttgcctgagaaccatggttttcaaggtgtcacctaggcgcctaggcgctcaaaaatcatgggcgtccctgttccc

SEQ ID NO: 146863 - DNA, 779 bp, Zea Mays
caataggtcaaaagctacgtcaaagtcccaagacttcctctcccttctgattcctactaccatactcaaaacctccacgaaccgcctcgaaacctgcattttttgtacttacattggctacatgcccattgagatctcctatgaagagcttctcactaataagtatagctctaaccatgccatggagttcgttagcactcccatcgtggtctacttggggcagtacactgtaattttgttcaagaccaagtcacccatgacaagcttgataaagataattctaattccttgctttctcacatccaccacaccgttcttgaggcttttatcaatcaaaacttgtactctatttctatttgtagctgcccctatgtgccatgcttgaagccagagttgttcacctcgttcgctttctaaccaagtcttctactctatttccatttagtctcttggatgcataagatatttgcatgcctcctagttgtttgttgtctcaacaaacaaccttaatttacctgtaagcgaccctacactccaactatctaaatagatcctagttggttcgattagctcccttacccttcacacccatcgatgatgtaaagatccttgcacattttcactgcattcgggcgccgctgtagcgcgctactaaggaagtaacgacctgatccttgctcacttgacattgtgtctagatcgtgacatgtgcttcactaagggggtgttgatcaggcccttgcccatttaataccatactcgggttctgatatgacgcg

SEQ ID NO: 146864 - DNA, 358 bp, Zea Mays
cgatagcctttgtgttcaggactgtatccaagaaagacactcaacagattgagcagtcaatttagtccgttcacgtggtggtaacaggacataacatagacagccaaacacacgaagatgatcatatcgtggagatgtcccaaaaagaacttcacccggtgttttgccagaaagttttgaggatggttgtctattaatgagatacacgacagtggaaacaacttcactccaaaaatgtgaaggaacaaaagaagatatcaaaagagtacgagcactctcaataatatgacggtgtttgcgttcagcaacaccattttgggcatgagcaccagggcaagaaagttgagctaaagtgccc

SEQ ID NO: 146865 - DNA, 394 bp, Zea Mays
atccaaggtattatttatatccagaaagtctgagtacaggggaggttcaaagaccacaatgaaccagatcaaaagcctgctcagcccgagaagtagtaaatgggagacaaatatgtcggcctagctgacaagcatgacagagaccctcaaaatgtcccctactacatgaaagatctaaactactggtgagcttggtcatgacgtcgggtcctggatggccgagacgacgatgccaagtggtggaggaggtggtagaccagaacaggaggtggagacgcgccggtagaggagggccagagcgtgtagagtggccccaagctgtcacagcgggcgagaggggttctggtggccagatccttcacagaaaaaccagaggggtcaaactcaatggagc

SEQ ID NO: 146866 - DNA, 524 bp, Zea Mays
gaaacagacacctgctaagtctccgaaactgtcagattatgacaatctgtaaagagtcagatccactgttatgtcaatcagcaaagaaccgtcatgtgaacggatcctaagactggggcgacaattgcgcatcatcatcctctgaagaatggatacaggcatgcagcaaagatgagaaaaaaaaaagaacacaaatgtaacacactgcaacggatgggaggaagtggtgaaggcgaactcatgaacagtggagtcagaaacgataacatgtcaatcagcaaaggtccggaagtccggatcctaagactggggcgacaaaaaccatatcatcatcctccgacacgaccatcgacactgatgaattcaaaagaaatcaaaatcaaaagatgggaaaacaacactgtttcgaccaaaaaacgcaccgagcagcgagaaatcatgggagtcaagaatgctagacgaccgtagaagaattcggctacacgcgttgtgtatttatattcagctaccgccggtgaggtgtc

SEQ ID NO: 146867 - DNA, 366 bp, Zea Mays
ctcgagaccgagcaccagcgccttggcgactggtgcacccaactggaggagcgcactaaggcggtgtcctgccattttgcctcagaacgggccgagtttgagcaggagcgtgaagacttcaaggaggacatccggaaggtgtctgaccgagaggacgaggtgatccagaaggagaaaagcctggctaggaaggaggcacgcttagaccaaagggaggaggccgtcacagggctccatgctaagctgaaagcttataatacggtgctggagaaacagcgggacaagcaggctgcggctgaggtgaagctgcagaagctgcagcaggagctcatcgacagggccagcgacattgctcgtgccgaggga

SEQ ID NO: 146868 - DNA, 840 bp, Zea Mays
agaaatagaaaacgcaaaaatttaaatccgtataataattgcaaggcgataataccaacggaccaacctacccacccgcaccctctcttgtgcacctccggctcccagtccactgcctcctgccaaaataaatccgtccgctctccagcttggtggcacaatcccatcgaaagctagggtttcaagcctcttccgacttctccttcccttcccttccccaccacaacgcggccgccatagacgcggtaccgcgcgaactcccatagatctgagcgagccaccctgcgaatcatcccctgacgcaccaaatctggtcagaaacggtgaagagttcggacacgatcttaagcgtcgttgatttaagaccacacacaaacacatctgtttgcccttcccccctatttttttcctgtttcggacgattcataagaacagacctgcaaggtttgcagatctacctgttcaagaaccagggaccttgttttggacgcccagaacgaacccttgaccctgcggatctgctcgatccgttttggatctgcttgcttttttctggatctagagagaatgttcaagtcgatggtttatttcgtgaacatctcaatcggggaggttgaggtgtggcccaagggccaggcgagcgcaggcctggccgtggcggcgtgggcgcgagatatccgcgttgaccgcctttccccgcccagcgagcggtgccctccgctggccgtcatgcacaccgtggccgtcgccgcccgatgcctcgtcatggagtccaggccgcccgtcgccgccgacgtggcgtcgctgcctctcgtcgacatgcacgccgcttgcctcagg

SEQ ID NO: 146869 - DNA, 314 bp, Zea Mays
gcgcagggcgtgtttcgccgcccagggccggctggaggtagacgacggcgccgtgaccgttgatcccttgcgcagcggtcacgattagagcatagggatactgattggggtaggttgaatctgcgccggtgatctagcatcgggcggttggcgagatttttaaatcgtggccattagtactcgatccgagggctctgggcgcggatcggtttggccgagatcggatctaatccgtgccctcggcatgggatccaacggtccaaacctccactgtaccccttcgcggtaacgttttacataagagaccccagaaa

SEQ ID NO: 146870 - DNA, 278 bp, Zea Mays
actttttcttctgcattttaagttcttttctgggaaactctctgcgtggccttgatgaattgttgctatattccctaatgttagatgaaagagctggtatgcttctgtgttgtattcccttagtagtgttttggacaccaaggaatgcagtgatatgagtaatgacatgatttgtttcttaaacgatctgctatttagctaaggaaaatctccatcttcccctatcaaatgcactttgtttgcttcagttgcaatggttctctatcacactaagtttt

SEQ ID NO: 146871 - DNA, 315 bp, Zea Mays
gtaaaacatcactctcaaattgagataggagattggagattttagataacatacataatgtaatcaccattgtatggtcgagggatgggaaaggtaaaggtgataacaaacagaagtaggcaaaggatggagttaaaaactcgcaagcgacaaagaagatgatacgtccaagagaaaaataggtaaaacatacaactctcagattgagatggaaatgacgggattttaaagggccaaaataagataaacatcaaagtaagatatagaggtgataagggcaaaggtgataatgatgaaaagcataatccatggaca

SEQ ID NO: 146872 - DNA, 449 bp, Zea Mays
ccagaaagcgcaggggtgttggtgcaaaagatcctaagacacagactagccagggaaggactgcgggttgttttctgttttagtcagggtttctttagcaaatttgacacggcgaaggggtatcggggtacaggagccgccagatctaaaatcgtcggtccagattagaccgagacactcatgaaccagggttcattcccacacgtcggattcgaagcctacgcttcacattcaccaagcccgcgatctaacagccaccctttgatctaacaccaacggcgcggatcgcgctggcgaagaggtaagtcacttttgatcctggccatcaaaattcaaatctacggccagcacatcgtcttcaatcccccgactacctctctctctcctctattttttttccacggctgttcttcctaacacccgcgcgcaccgagcggcgaatgctcccc

SEQ ID NO: 146873 - DNA, 8826 bp, Zea Mays
gggttataggtacaaaactcattcccacaacatttaattttacaagttcataacttatgtgaatggacagtttgacacatcaaagcttcacaatcaatatatttaacagatatttcagcaaataagtttttgcggctgcctgctctcatttctgtaaccatagtgatcagaaaatgcatcaagaaatcctctgagtttgcatttagaattttacaggggtgtatagcagtccccaccatgcaggtctatcatttcatttaacattttggaaactagtaccgcattacaattttacaagatgaggtttgtactatgcaagtaaatatacaattatacatgcatatgcatgtgatattacattaaatcataaaactatagaacaataccgaacaccaccctattccctttagaattagcagaagattacaagtttacaatgtgagaattgcactatgcaactaaatatatgtgcgtgcaatattatactgcataataaaactacagcatattcaagaaaaaattgttattctagatagtagagcatatgcacagtgtaaacattactggagcaagctgcagaaggcgaataagtgcccgaagagcttctgagtctagaagtggggtcccctccacatctttaccctttgaactgcatgtagtagaaataacccttctacccacagtaacaccaacagctctgtctataactgtctgattatcagttggcagcctcctccctccaagcctgtagcttccaccaaaaaggctccctctagcacgatagcgactcaactctctgtcccgtagcatttgagcttcagcaagtaaagctgaaggaagggcagacagaacagcttctgatgaggtcaaaagcacctgtgcagtaaaacaggtccatgtatgtaaattaaaccttacctcccgatcatgcaagtaaggaagtaaggattggaaatttgctaaaatcgaagcattacctcttcacgtaaatcaggagggaaagttgctataattgaagcattatccatatctactggctgtccagctggttgagagtgggcaatcctctgtgctcgctgctgggctagaacctcagcctgtatgtctggtggaagagcagccaaaaactcaggatctatttcttctgcagctgggggagtataggaagcagctggggcagaacggttctgctgagaagcaaggacttctgcccgaagatcctcaggcaatgcttcaagaaatgtgggatcaatttcattagcgctggaggcctcattaatagcattagtttgcactgtctgaggctcttgaagagcatcttcatatctcctagaagacaaatcattgccatcagaagcaggagctgagttcccaacttcattttcagcaatatcaacgatgttcatgtcaacatcagcattgactgctgaagaatctacatgagcatcactcagctcaggagcagcacttgcagaagtgacaagtgcatggcaacttgactccagatcagatgggggttccctaggatcattacccaagtgaacttgttgaggtgcttcaatctcattttgcataatattaccataacttccattaccagacaaggaatctctttcaggatgaccaccaagctgtgtaccagcaatacacatcatttcatcactctgaggtatagtgttaggatcaccggctgctgtttgctgcaccggttctacaacgcggctatcataaatggaatcaacaaggtgctgatttacgtgcacatctgtaggacagaggacatcattagcagggacaggtccttggttaacagtacaaactagctgatgccgaccaacaggttgagaaagtggatcggttgtaacaggttcagcatttcctgtatctggtaactctgagtgcgcattcgcaccgttgccagtctgttcaggccgcacctgaggagcactatttgaattattagccacagttaactgtgacacaaaatgatcctccactgcctgggcaatagcagctgcatgattacctgcctgtggttgaccatcatcggtccacaaattatctccagggccccgcctaattctaagggaatccataccaagtgagaaatctatcaaaggtggtggagcagtactgacaacacgttcaccaaacactgggggagcagtttctggtgaaaagccagcatctaacatgtacgaggggatgtcaaaagacagcatgtgaaaatctcttgaggaagttcctccagagggccacgctgaattagttccctccctagactgtgctggcctgacaagcagtggatgaagaaaggcattcacatcggtccttggtcgatcaagaagcgacctacttccgatttggcgccgccgttcaagaccaaacgaacgatgcagattaaatgaatcaactgtccccacaccatgaaatgactcagaagatatatcaataaaaccactggagtctgcacgacccctggaaaatctcagatgatgatcataatccattcgagttaagctctccctccatcttacttctataacatggttctcaagaaagtcgtcatcttcttcatccataaggtcatcattgtaatcatcaccaattgcattgttctcctggtcctcgatatctgtgtcagctatggacatcaaaccagctccctcagctgctatttcctcatcttcttcgtcctcactttcctccccaagatcctcgtcttccacacccattccatcaacttgatgttgcattgagaaagccaaaccaatatcagtactaggagccattacattaccttcaataggttcttcccgcatgaactgcacagctcttgttggaggattgccattagaagtactattgtctgctagatcaactcccatttcttgttcagcaggttggtcaaggttttcgttattatttccaccaacatgagacagttcttgagcttgctgacttgcagattcgatgtcattagtatgatgatgtgaatcgtatgtagtttgttcagggattacaatgtcatcagcttcatgtgtttgttcatgtgaccctggtaatctgttcttggtaaatcgatctgaattgaggacttgatcggtggtgtaagcagtcctagtgaggctatccaaagccttcaatatcaggttgacaacccttacagcatctgggtggtcaagatcaattactttcagcaaaacagaaagagattgcaccattccaccatctaccataggttttgcaatatcaggtgagcagccaagaacaggcaaattgctctgactattccttgacaatatggaattcacaagctcagagaaagccaaaacttttctgtcaggtattaaagatcctctggaggtgttgcttgctgaaccaatgaattggttaagtgcctttacaatttcagaaacaacccttctacgaccttcagcagatctgcagcataaagctaccaagaaccaggaagctctctcagacaaattaccaatccaatcatctgaggtatcagcaattttgactgaaggtagaggaagtagcagatagaatatatgatgcagtaaaccactgtgtccagcaccttgagcgcaacttcgtgacactgatatctctgtatcccgtctcagaattatccctactgcatgcacatacataaggagtatttcactcatcaacttaaggacaaatgcaaactttgatagcaaggcagacctctcagagaaagcatcaccatccagttcttggccatcaccaactttagatttgccctttgtatttggttcatcaacatccattggagtcaacagggaataaccatcaaacccatgttctttgcttgcagatggatagctcatgatgatctcaagaagctgatcaatcacttgaggaagactagcaggaacctttttgtggttccgtgaacatctgtttggtgtatcaaccgtcttaacctcagcagtcacccgaacaggctcattacatggcacaccactttctgttacaggaacattctgtttctctctgtctttctccttgtccttcaacaagactacattcaatctccctcctgaataatccaattggcagactgaagttgcagccttcatgaagatcacaggatctctagatatcagtggtgccatatttgtaagaaatgagcttggagtacgactgccatggttacttaatgactgtcgtatctccaattccatggcactctgcaaggtctggggatcctcaatgaggtgccgcacaatagcagatgctaaggtctcaaagccaggaaagatgcaagtgcctgggagatttaagagagatgctaacccaccactttcaaagaatagagcagcaagcgcgtgtgtttttgtcaagcgagcactgagctgaagcacagcatgcataactgttgcaggcacacatagcttaatgaattcacagcagaaaaccagtgccttttggctctcttgatcattcaaatagccagtagatttccctaaaatctttttaaaaacatttgcacttgcatcatctgctgaatcaataatttcagttctatgttcagcagttggtaatggattttcctcgctgtcagcactggatgcatcagaaattgacttggatataccatccattgtttccatactgagttttggattaaattgtagcatgttatacaatataagcaacagagcactgatagaattccaagtatgatctgtctggtctgtccttgatttaagacttcctaatatgttaagaacttgggagatgacaccattttcagcactagtttcacgtatgccactgtcttcactcagaagcaaagccagcacatgagcaacagaatacaaagcacccatatccgtggcatctgacgaaaaatgtcttaactgctcaaaaagatacaatactactcgcttgcagtattcgctcttattccggttgcacagtgtcgctagaaggtcagtcaatgggaaagccaaggtggaatcactagactggaaaagcttggtcgatacagtaaggatgtcatccaaaggaagcacaaatacacctttttcttcagcaatgactgtatcattcttattgcttccatcctccttgggtgtttcaatggagcttccaagtgacaaagctaacgcttgtgcaagctgcacatcttcctggacagaatcttctggatggttgaataaccaatctgttgccatctccacgctgttagttctcacacttctaagagattcttctgccctagcccttgaaaatcccatttcaacaattgtagcaatagcagattcatcaagaggggggccagtaacacgctgattggcaactccaacactactgcggctttgcttcatatctccaacaacagagcatatattgttcataattgacaccagggaggtaacaaaagctgggttgcacacaggaaacattgtatgattccaaacaggaagaactgcatcaagaacttgagattggagcatgcgcgcaaatgattctggatctgaaggcacagggaatagattaattgacagctcagttacaataggctggacaagaagccgattatgagaagaggatggagacaataagaacgtggagttcacataatattccagaaatttacagtaactctgtaacgtatccagcagccaggaattgtgagacaccttctcattaatagaggaaccttgatctgtggcagcagcaaggacagagaaaggaagtgtccacagtagctgactggttgcttcaaaggtcgttagaacatccttgaatgttccattaacatagaagctattaacgagtgcagaattgcataagcgacgtctactgtcaaatgtaagcacagccatgtcttccacaacctttccaaggtaacggcatttcacagataaagacatctcaaaaccagcagtagaatgcccagagaaaccaagagcactaaggaaaaattgagctagtgcagtcacaagacttctcgaatttgggttaaggttagagtcaggccgacgatgagccggtaatcctttgacaagggtagaaaggaaggaacgcatggtacaacaaaatttcttcagaagttcagaaacaacatcatcagggattctctttagagcatcatgacgccttgatgtctctgctggaaaacaaggaccatccaaatcagtacttgttgcattcaacactccatttaggcgcccacttatccttgataatgagtgtcgaccatggtggtgcatgtgggaaacagatcgcacagttgatacaaaatcttgctccatgctccacggtgatatagaagcccttgctgaaacaggattcatatatcttgaaagtggtgctgtatttgtgtcatcatcactatccctttcagaaattgaagcttcctcagccaaatcatcttgatctgcatcttgcgtatccaccttagaatcactgagtaaagatatctgccatgtgacttcaatataaaccttccccaattccttcaatatctcggcatcagcaaaagccagttctgagaccataatggtagttcccttcaggagaaaattggcaatagacaaaagcccttcaagggtagaaagtggcttcagaagagctgattgctttgcaggttcactaccaaccagcatagttccagagatcgaacccaacagttcattggttattttaaggtggtctctaaagaatgagcacactgctcgtgcaagagaaacagaatgctgaggtgagaagtttttgaatgcaacagaaatactctgaccaattgagacagatacaggtattgatggcaacttaaacagttgaagaacagcttctatgccttttttctcaataaatagcctacatatatcagcattttgcagaacagtttcaagcaggcgagcaacattgcatatgcactcaggaagaaataactcaatggatgatgatgttacagcatctaaaggagcatcaactgtttcgcctgagcatcctacctcaggaggtacaccctcactctgtgaggtagcaaccaccacatcagtatccatgggaataactgcagagtaattatcagattccttataggggatagagtctacaccacaccacactttaaaaatagtgttcaagatttcaataaacatgctaactccagaggatcgtaatgatggtgcatgacgcattaattcatcaagtccacttgataaagctcccgctgtgtcaccactaagagctttcatatatgatctagacgtaaagattttcacaaaacatcttaaagcattccggtcctttaccaattgaagaccattattgttcaggcacaatgcatccaaacactgtggtatacatgagactgcatcggagttgtaaagtccaccacacattatggcatcaagaaatgcttgtggcaaaccagctgaatcaagaacagtatagcatgttggatctttatgtatgagatcactcataacatttgcagcaagtgagaaaacaccaccaccgaagtccttgcctctcttaaaaatcgcacataaacatggaggtaacacattctcttctgaaccatcaacacgagcagaactaccaggcacatatgttgccagagatattgtacgtaataaaacttttattaagttcttcctatgatacaaaatcaaggattcagaacatgaaggttgtatatcttgcacaggtggataactttcaacctcgtttccttcattggtagaatggtcaattagttttgaatcaacctcaacttgagatacttctagcttaagacgagcaatagtgtcatctagtccacctagatctctgaacactgctgaagaaggattgtgataatccaggaagctctcaataacatgcactgccttactaactagatgtaaatgttgcgtgtttgtgtctttgagaagaggcaaaatagttggtataaaacctgcttcttgtagagctagagaacctggtgttgatgataccagcatagatacaagcgaaagaagtgcttcagcaaatattatggaccatttcatagaaccattgatgatagaatccactgtattctgcatgagaataggaaggataccccgatgaccaccagaagttaccgaggacaatacagtaggctggtgaggtcgatcttggcacagtgcgactaatgaaaggactcccagtatccgaatcttttcgggtatctcatcctcatagctaagtagtgataacagctcatcaatgaattctggttcattgttcaaaaatgttgatacaacttccagatcatggcctgcttggacaagaacaataaaagcatacaagcggatacagatatactggtgtcgacatgttaaagagtcaaaagcccttgcaaatctcagtcttgtaagaagaagaaaccttaaagcttgtggcacactgtaatccttgaccaacctgtccaatatttcaagatctgcctccttgcacgaattgacattcgataaatgaattacttccaacttgttctctttctctagacactgggatttctctgatttatcagcagcacgatagaactcaaaatggagtgtggatccaacctcagtggaaactggatcagatacactgggtagagaacatgctactaatccaagaccaccttcttttccaccccagccttgagataaggcaaataactttgaagcgagagatgcactgcgtattgagcttttcccaactgacttgtctacaaatgccattaatgtctgcaagcttgcttcaacaatatccgcatctgttgatgctagaagggcagacagatgctgctgtaacaaaaagata

SEQ ID NO: 146874 - DNA, 657 bp, Zea Mays
actgaaactggatggtaagttttcagtgaccatgttgaggcgaacaacagttcatgtcactgaaaatagaatgaccatgcatttttcatagaatggccatattcagttcacagaaataaatggaccgcagttcacagattagaattcagttcacagattacaaccggaattcagttcacacagattaaatggactgcagttcacacagcagttcatagattagaattcagcggctagggttgccatgctgcctgtgccgtacaccatcacacagctagagctagttcaattccctttcccttcccgttgtcacccctctgttcagtccacaccacaccctcctcaaccgcaccgtcgtcgtctagccgactagcggcgggagctatagcttcgacgagccgacgacaaacaccaacaggaggggaaaggagggaagagaagctagggcctagggagggaggagagctgctgggagacgacgacgagaagactggcgccgtaacgctagccgtccgtgacctgcgcctgatagaccttactgaaagatcgcaaggctaacaacgacgactgctgatggtatttttctattatggcaaagagaagacttgtatcctttctattttgataaacatgtgtacaccgaattgaagctcagtt

SEQ ID NO: 146875 - DNA, 298 bp, Zea Mays
atggaagcggcgtgcgttgaacaaagtctaaagagcaagggagcggacagggcttcagtcagtcttaagtcaactttataattttatgcggtcaagcaggaacactccaatttataactataggtgaaaactgatcatctatttcttgatattactcgattcgaaaggttcaaaaatactaaatacggataatccgtatctgaattgcacgtcggcaaattgagtcctttttattactggtgctgcttgtcacattcaagagtattttgtacgtcctaaaataaatacacgtctcgct

SEQ ID NO: 146876 - DNA, 341 bp, Zea Mays
gaccgattggtgtgccgagtcaccagctagccccaaggcatgataatagtagcagcagaagcaatgatcctataggggatcttgaagctgaagtaagtcggctccaagcggaactccgccgcaggatgactatctgggtcgtagatggcgaccgcataaatgagttgagaagagatgtccgccatctgcgagatcagctcgcggaccgggatttggcacttgactgggttgttcaatcccgttcgcttgcatgggacaaggagcaaaaagctcaagctcgagtagccgagctcaacttggccgttgaagaactgcagacatattgcaataccttacatgaa

SEQ ID NO: 146877 - DNA, 578 bp, Zea Mays
ggcggatagataatttttttgctactgcagaaacaatcaactgcatgtagcaagcttgagagacgactctagtgtagccctgtccaatccaacgaaaacaccgctaaaatgggatggtgggtttagaaggaacaaacctggttagcgagtgagatggagtgatattgcatctgtgggctttgcctgatgtcacctagttttgggtgctagaaatgaactttttggatgcaagcatcaacattgtttgcattgcagccatcactcccatcaagcattctagctcagactaatgagattgttctatagaaacatcacctttattattaacaattacaaaaagaaggcagctatttaagagggttcattttagtcgtgtaggctcttcttgttctagcagatcagcaagatgtcatattagagaaattgttgtataactgcaagaaggaaaaaataagtttgttgtggactcacacaatgcagatgtggattgaatagagccacaactagcagggagtgatggaacaacacaacaacatcgttctagttcctaatctcttttttgctaggctaaattcagc

SEQ ID NO: 146878 - DNA, 464 bp, Zea Mays
agattgcctagaatgtacatcaccatgctctcacccgctacatatatcatcaattctacatgactgccctatgcgtttaactgcagaagctgattctaattttctaccagtatttggatggtacaattattagaggttgaagcattgttgttagttgttactgaatcgcaccatccatcttattagttgctattttgaactactacatgttttgtactgagatttaattatacacaaaatcccaagatagcaatctgttatagcccttgaatcctaattgtagatttcccttgacagtaagcaaatttgctcagctactcaacaaaagaggtccctcatttgctctctagatttcatctacttctatgcttgcaccttggttatgcatatttctgtggtgctcgtgttacatttcttccatgtgcctcttcatttcatggtggtgttttgtttcagcatttcaa

SEQ ID NO: 146879 - DNA, 864 bp, Zea Mays
atagttttgaatagacaatcttgagttattcttgtatactggggtgcttagtatttttaaacagtgtgtatgttgggtatgtatctccacaatttttcttaagcctagtatagaagtatttctatttttctctgtattaataaggtttgggcagtttccttatttaattcaaaactctaaaaattagtatagaaaacatggggttcaatatttttgtctgatagttcataatgtttggaatccagcaaaattggtttgactaattttggatgagtatttctcaagttatgcatttaactgattcactgttgatttaaagaatttgaaattcgaattgaaaaggaaatccactttgctctggggtccctggtgttttcttcctaggttccttacaaacaggtcctcggtttcctattgcaccgagtcactgacattacgcttgaccccctggggtaactctaaatcaaccctgcggtccttcccttattgaaacagtgtccgcagcggaggaaagggcggaggggcttaccggcggcgagatagctccggtgaggtggtcgatggtgtaggggaggtcgcggcggtcacgtcgatgtgcggatcgtcgtcggaggtgaccggagttggcgggtccatgtgcgcaggcgggggagttcgtcggcggcgaggactccgacctaaccacggcgacataacacgatccagtgagttggggagcttcacgggaggtcagggaggtcgtgggtgcaaggaatcgaagaatagttcacctggtggcccggtctacgagcggtggcgggcggccgaagtccggcgagggtgattcggggtctctggtgtggttgcgctgggtctgagggctcg

SEQ ID NO: 146880 - DNA, 342 bp, Zea Mays
ctgaagcattggagggagcattgtcgtctgtggaatgatggtttatatgcttatcagcatccacaacctgactctggtccagacaatgggggttgtgatggtaaccattagcctctggtgcatcctccctgttgtgttgtgtcaggcaaaagggaaaatggtgaggatgggggcctccatacatatctatgtgccttaaactggattgtcaatcaaaaactaaagctgtacaggtttagctagtggttggcagataaacaaagatccctattcagtgttaccaacacatgatgggtgtccgtcggcgaataattggctttgattcaagctgttaaacactgg

SEQ ID NO: 146881 - DNA, 477 bp, Zea Mays
caaagcccaccgacgtccgctaagtcatggcaccatcgccgtcgggagcagcgactgtggttcctcaatgtccctgctcccctgcgcgctttgtcccagggttgtgtggtggggaaggagaaaaggtaccagtggaagatggcgctgccgcaacgacgaagatgggagcggtcagccatggagtgggatgtgcagaggcggaggtgagataaccagagcagaagatgttgaacggcttcttctccatcccatttcccttcgtttgcctactcccttccaccgcatacggataggccctcaaggtgattttcttctcctccccataccaaatcctaggtcctgaagcatctacaggggaacgatagtacgatcagctgggcaaggtcataggtcacgtctagcttcgacggattagatgaggaagccgcagcagaccttggcctgaacatgatgtctgatccgaagctcgcgcttagg

SEQ ID NO: 146882 - DNA, 827 bp, Zea Mays
caattcgggccgaaggattcaacatttaagggctgagatttaatatgtatgcgatctgctcccatcccagcatccgcgatccaacggtcgagcattacccaccccgaaccggtagctttgaccagatccacaccactcctcacagatctaacggtcactgattcatcctacatcatcttctcccactagccacccagtacggcggcgcctcccacctacggcggcgccatcgccggtgactcccgaatcggcgcccggacacataatacacgaatctaataggtgctacgcaagaagaaggtgagtgcaaacgctaggaacgatctcttaccgactaatgatgcgctagaatccccgtccgtggtgacccgtggatccgcgacggcgatggagctacgacgagtaattgctgctcctcccgtcgcccacagctccaggaaccgaaacgcgcgcatcaggtactcctctccaacctccctggcggcggaaccttcaacctgcccagctatggcgaggaaaggtgcagcggatgagacgactgacggtggtgcacaggcttctgggatctacgattcagcgcgcacaagaccccggaattgattctgggcgcagaatagaggagggaaagggccacaccgtcggcgaccgcaatttcacacctcgcccaccactagctcactcagctctcaattgctcccgatggcggtggtgcttcctgagccctttttttcttttgcgcagaacgattcagggaaaaaggatgccgaggctatccgtgcccgcgctttatggggccagagaactccgtgcgtggtggagtctgttga

SEQ ID NO: 146883 - DNA, 885 bp, Zea Mays
gccctccacctacctacctatcgcaaccgtataggtagtgcctctccatcgatctatgatttgtctcaacagctagctgtcttgattagattgtgtgcgcgacgccattattactagtgtatgctgttgcactcactccgttgaggaattgagttcggcgaacaaacgccgaaaagttcggtacggtgcacatggctgtcgtatgggcaaagctagtagctcaatggttgaataatgtggtttatttgttaagtatttgttaagatttgtcctttttttcatataagttatgttttggttatccgactttgtctgaaccccctggagaaagtaatttggggaaaaaaattccccttcaaaagttatagaacaactgccacgagattaaaccagttcaactgcaaaaatctactcactctttttagaaacatacataaaaaatccactcattttgagttagatgctccacggctagctagctgatttttgagtcctggttttttttgccatggcatccgagaacgggaatccttcgtccactgttagatgttgactcgactgacaagaaggatctagagctttcctctactcttcgcaggcaggccgcggaagctgctgactttcaccaccgacccgccgccaacgccggcacttgccagaccgccacgcgaatgaaacggagcgatgatgtcgtggtagtagtacaattttttttcccgcacgccgcatctttttacgtgcgtttggttcacatgattgaagcagagaaacggtcaaggtagacttgtcagagggctcaatggcagtagccgtcacccctgcgcagaggaaggataggattcatggcaaaagggagctcagcctcttcctccttcaacatcttag

SEQ ID NO: 146884 - DNA, 552 bp, Zea Mays
caccgtccgactacaattgggctaactaggccaattgcgtctttgccaacgggtaatagtggaggatatcctcatcattcccaccttcttaaaatgggccctagctttgataccagatggtacacccagctcaggtggggttggccgaggcccaacaaattagggttgctcggagcccaacagttcattatgcacacccaacttagggaaaggcccaatcgctccaaaagactagtccaatgggggaagggtggctctcccttttaaagtggcttcctcctcccaagttaagcaaggtgggataattctgaggctcacatggtcaccgtccgactacaattgggccaactgggccaattacgtctttgccaatgggtaatagtggaggatgtcctcatcattcccaccttcttaaaattggctctagctctgatatcagatgatacacccagcccaggtaggatttgccgaggcccaacaaattagggttgcccggagcccaacagttcattatgcacacccaactcaaggaaaggcccaatcgctccaaaa

SEQ ID NO: 146885 - DNA, 301 bp, Zea Mays
aaatcgttggaaaacagctctgctttttcctctcttcctcagatcgaactagacctaagcatgttgaatagtaataattgatacatgaatgtagaaagcactaaaaacattaggtcattcaacaatagtcaaaagaaggccctgtttattcctacccctttctaaaaaccgcagattactacaatttggctccggcaaaagtagatttgtccacccagtcattgcactataccgccattgcaacctagtaatatcatcctacattcggtgcaagtcattgctctgcggagtattattaagc

SEQ ID NO: 146886 - DNA, 395 bp, Zea Mays
gtggttaaggcttacaagtagcatctctaagcctcgggttcgattcccctcgggctaatttttcggggttggttaaaaaaaattctcgtagtgctccatccgctctcgggttacgatgtcctgtgcatccggttgggccgttacagagtggacggttgatgttgggctggtagtgatggtggaccagggttcggggttttcttggctgagactaatgttgcggtatcctccgattagactgttatagagtgaacgattgacgccgatccattagtgatagaaggccagagtttgaaaatcttgggatcaatgtttacttgttttgttgcggaataacagggaacaccttgcatcatctctcgtcccttcaattttgatggacaaccgagaacaac

SEQ ID NO: 146887 - DNA, 323 bp, Zea Mays
atcgatcttgctctcagcgtcggagagttagctgcacaccccccgatccccggccacgctccgatcgtacgaggctagctgctccatcatcgccctcttctgggaccctgcccctgccgtgagtggatcaatccatggacgccgcgcaggtgcccgcggcagtggtggtcgacgtcggggcgctcaccggaccgatagggagcgaggcccccgctgcgccgaaggtaaacgacgcgtccgtcagcttcagtgcatcgatacgttcgtatcggcaacactggttgtttttcaatccgcacattgcgtagttccgtggccagcat

SEQ ID NO: 146888 - DNA, 307 bp, Zea Mays
tagtcaaccagcctggaaacatccttccaccataaagagcctgttttagggtagccatgggagaccctgcccccagattagtgagtggtccaaattagatttacccaaggtatgtcttctctgccatagaatttgtgaatgtatttaagcaagagggtcgtgttctgaatcttcaaattgagaacacccaagccccctctatttctaggacagcacactttgtcctaggcaaccagagggtttcaagtgcgcattttaactgctgctgacagtcccttctgattgtttaactgctgccgacagtccc

SEQ ID NO: 146889 - DNA, 356 bp, Zea Mays
cttcaagtaccaggtcaggtccaaatatttccctctctccagcttgtgaccaatttagctgtgttctacaccttctcccatacaaggcctcgaacggtgccatctttaggctggactggtagctgttgttataagagaattctgctaaggaaaggcacttgtcccaattcttcccatagtgcaacacacatgccctcaacatgtcctccaaaatctgattcaccctttctgtctgaccatctatctgaggatggtatgctgagcttcttattacatgggtcccaagtgattcttgcagttgctcccagaaacgtgctacgaacggtgctcctctgtctgacacaatagtccttggt

SEQ ID NO: 146890 - DNA, 410 bp, Zea Mays
gaagaatgtagtttacttagaatttatgctgagttgtggttgaatttttattgatctatgattgaattttctttttatgggtgctggaatttatgttgtcaaggggctattgttttgcaagacaactttcatagttcgtgggtataaacagtattttatatttggcatccaaacgaagttatgctacaatcttccatgccatatctgacattatcatattgcttctgctcaatgttatgtgcaatgtttctgccctttctgatgtatgcatgctttttatgaaaatgctatgtgcaatgttcctgaccttttttatgtatgcatgtctatgaaaaaaaatatttctgtatatagctaagcaacatatatcttgcttgtaatctaaggtaaaattagacatttacagtttg

SEQ ID NO: 146891 - DNA, 669 bp, Zea Mays
caaggaggttgcccaccccaccccttactttgctctcttcggcgtccatccctcctacgaccatcttcgtgtcttcgggtgcgcttgctatcccaatctcgcttctactgctcctcataagctcgcccctcgctccactcgttgtgtcttcctcggctactctcccaatcataaggggtatggtgtcttgacctcgcctcccacagagtcctcatctcttgtcacgttgttttcgacgagtcggacttccctttttcctccacccccactgcctctctcaccgacctcgacgtgctcctcgacctcgaccctgtgtcccccactatcgtgcctcccttccccgctggttcgcccgcttcaccgcctcgcgtggccctgcctgcgccgcccgcccccgcactgccacgtgcggcctcgccgttcccggagtcgcctcacgcgaccctgcctgcgtcgcccactcccgcacagccacgtgcggcctcgacgttccctgagtcgcctcacgcgaccctgtctgccccgccctcccccacacagccacgtgcggcctcgacgtccccttcatctcctgcacagcctagtgcgacaccggcgcccgctccgccgtctcgctacaccgagcccatccagacataccagcgccgtggtcgacgcggtaccccggct

SEQ ID NO: 146892 - DNA, 471 bp, Zea Mays
ctaaaaagacctctccaaacaaccttgagtttagcaagtgaaacctccaaaaaaaacatgcttgtgttggtgttttcgaacccttatgtgtttcccccttgaagttgcacctgcacggcttgtagacacccatagcttgacccctaaatcgactaaaacttccttgtgcacttgttgtgtcaaaaaaaattattgttggtgtctagttgcgcaaaccctatcaaggccatgtttctttccataaatccttgcccctaaaacttcatagcattcatgttgatcatccagctgatcttgttgcctacctctcctttcgcatggatctagtgatctttttccttgtgaatcatgttgcggctttatcatccaaatctcgggatcccctattgaatctgccccgttatctggttatctgctataacccgttctcaagtatcggatgttgatctgcctaaatctctcatttctggt

SEQ ID NO: 146893 - DNA, 345 bp, Zea Mays
gtgatctgtgcggtccaattactccaaccacaccgagcgggaatcgatattttctcttgctcgttgatgattacagcaggtacatgtggctgccacttctggcgtccaaggatgcagcacccggcgccatcaagcgtgtacaagcggtggtcgagcgcagcagcggaaggaagttgcgtgccctgcgtaccgatcacggggaagagttcacgacgggtcacttcaacgactattgcgccgagctcggcgtaaggcgtgaaactgaccgcgccatatacaccccagcaaaatggcgtcgtcgagcgtaggaaccagacggtggttggcaccgccaggagcatgctc

SEQ ID NO: 146894 - DNA, 344 bp, Zea Mays
ggtgtatgaccatggtgagccccaattctagggcccgacacaacaatactcttccccccttaatctatgcgtgacatatggaatttaacagattaggggtggagcaccgtacctacgatgtggatggtggtggcgtcgatggcttccctcgagcgtcttctacaacgacgagcaattgtcgtcgaacacgacatccctggcgcccgcctggtcaccacggagcatccccgcacctttccccctgtggtcgaccgacaacgactgcgatgatacacaacaacggcttcctcggatctgctcgttggcggtagtgactacaggcgatgactagaccccaaatcgag

SEQ ID NO: 146895 - DNA, 422 bp, Zea Mays
tccagggtgagcaggtatgcagtgaggtacgcgactgtggggtcgtcctcaagcagctgctgctcttccaatgcacgcatcctggccatccaagcgggacggtctctctgaaagggcggaaagaatatgagcggggtgtcggccacttcttcttcatagatctgacacagggccctcaatgccttgcgagcgacgacttggcaggtgtctttgaatctatgcccagtagcagtgacactccattccacatggtgtggactggatccaatgtatacagtcacgacacacttctccgtgccatgctcgacgaattcacgaccatcatactctggctggctcctgattctgaggcggactgtgcatgctttcaacaacttggggaaaccatctatattctggcaaaagctggtttggcagcgaac

SEQ ID NO: 146896 - DNA, 344 bp, Zea Mays
cgcatgtcttctgctgaccaacacaaaacagctttccaaacccaccaaggccattatgaattcaaggtgatgccctttggcctttctggtgctcctgctacttttcaaggggcgatgaaccaaactctagcacctctgttgcggaaatcaatcctggtgttctttgatgatatcttaatatatagccctacatggtctcaccatttatctcacctggaatcagtctttcagctgctcaggcaggacaagtggcagattaaactatcaaagtgttcctttgccaaacaagaaattgcttacctcagacacgtaatttctatacatggagtgtccatggaccctgc

SEQ ID NO: 146897 - DNA, 465 bp, Zea Mays
tggctgacggctacgaactacgtagccgcggtcagccgagtcaagggtacacagtccttgacagcttggtatcagagcaccgtcatcgacgccctgtccagacgagacaccgaggagcacgagctgctggcgtaacaacacctcgtttcgacttcatcgagcgtctatgagaggcccaagccaccgacccggccctcgtcgccatctacgatgagatccgcgtaggcacgcacaaggcaccctggtccattgtgggcggcatggtcgccatggagggtcgcctctacataccagccgactcaccccttctgcaggagatcgtggccatggtacacaatgatggccacgagggcgtccaccgcaccctgcatcgacatcagcgtgacttccatttttcggccatgcgtcgtattgtgtaggagttcgtccaggcctgcagcacgtgctagagatacaagtcagacc

SEQ ID NO: 146898 - DNA, 939 bp, Zea Mays
gagcctcctcttttatacacccaggccaggctagagagaggaacaaagcaggttgacgataggttggaacttggagatgattggcgtggagatgggcgagatcagatagtttgcattaataactagcagagtaccaggtcaggacaaacatgatagagtatagatttttgcttagttttctattattgtcatgctgatctatcagctagtgaccttcccttagcttccagctagatcacaggcacatcaagcctgttgtggatgtgtagtgctgtaccagtacagtgtgtaatggttcttgtatatgcttgtttttttttctttgtctgtgtatttagcagccacgatcaacgaggttggttggtcgcagcagaaagtctttatctccaaataattaactagaaacaagaaagaaagctaaacatgcatagagagtctatatgtacgcgttcagggtccatggactattctatacgtctcccaatcagtacagttgtggcatggaatttctacctccgttttccacttgctgcagcagtcggcaatatgaagtgcatgtatgcatcacttgagagttgacacctcaaactctgccaagaagaaagaaaaaagaacccaagactactgcattgttgattgtcagagatgaaaaattaaaacccatgttccatgtaaatggctcacatgcattgcgactagctaaacctcttatgaaattagaacagggcagggaatcggcgggggggtcaatccaaaggatgcctctgtaatgttctcttggcattgtattcacgtggtcagctgtctccctgtggatcattgctccaccccaattcaattttaaatattagacacggccacatcatgataggttcaatctaacccacataaattaaagggtcactaaacattgcatagcagaagacgacagagtattag

SEQ ID NO: 146899 - DNA, 552 bp, Zea Mays
ttcagttatggctacttggtgccttgatctcacattcagagtttgatgtggttgacttccttatttgtgagatcgaggatacagtattggatggtctccgtgcttgccgtcagctgccctatgcgcattatctctatcacatcttcgcacagctgatcaggcctccttagttccagggcaccctcgaggcctctcgccttcagtttggttcctatcgtccagcccctgaggacccagtccatgtgccagatccagtatcagatgttcaggctaaggatgagaccttcacacagttcaagacctagggtgcagttgctgacacatcttcagatgatgatgaggaccttgggatcccgccaccgcctcctatgccacctcgctcacatgatcacgaggcgggtagttccagtgctgctcttgctgccccacctgctattgaccctgctctagccgcgattcttcagtctcttacacagcagcaggctcatctggagcagagcaggctcgataggcagccatccaatagcagatgtccgaacggatgctctctat

SEQ ID NO: 146900 - DNA, 330 bp, Zea Mays
ccaccaccccccatgaataccgcagaaggccgctccttcaactgttccctgcgtgactgcaagccccagagtaggctcgaacatggcctcgggaagacttccgcctcgcccaagcgtggcttcggccttgataatatagacaaaaggatacccaacgtcaccaaaaaactatagagctgacgccagataccctacgtattgccaagagctttttgccatacttaccactgctccaaccactacgactcggatagctcctccatcggacaggttcgggtacgtgtccgagccccggaccttggcctcggctctctgctcggtgaaagatat

SEQ ID NO: 146901 - DNA, 490 bp, Zea Mays
tacatactcctttgtgtatcacaatatatacaaaaaataaccacatgggggacctgttcaattagctactagtttgattgatgagccacatcgtgaattaaagtgatacaaccgatatgttattttgatccatcggccggactgctagctagtttgagtaccggcccaagaatccaagaacccaagaattttgagcaatcggcatcgacccaagaaaccctagcactaagatttgtagttcatgggaaagaagttagaggtgggggacgtgagtaccagcgagaagcagccatgtaaggaatagcgtcggtcagccagctatcgttccccttgtggacgcccatcagctggtgaagacgccaccgccagatctcgtatcgtagccgtcggtcaacctttgtggatctcgtgcagccggtcagccttgtggatcttgtcgatgttacgttgctgcagccacctccgtcccgtagctgccggagctgcctct

SEQ ID NO: 146902 - DNA, 562 bp, Zea Mays
gtgaaagagtcgggcaggatgtgaccaatttactagtatgatataatacaatgttttttcctcgaatttcatagttgaatccaagcagattcaaaatctggtcccgtccccgtgagccaacaaagactgatcattcgctttcgactcggccgagtccactacgtgatgcttgatgccgcagcgggacaatcctcgccgtggaccacggaacaccacgttttgtagcgttctggatcttgacccaagcgagtcatgggttaacaggatcacggttagacagcacaccaccaccgtttctagtggctggtcaggtcagaggttgatggcgggatgtgacggctcgcaagagaataattgcataaacatgcgtcgggggacatagctagatgcgcatgatggatcgaactagcgtcaggacattctactgcaacttaattaattaactgaacacaacttcttatagtcagttctcgatttgttttaccactgtaaaatcaagtacttgtttgttgatcctaacactaaagtatttaacatgaaggaaacaacaagtacagtcata

SEQ ID NO: 146903 - DNA, 372 bp, Zea Mays
tgggcagttgcgatggttgagaaaattccaggtggagatcagcaacaatggcgggattttttttgttgaggcgagaggataacagagagtgattttttttcgctagctggttgcatccgcaagttgaagaaagcactcggctgaaaggtggaggagatgtctggcgaacggcgatgagctcaccccgttcccacacagcgtcggtggtggtgcctcgctgctcacgatggatctaatctcaactccggctccgtttgttacgcaggtgctgctgggagtttgcttgcttatgtcacccatgatgatacggtgatgtcattttcggcaagggaataaagaaagggaaaaatcatgcatggcaaggacgtgtgg

SEQ ID NO: 146904 - DNA, 574 bp, Zea Mays
gtgcaagtcagtacctgatatatactttaatacatttaaagaacaaggttcatattgcacgaataaagggttaggggtgagattggatgattaggtattgtggtagcagtgcaattggtctgtttgattttgtgacaaaataaagaagaaatacattctcttgatcatgaaatggcagtaaggatagaattttttcattggttgagtttgtgcctgaaggctgacagtggatctatttggcatatttgtgctgccatggtgcttttctatagtgttgtttgctgttttatataaaataagaaggcccttacaataaactaaaccaacctaggaggaactaggtacattgcaaaaagaggactttagctaatgggggtgcacgcccatatctcccaccaactgagctaggctcaaatcctgtttttgtaacatataagattgatttagtagagtgctgatgaggtctagcatctactacattgtaatggtatctgaatggaaccaaagcattttaaagcatgaatccatatagttactttagatgatatagttgacttaataacttataatctgt

SEQ ID NO: 146905 - DNA, 733 bp, Zea Mays
gcacatgggccatcgatgtcagctttgacctcaataaaaaacgtcgcgctccctcaaccaccattcgcgattcttgtgactcggctcaacggtcggccaccattggcggggtctgtaactcgccccacccgcggactccgcgctcctataaaatctacccgaattgcgccgccgtcacctgggttgatgccgtgagggaaagaaagggtgaaacacctcgtgttgaaccacatcttcggcgtcgctccgaccggcagtcaggggcagggtgcttcgtcgtggcatggcacgagtgtctgtagcaccggtcgatggtaggcggcttcggtgatcgcggaatttctcaccagcgcaatatttctccgtgggaccacatcgcgtcgtgaacaacaccgcggggacctcgtgcttcggtaatgccctcggatcgactctatacctcctctgcattgtttagcacctggttacgctttgaatcgagcccgggcgtgaccattgggcgctccccgatgatggcgccgccgtgggcggaatccgactgacgtggggcgcggtcgggcgagggagacgtgtccctaggcgtcaatcaaggcttcaacgaccgagattagaagatcgtataatgtttcacctggttgatcatgaaccgttgatccacagatggacgtaggacgttagatcgaggcactttaaaatctgcaccatagatctcgggatcaacggctgtggtgcg

SEQ ID NO: 146906 - DNA, 507 bp, Zea Mays
atcaagaggagcaggtcagcgcagggcagccgaaggaaaacgcggaggaggaggaggacgtagccgtggaggagaagatcatacaggtggaggcggatatgctggagctgcaagaggagaggtcgtagagcagcgaggtcgtggagacagaaatagaggccaatgagcgcacggacgatggctcactgaccgtcattggagaagaagttgcaacacctgagggagaagacgagtggcggaagagaagatcgtcgaggagatccagcgagcagaggtgactgagaactcggaggcgaacgcaaactctgaggaaccagaccaacaaaactgacgtcgtctccgaagaacccaaggaatagtctatggtgatgagcacaggatctgggaggtgaatggagagcacgggatctgggaggtgaaggggatcgcgggggcaatggagttgattgcgagggcggtcgcggacgtgggaatgagcggagcggaggatgtcgcgggtgggagtgg

SEQ ID NO: 146907 - DNA, 411 bp, Zea Mays
tttgctcggatttgaagtagaggttttcatgttgtctagttcaagtcatttcccctgaaaattcgctacattgggatacatgcgttattcagttgttttcactgatttttgctgggatctgcggtagatgttttcatttttctttcttttccctgaaaattcacaaggtcacgatcgactcgttattgccgctttctcaggattgttgcgtttgccattgtcagtaatgtatttttccttctaggaagtttactgatcgttgttatggtgctctgtttttagattccatggccaaaaataataaatgtggtaaaattaattgtcattgctggatttgaatctctctttgatggtattggttgtggcaggtcagattctaccatcagtgtaatgatagagcgatacgtgagg

SEQ ID NO: 146908 - DNA, 729 bp, Zea Mays
agatcctatgcaagatcagaagctcacaaaataaatagtactataaatgattaaatgatttatcaaataattacaggacttgggaagtgctctatacataacaccttttccacctttttaatgatacaaatagttcttagcatcttttaaaatgtgtccctaagcttgcatgcacgattgttaatggccagatttttgggaaggtctttgctgttggtaattgtaagtacaatcttgaatatcagtttgaaccatgtttaggctgcattatgtgctgtgaattcccgtggaaatatattgggaagaactacaaattatttctcacataaacctaaatagtaaagtagatctgtttacagagcagaaattttgaagtgtcatagataggctgagaatatgtagtcacgagcagcacattactacttgaggccatcaatgatgtttttcgttctccaacctatgtaactgtgttattcttttccttcttaaatgcaaaacgaatctcttgtcctttttctttcaaattctttgcgttaactgagtggctcttacatatagaaataaagttgctgcaagaggcttcatacgaaactgaaaacttgttagtctttaaatcatttagagggcgcctgaagggcgccaaatgttctagtcttggatataaaaagagtcgaagcacaaagaatgaattccctgaactttgccctctcgatcgatcagctggttttc

SEQ ID NO: 146909 - DNA, 954 bp, Zea Mays
caaagtttttaaagaagtcaacggcgtcatatatttatgaacggaggaagtatctgatttcccattgattaaaccatgtgttgtttcttaacagtgacatatttttctagtaacctcagccatttctgtgattcagatcaaagaaataacctgtggcgtctcccagatatataggtctgtttggcagagctggcgatccaagaaatttgtggatcgcagattcttgagctgggtattcctagctccagaaatctgagaatctggagctgttggtactgtgttgtttggcctaaccgtttccttattctagatatcttcttcattttagcatatagactccagatctgagagctcagagctggggatgtaccacataggaaggtaaaattctgaaaagacaaaactaacaccataacaaccataatgacaccatagacaaatatgtccatcaaatgaacgcaaattagcttcccgttttatttaattacacatactaactgagaagttaaagaatcatcattagctcaaataccatgaccagtaagtagtgttaaagtttaccatgttgtatcactcaaagaaaataataaatgggaaacatatacagggtccaaggctggcccagaaacattacaactacaacaccactgtctacaagcattgatgcatactgagttgagtggtagcatagcgagtacctagttccttatgtctaaatgcttgtttaaaaacacacagaaaacagtatacatataagaatgatcattgaaaaaactttttttctcttatacacgccaccaactattttgagcagaagtgtatgaggatcctttggaaaatttgcagcactaagctgtgaaacttgcaatgtgaaaactaaaaaggtcatccagcaagtatagaacaatgacctactaatttgttttagttccaaacagtgtcagtgaagcttat

SEQ ID NO: 146910 - DNA, 421 bp, Zea Mays
agatcatggagagcgcaaacactggttctggtgtctgtgaagggttaggctgctgcagcattccaatgcgtggcggccaaggcttcactctcaaactaggtcgcctcaatagtaccattccacagttcggtgaagcgctctccagtgttaagattatcgtttcccaaaactatgaatttgttactgatgatgtttatgcaagttgggtgaatacaagcaatgttcagggcatgctacttgacattgcaatcacggaccaaccaaactgcgcgagtgcccagtcccaagagaacaaggatacctacgcatgtactagtgaaagcatctgcaacgacgttctaccaccagtagtatctcaaggaggctacagttgcttctgccctggtcaaatagagggcaacccctatattgaagatggctg

SEQ ID NO: 146911 - DNA, 549 bp, Zea Mays
ggttaccatatagcctgttcatccagcaaagggccatctttttccctttatatctgtttatcataaaagtggcttccttttcaggttccagctgaggcacgaaacgatgccttgctggcagtacttttcgtttcgttcgttgtggcgtaaacaggtccaaggtgattcgatagtactacctcactgcctctatcattttatccaatccaaggttatggttataaaatccttttgggcgaggtactaattatctgctaggagtgtactacgcctcagcaagtcaacggcgatagcttatgggacgggagtgtcctctgttaaggtgacagtgacaacgctccgttgagcgccatgtgcattatctaattgagcaactactttcccaacaaccacatagtactagtaaatataaatatcgttgagactgtcaaactagataaacacggagtactctgttggggctcatcttaacgcaatgatttaagaggcaactactggctttgactaccatgtactagtagtagcatagaaggtcatctgctctgttat

SEQ ID NO: 146912 - DNA, 715 bp, Zea Mays
tgctgattttgtcttcaagaacattcaacctttgaaggacagggcatacccggcctatctgtaccgaggtctagctgactcaacccgggtcaccaacagaagaattcctgctgtagacttggtgaaccggcttgaaatgatacttagaggcaaggtatcaaatgttggcgcccctgtcgcatactcggtctggaacctgcctccttccaaggcctttactcattttgtgtcgaatcctcctgctgctgatggcggtttgggccttagagtgcgaccctctgccgaagaagttagtgctttggttgcttcgcttggagaaattcctgatgatgaatggcaggtccactttgaggtgcctttggatcctagtgatgcagagataagtgctatgcttgatatgctagccgaggactcttctgatgctgctcctgctgggacattggtggtggcgtctctcacggaagctggtacaaccttggatattcagaggcctgtcagtgttcgcccgaagcgcccttgccgagccaatcaacttgattctcctgctgatgagcagaaaaagaaaaagagacgtcttcggcgagtatctagcttggattgggatgctggcccttcggttcctgctgttgaggaagtgcctgtgcctgaatttaccgacgctgaccccaatgggtgtgatccatctgtgttgctgatgaaaacgagggggaggaag

SEQ ID NO: 146913 - DNA, 374 bp, Zea Mays
gggcagggcctggtccttgctatggtcactgcatggatttggcagctcaacagtatcttgttactgtctcaggaaatgacggttagctcctatatgcacagctcctcttaaatgtatttctgcaataattactatgatgtcacacttatttctagaaggccattttatttgaccagtaacactcttttaacttcctttttccataatgtgtatccttgtattctgctaacaagataagtagaaaacagagctacaatattgtctgctttaggacaatccagttgagaattacagccgggttaacaagatttttaatgtggattctcaaccagtatgttgctgctcacatttccaactttgaaaatgcacttcaa

SEQ ID NO: 146914 - DNA, 302 bp, Zea Mays
ggtatactgatcggacaccgggcaaaggaaaactcactgtaacaataaactttcatccgcaggggtctcaaacgccaggcacgcagatagcaggttcagctgaaccaaagacagttttgggaaaacaaactcaaatcagtactcccccataaggcaaactagttcctcctaggttgatgtaggttttcaaaaggcaaactagacaaatcggagcactaatcccaggaaggaatgtttggatttcaggggcagcgaaggaacaaccaaaaagagcaaaacatccatcgaagtccaatcaatct

SEQ ID NO: 146915 - DNA, 408 bp, Zea Mays
gtgcctgaaaaatttgggttcaattggagtaagtttggctggtttgggcatttcatcgaacacatggtgtgcggggagttagggttttagggaaatggccatttgaggtatgaaaaccctcccgaaggagctaggatcctgcagggatacataatggggacaaagggacacattccaccaactggattcattggatttcacagaaattggatttttgcacaagggggtggtgacttggatgccacagagcctttcaaaccgagagcaaggagatagagggaaggagaggggggatgactgctcaccggagaggaaagggtcacggagagcaccaggtcgccggagagacgccggtgggggaagatcgccggcgctggggaagaatcgccagagacagagaggaaggag

SEQ ID NO: 146916 - DNA, 537 bp, Zea Mays
ttttttgcgggggattttttgcgtgtatattacatggctccgcctcattaaaaacctcaccccccgggaggaaaagagtgcgggccggaataaagttgttttgcgaattacaagggcgagctggccctgaggagtcaaacaaaaaatttgcggagattgtcaatgttccaagaatgctctaagtcttcgccggatggcgttgtgagcctgtacacgctgggggacgccttcgtcttgacgatgaaatggccctcccactttggttctagcttgccccgggcctctgtccgagctgtccggactagtacgaggtctccttcgttgaattccctcgggatgactgtgtggtcgtgccatgcttttgtttgagcttggtatttgtttagagcctgtagggaaaagacgcggtctccgtcaatgaggtccttcgaagtaggctcgtctacgtcggggttggctaacgtgactgtccgtggtgacccatgttttatttcttgcggggtcatggcctccgatccatatagaaggcaaaaaggg

SEQ ID NO: 146917 - DNA, 1403 bp, Zea Mays
ctatacacttaatacaaaaggaactacaatgtgtacgccgtggaaccgatttcagattcataagtaaatacagaaggaaaaaaatacagaacgatgtgggtgtgcatgttcacacttatacagatcattacaataacaagaagttatccatcggaaagtaaacaaaagcctcccctgcccctacactaattaagtaaacaaggcccaataaacagttacaatcctgagttaaaataagggcaccaactactatgggcacacaacaaagtagcgtaagtagtaacactaaaactaaaacctcagtaagccttaatacaatcgggaaatactaaagtgtttgctctaagaattagtcaatactaaaaaatcttgtttcagccagtgagactcattccggggtgagtcttagagcgcggagtctgcaatttggatagtagagagcagtctaatgagtggactaagagcagctctagtgttggtaggaatctaacctcgcagaaggaaactgaactatcaacactgcagcagtcaaccgctcactgtcagtagcagaattcgacctccaaacatggctctgtgcgagggagtaaaatattcagccttcgctgctctggcctctttagtgcagtacaatttcctctttctcttggctgttttggagattgaactcgatgagaaaggagtagattacactattttatttggttgtaggctccaccaaatcgaactcagcagtggaggcggcgaactcagcagtggaggcacaggtcgaaggaagggggagacgccatctagccacggagatgccatctagcttgaccttctcgacttgttcttcggcggtggcttttgcgaaggaagaaattagaaccattaagtagattgaagggcgaggaaaaacaatgaagcaagaagagacggtcgtacaatacctaggggtggagacggtggcgaattggggctagggttagggttttgggcggggcgctggaggctgcgggtgaagcggaggaggtggttgttgtggccgttcggcgtaggggcggcagcagggagacgacgatccttggggacgacggtgacaggttcatcgatgtcgtcgtcatcgagatcgccgcagaggtcgaagggaggggagacaccatctagccacggagacacccaagaggcaagaggcaagaggacggaatcgaatcgaggatgcgcagtggggatgggtgctcttcctcgtcggttcacacctctctcacttaccgaggagaggaagaagagggcgagaggcagcagcgagcgtgtgtgacccatgctccttaggcgctagacatgcgggggcgacagcgaggatcccgcatggttgttgggatggaggcagctgcgcgcatggcggggatgggggaggctgc

SEQ ID NO: 146918 - DNA, 873 bp, Zea Mays
ctgacatgtgggcgctcctcgtcaggtccatctccctcacaaacaactcccgctcgttacgctgagaactccgagctccgccgcccgaacgcttagcgagctcgccgcggaatccgcgattcgatcctctaactaaccggccgaaatcctcgttgcctgcccgcccctatttaaagcaccggttgaggcattgccctcaccccaagccgaccgtgaagcttccattgccgccgcggatacattcggccgacgacgccaagggtcgtgccgccgttcgggagtcgtaagctgggttccgggggggttcgccagaccacggggaaactctacgtgcgctcggaccgtggagattggcagctgcttggcgtgaattgctcgccggtgttgctgctccgccacggatccgcgagacgccgtggaccgcgcgcctgcaagctcgatcaacggtgaggacacctccgtaagtctcgccttaatctctgctatgtttaccgccccttaattttggtgattcgcgctcgggatctcgatttggcatactccggcgatggctccgccgcgcgtgagggcggcgccgccgtgtttggggcgggattgggtaaaacgatgggggccgttgatcgtgacgcggatgtccgagattagaagagggagtaacgcttcgtgcatgaatcggatccgttcgattttgatcggacggatcgggggagatttcggagtaattagatccgcgccgttgatcgcagaatggacgggccgtgcggcgtaccgcttcgcgggcggccagatctaatctggtgcgcacgtctcggatctgacggctcacggtgccccgtaccccttcgccgtgtcacaattgctaaagagtccctg

SEQ ID NO: 146919 - DNA, 432 bp, Zea Mays
caagaacattgttgagatgtaaaaaaaccatgcaaagtggtggagccagtggaaatgacaggaagaagcgagccgtcaccaacaataatggaggaaggtgcagtaatagagggagttgaagtttttgatatggtacccgcgttggaggtcatgtgggaggttgcacctgtgtcgaagtatcggtcggtctgctgaggcggagtcagggacacaatactgaaggcggatgcaagggactgagcgtcccaagatggagtggccgactgtgccaggatgccgtagggagactggggaacacttccctgcagagggtcagtgtgcagagtgtgctgcagcgaggcgcctccttgtcctagaagagtaccatgaacgtactgcccggtctggtgggccagcaacgcctggtgaggagcgatggaggccggagcagcg

SEQ ID NO: 146920 - DNA, 443 bp, Zea Mays
caccgaccgaagtagagtatgttttgctaggaagttgttgtgcataatttctatggatgaaagccatattgcttgattataggatcaaattctaccaagtcacaatgctttgtgatgatgaaagtgcaaacaagattgccaccaacatggctcaccactcaagaacaaaacatattgatatctaccaccatttcataagagatcatcaaggagaaggggatatcacagttgaaagtgtgagcacctgagaccaacttgctaatatatttaccaagccacatgataaagcccggttctacaaacttatgaatgaacttcttggtgtttcataccttgctccgacaagtaaatttatcgtgcgtgttccgggctccagagggtttgcacggaggtcacaagatttatactggttcgggtagaaaattcctacatccaatcatcgg

SEQ ID NO: 146921 - DNA, 555 bp, Zea Mays
tcttctcgagacatagatatctgactccacctgccttcttccttgagcatatgatgactggaagaaatcatttatctctcctctctccactctcctctcactccccctctctctaccgaccatgacatacacaggtactcctatcattcatactaccaaattttccaactaagaatcatctagcagttgccactagctaggaaactagggttcagcttttgaagagaaaagctaaagcaaagctgcaaaggtgtgacacacacacaggagtagtagaaggaagagggcagtagtactgtatatacttgagcaaatatgcgaagaagccttcttaagccccaacattctatatatcttcctgacaccaccagggggacagcatcatcacgaccattgaacaaagatgaaaggatgaagaagcaatgacaagagcatcaatcaagattacctaactgtcaggttttaaactttgaatcatgatgaacacagtttcctagctagctactccaagctttatatttacttctagcaacaacctgatgggctagctactgc

SEQ ID NO: 146922 - DNA, 735 bp, Zea Mays
aataaattgaagacgtctcaatgtatgaacaaaatgatacatcagaagaaagaaagaaagaaagggtggacattgatcatattttgagaagatggatattcaatgtaatatcaagataaccaagaagttaaacccttttcggatcggttcagccaccatggtgctgctaagcctccaccattcttcaaaggagagctcactaggccgaggcgctacctccagagtgcccaagatacgcagcagctcagcccacacttggcatgcaaaaacacatcctgtgttgcttccaatgcaaccgctactcagatggagatagaggagatcaaagataaatggagttccaaaagtatgacggctattaggtggatgaaccatcagtcagatgactatggagcttcaggtttcgtagttataaatgttattcgttaagattattcgcttccgctataaccttggtcagtaataacatatttgtatgatttatttaaagtattatgtgatggtactttcactgatgacgtcgttgtgtatgtaaatttgatccttacgcatacatgattcgcattcgattgtgttcttaaaaccggactcgacatcactgaagacaaccatttaccaaacataaatcaatacatgtggatgatgggtactggaagtaacgctgagagaatgcattaaaacttgcctgcatgccgtgcttccataaagcaacatcaccgtggcggtgacctgtta

SEQ ID NO: 146923 - DNA, 438 bp, Zea Mays
ggacctgacgctctacattttgtcatgtttttttggcagttctaccaccatcgatttatactgtggctatgtggaggtgtcatcctacacggtgataggttttcttagtacatagcagcttgaggaaaatgtccgatttcgatgaacaggatgacatattcttggagacatctgatgatacaagaagttcggcatatttttcagctaggtgcagcacaagtgaacaattatcagcatcatggggacctgaggatgagctctggacaagtgaattgctgagtgtcaatgaaaggcggcatagattcctggttcggatgggctttgctaaacctattcctactggaatcaccttttcacagtggcagggagaaattttggctgatcgtgcatttcgcgacctggaggacagaattaacagcatctgttcttcatatcggc

SEQ ID NO: 146924 - DNA, 876 bp, Zea Mays
tgtagattacatacactcagcgaagggtcactagacccaccgcacaaataaatacaattgtgccctccactaccgccggacaacgcgagggcaccacacactacatcggctcaaccttcggaatgatgcccgcctccctataattgaacaacattatttttaattcctcaccctcaaaaagatcccgcagatccccttcaccaatactcgtcccaatcggcgaagacagtagatcttgtttgccaaaccgatccactcgaaggcgggtccgctccacccccatccgacggcgcctaccacttcgcgacatctcaccaacactatgcttcaaaaccacttttcgtcgccgtcgttcgatcctcgcgctggggagatcagacacctcgccaacctccaaccgcggcgaggactccgccgcggccgcatctaatgcaacaaaataatccaaatcttcacccgacgactcttcgctctaggaaaacgtactcccaaactcatcatcaaacgaaaaagactcagattcagaaccagacacactataatcagcaggcactacggtagcggccaccacaaaattcgtatcgtcagcaagggttgtctgcgcaggcccacacgtcggaacctgcgcagcaactgagttttagtatcacaaaaacaaaatcctacatccaacacccctagcactatcccgccacctgcgaagggcgggccgacgccgccgggtcttcggcaactggcgcgaccgccaccgaagtgtcttcaccagtcggcacggcggcctccacaggtccctcgccaacatcagtcggcgccggcgactcctcgatccccgccctcacacccactaccagaggcaccgtgctctccaggtcaccg

SEQ ID NO: 146925 - DNA, 863 bp, Zea Mays
attaacatatgaacataatcatcagtgagcaaaacaaacgcagttcatcagttcatcaattgatattaacatatgaacataatcatcaggttacctctgtgccaaacgcagctcgacagatcaaggcagttcaagacagcagttcatcagtgagcaaaacatccggataccagcaacagcaagcagatccagatagcgatttcccaacaaacaacatttcagttgtgagtagtagatccggtgtaaactaaacagttcatcagtgagcaaaacatttcaatagtggatgaggttacctctgtgctagacagggagtgacagtgagcatcagatccggtcaccagtgatagtgagcagcagatccggagcaccggtaccgtcgccgactcgccgtggagatcgatggagagccgacgcgcactggttcctcacggatccacaaaacttggagcagctggagcagggaggaggaggcgggggagcaccagatgctgactagccgcgccacgacgccgcagggaggagggagcagggaggagggagcaggtgcgcaccggagctctggaggagtgagcactggatgtgtcgcgccggtgggagggagcagggaggtgggagtaccggagctatggaggaccagagcagggaggtgggagtaccagagctatggaggaccggagcagggaggtgggagtaccggaccgaggcagccgcgcgcccgcgcaccgtaccgagagcaccggacgcgcacgggaccaagagcaccggaggagcaacggagccacggaggcagccaagcacggagagcgggagaggaacgccgccgccgagcacggagaggaacgccgccgccagagaccgag

SEQ ID NO: 146926 - DNA, 433 bp, Zea Mays
gctaatcggaggcgagagtgggtgctctaggttcgtgataagctaacggagcaagccggggcatcaatttatagtgattaacagcggtggctccaaattttgggaagaaagctggcggcctaagcaaggtgagtcaccggagtgcagctactgtggcgctcaacggggtaaagaccctggcagtaaacgggttgtccactgcgacgtcttgcaacatggtaacaagtgtaagcacgtggcacgactacgaagggcgacgaactccgacgaggacacattggtcaatcgcacgacaagtggcatggtgaatagtccggtgataaggctccaactcttccctgcgttgagatctttcaccgccagccattatccgcacaccaaagcgcatgaatcgcgacgactggcgtaaatcgcggcgtaagttcatcggcgg

SEQ ID NO: 146927 - DNA, 299 bp, Zea Mays
atcaagaggatgcatcctttacgaccaagttcagaacaagcacgggttcagttaagaatcaacaagattccccgatgaagagtgtgtacaactagagcacgtacgagccttcatgtcagcatcctcgttgtccgacgccgattggaggagagaagataggttggattaccgaggtcggcttgtcttggatgggaagaagattgttttacatagtttgatcacgctagagagtacatagtttgatcattagcctctctccctcaccccgtctcatcatacaagggattcttctctggctg

SEQ ID NO: 146928 - DNA, 520 bp, Zea Mays
gaatttgctgctatcaccgtgagttctccgcgctggctgactgacatacaacagtgttaccaacaagactcccaggcaatgaagcttttaactgagttgactgcaggttctggcacctcgggcaattatactctgcagcatgggcttattaagtacaaaggcagactatggttgggcaataacttggctctccaacagaaggtaatatcttcgctccacgacagtgctgttggtggccattccggcttcccagttacttatcaacgcgttaaacagttgtttgcctggccatccatgaagtctgttgttcgggattttgtccgttcatgtgaaatctgctcccgcgccaaaccagatcggtctcggtaccctggtttattacagccactcaaggttccatcacacgcttggcaagttatctccatggattttattgaaggcttacccaagtctggcaagtcagactgcattttggtggtagtggacacattctcaaagttcagtcacttcattgcccttt

SEQ ID NO: 146929 - DNA, 367 bp, Zea Mays
tcaacaacccttgaatatctgcatcaacagtctcatgttgctcctcctgcactttttctactaataccaaagaccaaacatcattccctgagatccatttttgcacatgtaatgctgaaacaagctctacctgagaactggtctgattcccatcaccatacagagtaacttgttgatcctcatccttaaactgcaacactttattgacccaatcacactccataggattgtgttgccttaaccactgataacccaaaatagcatcaaaagtccccaaaggtagaattctcatgtcagtgtgataaaaatgcccatgtgcccaccattccaaattcttcaccatagcctggctgatcataaactccca

SEQ ID NO: 146930 - DNA, 1126 bp, Zea Mays
atctttgccacttattagctaacatgtaacatgttgttttgttgcctggatttgcttcataatcaatgaatttggtctcctggcaaagctactttctgctgtcgtcatggcagattttagaatgctagaattatctgttcagtgatattatttgcatatttttggtcttttaatgttgtgtgataggtgataccaagtactgggaaattaatcatctcaaacaactagatatttttctccatctcaagctcaggctggcaattataatgctatggatcgctaaatcctgatgaatgattgagtgccgattcatcatccagattgtgttgtatgatatacatttgaaacgagttattttgcatatatatattggtgtatcttgactgccatctgtgtttctaaaaagtgctatatgcttagttggagggatagggttacacctaggctttctgtccatcaacaggtgctaggcggaagtgttttatcccttcatgaacagtctttgccgatatctatatgatcgcatgcaaaattcttcctttagccactgcaagagctatatagggccctcttgttttagcttctttctgacgagtttttttggagaatatgtctgtggagagaacctaagtatcgtggggattacatgcggagaaagataatgaattcatatagtttgggatcttggaagtaacgaattcctcatatcgcgacgacgaatcggctgatatgtgtttatattgattttggacgatttttatcatcgtgattctcatataagcgggtttgacagcacacaacaacttctggtggctagaatcagcaaaaaagagccctatatctcttctttggccaccgcgagaactagatcttttaatattcagtatgttatgatcttgataacctgaagcttattgccctgcttacagagcataatttgtaggactggattaatcctgagttaggttcatggctgtagtatgaatttgttaagggtggcaccgagacttatgtaccctgtcagcccttatctaccccaaatgtttcggtgtatattctttattctcagcctaccccaaatgtttcggtgtatattctttattctcagcctgccagttcggcgtca

SEQ ID NO: 146931 - DNA, 555 bp, Zea Mays
tgtgtctgaaatactgaacttgtggtgaactgaatgtgtactctgaactttgaactttggactgggcagaactctgaaatttggctgggcagagttctcagattgcttgtgaggactgggcagagttctcagaacacccagcaatctgaactgggctatatatctcagagaactgaactttgaacaaatagataactttgagctgggctataaaaatggttttggcatagctgggcaatctgaactgggctataaaaatggttttggcagagctggttttgtggatttgaatctgaactttgaactttggactgagctatatatctcagagaactgaactttgaacaaatagataactaacaaatctgagctggttttgtggatttgaatctgaactttgaacaaatagataaccaacaaatctgagctggttttgtggatttgaatctgaactttgaacaaatagataaccaacaaatctgagctggttttgtagttttgaatctgaacaaataactttggactgggcaactttgaactttggactgggcagag

SEQ ID NO: 146932 - DNA, 765 bp, Zea Mays
ccttgctggagctagcctaacatggtaatcaaagcctatatccaatttttttctcgcttccactaaacctaggggttgtcgcacccctcctggccactgacctcccaaaaggcgttgcctccccttcggcctccatgcctttggacacaaacgctgacgtcctcaaagagtggcgtgtcgccctggctgtcgctgccaacgatagcgaaggtaaggccgctgccacatgtcgtcacgtgttagctgcccactagctccttgatgaagagcaaacaattgttgacgatcttgagaaggtctccgtagtcaaaaaactgttgtcgtcttccacaactacggagaccacgaccgactctttatcatacgccgagacctcgctaacttccacatcagcagttgtcgttcagtcaacatcgttctagacatctcatcgaccagttacgcccgttggcgtgatatcaagttgctagcccttatgagatacgccctcgtcgaccacattgagtttgatgacaccctccccaatgatcgctattggatccagatggacattgtcgccctctactagcccaccaacacgatctcccctgaacttcaggaggtcatcctaaaacgtggccgcaccatgcgacacatgtggttcgggacgatctcctcttggaggagatccacctagacaccttcggtccagctcctcctacgacgttctacttcaacaacacaccatcttcttcaaagtcatcgtgctccatgtcgcctcactcg

SEQ ID NO: 146933 - DNA, 689 bp, Zea Mays
ggattatcggagctgacgtcgggatttccgttcccacctcgtcggggtcctggcaggcaaataaatatcgaggcctcctcttggatcgaccaccgtgcgcgcagccgtgctctctgcccaaagccaatcgtccatgtgcgagtgagatcggtcaggggtgagaacctgggtgcgtgtgggtcaccggaatcgggtctcggagttcgtcgtagtcccgccctcaagatacatctgggtgattcacttgggaccgctgggtgcgtggtgacctcgacgctcgggaaatttctaccaacgccactgggattgtccatcgtcatcgggggctcatcgctggccgccttgcgccgtgtccttggcggctaattgcataattcacggtatgatcacccctcccggttttgtatcgtcttcaatttagtttttgcaccatacgagggcttgcatcgcgctcgggggtgagttctggtacggtgcggcaatggcgccgctgcggtgtgatggacaccgtcgtcgccggcgttttctcgggggaaacaccgtgggtcgtcgatctcaggagttgcggctaggattagatggagtcatgtagtggttatgatcgtaggatccccatcctgcgcgtagagatagatcaggggggtacgatctgggaccgttgattccagaacagacggacctgatgcaat

SEQ ID NO: 146934 - DNA, 300 bp, Zea Mays
ctgtgaaccagcccaagttcgatgctttggtgctgcttgcatgttggcgtggggcttggaagcttagccacgtgtttgagccatgttgtgctggcgccatcaaagtcttctctactgtgaaccggccgagctcaatcactttgcactacccttttatctagtcgctgcagggccagggcagtgaagtctcttctcgttcttgagttctagcgagagtgcatcgtgtgagtgttgtggttcatgttcacgtcggtgtttactctccccggccatcaggttcgatctgctcttgttcatcgc

SEQ ID NO: 146935 - DNA, 443 bp, Zea Mays
caggaagtttcagtaagcagaaactcacttcacaaggcacacctaggagaaaagggagatgcagaaattgtgggatatatggtcattgggctcaagactgtaagcgtcctaagagggagaatggcaaggaacaaaaacaaccagaggcaaatcttgcagttgctggtgatggtgttgaaactggggcacttctgtttgctgaagtacaaggcacagtgcatggagcaccacagtttgttcatttgtctgaagaaaaagtgatcccgatgatatgtcctgaaggcgtgtgggtacttgatactggtgccagtaatcacatgacaggtacaaagtctgcactctcacaccttgatgaatctgtgagtggatcagttagatttggggatgcctcaactgttaaaatatgtggtttgggagctctagatgttcagggaaagcaaaat

SEQ ID NO: 146936 - DNA, 467 bp, Zea Mays
cctcggcacctacctccaaggcacctccttccaacagccagcagagcaggactcaatactagggcagagcacgagtcaaccatgtcgacgctcaagaagcccagcaagccccgggagtagtgctcggtgagttccttgttgaatttactcccgctactgtgctttttgattcaggagcatcccattcctttatagccactaagtttgtgaaaaagcatggcatcccctctacacccctagctatccctttggtcacccgaaccccgggatcagacctcctatgccaactcaggtgctcccaagtcagaattctcttaagtggggtagtgttcctggcagacttaaccgtcttgccatcccaagggattgatgtgatcctaggaatggactggctaactaagcacaagggtatcatcagctgcgcaagtaagaccgtccttctcaccgatcggcaaggaaaagcattt

SEQ ID NO: 146937 - DNA, 844 bp, Zea Mays
gtttggacctgtttgtggttacgtctttagctcctctatagaagcagcttctccatagaagccacagcttttttacacgtcgtttggtaaggcagctcctcccttttcagtcatttggtcgaacaccttgtgtgtgtatttcagcgtgttccatccatgtccatgctcctgctacaatccctctacatagaggcatgtacaagctgccatcttctgcacagtcagggtggagccacccgcgaccatgctcccattcgccacgtcgccacagtcttcgagggctcgaggcgcaacccgccgccgccgtccagatcttcacgtagcaccgctgcattcacacgcacgcgagcggcgcggagctgttgggaagccagttttttcgtctctggctctcaaccctgaaaataactcttgctccacctccggagccgttttccgcatcgcgtttgggagagctccacaaaagagccagagccacctaggagccctcccaaacgggcactaattctaggcggacagacacataacacttgatactgatacaggaatacggggttcattggaacagaaaagacgttatgccaatcaactacagtagaaaaaaaaattccgtgtttatggaatataaataaaacaatagacaaaaactgcagcctcggtaatttctccggtcgccagtatactgtagtattagtgatagataaactgctcgggccaaactgcctgggatagttcaacgagtagaaggcccggacccatactgtacggctccatttcggccgcctgtctcgaataaaataacgcagaccttttggttcctggtacccagtaccacgttcttttt

SEQ ID NO: 146938 - DNA, 388 bp, Zea Mays
tgtgtcttgatcatagtccatatctaaattacgcccatgcttttactcttcctacgacccttgctgcgagttatttcatcgttccctgtttcgagtcatatcatcacacactacttcgttgcaacaaactctcccaccgccgcatcactttccacagttcaccttccttgtgcacatcatagatgtctactctagcccgaaaggtcccttctcctctttccattctgcagcatggtgcctctgtgtgcccatgaaagaggacagaatcaccatcttgtgagaaacaaattgcagcaccacatccaaacagaacaaggtaggagtgaaaaacatacaacaacaacaaaatcttataggcttaagcaagttagaataggctaaagttgaa

SEQ ID NO: 146939 - DNA, 348 bp, Zea Mays
atttcaatggttcataagacaagtcatattctatgagtgcataagcccatttaccaattctaccactcataatctggttttgcaacatgtatttgatcacatcgatttgaccggaaacggtgcaatgactagacatcaaatgacatctacacttggtgcatgcataaaacatgcataagcataacttctcgatgaaagtgtaccttgttcagcatccaccagccctccgacttaggtaggttaccacatgctcctttgcttcggtctcttgcgtcagaacagctccaataactttatcttcggctgcaatgtataatctgaatggtactcctacctgtggcgctttta

SEQ ID NO: 146940 - DNA, 372 bp, Zea Mays
gtggccacgaggaagcctggagctatggtgagagagggcttcgctcatcaaggtagtttagttcttagaaagcagctggtgcgaaggttggcctgtggaaatggtgaatgttatggttcgctgcactagccggctgctggtggcgagggtcttcgcgctgcatttcagcaatttcttgctccagtgctttgtctttttgctcctcatctatgatcatctgccttactctggcctgcatattggttcactgccacttggctgcaagtatctccctttgcttctataggtgattcttttttatgtgaagtgcttgtaatttgagttgatcttcgactgagatgcccaagacttcgccttcttccatgatgtctg

SEQ ID NO: 146941 - DNA, 582 bp, Zea Mays
tgcacatttcattaaaaataaaatgagctaatagttagttatttgtgtactataaaccgtccattttatgaaccatatatgtgatagaatcacttatttaaaagcaggaacatgccttgctcgcagtctcgcactagtgcactactgaatcatcatacagtctactagctaggaagtggttgaagagtaaatgttatctttccttctaaaaaagaaacaccataggaaaatgaaaatctctccggttagtatttaatgcaaacgccgaacaaatgctctttgggacggtgttattaaagacgttaaagccatcacggcacgcatgattctaaccgaacagtggactgattaacgagttggttttgtggttggagacgctccgattggttcacgatttgatcgatatatatgccgataagacgagtccacctcatgcgcttgcaccacacacatgcactatatacgtgctttggtgctgatggctatttgcgacctcgattccttagcgggtcccagcttacttagattaaacgtcacaattattgaataacatatatgatcattaatcacaaaccaaccttt

SEQ ID NO: 146942 - DNA, 275 bp, Zea Mays
atagaccatatgtgccaaaaaatgcctgaagccatggaacacacgacgctaccaacatgttcagtttggattgcgtactcttggcaggatgaagctgaactcacattttacgatagccaggaagtgaagcatttgcagctctgctagcccatcaaacaaccagataagaatcaaactacacaaggatagatgttactcacggaaaatgctcaattttgccacaaggttgagcattaagaagactagtgaccttaactgtagaagttgattcttac

SEQ ID NO: 146943 - DNA, 521 bp, Zea Mays
ctcagctttccttcgttaacccaaccgaacagtgtagcccctggcttatatccacaggctatggcacattttttaagctctgctttttcagcgtctgtcagtccttgcccaagtaaatcttgaaattcaaaatcttcttcttccaaaatgtcttcagcttgttctttccccttttcagtagctgtgctcgccgcggccacaacagattcttcctcagtcatttttaggagtatgttatcaataacttcaagtgtctcttccaggttcggatcttctgtggccccagtttcagccccggcagcttcggctgcgccagtttcagcttcgaaggtttctgctctggtggcttcggctacggcgcctttagcttcggcggtttcggcagtctggtcaatagcaattcttgatgccagtgtcggtgacggtgtcccatgaattacatctgctatttgaataatccttcgtttttcggcagtgcaggaccttcgtctgccgaagctgccttgtccttctgaaaaaac

SEQ ID NO: 146944 - DNA, 440 bp, Zea Mays
gcctatcgcaaccccttccagtgcccgaatggaagtgggaggaaataggcatggattttgtaaccggactgccctagacccaaaaagggaatgactctatctgggtgataatagaccatcttaccaaggtagcccacttcatcccagtgaaaactacctttggaggagccacccttgcccgaatatatcttaaagagatagtcagactccatggtattccacggaagatagtgtcagacagggtaacacagttcacttcaaaattttggatgagccttcagcaagctatgggcaccaagatagacttcagcaccgcctatcacccccagtcagatggtcagacagaaagggtcaacaaggtcctcgaggatttattaagatcctgtgtgttgacgtttgacaaaaattgggagtccagtttgccttatgcagagttctcg

SEQ ID NO: 146945 - DNA, 476 bp, Zea Mays
gacacagtcaattgggcagctctccttcagattatgaatgttaggggcttcccaccgcaatggtgtgtgcatgggtccatcaggtcctccccacctcccgctcggcccctggtttcactgcaaaaaaaggactccgacagggtgatcccctatcaccctatctcttccttcttgtcgccgatgtactccataatcatcacccgtgctgaccatgtagggatctccaactccaagctcaagacaattctgtgcaccattgccaaaacttcactggcctgaatatcaacttcgacaagagtaccctagcctagcccctatccatgccagctccgaaaatgcatcgcgccttgcatctcggtgttgcagtgcaaacttgaaagtctccccttgagctatatctaggtctcccattgtcaaccacgaaaatcaaattgtctatccacaataccttactgccgaaatccgaccgattcctc

SEQ ID NO: 146946 - DNA, 865 bp, Zea Mays
gggaatcttctgaagtagatccacaagctgcaatcaccaagtttttcgagctgcacaggcttatcgttcagcaaagtgctgtctggaaagcttacactcctgagcctagcaaagaatctcgaccggagaaggaaaaaccgtcgaggaaagcttctgcatctcatcatcaccagaacaaagctggcacacgcgacacagctaagaatcccgaaggtgcccagggcagtgagaagacggaatgggcccgggaggacggtttcaaggagatctgcaggtcatggattgttctgaggaaagaatcgcggtcgtggtttctgagcttcctggaggatgcacttgaatcaggattcatgtccgagggccaaaccaccaagaacacgagagaacgcgtgcggggacaacccaaacccaagggtggggacgggaggatcgcggtcctgctgtcgcagctcaaggagacgagcaactggctcgatcagctgctgcaggacgaggcggacacttccgcggacggtttggccgaaaccgttgaccagctgaagcagaaggtgtacaaatgcttgcttggaacggtcgaaaccgcggcgtcggcactcggaggaagataaaaaaattgatgtaatggtgacgaagacgagcattaagttattgggtgttcagtcctgcaacaggatgttggggtgaagaacacaatgaggggaagatgtaaatagtcgggttgctcatttttaagttataaactaatttatttttattttttgggaggtgggggtgggggaatttcctggtgttgcgtgtgaaatggcaattgattttcttgggtattcgaattgttacaaatgatcttgcgtgtcagcttttgaaa

SEQ ID NO: 146947 - DNA, 436 bp, Zea Mays
catggaaggagctctgactctgctggctaaaccatgacggggtgggtccagctggtctactgaagtttggtcccttgggtggaaatccaaatgatcgagtcttctggtgccggtcttgctgctgagcccgaagaacttggaactttcttttgagatgccctttttcttcctcctttgccctttcaacttgcatggccttgttggaaaggtgagagaaactgaggaagtcttggctagccagaattgttttgagttctggcctgagtcccttcaggaaacgggccatctttttgccctcggtactgacgtcatctggcgcgtagcgggctaactctgtgaacttgtgcacatattcgctgacagatcttccgtcttgagtcagttctcggaactcgtcctccttaagttgaacgagcccttggggcacatggtgctc

SEQ ID NO: 146948 - DNA, 931 bp, Zea Mays
ccacccgattacatacctgcggcccagattagatctcgatttacatgaatcggtacacaatcctagccactggatctagatcatgcggcccacagctcgccacaactcgggttcaccggatccgcctagatcgcatccaacggtcccagttttactgtgtgaaacggtatgcgcagggcaatcgcgcccgcccgatagggatcggacggccaggagccgttcaccttccccgaactaatctaaggcgttaatctatgatcggacggcgcccaatcaacgtccagctcacacatctatccctccctcacggtcaacgccggcggacccgtgcttcctcccaacggtggcgccatggccggtgcacaccaagtaggtgatcccccggcacaatcttcaaattaaatggcgaaatacagagcggagaccaaagtggggccatggggacggtactcaccctcggttgcgcggcccagagcttggaccgtggagagaagccgaccgcgatggtgtctgcacgctggtgaagatccttcgagtctccagttggcaattcggcgcggcgggggcacaagctcctttccctcaccccgaaaaagccccccggcacaccccagagcatggtggacagcgaatcgaaggtttccctccccgcggcggcgcccagacacccttgctctatttctctcttctcggtgctaagccctcttgattgcggcagccggtgttctctggactagtgccggctaggttactcgttccttgatctagcgcggtcaacatatgtatgcacaggaatggtcggggtgccgcacccgacgccgcgacgttggcgcgctcatccgccaagctcgggcgtgcggttggggaaggtggcctgacagcctgggcccaatcgctagtggttgatgccagggcacggtaccgggcccac

SEQ ID NO: 146949 - DNA, 597 bp, Zea Mays
tggacacattcaagcgtgatattatcattgaaactcgaaacaacgaacttaaaagaatatcctcacttcatccagcttatatggctctacaatacccattgctttttccatttggtgaacgtggctttcaagttggaatcctatacaatgacctaagtccagctcaaaacaatgcaagaagacatatgaccattcaggaatactattgctaccaatttcattacaggaaaaatcaaccaaatccatatttgtgttacggtttattatcaagtcaggctaaagtggatgccagagcatgcattgatgaaaatagattgaactatattattgccaatcaaaaaaacttgaggattgaaagcatacaaggtattacagatgcagttagccgtggttgtattagtggcgacgaaattgggaaaactatcatactatctgcgtcacatacaggaggtcgaagatatatgattcaaaattatcatgacagcatagctatctgccgagttcatggtccgcctgatttttttgtcacttttacatgcaatgcaaactggcctgagattttggacagcatgttcgagcgtggacagagccctccag

SEQ ID NO: 146950 - DNA, 707 bp, Zea Mays
gaccagcaagagcggcatgcgcacctcaggccagcctcttctctcaaccaaccacaggtaaattactgccctcgttgtttctaattgccctctgcctctgcgccataccattggtttgatctcgccctaggggatgatttggttttgatgagaatttgggatcttgattgtagctttagaaagcccagcaatggccacggaggacaccagcggttggtgaaccatcatggcaccaccagtttccagcctgcactcacgcatggttaaccaccttatttttattcttgtttatttctttttagggaagccattaaagggtttaactttcaatttggtagtatataaatattagtgggttgccagtatgattttgttatccctttttacctccagcttggggcatgaagctatatagaagaaattaccttttgctttctacttacatgacatatactaaatataaaaatctatacaacaatttcatgctaggacaagctcagctcgtccaaacttggatgaacaaaaacgtaatcaggtatcttgtcttctcttgtttatctgatattttgatgtatgttattcttatttgttgttcagtgcttgtttatttgactgctagaactagcaaaaatattgaatgtttcctaccactcatcttttgcattagtgcattgaacggctaaagattcaccgcagtaacatcgtca

SEQ ID NO: 146951 - DNA, 876 bp, Zea Mays
aaacactaaggcgaggtcgggattgcgtgaacggggctgaggcgggcagacggcggagggggaccctcgggcgaacccagggctgctccggcgagcaatacccgccgcagtgggggttaatccggcgctctagggtcgacataggttccggggagagggtaggggtgctctaggcctgagttcgtgctcggggaggggttgcagtggccggacgccgtgaagaagcggcggtccgacgaaggggggctccggcgagacaaaattccccacggtaaagtggagttggcacaaaatagggacgaggaagggtcacttacccagagatggcgcttggggtagcttggcacggcgcgaggaggctccggttggtcggacgtcgaagaatcgcggcggcggcgagctccgacctgcgcaggggagaggctgagcgtggaccgggcagaggagttgaggaaaggggaaaccaccgcgtgttcccggtgcgccaagctcagacgaagctcaccgtggccaagacgctggcagaagtccggtggtgacggcagaacggcgaagcgacagtggggggggggagggaggcggcgctgtggctgggtgagtgcgagggcggggagagcgagaatgtgaggcaggggcgagctgagggagtgtgcagggtctttacctagtgctcgggcgacgtgggcgggtcatggggacgtgggtgcacaccatgggcgcgacggttgcggaggaaggggcaggtctgacggacagggcccgtgagccagcgagagcgggtccgcgcgagtgcgcaacggtgctgacgggcggtcctgttgggcagagagaggagagcgagcgagcggggtgcgacaccgacaggtggggcccgcc

SEQ ID NO: 146952 - DNA, 291 bp, Zea Mays
caataggatggtggacaatcgctttgttgtggaaagccgatgagatatagtggattgtcaagccattgagatcctagaatgtgtcatactagatccttgtcgccagttgcgtaatagcaaagtagcctccctcagcgacgaatatcaaaacttctcaagacacaagaggactagtatgccagtctgatagtgtcacttgaggttgaagagaaggcaagattctaatggtaaggacgctaagtccagttcactacaaacttggtcataggaaattcggcaagaataaaggag

SEQ ID NO: 146953 - DNA, 437 bp, Zea Mays
aaactttaactaacagtggcacaaatggtttaagaaccgcatgagaggtaattcaacagtactcgtccatcactttggaaagatggtgcaattatgaagctagcaacaatccttacatcagtctctctctctcttttttttgcctaaatatgcatgcatggctcacacaactattgaggacataatagagatacaagttgactccctagcactagttaattagtagatacactacgtactcatatctgtcaacatggatgtaaataaagctttatgacttggacccataagaaattaggagaactagctacatatacttaggtcattggacatgttatctaatatggatctatatgtaaataaagttcactagtagaaaaaggctcaaagcctgcggtgcggtatatttttataggcagattcggttatcaatcgcc

SEQ ID NO: 146954 - DNA, 422 bp, Zea Mays
cctataaaacttgccttttagcttctgtgttagcctctttccatgtagaacgccatatgtttgatgctatttcacccccctgctttgttgctatggctaacatcctcgttaatatcctgtcatgatataaacatctagagcattcattctttctactccttaataatcctttggacttgttccaccaccaagtatctttagcttcacatccactccctttggttgctccacacacctttgaggcgaccttataaatgaaggtttctatcttcccttacatattatttgtgttatcttcttccttccaagtgccctcgttgattgcccttttttgacgcctcctatttcagtttccaccactttgttctcgcaatcttggcttgtttatccctacgagcacacacttgaaaacaaaagaccga

SEQ ID NO: 146955 - DNA, 553 bp, Zea Mays
cgcggtaaagaagaggatatagccaagggtgagataagtaaaacatagctctcgaattgagatagaaaagaggggatttcaacaagcagacctaagataagtatcaaggcaagatctacatattacaacggtaaggatgatatcaaacaaaagctcaacaaaggatgaagttaaggtaagacaagacttgcagggcaacaaagggaaaggaaacgaacaagagcgggatagggaaaacaacactctcagattgaaatggaataagtgaggcaaaaaaataggtaaacatcatggtaaatatggagagaggtcaagggtcaaaggtgatattaggcaaggatataaaggaagaggtaaatgtgcataaaaaaccaggaatctaggtacaaccaagaatagagttaagataagtcttgcaagtggtaaagtataggatataaccacgggtgagataagtaagagaccacacttgaactaaggtgggagattggaggttttagataacgaacatagtgtaatcaccaaggtaagattgagagatgagaagggtaaa

SEQ ID NO: 146956 - DNA, 574 bp, Zea Mays
gctagagagaaattcatcaatgagggtgatgaaaatactaaattctttcacctgttggctaaaggtcggaagaggagggtaaaaattcctttcctaaatcaggatgaagtctctgtgagtgatgatgttggtattaataaaattgctacttcttattataaagatctttttggtcactcggtgctttctagcatcaacatgtctaattgtaacatgaatcaattatctgactctgataggtcttgcttgacggctcctttctcagtggaggagattaagaaagtgatttttgagatgaaacataatagtgcccctgggcctgatggctttcctgctgaattctttcaaaccttttgggatactattcagttggatattgtgcaattattcaatgacttttataatgatagtcttaaaattgagagactgaattatggggtggtaaccttactaccaaaagtggataacgcagctgacatgaaaaatttcagacctatttgccttttaaatgtgtgctataagattatttccaaagtcttgaataacagactggcgagttgtatcacaaaagtga

SEQ ID NO: 146957 - DNA, 303 bp, Zea Mays
tgcacattgaattgctttcctgttccattttctttgtcactagttgcttgtcacaactacatcttaatttatggacgtggggcatataaaagaacttgcataataaggcttaacaatggatggttggattggttgggacgtgatcccagccagccgattccctgatcagactgcattagaaacattctccagtttctgaagcataggagctttctcttctcgagggtctgtagggcaacgtcctcattattatgcatttgctagttggggctaaattaaagatatcacaagcgaatgcatttc

SEQ ID NO: 146958 - DNA, 2003 bp, Zea Mays
gcatttctctgcgctttcaggagtcatggtttactagcagcacaaataatgcatggaatcatgtttgatgcttcttatctttctagaatcacggaggcatccagatgttatctatctatctataatattagttagtttttatttgctcatgtgcctcagtgcctagctaactactcgtgaacgcatgcagcaggtcgtccgcgattttctttttctatatgcagactatatatagctggcaaagactcaattaaagaagttacaaaagctaaggcaacaacactaaataaagtcgagagatgagataaaaccatacgacaatgttaatgtggttgtgtcaaatactaactaaagcgtaaagacactcccacacgatgagacgataaaaaggccggccgggtgggggccggtattcatgggcagggcttagtggctccttgctcacgaggcacgagcattcgacatggacggtggacctgacctcacccgtcatcagtcacttcgccgggccactcagctcagcgccaccattcgccgcgcgcgttggctgcgactgcgagagcctagcgccctagctagctgcgtctgcgtgacatgccgtctcactctcacagtctcacgtagcctgacgctctggccacggcccaccacgtgccatgcgacacgaggacggtcgcattatgctagctacgccggccgccatccttagctagcgctacgggcgtcgtcgcctcgtcgggtcgatgagggacgaacacgtgtgtactcaccggaggcggcggaagcggaggcgacggaggggtcctccctggccctggccgccctgaggtcggcgagtatgtccatctgccgccgcagggaccggccccgctccaggaactcctgctccttgcccctgtagaactggttcaccttgttgagctgcgcgtccaggcgcgcgaagaactcccgcgccgcggccgcgtcgccgtcgtcgtcggccaacggctccagcagctccgtctcgtacacgtcgccgccgccgcctctgctcgccgaccccgccagcttgcggcggtgcacctgcagtaactaggtgtgtgagtgtgacgaactgaacgcgcgcgaacacgtaaaagatcgtcttttgacgtgaggtctagctagctagcaggatggagacagacagaacatggactatgtatgctgcgtggacggtgcgtgtagcaacaggtgttagttcgcatcgtgtacgtacgtgtatgaccccatgacgatccctgttgggagcattggagccgaagaggccagcggggagcctgtccaggagccactgggacagagagagagaggcccgttccgcgtggtggccggcggcagtttcttgcgtgtcggttaggcctgctgcttggcgacggtcggcagcagcatggtgccgggcgtgctgcatcctcttgagatcctttttgagcaggcagtagtccaggaaggcatgcttccactcggggacaagctgcccctcaaactgcttggagaacttcaccatcttccctgccctggcctggttattatattattatgccgtcgtcgacgacgccgcgacgacgacgggtaccgatcgacggtcgtcggtcgagctcgatgacagtgatgccgctagctctggtgggggttgggagggggagccatggagatggttatataggcggctcgtggtcgagggtgaggggagaatcgcttcgcggctgttgggagccagcacattccgagatatactgcgcgccctaggcttctcgctgatgtagctcgctgccaacctctcacgaggacgccacttggggcgggggtggtggccgccgcatcggattggattctaggagggaatcgatggatgagagatatcaaagctatggaggtggtaatccaggagggtggtactggtacgtacgacgcggaagaacgagaagcagctggtgtgttttctatggagagacgaaggacgacgacgatgaaactgagtgctc

SEQ ID NO: 146959 - DNA, 302 bp, Zea Mays
ccttcaccgatctagcgaccataacagggacttggtggataacttggctcttcagcaaaatgtgcctgataatttggcaccagggtcatgcactattatgtcgaactataatgcttactttttttggctccatcaaatgtgtgccatggaaacagatttggaaaccttgggctccactcaactgcaaattctttatttggctggcaatcaagaatatatgttgggcatccaattgaccaactaaaactagcaaccatagtggatattcttcacctattcggcgaggcttccgggctgcatag

SEQ ID NO: 146960 - DNA, 696 bp, Zea Mays
gttctccagaacacctaaaatgtaaaatcggtgcgcatttttgtgtaattttttctagttcagaactgagactcatgtctatgtcccaaaacaattaagtgcacatatcgtatttcgaggagtcaactaatttcaaaatttattttatctattgacatttgaattgggtctgccaattacatccctataagtgagttaatatttattgtttatgggtcctaggcctgccacaaaaattttaagaaatatgagtataatgaactattgaaatgtacctgttctttcatctgcatcaattcattgcattagtaatttatcctgagggactggttctgttaacacgagaacttgttaatataaagtaataatatacacaaaatgcaaggcaaatgattaatgcctatacaataaatccctggtgtccagaatgattgcaagaacaagtcagatccataaattgaccttaccaagacaaaaaaaaaaactagtgaaaaatataatggtcttagtagcttcactaatatggtaattagagtacttacaattccaaagtccggtatatatatcgtagtagcttcactaatatgataccatgtgtctttttttgtcaactgtcatccacgaagtgcgcacaaattcttgatactatatactatctgtcaggctgctgaacatatgcagcttgatggacggagt

SEQ ID NO: 146961 - DNA, 424 bp, Zea Mays
taggagtacaaattttattaagtacttaagccttggtattgtacaaaattaggagttaaatgggtctgaagtttggctgtcaggctgagaatctgtatggttcagaaaaaccagtggtacagggccaacttcaggatcaggtggagctcgatttaatgggtaattggctaagacctttatagcaagattaaagttggattataggggagtaactttggtacagtcttcttctctggttgttgtacaaaaattaatgaaacaatagcccaaagttgctctgtcagaactgtgttgagatactaaaactgaattctagaacatgaatggtcacagtggaatggggccgaattggaagcgccatatctttaattccattcagttttgtaccaaggatcctatagtaagtttgaagactgatgttcag

SEQ ID NO: 146962 - DNA, 454 bp, Zea Mays
ctccataattcactctctgaataaagaaaaaataaattagaactcttcacgtgggtattttctactcaagttaattatatgtgttacttgacatcttagggcatttacatgttggtgctaatcactgcagctctgctagcgtgatggataacatctacttgtgcttgcccctaggttctggctattctcatgcgaatcccatattctcaactaagatggatcaactaatcttcttgagctcggctaatctccgcatgtagcgtagctctacttagatcgttctcatctccggcatatgggattcggctgttctcaacaccagatctggctgcaagtttccaacgggcatttgttttcatatgttcttctttacagggaaagtggtaaacgcaagtccctgccgtcgtagatttcccgaaccggcaaaagacaagcaaacaaaaagtctgagcaa

SEQ ID NO: 146963 - DNA, 395 bp, Zea Mays
ccatgataaagttttaaaaactgatgatcaaatagtttggcttgaggcgcgggggcggctgaggttagcgtgggtatagacatgagttctcggtagttttcttgcgaaaaccggcgagaaaaagtaggtctcgcggcgagaaacagcgaaaaccgtctctgttttaaaaaaacaattttgaaatcccaaaccgttcgggaacgtcggatttcgacagttttggtctggtttctcgttttccgcggtggcggggcgaggaatttgtttcgaacgggattggtaaacctgggtcccatgcgtcctagatctgggagaactgctgggacatgcttgtcgcggagctgcaatgcagccgcagtaccgatcgtgatggcagtcgaattattagcttcctt

SEQ ID NO: 146964 - DNA, 511 bp, Zea Mays
ctttttcttcctcttttgccctttccacttggatagcttttggagaggtgagagaagctgtggaagtcttggctggcgaggatggtcttaagctcgggtcttaatcctctcagaaaacgggccatttttctggactcggtgctgacatcctcaggcgcgtaacgggccagctctgtgaacttgtgcacatattcactgactgttctcccgccttgagttagctcccggaattcatcctccttgagttggactatcccctggggtacgtggtgctcacggaaagttgcttcgaattctgcctaggtagcatctctgacggcttcactgaaagtgtcccaccatgctaaagccattcctgaaagctgatgagctgccagttgaacacgctgattttcgggacatgcgatggcttccaacttcctcttgatcgtgcgaagccagtcatctgcatcgaggggattgctggaccccacgaacgtgggaggcttgagtctcaaaaattctcccatcc

SEQ ID NO: 146965 - DNA, 422 bp, Zea Mays
ttccaattgaagtgatgcttgccagaccctctcgtcctgatgaactcccatgccacggaaatatgtatcacatttgttcagccatggcaagagatcagaatcaccatcataatgaggaaaagagaaattgggccggcgtggtcctctgtcgtcgtggcgatcatggtgtccgccgagaatgccccggcgaccacttccatgtccgtcgtcactgccaccagaggcagtgtgccccgcgccaacatggctctcgagtacaggacccgtaggcagggtcgtcgagggcgaaggttgtacccgcagcgagcccgtctgggtggaggggtcctgctctaggagagtgatgcactgcacatgagtgtccaatcgatgattcatggtggcgagttgccccagaatgcgatcaagcttcttagagtccg

SEQ ID NO: 146966 - DNA, 368 bp, Zea Mays
agttcagttttcagagcatgccactgaactctgaaaatgctacttaatttctgaaaaccgagttcagttatcttcagttagcttcagttaggcaaagtgacagaaaaccgagcagacagaactgaactctgaaaatgctactgaatttcagacagaacctaacttgttttgacagaactgaactttgaagctactgaaaatgctactgaatttcagacagaactgaactttgaagctttctttgttttctttaaattgttgtgcctgtaatagtgcaatgagtacgcaatagtgtgaagtggtgcttgttcatccgacagacatgcagtggcatgctcttcactgcttctgacagccatatgtttttg

SEQ ID NO: 146967 - DNA, 305 bp, Zea Mays
attgctaattgtaaaaattaaacgttgcagggcaaagaggatgctgttggaaacactgaaggtgaacatgtatcgcaatgtgataacgaggagcatgtggcagtacattcacgacaacaggtaatattatggcaaaaaacaatgtaatttatgtataatgcaaacaaatgggatgatttatacattatttgtaatattgactataatgcactaatgagtaggatggaggcttaaatattgatgcacatcatcaatctgaactgcaaatgacgcttgttggaaatgatgattgtgaaggaacacaa

SEQ ID NO: 146968 - DNA, 381 bp, Zea Mays
tatagctgagtctgacttgattcttctgtttaggtatccatgtgtttcggggcttttgcttgtggttgagttgtactaatcatgtatccaaacatttttctattccttttgttgttcttcattccattcatcgaatatctcggtgactcatttttctcgttcatagttgttaaggtaggggtattgtcattggcatcatttacttcctttccattggggttcatcatctggttagagagtaaaagaggtagtgagacaagattacataagcgacttgtacgatatgaagataaagggcttaacacaacattttgatttccaagataagtttaattaaggagcaaggatggtttcttgtttcatcatacttcaagagtttac

SEQ ID NO: 146969 - DNA, 510 bp, Zea Mays
cacttcctaccacgctcgccgaacagtcgcaagaattcaataagcaattcaagccgtctgaaaaatgagtcagttaacaggcaccgcttcgcgtaacacgacaccgtttggaccaaggtcaactgctcaggcaatataattacaccccgcggtcacatcaagttactactccaggacagtgtggtaaatactctgcgtaccaagacacccctttggcacaaccattgggtgtgtcgccaggaattttcaaagattttctgaagaagtcatatccacaaaatatacgtaatgaatgtatcacgacaaaaggaggagatggactgagatgggaggaagtccaaatgtggctactgaagtacaagtctaatcagcagaagcattgaagcacagagcaggatgatgtccagccgagagccatctgtctcaaccagccagacgtccaatctgtcatcgatcgaattaatttcagacctaacaaggcgtggacagatagcgtcgtttgaattcaca

SEQ ID NO: 146970 - DNA, 1172 bp, Zea Mays
ccttgacggcaattgaagtatcaagcacttccctcttgacccttgcttgaaaactgttctgtggacttgtttcataaggccttagttcatgctcttgtctacaatgtccccatacattacatacatgacttctctgttcattttcagttttaaatgtctattttcatggtctagtgtgtgtttccatttaccattgtgccattgtcatatattcacatgttggtactttgcccctcgtccgcacaatacaaatgtatgcatgtagaggattattcggaccaaactgggaccaaagaagcatctcctggcctgaatcgacacatcagtgtcttaatatcatcagatggacttattccagattcctcacgacatttaaaatgtctatgcaagaagaaattacactttcgatggtgtgaatgggcattcagaacttctgagaatagactcatcataccatggagattgcattgaagttgtttcaggcggaacaccacattctgcctcggacctccacagaagcctcaatatgtgcaactgccataaacaattcatgcagatttgttttcttctttcagcagggaataaaaggtgaggtgcactgcctactacattatgtacgttctgctctactttatactctaaaagccatcctctgccttatattccgctttgtcgtcaagtacaccgtgctttctcaggcttctttcacctttttttctgaatagcatataagactatatactggagtgtaagcaacaaatgtatgaaaatcaatacatgcttatgcatcagggttctcatttcgttccagcgatcataacaaccgcacagagacagactgcaaactagtttttgactattagataactactactttggacgtgtcctctgggaaagttgcttgaaggcatgcaagtttgcagtgagaacacaaaacccttttgaagggaatatactcaacgtctaacgatctcttggaataaaggcagtataggtactgtcctgcagatcagatgggcatctccaccaggacgtttgcaagcagaaaggtagaagatcacctttgaactttgaaagttctgacatcccgagggggcaaaaggcgccagggaatttctcccgcactgcaaacagcctacacccagatccagcttctgtggatgaactcttgc

SEQ ID NO: 146971 - DNA, 344 bp, Zea Mays
gattttttaccggaagtgaaattatttgatgaaaactgtttggcaaataggtcgtgaagtgatttatgaggggttaaagagcggggtgtaggttagaagtggtgggaagcaagtttttttggcttacactttctagtacaaagtatagactagattcactccactttcaccataaagcagttcagaatttcatcgtttagctcaccatgagtgattttcggtgggagcggagctatgagagctctgccaaacgccccctcaatcttttcaagtctcttttactacatcttcagttatgagcactggttagatatattggactgagcagatatattaggatagag

SEQ ID NO: 146972 - DNA, 465 bp, Zea Mays
cacgatctccgtagcgatatattattgcacgtcaacgccaaacagtctccgcatcgagattttttttatgtgttaacgccaacaaacgggacacacgcccacggtggttctgccatgctcaccacaccggcgcttatgttgttcgtcaaggtcaaaccatatccgacacccgtcagttctcgcgcccagccgaacacggtggcttttgcgatgctcaccagtcaccacagcagaaccacaaataagttaccagtccagccaatataccttctgacgacatgtttctcctattacaacgcacacagaccgctagttttgccctaaatcataggattgaagttcatgtttgcctctcttctggtcgaaactatgtacgatatcttcggtcattataaatacagaagattacaataacactattttatcctctcctgaaccaaccatttccttaagcagaaaactatg

SEQ ID NO: 146973 - DNA, 336 bp, Zea Mays
tcgatgtatccgatgcattttgcgatggctgaaatctagcatacctttctggaattgtgggcacataatcaggattccgatcacacttcacaaaatccaaatctaaagcatggttctctcgaatgtagttatgcaaacacatagtcactgccacaatcattttttgaacttccattttgtaagacggcattttcagtagcactctccacttcattttccagactccaaatgctcgctccacaacattacgaatacttgaatgcaaatggttaaagtgctcttgctcaccatttggagccggtcctctcctctagtcaggtacatggtacctttgac

SEQ ID NO: 146974 - DNA, 544 bp, Zea Mays
atgacgatgagaaaaagccattctggaggtatgctgagatacttaaaagaactagaaagggtccgggggggatgtgaggattagatgtagactttctaaccatgattggaatggaagctattctagagttaaagcacatctgttgaaaattcgtagttttggggtgaagttttgtcgagtggtgacagtacatgtttttgaacaactgaaagttgaagttgctgcagccagtgttgttgctgatagaaccatgcctagagatatcccacttctagttgagggcaatgagaagaggaagaggaggggtgttttagctattgaatctagcttcaatttggatgtttggagacaacttgatgaactaacaactagaatgttttacactggtggtctgccttttaatcttgcacgtaacccatattttagaaaggctttcatgtttgttgccaataatccaattggaggttatgtccctccaagctacaacaagttgaggacaacgttgggcggaggccgaacacgccctcgttctaagctcacaaac

SEQ ID NO: 146975 - DNA, 389 bp, Zea Mays
tcttcattttctccaggaaggtgaccgggtagaacctcctctcaaactgcctgataaaaacatcccaggacaggactcctggtgaagaggagtgagctgcctgcacgcccctccaccaaatctgagcttctcccttcagcagttgtgtgccaaagcaaacacgatcaccatacacaatctcgaagacattcatcttatcctccacgtaagttagccaatccgccgcctcgaccggagtaccactgccatcaaaagtatccaacttcatgcccatccactgcatcagagaaagaccactgactggaagaggcacctcggccccgccacctagagcagcacccgcagggacagcgccccgggcactcctccaccaccagcaccctgagcag

SEQ ID NO: 146976 - DNA, 728 bp, Zea Mays
tttattggttcagaactgcaatctaatagttttgttttttctcagcggatttggtgcagatgaaggcaccactatccacttagtactatctcggactcaccatcagagtgtggtccttagtatgctggcatccaatccttggctcactgtgctgttcgacaattgggctaccatttgaggtgtgcattaagaaataaaactgaggtatgtaccttgactcgatgaggcatgctgagttgaaagcatggattcgctccatgatgttcggctttactcccgcattccatcatgcgtggtccttgaactttcaatacaattatgtatgacagccattgtttaggcttatcatgtatcaaagcctagtctattgaatatttgcacctcattagtctacatgtcttgataaattgtaaatacgttcttctttaggaatggacttgatgtaacttttgaaatttgtatggagcctccttttattataacatgaatacagattatttagttctcagaactaaaaatgtcttctatgcttcttgtgaaattcacgcctagttatttcctggaccagtaaggttagaggatgtgcttgtatgatctattttttcttggcgaggaactgtcattcttttctcaaacacacaagtgaattgtgtgcctttaggcatcaaactctatggcatgaaagatgaatggtatcaatgtgttcatgtgttaaagctatctgagcg

SEQ ID NO: 146977 - DNA, 418 bp, Zea Mays
gaggggtagtggtatttgaaggaatgcggttgtaattaaaagacaagcgagaataattagatgtaacttctttcttttctcattcgttgctctatgtacatagacagattcatcctctccacttcatcttgatgtggaggtgttatcctcattgtagatcttgatccttttcttacactttttggagtcattgctcgtgtgggatttgaaggattcattgtccttggtctcctcagatagaatggtcttattctagtctccaccaaatttggatccctcccccgacatcattttgatttgttagacttacgaatgaagtgtcatgctctagtaccaatttaaagttgcctagagggggtgaatagggaaaacatgaaattttcactcaaataacaagttttgatctgaacagtctcac

SEQ ID NO: 146978 - DNA, 275 bp, Zea Mays
ttcgaattcgcagttgactggcgccgacatttggcgccgaaaccaatactttccccgtaatcctagccagtgtgtgtcaaatgcctttgtttgcgttcttgggacaccgtttcggccgacaagtccactctctctggctggaactggaattgaacaacgcggtaacttgttccaagacttctcctcacttgttcccaggacaggaacgacgctaataaccgtgccgttgctcgtttcttgcgttcatatactcggtttctcatgcgtccaaaacc

SEQ ID NO: 146979 - DNA, 404 bp, Zea Mays
aattaaatatattataagatattttgcttatatttctcatttacggaaaattatatatgtgtggtattaaattattcagctaccctaggttcaaatcatagatctgccactggtcgatatatatagttccatcctcgagcactgcctatgtttattttaaacgaactcagcaggtctagtttaaataccaatataatcaacacaaaagagattcttacatacttcgatcgtggtccaaacggcagtgtgacttgagattatgtatgatgaccaggatatatatttctgaggggaccgacagggattttatggttaaacgggactcatcgtgtaaactcgacattgtttattgacttgtggattttataaattataggctatgatgtttttgtgacctagttaca

SEQ ID NO: 146980 - DNA, 294 bp, Zea Mays
atcataggcggattgcttcgtgcttgggcctagctgcctgggaggctaagtgggccaatcgggccatgccaaatagattttccggtctactgtaaagcgggataatacgggaaaataccggctcaaaacgggataccggaaatacgggcgggaaactaccttaactgttttcgcacccgttttcggttggtcccatcccgttttcgtaccgttttcgtattttcccggaaatacgaaaatagtcgggacaaaatgggaatacggagtgggtcgggacgggaaatttcccgttcg

SEQ ID NO: 146981 - DNA, 402 bp, Zea Mays
agaagatatcaacacggaagtaatgatcttgagtgatattgtttttccctccctttcttgatctaccaaatcttggtacactatcttccatatttgggattagaatatcatttttctggcaaaatgctttggcttcttcaagtaatggctcataaccttcacttcttaaatttgacaaacgtgttttcacatcaacaaccaaagacatggcttcaacaatattttgatccttcttttgcaatagaaaagataattcatttgttatgcgaaggatctgcaacatcatcttcatgataaaaacaaagctaaaggactccatggtatgcactaaacctcctgcccttgatggattacgttgatcatcatgtatgactgatagaacttctattattgggtcccaca

SEQ ID NO: 146982 - DNA, 305 bp, Zea Mays
acggtgtcttgaaggggctcctgacgtgtaaccctaaggagaggctcacggccgccacggctctccaactcccgtggttcattggcaccgctggtgtcccgtagagatggcaattcttccattagacgatgagtggaaaagtttgtaaacggtgaaagggcaattcttccattagacgatgagtggaaaagtttgtcaatggtgaaaaattctctcgtaattacattgtcaaaatattactcatgtacaaatatgtttagtttaatgtacacataggaaggactcgaaatgatttcacaaaagca

SEQ ID NO: 146983 - DNA, 595 bp, Zea Mays
gaaagagcgtcgaatcttatcaatttgctttgtggcccatttcgcaagggggaatatggttaggtggtagatcggcatggaggagagcactgaagatacaagggtgaggcgtcctgcgcggttaagcagtggacctttccatccggcaagacgctgtccgatcttctccactagtggttggacatgaattttttgtagtgggcgggtgtggagttgaaggccgaggtattggcaagggaaggttttgcagcatcccgggaacggctggagggtgttggacaaatctacattttcacaacggatggggtggatggagcttttctcaaaatttgttgttagacccgttgcagctccgaacgcattgaggatctgtctgaccgcttgcaggtcattacgggttggattgatgaagatagccgcgtcatcagcatagagggaggttctgagcttagctgcagcaagagggagaggtgtgaggacaccatgctctgaagcaaggtctaaaatcctttgcagtgggtcaaaggcaaggatgaacagcatgggagagagagggtccccttgtctcaccccacgcctgtggtcgaagctttct

SEQ ID NO: 146984 - DNA, 652 bp, Zea Mays
aacacacttactcgatttagggtgaccactataccctactaacggagcaatcggcttacgtcggcaatgacttaagacagtgcaacatgctcacgcttactcgacttagggtgaccactataccctactaacggagcaatcggcttaagtcggcaatgacttaagacggtgcaacatgctcacgcttactcaacttagggtgaccactataccctactaacggagcaatcggcttaagtcggcaatgacttaagacggtgtaacatgctcactcttactcaacttagggtgaccactataccctactaacggagcaatcgacttaagtcggcaatgacttaagacggtgcaacatgctcacacttactcgacttagggtgaccactataccctactaacggagcaatcgacttaagtcggcaatgacttaagacggtgcaacatgctcacgcttactgaacttagggtgaccactataccctactaacgaagcaatcggctcaagtcggcaatgacttaagacggtgcaacatgctcacgcttactcgacttagggtgaccactataccctactaacagagcaatcgacttaagtcggcaatgacttaagacggtgcaacatgctcacgcttactcgacttagggtgaccac

SEQ ID NO: 146985 - DNA, 381 bp, Zea Mays
cttttgcaagtggtgggttatgtaactttgtaaggcgaccaattctaagggtgagggccttgatagttggtttgggttacaccgggcctcagtgtggatagtacttgtacaaacaacgatgcgacatggtgtttgttgctatatgccactaaaattcaattatcccttctctccacagcaatgtgtcagtatgcaaatatgttctgtatttgtttatgtgcgcatcttgcattttacctgtttttacaacaatctgaacggtctgtggtggtacatgccgctgaaatttaacggttccatctctatgcggtgcatgcatgattcaacaccgaataagtgctattgaaagctataccttactggacgggttactcagtgtca

SEQ ID NO: 146986 - DNA, 377 bp, Zea Mays
atagaggtctcaccaccaaattcgggcactgaggccggttcgatgaagcacggtcggtgagtaaggaccttcaccctcttcctctttggcgcggcctcatttagaccaactgaaacatctccttttctagaagtggcactttttctcttttgccctttcagcgggtagcgataatcagggtacacaaacccaatagcatcgaaaactctattcaacctcttcttcttccggcctccgaaggtcgcagacagcgcgttatcctctgcctttgaatatggtccaagaagttcgtcgcttgtagcttcgatgcatttcagccaatcatcatctggctcaataaacttaccctcgtatctgaaggtgtatttcaatctaac

SEQ ID NO: 146987 - DNA, 576 bp, Zea Mays
agatagtccattgagcggcaggacttcatccgtcaggagatccggaagctgcttgacgccggctttatcgaagaggtccatcaccccgtgtggctggcgaacccagtcatcgtccccaaggcgaatggaaaacttcgaatgtgcatcgactacaccagcctaaacaaggcatgtcctaaggacccgtatccacttccacgcatagatcaaatcgtggactctacctccgggtgcgacctattatcttttctagatgcctactcgggtttccaccagatctggatggctagggaggataggaagcataccgcttttataacagtggatgggctctactgctatgttgtaatgccctatggtctgaagaacgccttgccaacatttgtacgggcgatgagtaagaccttcggggacctgattagggacaaggtggagatatacgtcgatgacatcatggtcaagactaggagggggtcgactctggtggaagacctaaccctggtctttgacaagttgcgggcgacgcgcacgaagctgaacccagacaaatgcgtctttggtgtctccgctgggaag

SEQ ID NO: 146988 - DNA, 1527 bp, Zea Mays
attgtatcactgtagtaccgactaccaatcaaattattcaaatagatgtagtaccacatacagagggagagaatatcagggtgagaaatatttgttgatatgtcatttgctacatgttacaactgatatgcctggcattctgtggtgcttcattgttcagcacgagcagttgtttctttgcaggaccactgacaatacataataattcgtttgtagttttcaacttttcatggggaggtggcccatgttttagttgattaggtactgagcctgttctgtcatgtgcagctcatgtgtactttgcaggagtcatgacctcatgggacccaaccctgagatgagatgttggggatgactatgaatctatgatgggctgatgactgaccacatttgaccaattctttgcaaacatgagttctctgttagaactatatattacttatgatcaggtataaaaatagaatcctagagatatagttggtttagacctactacaacttaagtaacaaagtcctacaaggacatgtaacaattgtgttgactatatataatgaacatgggcagcaacctaagggcttaagatcttaagccgttccaactatttccacactatcaatcaagcattgctgcatgatgagatttgttgcacagttcggaatagttgaagtggctaaaacttgatataattaaaactgatttagagtcctagtactattcaatgtggcaccatctctttgccactcaaaaaggcgagcatattagcggtctttatattgggataccatttgctatataagacttataagtgttccagtggacagtagagtttgggtgttttttaccaaagaaatggaatggagtgccatttgtgacatgcagaaaaggtagcattagggaacatttggaccatgtaaggtgtattcagggggtttgaggcttagtgatgttagtagtaggtatgatgaatatatgacagatgactggtttatgttagtcttgtgtggctgctcactcagagtctacgccggaactgtttgttgcatttgcatctatgtcctgcacactcctgcacactcataggtcttgtcaccaagggctgtcttactatagcttgctcttaaggccatcattgtgaactaccgcatgcactgcacttgtcaactattggtacatccaactgttctgatataactatcttcattaatactgaatatgaaactggaatttaccacttgtttcttagtgtttgtagcatatgaatctgatcatttcctccatgtcacttttacaaggcctgctctctatttatagaatctatttgtggcaagatcagcacatgattctccattttctttatgatatatttatattcacaattttgtgtttgcttccatatatcaagattacggcagtaacacaataagctcagttagtggaagctacttttttctttaccattgctgtaaaagttgtattatcaaaggatttgaaagatgcgaaaggagacatgtcacatgctaaaattat

SEQ ID NO: 146989 - DNA, 1468 bp, Zea Mays
attagattagcgccgtgccggaaaaacagctcctcgcctctctcccccattccccggtacctgaataaacagtgtgctggtgcagtgtgactgcgagcgcgtgggtttagtcagagcttcgcggatttcgcgggtgcttcggtcgttggactctgatggccgcggcgcggcggcaggccgcggtgctggtgctggtgctggcgttggtgatgggcgcggggttggcgccgggtccccgcggatgcgctgcgcagggggaggctgtggtggtgtccagctacgggcagggccgcctctcgctcaagccctacgactggacctacctgcgcggtgagacagtttcagggttctataatctcggttttggctttcttacgttctccttcttcggcaaagtttcgtccatgttataccttttgtttggtgtaggtggatgttagttttttccggggggtttgcacgatttttttatttcgttttttgtgataggatcataggaatcgtggtgatgaaactagctgttgtggaatttcaccgaaaacgcgacacacgtgtcgcggaattctatttgcttaacagttcggtaggttctgtttagtttcggcctttcagatgctactttcccgcagctgtggaattttggtttagttttggtgttccgttctgacacgtctttgctacaactgaatactactgtactgatttgtctcatccgtggaaattctatttcattcattccttttttctggatcgatcttttaatactctacttcctgtacgaacagttgagctcccgccgtcgttctcttctgtcaccatggatttcgctgctgacatagaccttgtaagtgaaagattctgtcatctcggccgagcattattgaattattaagtaagagttattttcgctgctatcaggtttattaagtgggtatatgttcgtatttaatactcttagtggtagtaccggggtcatgcttggtatcaagcactgattagtggagtggctaaactgctcttagatcatgcgtgtctgcctatcagttcacatgccagtgtctaaattggaggggaggaattgtggtgttccaaatcaatgatgggtaaaccacttgtatttttggcattttcctttcacattttatgggcagttttgagctcagtgccttgtatatataatgggggtcggagggatatgaaacactagcgtaagttgtgttgtgatgcataacagtgagtggaagttttcttttcttcgatttttttggtgtggcaacccccatttgacttaaacattactaaatttattatatacctcacatgtttcttatctatagtttgtggaatatttctttgaataatgcagcagagggagcgcttgaaaggcattccaagaaacaagcttgctattatctgtttgatgaattccaaccctcctattcctgatatatctgattcttatctggac

SEQ ID NO: 146990 - DNA, 722 bp, Zea Mays
tttagtgttttaagtaccaacagaggagggcaattcatgcacatactttagctttttattgcaatgatagataatttatatgaagttttggacttattttggatataatatgtcagaatgacagaggtgaatctctagatatagatttaggagggggttaattgaagccatttttgtaatgaatatggtgggtatcttttttaaccaaacaaaatggatttgatggctatagtcttctatgaggattactggattagagtgtacagttgcattgattgctaccaaaatagtatctaatataattagtaaaatgatgtatctctttttctgacacgcttgcgacactgaggccgactcaaatatctcattaaacaacatgtgcatgtctacgtttatgtgtaatgctcatgtcggctgcacatagacgtttattagcttgatctgatggtgatcaattgaaaattgttgttgtagattttcctggagatcgaattgtccttttgtgatcctaggtttggatacagtgctgcgattttctgctctcccaccgtaagaacacaagatgtggatagagaattgttgatagtcttggtgttggttggacttacttttagtgtccctatagtgaattactttcgtgtcgtcatagtcaattcaaagctccgtacaaacacctcatgtttcacagtgtaccacatttgcaggtacataatgcgctcgac

SEQ ID NO: 146991 - DNA, 316 bp, Zea Mays
gttggatgtggctgcggcggagacttcgccgcgtgtggagggtgctgaggatcttcctggtgcgagtactgggtgtaggcggcgaagggtgatgggaaaacaaagtgagggtgaattttcatggagcggcaggcgtcgtcgcatggggatggagcgtggccgacttcgggtagacgaggttggtaaacgagaattgttgtcctcgccgattgtggagggcataggtgagggggatcttcgggagctttttgagggtgaggaattgaggataatgctgtttaattacagggagatgggtatcattccgaaggttgag

SEQ ID NO: 146992 - DNA, 320 bp, Zea Mays
cctatttcattaagaaatagaacgatagagtttttacaaccaacacaggtcacgaagcccgccattcaacaaggatggcacatggctacatcccaccagagcaacgccaaaaaagggatcagggacacaggaatccaaacttacaaccttatttagatcaactaagtcttaccaaacacttacttaattgtctacaaccgaccactctcagctgcctgaaaccaaccataaccgatcaaaggcaaggtaacagacaatgcacacctagcaaatcagaagaccaagcagtttgtaagacagaacacaatcaccaattcacc

SEQ ID NO: 146993 - DNA, 1004 bp, Zea Mays
ccttgagaaggattttggttttcattttccgtggggcaaaacttgaaaagcaaccaagtgccatgtcgggttcttgatgcaattcccttctcaagagaaacttgatgagatgattaatttccctgaacttaaaatgaaaatgtccagggcaaaaatttatgtctcttattggagctcacaggctaaacctaaatccaagcttcattatgtgtagattgtggctgaaaatgtcgctgaggaacttcaaaactatcaagctatttgtgagctgggatcaacaattgggactgttgaagaggtggatatcttatctttagattctaaagatattgtgagattcaaggtacacgtcaaaagtgttgctatgattcctccaattatagaggtaggtgttaaaccttttctctatgacatatttttcaagattgatgatatcactgatgagggatggaatgatgagtctataaatcttggcaaaagagcatcggtggacaggcaaggtcttgatgacctttcttatgaaaaaactggcaaaaaagctagaaatgtaggggacaagtctgttaaagaagagttgagacttgaaaacattggggatatgatgtctcaaggcaaatcttctggtcgggggcctgacttgggtgataacaatgaaaacctgaacccggtatctgaagataaaggttatgacaataatcctataaatgaagatgaagagtttcatgagagtgaagatgacctcctgagttctcaagatttggaagaatttgccaaagatgatgaggggtgtttaccttcaagccaagaaaaaatcaacaagtctcctttgggtgctcaagctaaaggctctggaaaagctaaagctgaaaaacaagtaatgaatatggaagtggagcatggtgaaggcattaggaggaggagcagacttgaatccaatgacgacatgaagattgctgacaaagctgcagcgagagctatggctaaagatgccttcataaacaaag

SEQ ID NO: 146994 - DNA, 714 bp, Zea Mays
aacagggaaaaaaaaagagaatgggccgagaagggatttcggtagtgggcctgttcaggaaggtgattcgacccaggtcagttcaggtgagttctcttttttccctttttgttttcttgtgttcatttctatttcttgttttcatttcaaatttgaaatttcaaactcgaatttgagttgtggtttccacttcaagtatgcacgacccaaaaattcataatgggtgcatagaaaggtatcattttattgttaacttattattttataactttaagtaaatgcctataatcatgccataaagaagaattcattttaggagaatatcatttgtgaatgtgtgatcgaattaaaggttaaaatcaataacaatgaacctatgttgttttacttatttttagagaagtaacacatattcccttttaagaatttatttataaacagtggaaggtatcccgaatattatagttcatgagaggactattccattctaatgttttaggatttatatttggtcagtaaaattttagtattgcttaaatttatttatttcatgattttttttctctgacgcaaatttttgggctctacagaggactaggcaagaccaccctcgctcagctcatctacaacgaccctcaggtcaaggagcacttccatctactaaagtgggtatgtgtgtcagatgatttcagtgtccgtattcttgccaacaag

SEQ ID NO: 146995 - DNA, 1026 bp, Zea Mays
tcgaatcccctcatttaattgggttgtacatgacctaaggtaatccaggttttaagaaatatcgtacggtgatttaaattctactcagactataacttaatagaggtgtgctattagaacttctagttttattaaaacttgagtataaaattctactatgtgtatgactcctatttacatgtacgagttttagcaaagactgtataaaaagatatataggctataggcagtaaccaagaatttaagccaattcagaatttattctttgtttctccacttctttcttttacctcccaaaccttgtgaaagtatcaaactgaagttagatagtttgagccagatactaccatagtggcttcgtagaatggttctaacaagatacataacttctttgacatctcccaatcattaggcgaaggctcatgtgtggatttgtgggtcatttcgccttaaagcttcatatgctcttctatacttcaaagatgtcttaagaatatgataggtcgaatttcaccgggtgaggacaccgaatgtagggtgtttctcaacatcgagtacaacaactgtgtggtcaacttgaggaggaggtgccaccaatgaagatattattggcggagcaggagaaatgtcgagcacgaccgatggaaaggcagtagtgacacttcacaccagggactttccccttagatgtgataaggttgtccttccctctctggtctgcatagatcaatagacgatattattaagtcaataacagtatcaagtgcctgtgctaattattggaagaggagagagggcgatagtgacgacagcgcgagtgagggagagggcgcggcgaggatgcgagggagggggggactagacgcaacgaggtcgcatgggaggagaggggtcgatgacgacgacaatgcgagtggggggagagggtggcagggacgtggggagggggaggcttttgtcaatggagtcgcaaggtgatgatgagggtgagagatgatccaaataatattgtccattatacttgaa

SEQ ID NO: 146996 - DNA, 373 bp, Zea Mays
gagatgaggaagagttctggcgtcgtggttacgtgttcccagccgtggcgagctcatcgacgttgatgggacgacagtagggaatcacggcgatgcgatggcgcggttaggacatgcggtggccaacggcgagggcacaacggcggtgagcactttacccgcgggcggtgagccaggggaggagtaccgcggccgaccgaggtggcttccagcttgacgacgatgaggatcttttaccccgagaggttatccacaagtctggtgcacgaatccaaacgccggcgacacgaatcgcggcggagggatccgtcggcggtgaggacagccgcgctggcggtctgatccagtcaagctattgtaccatggcgagctc

SEQ ID NO: 146997 - DNA, 602 bp, Zea Mays
cttgatgtcacgcttcatatagtactagtagagagaccagagaagcaatcaagatccatgagtggttctgatttatgatttatgagtctcttttgaaaattgtgttctttttcttgtgacgtctgctgcatgtgaatgaatttcggaagttgtggctgttgaatccaatggttatggatggtttgcattagctatctgctgtggttgttgcttgaaggcttcaatagtgcccttttgattcttttcttcctagttgggaaatttccctctttaagaaagggaatagaaatttatctacatgtgtatttgaatcttgttttgctgctctcaatctcacatttgaactgcaaagcttaatttattatgtcctggtagttgaaccccacggctgtgaattgtgtgcttcaattttctgctcttgtagttggttcaagccttgaaggcttcattaattggccatttcatgtaaaaatgaatgttgctttcagacttctgagagatcttagttcagttagattgctacatgagaaatattatcgttgctacattgctttcaaaaggagctagaattttatttctttgtaattttctttgcttagtac

SEQ ID NO: 146998 - DNA, 383 bp, Zea Mays
atttatggccccaaccaccccaaatagtcattgaaaaagtgggacagaaactacactgtcaggtccctacagtgccagtccggtgtaccaccagactgcctgaccttaactggagcaggtgcccgtttttacttgtcaagtacacctaactagtccagcatgccacggaccctgtgccacgccatcatagttgtttaaggaaaccaatcattgagttctgtcggatggtccgttgcacatcgaatcggtccgggtggccatcccccgaactgcctgatttacaccctctctacataaacggtccggtgcacactggattggtccggatgaccaagtcgcctgaagtttgtttacaatgtttctgcgtagatggtccggtgcac

SEQ ID NO: 146999 - DNA, 473 bp, Zea Mays
cttaggaaattttctggaatgcgctagtgctctactgatgggttgaatgaacttgagatgtattacaatagctgtgtgtcgtgccggtcatcaaaaatggcgaaaggtggtgtgtgatggtaattgggaaatggtcacgtcattagccaactcatgtcaggtagaagttgattgtgttaagtgattgttatatatgttgtgtcacgaatcgtgataataataggcgagccgacgtatatgctgtctagcgggctgtgtcgttgctctagctagccgactggttagaggacttaaattaagctcgtagtcccgatgaattgcttgttgtagtctagatgcgcatggtgatgatcgcgggtaaaaatctgtagtgctcatgtggtgtctaaactaaaatgcggactagtgggtgaaaagcgcttagatataagtatatgtcggatttgatgattgtagtgaatgcgtttgttaac

SEQ ID NO: 147000 - DNA, 826 bp, Zea Mays
gggacagtgaccgtgagatcacagatcgacggcagaggttttaaagaggtaaggagggttctggaccgcccgattagagattcacggcccagatcggccccggccgaaggggtatcctatttctaatcgtagccgtccacgcgatgatcaacggtcgcggaagcatcgtctcctacccagcccgagccacccaactggcctcagcgcacggcagcggagtcaccggagtccatgaatccgaccaacccgagcgccagactcaaattcgttcggccctcgcgaaattgacgatgcccagagcctgattcacccatcaattgctaccgccatccatcgtaggacccggcccacagtgcaccgcgccagcatcacccgctaccccgaattgacacacgagccatggctaattgagtgcaatacaactgacaaaccgaggaattaacggtgtttctcatacctaattgcgcagcagaggttctccggccccggtggatagttggaggtcgagattccgcgacaacgacgaggaacttcagagagtcgcaacccaatttgtgtgtgtaggggtcttggtttgcttcctgtcgtactgaagactccaatccgcgacaaaccgaacccacacgatgtgagtgcggtgacggtgccgctcgcaagctctcaatctctctcttcctctcctcggatttctttctccatcgattttgcgttggcgctcggttccagctcagatgtgacgaaacggggaggccgaagtggtcgtggctggtggctttgtactagcgatgcaggtcgggatggctgtaacggccccgaagctcacggc

SEQ ID NO: 147001 - DNA, 381 bp, Zea Mays
ggtcgaagcactcaatcacgtctagtcggggtgaccaatggctccacttcgatcacccaacaagtaccctctacttgttaaccccgtgatccaagaaagccaagtcaataaagttctagtaaatgggggtagcaacaccaatgtcaccttccctagggcgctctaggcccatgggattctgattactgacctcattgagtcggataccctattcttcggcattgtctcgactgaaggagagtacccgttggggcacctcttcatgtcggtgaccttcgacgctcctgacaactactgaaatgagttcctacgttttgaggtgactcggttcgagtgtgggtataatgtcatcattaggaggccgggactggccaagtttat

SEQ ID NO: 147002 - DNA, 320 bp, Zea Mays
caagaaaataaggtattgtaagtcatctgcattattttctgcaggttcaattgttgttccataagtgactcaatactcaatagagagcatctaaagctccaaacagatgcagaggtaccatattctaatattcactaatcaacatacaatgattagtcaacaccagcttatcggccaaagtacttttgcaaacaaaggcaaggaactatttcataaaattagttatcttttttctgtgtgcacaataagatcaaaggggctaacaagttacaccaagtaagttgcatggcattaagaggtttacctctgttacgatatgc

SEQ ID NO: 147003 - DNA, 438 bp, Zea Mays
gggcgacgttgaacggtggaggggatgaactgtagccgctagtgggggtgaagtagcaactgttaaagagagtctaagactatctgcagtgaggaacttcaactagtacgccatgaagatagagtaatatatatggtagaaaaatgttgcagcgggcaattaggacaactaatgtaagtttcgtgagggaatgagagatgccaaatatagagtccatgcaactcctaccgcaagctggctacgatcctaggatttagaggcggtgaaggttattgtgtggggactagggatagaatagagttgaaaaaaataatatatggtagttgatatagagttgagatataagttaatatgattacagaggattgtgatatatggtaaagaatcatgctgaaggtggcataatattttctttagatagaaatttagagtaacgtg

SEQ ID NO: 147004 - DNA, 778 bp, Zea Mays
gctatcggctcttcttggcagttcacttagtaatgagacaaatctttagccttttcagttgctactactatccctgcacgtgtgcagagaatgctcaggacttgatctggcattcatgtcgagatctgagacgcctcctcgccgctaacaccaattgaaagtaaaaatctatcgactagctagatctcacgctccatttttgatgtgtgaatctatgattcaacaccagagcgtgatgtgctttagatatctacttcttctccttctagccgaccactaataaactaaaattggatcgaaaatatgcactgagaatttgtcttcaccagccgcgacgaggtaaacatagtccatgatttttattttcaacttctttgatttgcaaaaattgttgccttgttcttacctcctttgacaacaatgtagatgtgctttctacgagaggtcaaaacaggtattttgaagtcccaaatacatgccttaatttatcaactgcagatttcatcaccttgccctgtcttataccaatataaatttattgattcaagaaataggaaacgaggcaaatgcatctgactgattaagaaaggataatgttttccccttccaagatgcaaacataaagcataagacagtactaaagtttgatcactataaagttttgtttcaaattaaccagcaaactaaattaggcagataatctagaaataagatgaactctaagactattaagttacttcacaatctgttatgcacattgttgtttactttcataaca

SEQ ID NO: 147005 - DNA, 291 bp, Zea Mays
ccctgctccaaatcctatcttttctatgtgagtcccgagcgtatatattcttagggtgaggagaaaagcttgtgtcaagtcgggtctgtcactcagctcgagtcacgacaaaaactaggccaaagcgtgtcaaatggttttggtgtggtttcaaacttcaccagggtgtgtgtgaggtatttaggcgccactttgtccatcagaccatttggttttgagtttaggagctacgtgaacacggttgatctttgaaaacaggttgaaaagacttagagaaaatgttgattcccc

SEQ ID NO: 147006 - DNA, 830 bp, Zea Mays
tgcacaagcacaagcacagctaccaaatccagtcctgggccctactggtaaccaagttgtgttgtgtgtagttgtgtacgtgccctattgcattgcagctctatttgcgttgtctatctatactatatatatatcctccacgatccacacgtctcagcggcagcgctcagaggtcacagcacacagacagcattcattctttcttctccgtcagttccctccactgccttcttggagctgaagctctgcacccttctcctctccccacaattggatcacgccctatctgtccgtccatccggcctcaagattccacggcgctgcgcaaggtgaggctgtccctgctcttttttctcaccttctgttgtcaccttccacaaatctgttatggccgtcgtcggtccagtccacccatggtggaaagtgatagcaaatcccgcagagaatatgaatatggcgccatttctcctcttgccgctacgtacgtacgtaacatccaagattcattagattttgcatgcgctactagtacactactagatacagtacttcgacgtcatctgatggaagcatgagcaagaacttgatgcaagcgttgctcttctttctcctgctgctaattaaattcttcccttctcatactagcgtgcctcacgcaatgaatgccatgcaggaccttccatccattgccatgtcgtcaaaccagaacgagagcggcggcggcggcggcgcgggaccgccgctgccgacggcgttcaagagcccgtccacggacggcaagagcggcagccgccggagcacgcggttcaaggacgaggacgagtacgtgg

SEQ ID NO: 147007 - DNA, 355 bp, Zea Mays
taagtgaacaaatctgtattttctgttcaaattggactctgtctgacgcttgcttaatatatagtctcaaatttcctggcgagaacttcatgaggaaagccacagcaggtgttgagtgaaacaggagaactaacaaggttgataactgacaagggcaagcagcatgtggcacatatgagttagtagcttagtatacctgccactgaagagggtttgggcacaccagtacttccccacacccaaatccaggtcatcattgtgcataccttgttaccctccgcaaactcctccatacacatttgcccaaacccaccggataacgatcaagcaataatggggaggtgcttggagttgg

SEQ ID NO: 147008 - DNA, 296 bp, Zea Mays
ctctgatgaggactgtgatgaaaaacacaatcaaaacacaccatctttcgggactgattggctcgatacgagccatgctgccaactctgcaattctgacgtccccattccagcccgcagattttcttttgcatttccacgcttttattcatgcgtctgtatgctgcatcgtaaaaaaattgatctgaaatactttgacagtggcctgtgacgaaactcagcaatcaaaaacaccatctttcggggctgattggcgcgagccatgctgtcacactgcaaagaattctgaggccaaac

SEQ ID NO: 147009 - DNA, 344 bp, Zea Mays
ccaaatcaagtctattcggaatgtgggacctccgacctgtaaggtcgaagtgcagaagtttctcggcaaggtgaattatttacgaaggtttatttccaacctagccggtaagattgatgacttcacccctatccttcggcttaagaatgatgccgaattcgcttgggggcagagcagcaggaagcatttgatctcattaaaaaatacttgtcttcggctcccgtattaaaagcaccacgagcaggagtaccatttcgattatacattgcagctgaagataaggtcattggtgttgttctgacacaagaaactgaaggaaaggagcatgtggtgatatatctaag

SEQ ID NO: 147010 - DNA, 568 bp, Zea Mays
aaagacatggtcaaccagaaggcagagaaatacaggtgcttccgtcaggatagcaagggaattctgtggtttggagatcgattggttgttcccaaggaccctgagcttagaaagaagatactggatgaagctcacctttcaaaattctccatgcacccgggcagcaacaagatgtatcatgatctcagatccttatactggtggaccaggatgaagagggaaattgcccagtacatctccgagtgcgatacctgccagagaatcaaagccagtcatttgaaggcagcaggccctttgcaaccccttcgcataccatcatggaaatgggaggacgtttgcatggactttatagtgggattgcccaatacctccaggcaccatgattccatttgggttattgtggacagattgaccaagactgctcatttcttaccagtgcataccacccacaagacagagaagtatgcagaaatttatgttgatcaaatagtgcggttgcatggtattccaaagaccattgtatctgacagaggagcactgtttgtggcacacttttgggagcagctgc

SEQ ID NO: 147011 - DNA, 339 bp, Zea Mays
ttttgaggaagctagcagacacattcgctaacagtggtgccaacatagctgattatgaccttccaatcttatcgtcctgttgtgacgtagtgtttagcaaccggctgataaacgacgaactgagtcctgaaccattgctgttgcgtgaccatgctgctgctgctgtctcgcagttgaatgctgaccaacggctcatttttgaaaagctaactgagtctgctctctcctgctcgtcgggcgtatttttcgtatgtggacatggtgggacaggtaaaactttcttgtggaacgctatactcacgcatttaaggtcccaacaaaaaattgtgctggctgtag

SEQ ID NO: 147012 - DNA, 363 bp, Zea Mays
tgaagaaggaaccctctggttcagggaccgtttgtgtataccaaagggggaggcaggagaaatcctgctcgatgaagctcacaactcagcctactctatccacccagggaccaccaagatgtacctagacctcaaaaccagatactggtggagagtgatgaaaaaggggatagctcagtatgtgacccaatgtgacacttgccagcgaactaaggcagagcatcataagcctgcaggtctactacaacaccttctagtgcccaaatggaagtgggaagaaataggcatggatttcataatcggactgcctcgaacccaaaaagggaacgattctatctgggttataatcgaccgtcttaccaa

SEQ ID NO: 147013 - DNA, 272 bp, Zea Mays
aagttatctacaactttattatgaccaccaataactgatttcaagattaacttaagcaaccattgcaatttctgaaatctgttcagaaattcgacagatttaggtgctgggcttgtgaaaagcacaactcctaaacgatcaggtttatggctgtcaaattttattacaagcaagataataaggttatctacaactcttctagatgacttttctacagaaaacatgattcagttcatcaagcatacagcacgacgaaaacagtgtgtgcagcc

SEQ ID NO: 147014 - DNA, 726 bp, Zea Mays
cacccattgggatcagcatcagcagggtcacacccattgggatcaacatcagcagggtcacacccattgggatcagctttagtaaagagttccaccgatacttcttcagcaacaggagcagaagggccagcatccaggtgcagttggatgactgacctaacggagacgttttgggcgactaccctcagggcttcgagtacccacggttttttcaggcactgggatagttgcaacatccattgtttcagcagggaccgagtcagaagaatccgtagccaacatgtccagcatagcacttatctctgcatcacctggactcataggcatctcaaagtgaacttgcctctcatcatcaggaagatcaccaagtgaagcaactagaacctcaattttttcgagagaaggtcgcactctaagacccaaaccactgtcaccagcaggaggattggacacaaaatcaaaaaaggacttggaaggtggcagattccaagcagaatatgcaacaggagcaccgatatttgatactttgcctctaaggatcatttccagtcggctcaccaaatccacagcaggagtcctcttgttggtaacccaggttgagtcggtgacaccactatacaaataagtcgggtatgctctgtccttcagtggttgaatattcttaaaaacaaagtctgcaaccacaacttcagcggtcagacctctctccttcaacaaacaaatttc

SEQ ID NO: 147015 - DNA, 371 bp, Zea Mays
ccgcaattggacttctatttgtaaacaggaaaaagatttggaaaatttggaactgatggaacctctacaaaagggacatctggaaaaagagacatgtaccaaaagggtgttaaacaaacgacttttggtaaataaggtggataaatttaatattacttgtaactcaggtgctaaggagcaaaaacagatgcattagaaactgtcaaacgaacaagcacaacccatagaagaattggacataaagatgaataagaaatatatgattactcatgcatttcaatatgtatgtaacatattgtgtcgttgttagtatttctttggcgaacagactattgaacacaaagtaaaccattaattgctgagaaaaggga

SEQ ID NO: 147016 - DNA, 386 bp, Zea Mays
atgggatgctcctgaatcaaaaagcacagaagcgggagtaaattcgactaggaactcactgagcactactcccggggcttgctgggcttcctgagcgtcgacgtggttgacccgggccctgccctggtactgagccctgctctgctggctgctggaaggaaacgccttgggggtgggtgctgatggaaccttggggccattcaccgagttggagtaggttggtcctggtgccttcaactgggggcagttgttcttgaagtgattagggtccccgcagtgccaacaggcatttgctggcggctggttgcttgcaacggagggtgcctgatgggagctctgactctgctgactgaagcgtgatggagagggtccagattgtttatgaa

SEQ ID NO: 147017 - DNA, 371 bp, Zea Mays
ttagcaattcaatgtccatgtggaactgtttatgcaatggaagaagagaaaggtagcattcaaaagaaaggtgcccacctgatacaatcttcctaaagtaaacttgtcatttcctgcttgtggttttgtaagtgacatctacaagtctcatatgacaagatagccatatccactgttagcaactacatttagtggatcatgtgttgcttctgttaaggtttttctgttgacaaaaaaggacttgcttgtttcattgtcatcttttggagggttctcgtttctagctcaatcctggattcacgtcaatacttgaaccgctcatagtggctatgctatatgtccaagcctcctaggttaacttgaggttttgt

SEQ ID NO: 147018 - DNA, 435 bp, Zea Mays
catgaatggtaacagttgctgatctatcagcatgaattcccgatgaagactgagaagcacttggaattggtacaaggacaaaatgctagggacagtagtagctgtagattctgatccccccctccctttgcatcaattggttccattcaggttgtacagttggagctgagtagcctaattgaggatatttcacttaatgatgaagatgatcagattatgtggaattttacttcaaatggggtttatgctgtgcagtctttgtattcagtgattaactgaagggctatttttccactgtttgtgagctcaatttggaaattgcagttttcaccaagagtgcatctcttcttatggttagtgtcaaacaacaggtacttactagagattacctagcaaagaggagagaggttcatgatccttcttgtctgttctgta

SEQ ID NO: 147019 - DNA, 341 bp, Zea Mays
tgaacagtagagctcttttgactagatcatgccaattgtccctctaattctttttgttgggtttttgaatatagcaattgatcttgttttattgtgtgggtcttataccacctatgtttatatttacttgttgtatcggatataaatatgatctctggtcaaagtatgtgctagcgaaattcaataattttattacgataaagaagtaacttcgatggtggtctatttgtatcaattttacgctttacggataatggtggtcaaagtttctaaagtttggctatgtctgctgtaggaggcatctgttttagactggagatagtaatatgttattccttgtg

SEQ ID NO: 147020 - DNA, 1326 bp, Zea Mays
attaaaataacataatcccttccccctttgattctctcgtgggaaaaagacaagtcagagggagaaggtaataaacaaacataagtagatgataaatcaaaacatagattcaatttcttctcattccttttattgtacttttttaccaacttccttcggaatgtccgaaggtgaacaaagaatgaacatacttcacagcttcagatgttgagcaagtcgagaagaaatgtgtgcctcgagctatccaaaaagacccccctttcatgggcattgtactcctatttgtaagggaaacatggcgtatagcttcgtatgaaattacacttatgacctaaagtcctatatataagagttcactaagggtgtcactgttttttcctcttaggtgacgcatagcacacattgcttgattctttcttcgtctccttgctatctacttcagatgctcttaggtgcttcagctaatcaccgatgtcaaagcttctactcgctcctttagcctgcgggacaatactgtgatgaaggccactatcctaaaacaaacatgaagataactgaggtttgttaatttgaggacctttggcaaaggcacatctccaacaactgccatctggtaactcatgatgtacttggacttgagtgcggtgtctttttttctttaattaggcgttgtagttctgcttggacttgagtgcggtgtcttttggctgctagggcctctttatgcttttgtaggtgttcatttctcatacgaaggctctggagcagttgtttttcattattgacgtcgagatcctcttcatctgggtaacttgtgtggtccttcttgacgttgggatgggaaggcattggcctcttgtgtcgatcctagactgagatcgtgggcctaaggaaagaagacatggattggtcctcgtctggctgaggattggatggttggcctcttgataggttgggctagattttggctgtgtaagggtggctttaggggttgaaaagggtgtgacgagccccccctgagctgtttatgtggacacttcctttggggattggattgtttgatggctcattgcggtctagggaggggggctcactcctgctggttggacaatgaaggctgccttcgcctttattgtttgactttgatcggcgaaggtaacctttgcttttggggtgttgtcaaagacgactgccttcgtcgtcgcgaacttcgaagcatgctgtgattgggtgttcatcttcttgggaggcacaaatgttgaattctaacaggtgggaaccaaacaagaggaacaaatagggcaaaacaacgagacaaattgggaa

SEQ ID NO: 147021 - DNA, 679 bp, Zea Mays
gttgcacatggatcttggattcacatcttgtgtgtagagcaataatattcgtcacccactctataataacttaacaatcgttagattatctgtgatttttctaatccattttttaatcattctagcgtgggcgatcatgatctaggatgagcaattgcattctatacctgtggcggcggaatggttctacgcactggaacacgacaacaacgttcgttgacttcaccaaccttcgattcgactcaccaattcgctccagccccttggccgaattaaatgatctctagcgcattggcactgtcgaggaataccagcgacagttctcacttcttctgtgccggtgcaatgaccttactaccatgcagtaggtcagcatgttcacggcaggtctagggaacccctgcacacggatgtcaaattataagctcccaggaatttgcagtgcgccatgaacctgacaagggcctatgaaaaaagggaattggaggcaggaaaaagaggaggatacagagctgctaggaatagtttggtagtcaaggaagccggcaacaacacagcatccaaggtagttgttcgcctcgacctcgattcaaacggctatcaccggaagagttagcgacgaagcgtgcaaaggggaaatgctatcattgcacagagaagtactcaatgggtgttgctc

SEQ ID NO: 147022 - DNA, 548 bp, Zea Mays
atggctttgcatttctgtggctatgctaggtcgtggagatgaacgtgcacatggactgcgacggctgcgagaagcgagtgaggaaggccatgtcccagctggaaggcacgcacgactgattccattcctccatcctgttcatcagaaatatataccaacaaaacccaattccgatccatcaggagtatgcatgacagatatgctagctgtgcagtgcaggagtgagctcggtggagatcgacatggatcggcagaaggtgacagtgacagggtacgtggaccggcgggaggcgctgcgcgcggcgcggcggaccggcagggcggcggagttctggccgtggccgtacgacggcgagtactacccgttcgcgatccagtacctggaggacaacacgtacatggccaccaacaagtactaccgccacggctacaacgaccccacgatcggatcctacccctgccacgccttcacgcatgtcctcgacgacgacgcgctcgccgtcttccacgacgacaatgtccacgcctgcgccgtgatgtgatgtacg

SEQ ID NO: 147023 - DNA, 678 bp, Zea Mays
caccttcttagaaggagaagatgctacataaaaccaagatcacgacacacctagggagtgtaggaccacgttcacgggatgggacaccacgacctacaacaattgtattggacccccgattctagcaatgaaagacaaggttcatcttcactccttccgtatgtgaattatccggtcggtgaagtgactcggcaaccgatgatgtgggtgtaccaataggaggagcctgagtactaccaaatgttggtggactcgtggagtacacttctacgtggactgggcagacttgggcgaagaacaagttacagttgatgcgtgagcaatgtattatgttgctctcatcggaggagtataatatgacatatgatcagtagaatgcacaaatgtgggaatgatcttcatcggaggttgtattgtatcttcggtagtatttgtgaagtatgaaactgtggcatgcaatgtatatgaaccatgcaactgtatcatgtaatgcattttgaaccgctaaatgttgttattgtacttgtgataacatttaggccctttttaaaaattttgtgacctaaatgtgctctatttgccaaaaaaaggtttggtttctcatgcattgctactggtttatcaaaatgatgaccaattaatcagtcgtatcggccgataaaccgttcccgaaccgat

SEQ ID NO: 147024 - DNA, 584 bp, Zea Mays
atacaacaatagaaacaaatgttatttgtataaatgagatataaaattacataatatatatgaaacttgaccattgaattgaaggtactatatgggaataatgagatacaaaattacataatatgcaacttgaccaccctctctcagccataataatgggaatatatatgctacttgaccaccctctctcagccattcagccaccaccctctctccgtcttcgagccctctcactctctctcccagccacttctatgcggtggcactgctgctccaccctctatcgcagccacttctaactatggaatgaaagcaacaggtgaacgagctggcaacaccgtagtcagtaaagacagtaaccctttttgacggagataaaggaggaaagcatgcatgtcaacaaatataaaagggtgtcaaggaggaattatacaaaagacaatttgaaacacctgaacacacagaaccagtccaaccaccagcccgcaaaggtaacagttcactggggagtaggtccacaaaatcctgcctcagcccaacagtgattgaccatggaaaccagattaacctaccccgcatcgtcg

SEQ ID NO: 147025 - DNA, 345 bp, Zea Mays
gttagcacatcggcggcgctccctggaggacctatcgaggccagccatggcgaaccacagcctccgtgcgttcctggttctcctcgtcgcgaaggtctgcttcgtcatggcgatggtggcgacggcggtgcagggcaggcctgggcctggacccacggccctggagtctgttcccgcgtgctgcttctaccaccccgagtgctgctacgacgctgccggccctccggctgatctagggtgacggtgattgttgtttcgatgcccgtaatgagctaatgctgtttctggctccgtcattgtactgatcgctcgcgtaataaaatgagagttatgagtatggttcag

SEQ ID NO: 147026 - DNA, 406 bp, Zea Mays
gcacttgactctaagaaagtttggaatccactaggaacaacagaagctaaggagttgcttgtatcctttgaggaagaggctgattgggcattacttgggctatgttcactaatcttgcgtcggtatatgacctcatacttcttgtacaacctttccaattctttatcaatggcatctatttctttttgagctcttaaggagtcataaatctgaccaaaacaccatctaatgtatctcattttgacagtgaccaccttaaaatacttccagcaaccagccctctttactctattcgccttgcacttggagggggacaactgaataccagctcttgacctctttcctcctctatttgtcttttcagtttttgacaattcatctccatcagtggaaggtggaaactcat

SEQ ID NO: 147027 - DNA, 975 bp, Zea Mays
gtcttctacttcatctacataaacttgcagatttcacttgcatttttggtatcttccttcttttcttctgtcaaaatagccacaggtttgtcctcgacagatttagcttctgaagaaatcctatggtgcttaaaaccaataatctgattgaatgatttgaaaattattgtgctgcagttgttggttacatctatgtatttggctctggcttgttaggggaatttctccttcgcttttttgttgaggatactggttttccaagtaaggttctatcataatcatatattaattacaactatttgagtatttgacaactctcattagattttatgcatgacgatatctttgtttatgtacatagagggttgggtggtcgtaatggagatcattcctggattttcattgtaccgaggattatacgagtttggtcaatacgcatctgctggaaactcaatggggaccactggtatgaaatggagtaatctagatgactctcttaatggaatgcgtgttgtcttgattattatggttgtggaatgggcaatagttctccccttggcattttatgtggatcaagtctcgccactggggggtggattcaggaaaaatccctttttcttcttgggctgctttaagaagagtcctctatcattgcggagatatagctttgggagacaaggatctaaagtagtcgttgaaatggacaatcctgatgctgttcaagaagtaagttactctcttacattatctctcgatgatattttcggtatttcttattttctaaattatgttcagagggaggtggttgaacaacttctgctggaacccattgcaaaccaagcgatcctctctgataacctcaaaaaggtttaccatggtaaagatggaaaccctgacaaacttgctgtccgagggttgtctcttgccataccaaaaggccagtgttttggaatgcttggtccgaatggagctggg

SEQ ID NO: 147028 - DNA, 428 bp, Zea Mays
aaacagttgagctcgcaaagtttggactcttgtaggcaagcaacagagggggaggcaagggagatagcatcacgaacgattgtgcatttatccggatcgcctaacccacggacgttccacgatagcacattacaacttttacaaactagactcatgaccaaacaaacagaacaccaaaggagcacacgacgacaacggtagaggggcacacacaacactgacctaaggagcacaaagataggcacgacctgacagcagacttagagagacaacaggttgacattacagaccatagaccgacaacagatcgactacagttgtgatgacagagagccccgccactgacagccaaggggagagaagcgatcattccgccataggaggcaccactccaatggagtttgcggcgttgcagcctagccccgcag

SEQ ID NO: 147029 - DNA, 404 bp, Zea Mays
cctccgagaaatccggtaaggcgacgaaatgtacggcgacacaatgaagggtcaccaacccaaaggggacaagggcaatagggacgactacaccttcaattcagaaggctcgcggatgtctggccgacatactttcccgaggaggccgaggtcgggctgtcagaatccgaccagaaggtccgcctcaccaccgccctggctgatttcttctccacgcccgagatggcggaagtccttcgctcacgggtaagtacgcgcggctcccatctcctgtttagtttagttttaggttagcgcctttatcttctgtttcatgtgtggttagtggtggcattctgtgctgggtactcgagaaatagttgagatttcatcattttggttcttatatggacggtggtatttgt

SEQ ID NO: 147030 - DNA, 351 bp, Zea Mays
tgacaaaccaacgattgggacatgcagataagatgatcgagaagtgacgtggtaaggcgtctcctcagtagcacatgcctgtccagaccacacatccaaagaggtagatgtcggtatagttgatgtcagtgttggagtagatatgtgcggggttgatgaatgttgggcgactcaaccccgatagattgggcaaatgatataagcaacaacaggtgagaaccaatgttaatggagggcgacagggtaggtcatcaagaggtgtcttttggttacacatgcaacatggcccacatgtgggctcaccatgcggattagacaaatctcgtcgacgcgggagggagcggtagtgta

SEQ ID NO: 147031 - DNA, 350 bp, Zea Mays
ggctgaggttgttgttgcacctgctggatggctatcagggtctgcacaattgactgaactgcttgagtttgcatgaggaacatcttctccattgtcatcggggatgggggaggcaactgcgaatggggtgcctcatcctacgaatcatgttgctcttgctgggtacgtctccctcctctacgcctatggtcagacatctacaaaagtcaatcatacatcagaactgatcttgcaaacctttcagcataaaaaaggtagagttcttcacaacacttaataaacaagcatcttcattgactctcaacacggccaaactaatcttctcggataaagagaaaagtctaaaaagg

SEQ ID NO: 147032 - DNA, 531 bp, Zea Mays
cccattcatcggtcgccgtcgagttgggccatcatggggaaacaacgtcgccgcctcagtccggcgaggggaggaagaagggcgcgcggccgtcggattcagcgggcggctgggattagaacacggggataccggttcgcgggggcattgcgggccgtcggatgggaatcgaacgatcccggttagatcaagcttcgcccttcgtccgaatcgtaggatgttgatccaacggtggcaattagagcagggagtacctttcgggtgtgcagatttgggcagttggatgtcgatcggagggctcagggtggatctcgggtatttaaaatctgagccgtagatctagcatcgcgtggctgttaatgaataccggttcattttaatagtcttctaatcttggccgtccacttacgatccaacggctgagatctgtgagtaacccttcgctgtggcaatcttcgtaaagagcccctgttctttttgtaaatgaacccgccgtccacttagctaggttctgagtcttaggaattcttc

SEQ ID NO: 147033 - DNA, 1037 bp, Zea Mays
tgctccttttcctcagtttcttgtgtcagaacagccccaatgaccttatcctcagctgcaatgtataatcggaatgatactcctgcttgtggtgcttttaatacgggagccgaagataagtattttttgatgagatcaaatgcttcctgctactctgccccccaagcgaattcggcatcattcttaagccgaagaataggggtgaacgcgtcaatcttcccggctaggttaaaaataaaacttcgtaaataattcaccttgccgagaaacttatgcacttcgaccttacaagtcggaggtcccacattccgaatagacttgattcggtcagggtcgatttctataccatgttcatggatgacaaatcctaaaaacttaccagtcgacactccaaaagcacatttacgtgggttcattttcaaaccataccgacgcattttatcaaaggctttgcgcaaatcagctatatgaggactaaactcagccgatttggctacaatatcatcaatgtagacttccacagtgtttcctaacaactcatggaagatcagattcatagccctctaataagtagcaccagcatttttaagaccgaatgtcatgacaacccattcaaataaaccaatgaagcctagacatataaaggctgttttagacgtatcctcttcggccatgaaaatctggttatatccggcattaccatcaagaaagctaataattctatttcctgatgcattattgattaatgtgtcggctatgggcatgggatattcatctttaggagttgctatatttaaattgcgaaaatcaatgcataccctaagcttacctgactccttctacaccggcacaatattggagacccactctgcgtatctgcaaggtctaataaaattagcttctagcagccggtggatttcgtccttgattcgtgggagaagatctggacgaaatgttctagctttttgcttgaaaggtctgaaaccagacttaataggcagccgatgttcgacaatctctcggcttagtccagacat

SEQ ID NO: 147034 - DNA, 386 bp, Zea Mays
tggccagagtacgctccactgctagggttgagcgtgatggagatgagaccgaaaccgctgaaactgtttcgatttctgaagcaatgaggcgctctgggctggtttcatcagaggacacacctgctgccgaagcaacacaagctgatgttgaagaagttggttccgaagatgagtacagctgcgggatgccaagtaaacctagtcatttggactttggaaagtctaccatctctgaagctgatcttccaaaaatggtgaagctgggctatttcagtgaagcaaaaaaggagctggttcgttttggcggagaggaaactattccgaagccggaaaagaatgaggttgtagtgttcaaaagattctttaaagcaggattaagatttcct

SEQ ID NO: 147035 - DNA, 344 bp, Zea Mays
ccatatatgttgcattgtatatggctgtcagattgcacatgagtggttatctgcaggtttgattaatggcattgcatgttcggcgaatctgtttagtgcaatctgagactcatcttcagctgatctcacctcatggctaattgaaaactgtaccattgaacaatctgtagactgcttctgtttttggtgccaatgttgtgatttaaatgccgtatgggaaatgtttatcagaacatcctaagcgtgctattctgtttgttgcaactaacgagatccttatgtgaggattgaccaaaattagttcccatatttatttacatggggctgattatttgaggttttca

SEQ ID NO: 147036 - DNA, 317 bp, Zea Mays
ctcaagggaacctagcccgcgcccactcgagtcgatcaactgagctgtgtagcttgggttggggtacacttgttttgcactttgttagctgtgggtaccctttgagctgaatctcatggatagagagaacccttttattgttgttcaagtttttgtatgtaatcttatattcctcatgtaagcatacaggctattgcttctcggttgtgtagacaggatgagaaaaagactgataaacaaatggtcggcttgaagagggcaagaagatgatacatgtttgagatggggaaaatgtgttatgcaaactccaatttaac

SEQ ID NO: 147037 - DNA, 314 bp, Zea Mays
ctaaatcttcaaaacatgcatgagtttgaattatcgattcctactccatggccaaactcgtgcaaatagatgtttaggtaatccccttattagacctaagatgcactcaaacttaaaaacaaggatctcgattctgtgatcttaacaatccacttctggctctcttatggtcataatttcatcctaaaacatatccttgtttggttgatgcaagctggtatccctattccagtttgcctctgcttgaggatcacattgtcggtttctcaatctaacctggggaaggcatgtctgatcctttccttgaacttgat

SEQ ID NO: 147038 - DNA, 671 bp, Zea Mays
ataaagcataacattcaacaattaaatacgaatgtcgcaaaatacacaccaataagcttactcgcatgctgcttctttgatgcatgcttccgaaaaagtgatgcaatatccccacctctcttcataattcaaccactctagaaataaaaaaatcacagcgcatcaaacaccaaaaattctaaatagtgcaaattgtcatccattaaacacataaactattgcaactgaagctacgatttagaaattagaaattgcggttagttaaacaaaccttggggttgggattccacctactggcctaaccctaacaaggccataaacttagaccagggggcaaaagaggtgaggaataggaaggtgctaacctgcggagaggtgcccgaattcaacgaggggagtaccagagcagagcgagcgcctgggggctggcctgctgggagtcgcccacgcgtggactgggagcactagttggagtagagcgagtgcccgggcagggggctgtccgatttggagtcaccacacatgcagtgtgccgccatatcgtcaccgcgtctcgaccaggcaacgatgcaatagctgtttgcttaggtcccagccgaagggaaggggtggtccttggtggtgtgggccttagggtatgccgcagcccacctgggccaccctgtaggtct

SEQ ID NO: 147039 - DNA, 1216 bp, Zea Mays
cctggcccggagctgttggtgtctgtattaacctctacttggtcaatgcctatattgtctagctactgcttgttgcactccgctacgttactgcctccgtgctctacctcaaggcccatcactacggcatcatcatcaccctacatatgcctttgctttgtgcttggtatgtcacccactccactccagtgacctattaaatgaaacaccatgccaggttgtgccatggtcgtagagacaagtgaaatgacattatcttgcttcatctttgacgccagtggtctatggaggtcacatgatggttcggatgagaaagtctagttgctttgtgcttggtatgtcacccactccactccagtgacctattcaatggaacaccatgtcaggttgtgccatggtcgtagagacaagtgaaatgaacattattttgctttatttgatcacatggttttggatgtccaaatccaaacagatcatattcatgtacatccaaagcaggcagggttaaattggactttggatttcccaaatccaatcccacatgtacttgataatgcatcatttaaattactgaacacctatagattatacatacaatagcttgaatgtgctttctacattggattactatgcttaaaaccttgaacgacaacaacttatttatatgcattagcccctgtaatgtggttttggacgaccgaaatttcaaaaaaaatgatcgttaagagttattccaaattttgtgatcctgcatatgttgagaagattctgtttcaccggttatgtcactacagatgtagatgtagtttctagacactgttttgtaatggactgcttcaaagttttttgttttatggatccataatctcagttgtcccatatgccaaatccaattatgctaatcatttagctgaagccagcagtactcgttgtgttgcagttatagtgatattttctacaatgcatttctgtcatatgtgagaaagcgttctgatggaaaacactcaaagtttcagcatgtatttactgtgttccagttttcaagtcttttgagttttgtttatgctatactgcttgacagttttaaccacctaagacaccaacagtcaggtattttggggtcttttagtcatttagttcttggtagaacttgtgtaccatagtcagtagttagtaatttacctgtgtacctgtgcagagtacaggactgtatctg

SEQ ID NO: 147040 - DNA, 725 bp, Zea Mays
cattgtcgcatcttttcagagtcaattcgaccaagccaaaggtgaaccgcacagcctagggccaaaagcctgtctgctctctctgcctcccagagtcccaggtccccaaggaacgcatcgcaagcttttgggcaaagcgccgcacagttgtaggcagtggcaaaacgatagaaaactcccaacagagttcgctttggaatggatcaaggggtgccacaaaatattagcacggctgctagcctatagcctgctacgtcgagtgattcaccttcgtcattcacagatggagcggatgatgattgtttttacctgcgtttaccgtctctgaaatccacaatgcttaactgcgctaatctacatgaacaggactgcgagtctcttttatgcgttggattgcacctacgtagttgatgatcagtaaccggcggccggccggacgccgtcgcgctggaagtcagccgatccggtcgaggctctcggcgacggcgcgcatgcgcgggcgcatctcggggtcgggctccgtgcacccgagcgcgacgtggaagacggccaggacctgcttcttggcgtgcacctcgccgagcagcgtggggtcgaccacctccgacagcggccgctcctccttgaacgcgcggcgcacccaggcctccaggtccacgccgccctccccctccgtgggctcgcgcccggtcacggcctccagcagcacgacgccgaacgcgaac

SEQ ID NO: 147041 - DNA, 304 bp, Zea Mays
caccacctctaggctgctttcaatgatgttgggggcgacaaggacattggttaagcgaaaaggatcgggaaggactgcggcacctactgaggtgacgggtagggcagatccgtttccaacaacgatggaagaaggaagggaggggtgggaggaggtggaagacaagatacctacgtccggggtggtgtggtaggaggcaccggagtcagccacccagtcagaccgaggtgggtggggtcagcgtcatcgtggaaaaggagctggcgaaagactgcgtgtcccacccattggtccaggtccccca

SEQ ID NO: 147042 - DNA, 317 bp, Zea Mays
tagatttagaggcgagcgtaacccagcatccgactgcgtattggaacggacgagggctctaaagcgccaccggatctcatttcgggagcttcgcagtgaccgagaccgggatccgccgacggcgaacggcggccagccattgggacagtgctcccccaccggtaccaaaaactggttcaggtgtcgtaaacagaagcgaaacagaaagcagaatcaacagctagcagcctagaaccgaaccaaaactggcatcgaaacagagaccagaaacaacagatacaagaacagaactgggtacggcgagaaggctttcagct

SEQ ID NO: 147043 - DNA, 273 bp, Zea Mays
aaacactacttcatcattgttcggtgcaggagtagtctcttctccggcaaatcggacaagttttctttcagtttccccaaagtagccaagcttcatcatcatgggcatgtcgtcttcggacacagtaaatttctcaaaatctagatggctgggttttgtggggatcagaatactgtaatcttcctcaacttcatcaacattttcttcttcagcaacaacctgttcagcttcggcatcaggagtaccttcgttaatagttccctctgtcacaac

SEQ ID NO: 147044 - DNA, 525 bp, Zea Mays
ctctttcaaagcttcgggagcaggagtagcaaccttttcaggcaaaacttgctctgtggccttttcttctattgccctttcttcaatttccgaaggttttttctcggcgagctctgaaggcccagcttcggcactagcttggattactgcagcttcaatttcagtcggctttgtttcagcttcggtttgcatttttgaagcatcagagattttccctgaaggggtggagcttaaagcctttactgtttctaacacatctaacacatttgccatccttcttcttttgggagttgccgcaaaacctttttgtgccttcggcactgttacttctgccgaagggcttaaaatttctaacatttttgttccttcaatttttggctcttcagtcttatctttatcagtcttcgactcagctggctctcctaagggtaccttcggcattatagtcggatcttcagccttctacataggaggaatgggctcttttggttcagcagctgaagaagtctccccaccaaactcagg

SEQ ID NO: 147045 - DNA, 525 bp, Zea Mays
ccgcaagctacgtcactactttgatgaccacaaagtcatagtagtcactggttttccgataggggatatccttcacaacaaggaagccattggccgaatagccaagtgggcctgtgaactgggatctcatgacatcgaattttgacctcgcactgtcatcaaaactcaagcattggttgacttcatatcagaatggactgaacaacaagtaccggagaacccagaaactgcagaagtatggcggatgtattttgatggctcgctgaagctgcagggagcaggcgcgggaattctcttcatcgcacctggaggcgagcacctcaaatatgccctccagttgttatttccagcctctaacaatgcagccgagtatgaagctctgatccatggactaaacatcgctatatcattaggcatcaagagactgatggtatacggagattctttggtagtcataagccagataaaaaaagaatgggactattcgaatgattcaatgggaaaatactgcactaccgtccaaaa

SEQ ID NO: 147046 - DNA, 430 bp, Zea Mays
ccggcctccccttcgtcactttccactatccaaagcttcttcgctcctgcttcccttttcacaccaagcaggacctgccggtgccaaacgcacgccgcatcacacagaagccaacaaggttgagaagagactgaggaggtcagccagccacttgcccacctccgagctgtcccccatgacaccaccgccaccagcaacccaagtaccaaacgactgggccgcagtcccgcaatagcgtcaagatctcccctttgacctcccccttcgccttccggccatggtctgctgccatggcggccggcgccgcagcgccgcgctcctattcttggccgtggccgtggtcgcctgcgctgctgctgcggcggcgcaggagcccaacaccgacgcctacttcgtctctgggtttttctccaagctgggccgcgccgcg

SEQ ID NO: 147047 - DNA, 749 bp, Zea Mays
ctccttctgagtgaaaatatacttgagacttttatgatcagtgtaaatgtcacaagccttgccataaagataatgcctccacgacttcagagcaaaaaccaccgcggccaattcgagatcatgagttggataattcccctcatgctttctcaactgccttgagccataagcaatcactctgccttcctgcatcaacacacagccaagtccaattcgcgaagcatccgtataaactgtgaaatgcttaccgctctcaggcaaagctaggataagggcgtccaccaacttgctcttcaatgtttgataactggcctcgcaatcgctggaccagacgaagagaacacccttctccaaaagtctagtcaaaggcttagcaatgctggaaaaaattggtatgaagcgccgataatatccagcgagccccaagaaacttcgaatttcagagacactagagggtctcttccactccaccacagccgcaacattcttgggatcaaccgcagtgccctgctcataatcacatgccccaggaaagccacttcggacagccaaaatgcacacttcttcaacttgccatagaactgattctcccttagggcacctagaacgagacggagatgctgctcatgctcagcctcgatcttagaataaatcagaatgtcatccaggaacacgaccacaaagtcgtccaagaactcatgcaacatcctattcattgcttccataaaagcagcaggagcattagttaa

SEQ ID NO: 147048 - DNA, 693 bp, Zea Mays
ggaacggaagctacagaacctcttctcgctggagatggaagagaagtcaagctgctgcaactgctatggtgtcttcatagctttgggtgccctctttatatagggaaaagaggttgacgcaactgcacagctgaataagcagacggcaagagccaaggggcatcactagctgagcttgattaggagtctgtctgctgtcatgtctgcattatgggtggcaaaatgagcagcacgggtgaaggggcattgaattagcatcagattcacactaatatcatgtgatccgttaattaacatgcaagttgccggtggaagcatggacagctatttgacttcgctcacatccaggctcccaagacgtgtttaatcatctgattctagaccattaggtgcagctctgaataattagcttattattgtcgcactgtcatgttgcaagtatcggcagcaaaggatctgttctagctcataatatgcgcacgctttgccagagatgcccatgtctcttaaacattaaaacatcgtgagagaatagatatatcagttttctaagggcagacagcagaaaagagcaattccctattttgttcacagtggttctaaattttcctgaatttacatttgattactaatgcctcaccaattccagatcattcactccgacagaagtttaccttcagtccaagacatttg

SEQ ID NO: 147049 - DNA, 445 bp, Zea Mays
ctcggagctatcgtgtacggcagcacgagcactcagcttcaggtcacctcattcattcttgctcacctcgctggtgacttcttcttccctgccgtgttcgtgctcgtccccccctgcaagtgatgcccggtaccgcaatggaggcaccaaagcgtagctgctccccgtcggggcctcgtgggtgcgcgacgcccaccttcctcttctccatcgtcctgctgctggcactggcagtcgctgcttcggtgacggacaccatcctcccgggcgcgggcatctccgggaaccagacgctggtgtccaagaacggcgacttcgagctgggcttcttcttgccgggcgccggcatccaccgcttcctcggcgtccgcttcaagaagatgccgggcaccagccccacgttctgggtcggggacagggtggtcatctccgacatctcagccgc

SEQ ID NO: 147050 - DNA, 1384 bp, Zea Mays
atcgttggaaaccgttacacatgatgctgatactaaacaaatatgttgaattcacaatatatgcatgagatttatcgcatacctctgatatcaatggtcattttaccattgaattcttcattgtttcctgtttgatcttctcttccacctgcataaagcgaagcaaaaaccaattaacacataattcaagaacttctgcagattgatagcaaaaccgaggagctgcttctcacttaatttcatttgttctaatgctgccacgcctggaatatttttgtcatcagaaccatctttgcaagcttgtgccaaactgtttgtgatatctcctttttcaattcctttcaaaatcacctattaacacaagcaaaactaaaaagataagggcatcatatcattgcaagatcttatgccagtaaagacaacataaaagtgaaaattaccgcttcttcagcattaggtgcaatgagagctaaaggatccataggatcttcttgccacaacgaagatatctcattgttaccaatatcatttatcggcattgtgaagtttctaacatcagttgttctatatatttcaaacaactttatcctgctatatctcacagagttactagatggaccaacaggcctctcagaaagtacaccaagatggaatggtcgtgaagaccgactattgactctgcttgtaacagatgtaaaccttctgcgagaacttgtagagtttgggctatcactttcctgcctatagctactgtatccaaatgaagcagataacttctgtggatccgtaaaaagatgatcagatgtaccgcctgcaccacggtttgcaaaatagctggagttccacgatcgagaaatattactgtccctttcattaaccttctcatgattggtaccatccttttctttcccatggcatgtactgtaagaaaaaactttttcacaggagtaatcatcttttatatctgaatctgttgacttttcacgccaattttgagaatctttactacttgcaccccagcgagaattccaattattctcatggtgttggtcatagtttctttcgttactaacccagcgctcttttcgactccgctggctaccaagatattgcttggggtcatcacagtgctgttccactttgttcatatcactatgttctttttccatttccctccattgatttcgatgggaatctgaattcagtctggtgtcttcattgcaccattggtcacggtggccagatattctatcaaacacagaaggcctgaaaacatctcttttctttccagtattgttcccttcttcactgtttcctgtcgtgtttgcagaattaaagtggatatcatgtgaaccaggctcctgcaacaaataaatgaaaatat

SEQ ID NO: 147051 - DNA, 522 bp, Zea Mays
ccttcacgacaacagggcacattcatagcctttgatagggtcatgaacactgttctctatgactgcgccgagctccaaccaccctatggcctccatccacctttgagaggaccaacacactactgagctgtttgtgttccgtagtgccgagattgtctccataacaattaagacattgtcgtctcgactacccatactcgtcgtcagcttggtcgccactgtcaacccaacacctctcctggtggctccgtggggtacctcccccgttctctcctcgtttactgtgtcatcgcaacccacttccaccgactatgttgctaactcttcctcataccccaccacttctgaccacagtactgtttctttaccccatccttgcagccccaccttcccttcttccatcattgtcgataatgaatccactctgcctatcacctcagtaggtgacataatccatcctagtcctttgtttttcatatataaccagataaaaatgaagagtacaagtctagtacatataaa

SEQ ID NO: 147052 - DNA, 884 bp, Zea Mays
gtatggtcgtgctagagggtggtccccttcctcgtttggatgaaaccgttcaagttttctctcgctgtaggagaggaggatgggtttgtcgtgcgtgtctcatcatatgggttccccctattggttggtggatggggatattcattctagcggtggatggggagccattccttaagcatgtctatatgtcgctgcttgtgttctgtgttgttttatgcgatagctgctgcctattctgaatccgtgatctgcggtaccctgttcatgccagcatcgaccatcgagtattcgagtgtgcgtgtgctttcgttggatttgcgtgctcattgatttgtcttgggaagcatggactcatggttgcttccttcctctcactgcaggtgggggccaacgagcggccgcatgctacctttccgaccccgcttccacgccccaccggtcagcgaccacagaagaaattggtgagtcccttgctatctctcacaagtgttgcactcgaacacgtcaacctgcatttgattcagcttgagctgcttgactgttgtgctggtgcgagagggactcgtaaactgttttgaagctgtgtttttgcattagagtcctccctcccacgcgctttattactggtctcaagggaaaggaagtctgaccaggtcggagtgcccacccattcacagggaaaagggctttgtttagtggtggttcaactaagcctgcaccggttttagaataaagcagctcagcagctgctatatatctgtctgcctttgaaagggtgaggcggggcggggaggagcgccgagcgtgaacacaaagtggaatcttaaggacaaagccacaaaaagatctaccaggatggtcctgtgacctaaaagccaaaaaaa

SEQ ID NO: 147053 - DNA, 620 bp, Zea Mays
aatagcttcggccatcttagtgatttcttcttctctctttgcttctgggtcggtcgttgcctcgaaaggctccgggggaggacatagttcagctatgatacaaaacataaataagttcgaagtcacagaaataaaacacaaagtcaaaagcaattaaacaatacctatccgcctttcaagttccgcagctttctcagttgcctttgtcgcttcttttgcatcatgagaatctttttcactcttttttattatctcgtgcaccatctctcggctgccattctcccagatgtcagtaaagaatttcccaccaactaagcttgcttcggccgaggggtattttgtatcttcaatagataaggtagcttcggtttgggccaaagttttcacgtgatcacagcctaatttctccaaaatagccacgattccccctggcacctgagaaggcgcagacatccccgcgaccactcaaaacttcttcaaaggcttcaacttcgttgctgatccaatcaattgggccttcaggatcaccccttacgaagttgtcctcgctagagaatgcgccaacattggcgaagctagattttatcttttgcacacattctatggatttttcgtagcat

SEQ ID NO: 147054 - DNA, 470 bp, Zea Mays
catcctcaggctgttgttgatctgttttgtttgtgcttgtcttgccttgcactgtggattctttagccaacaaacactggcatgacctcagggcctgtcagagttcagcgtatgcaacataggcaagaagactctctgcggtccatgacacagggcaccatgttgtgcctgcccatctcttgcttgctctatcatttgggaatcatgccgctactactgtaccatcttggtttaaaaggaaggctaaagaatttttgactgggcacacagactgacaggcatgagtttctagcaacatcagtaattcagcatgcatgtatgtttgatcagtaggggttacctgtgatttagatgtggttcctgtttaatcgttgtcctacatgaacttggctttgaagaattgtttagacttgatcctaatgtggaatgtttgtacgttagattttttgtgtaaatataagttattgaag

SEQ ID NO: 147055 - DNA, 389 bp, Zea Mays
tcaagagagaaacaccacacgagtcctcggccaaatgtgttgttcatacgctaaactgcacacatcacactactctcctacatacttttattttttgttagcaagctagctaggatattaatattgacgttgctactgaaacctttagaaataattcatgatcgatctcgttttcatgcctatttataaattccttgtcttcctcttcactcggtataaattttatatacctcttcctcttcttcttcttttttgttaccatgaacttgacttattagcttgttattgatgactatattatggtattatattgtgcactagtactccagtagcgcaacttactatgaattgactatattatggtattacattgctaagaattgctaaga

SEQ ID NO: 147056 - DNA, 484 bp, Zea Mays
tgatgacacgtgttttgtggggaaattaataaaaactaatttgacgttgtaaacaacatgttttgcggagaaattaatgaaaacgaacttgatgttggagaaagtaatgcacttttgtgaacacaaagtggatatatacccatatatgagtgatgaatgattgtccagaggtgatcaaagttttgattgagtgtgtgtgacagtaaccatggtgtgagtgacacagactgcacacaaatatcttttgacttatggtatgcaggtattcaatcttgagacgatcaacgacaatggaaaagctcaaccgaaaaatccatgcgcgatggaccaaaagtggtgaaggatggattggaaaaggcttggaccaagttataatgatggactggctagcacttggacacatcgataagcaagtgtacatgcaatgatggtagtaaagacggtgtgttggtcgaagtcgaggcgacgatcgaacctagtcaag

SEQ ID NO: 147057 - DNA, 366 bp, Zea Mays
gggctgggcgcggcacgagctattcccaggaacgcgtggctgtgggcggttcgctggtggccagggcagcgtatcagctcgccggactggcgacgcgaggtggcgaggcaggcgagcggcacggatgcaggcacgcaggttggtggacgcgatagatgcagggcttgggcacagcgttgcacgcagggaggggcagctgcacggcagaggcggccatggccgccgacgggtggggtagacgaggcggagacgcggagtggggggtagacgccggggctagggatgctcggccagggagcggtgttgttcgccgattgccagatgaacaactgcatgcgcattttgagaaaacgtcctagcaggaac

SEQ ID NO: 147058 - DNA, 594 bp, Zea Mays
taaaaattgtgatatccacttacatctctccttcacttttatagttttatgtaatttacattgatgtttttacatttctagaattgacacgatacaatatggttggaacctagggtataagacattgtgcatagaatagaaatcacactaggggtaaaatgggctaaatgatagcctttaattgttatgattagcccaattaactttctcttgggcatcttaatctttttagaggtatattaataacttatgtcacaagctatgatacttaattgttatgattttgctcccactaattttgatgttctttaagaacataatcccttgtacttattaattcgtaatgtagataactcatttacttagaatccaaattcctatccttagctagattgtacttttgtcttgatgaggttatagtcaaatattcatcaatcggtatgagccagaatgataaaaaatgaggcatacgagtttctaataacaagctttgttaaactaatttaataaaatatgcgttggccaaaataaaatgtacagcaactttcgccaaaattagtgaaaacaagtcatactttaattagataaaaaaaa

SEQ ID NO: 147059 - DNA, 566 bp, Zea Mays
cgcgtaccggacgccactgctcaccggatctggagtgtccttgaggcttagttcttcggccaccgccagactcggattctgtacctcgagaccgccttccgtcagcttacttagggcaatctctctgtggacgagtactgccgtcagatgaagacgatggcagacactcttcgcaccctcggggcccccatcaccgacgagtgcctcgtgctcaacctcctccacggcttgagcccttgcttcgatcgtgtgatgcccatcatcacccgcatgaagccttttcccacctttgcggagaccaaggacgatctacttctcgaggagcttcgcctctccgccactgcgaccgccgctcccgccacaacgctctacagcgctcctcaggctccccctctgcctccgggggggatcctcttcaccgcactccggtctcccgccgtctggagctcttcggcagcctactggctccggggggtcgcggtcgtggtcgcaagagtggacgtggtggccggggccattcaccgggtggctcccagtggccatccttctacaacccatggactggc

SEQ ID NO: 147060 - DNA, 505 bp, Zea Mays
gacagttctcctagatggcataacaaaacgtgggcatgctttagctagaaactttctaagaccaggacgttcagacaagacaaaaggttgttcatcctcaattatcatttcagcaaaactattctttaagtcatccatatcaaatttccatgttgaaacagtaccaacactactattgccaggacgaggttgtagttgtaaagtaccttgattatcaattactagtttgtttggattcttcttgcaaacttttagatgacctttcagagaagatgtaccatttgtccttgtgtcatagcgaaagagcttgccacaatacctacacttggctctgtcttcccctccttcagttctaactttgctgaaatgttcccatacatctgaccttggagcaatagctttccttttcttgccatcctcctctgttggtgcatcattgggttgctcttccttgcctttgtctgcatctgtcgctatcggttcttttgcgttcacttcattaaca

SEQ ID NO: 147061 - DNA, 523 bp, Zea Mays
ctgctcctgctcgattcgcaattcccaatctggcgcgcgcacggggcactggttggcgccatttcgccgctacaagcttcttcccataacaaacgaaaacaaaaaaatttccccgcaaatcgcagtccgccgatgccccgcggcagaaacactacgcccatttcaaaatttcaaccccaaaacgaaagttgccgtcgcctcgccttccgatttcgtcttcccaccaagccaaaatgttgctcagattcctccgccgccgcgcttaccccggaaaactttcgagctcgcgcgatctgtaaaaccccgtctttctctcggctgggaactcccgcgcccagaaaaattcttctcccctagcttagctcatccatctcgctgcccgccatccatggagatcgccaagaacagcattgcgagcggccgcgtccgcgacctgccgccatcgaagcgattcaggcacgtcggctcccacctcggatcgactcccagcgtgccgctgccggccaagaagcgcatgctgccg

SEQ ID NO: 147062 - DNA, 672 bp, Zea Mays
ccggctgccacgcggccatccctccttccggccatgtccggtcaccggcgccgcccttctctgttcggccacgccatcgtggatttgactgccttacggccatggttgtaagcgtggcatccttaggagtattctccttgcgccgttgcattggtgaacgccacgggtacaaccaccgtattcttccctatctccggccgccgcgcgtcttcattcaaattcgcggccaccgcccactagctctataaattgaagcctcagcacgttccgctaggtagtcatacatccagtgaaccaactcttagctccaatcgttccccacagctccccaatttgggattacccccaaattgatcgaagaacaccgcggaaccaagcccgccgtggtcagctcagttcgggtcagctccttccctctgctcccttgtttaaacattcacatacgtctgcgatgctcgccaacccattcaattgagctaggatcccatgaatcaccgggaacatgtaggttgttagttcatccgcgcgctcaccgtggccagaaacatttggttagccgttcttgaaattaacttaggggaaacgttcacggggccctgaatctggtttaggatgaagaaggacgccgttcctcgcgtaaatcggccggtacgcgggctcgccggagctccg

SEQ ID NO: 147063 - DNA, 810 bp, Zea Mays
caagatcacttgtgtgctagacggaagggaacaaactcgtaggccgagacgatggccgcgtccagaagagcggcggcggctatgctgtgcctggccgtggcggttgccgcggtcctggcggcggagaagagcggggcggaagcggaacggccgggatgcttctgcgactgcatgaagaaccggtgcatgaccctcggcgcgagcgcggcggacaagttcgactgcgcggccgcctgcaccgagggctgcgcgcagatcggtcagccgggccagcccagggccgacgacttctgcggtttctgagccgcacgctctctcgggctttgcagattatagcaggccggcgtaggctcgatctatccggtgaccggacggcccagttggatgccgccacgaccacggtccacgacattcatgcatcgtatgtgcatgcatgtcccatagcaagagtctaaataaagctggttgttattatttcgtgttactcctatgtccgatagcatatactacaggattggattcttgtctcacgcacacacatactgaacacaaagcccatactagattcggatcttgcctttcacgactagattagtagctatgggtcgatttaattaggagagctccaaaactttatagaactagattttagaacaacttgaacttcgagagctgcgccatgaatgttttgagtctaggaagtaggaacagtatttttgggagttgcgctatggatgtttttttttgttgttgtttacagacagtgagcctgattgtaccactgattgagtctaggaacaatattttaat

SEQ ID NO: 147064 - DNA, 534 bp, Zea Mays
cgcggagtgtcgcacgcgagggaggcttcgctgctccttgcggtgactttgatgtggtcgaatgacgaagaccgtcgatgcggtctttttcgacattgctttaattttttgcggaggattttcgcgtgtatattacatggctccgcctcattaaaaacctcaccctcgggaggaaaagagtgcgggccggaataaaactgtttggtgaattacaagggcgtgttagccctgaggatttaaacaaaaaatttacgcagattgtcaatatttcaggaatgttccagatcttcgccagattgtgttgttagtctgtacgcgctgggagacgacttcgtcttgacgataaatggtccttcccactttggctccagcttacctcgtgcctctgtccgggttgagcggacaagtacgaggtctccttcgttaaattctcttaggacgactgcgtggtcgcgccaggccttcgtttggacttggtatttgttgagggcctggagggcgaagacacggtctccgtcaatgagatctttggag

SEQ ID NO: 147065 - DNA, 320 bp, Zea Mays
ctgcaagtttcgatgtgctgctctcgtatgttgaacagatgcagatcatctctagggaggtcgagatgctcaggaacaaggttagttcagtatttgctgctctgttcctgcaagaagcgcaggtctagcaatttccgtcgccaatggttctttgcatttccgttttgcaggaagccacactgcagactgtcaatggcgtgcttcagaaaagagtactgcaaatctgcatgtcctttctttaaagaacactctctctgacttaatcttgtgcatgcagataattgagcggaatgggattctgaattagaacaacacgacga

SEQ ID NO: 147066 - DNA, 471 bp, Zea Mays
ttggtcttgacaagttcgtcatcttgtttacctaattttctatacaataaataaggcattagatttacagccacccctccatctaccaacattttagcaatcggtatcccatcaatgtgaccgcgcacgaagagcggctttaaatgatttaccgattcctttggtttagtaaaggcagcctctttaggaccaaaatcaaactaggcaacaacaggttcatcgtcaccgacaatagtacaatcgccggaaaatgtaataacatttacatccatacctgggcgctctagagaagcttcgtagtcgaccaggtcttctcccagtaggtcatcctcctccattggtgttggcacatcgtcggaggcgcctggtgtggtgtagacggtccatactccggggtcagacggtccgcgcctggtgcagattgtccggccttgttggccaggctgtctgccatacctgcagggtgctgca

SEQ ID NO: 147067 - DNA, 1375 bp, Zea Mays
ggcgtgagccgcggctcaagagcggggggcgcggcggcggtggagggagggcgcggtcggcctccgtcgcgccgccgcagcggcgccacaccgcctcggtggcggactctgctgccgatgtcggcgggaggaaggcttcgcgggcgcggtcggtggccgacgtcgcacgcacctaccggggctccgaggtagcgtgaactctctgcttcacgcttcactcggaaactgcgtctcaagaaaagctctccccttcgtagtagcttgtgcttgcaactttccatgttccccactcctatttatggccatagcagtataacatattgacatatagactagtaactgacaatcaatctggattttatatccatcaaaacccggttctggctgacaccagggaatgccatgccaattaatctcaatttttttttgtcttgctatacatctggcagaccgatgcagaagccaggggtgtggcaaggaaactgcagtcatggaggagccagcattcagttccagaggtatctctactctggactctggttttgaatgtcagatgttttatttacatgctgcatatatgtatttcaaaggaactcgtaaatttacacatctcacaggggaagcgtaagggaactgatgcaagttgttcatcccaggggtcaacaaccggagcggttggtgaaatagttcgtgtagtttggtactttggtcagccgtatgcatgccacacgatttactggcaacatgaatacttgagtgactactagtgtttattgtacacaggggtgccggcaaatggatgaaactacacagtcagaatctagcactgttgtttcttcacctggccatctcgagcatgtaagaattagagaatcacttgtgttaaagctattgttgttgcaattcattggtgtagctatgaactcgaaaaaaaaagattacttttgaacatttatgtgtgcatatgcagttttctttttctagtgttattgcaatgcatatgccatcgatccatcatgctgcccacttgtttgtctgagttcacaacatgatctctttcaatagaatattgtcaggttgaaaatgtgcttttttagaaatattgggctagtactcctttctctttgtaaaggagaaatgttgcctttatttccagcttttgctttgaattttactttactattttttgatgtttggaaaaaaaaactttgctgtttttatatgacatgtcctttctagacctttcattcatattttattcccttgtgctaagttgttacttgttagtgatgctactatttttatttgaccatttaaaccatttggcagcaggaccactcaactgtcccagtggatccagttctggaaattcctc

SEQ ID NO: 147068 - DNA, 375 bp, Zea Mays
gtttaaatctttaattagaaacacgcttaatgctccaaggtgatctgctctgttgcaacaaataaaattggtgacactacaaaccagcttcgaggatgtctctagatgggcacgtgtcagtaacctatcatctgtaatcctaaaatagaaacagacacacaagtagattcagacaaaattgtgaagagccttttaatactaaagtaatcgaatgtaatatcccaaaaaaatgttgaccaaaagttgatcttcggtgcgtggatgagggaaagggttgtgggccgttggatgcaaagtcagaagtcatccgagacgtcggtcctttctcccacaaaaccctaggtggccacccttttcccttggctggccgccccc

SEQ ID NO: 147069 - DNA, 622 bp, Zea Mays
gcaaaatggggttggatcggagaccatttttagcataatttagcacatttgatggagctgatgtgctaatgggtgctaaactttagcacaatacttttagccatcctgattgtttctttagtaggtaaactttagaaaaagtgcagtgctaaactttagcaataggaaacaaagggggcctacacttatgtgtgtacctaccacacaaaaccttaggttaataatttgcagtgcaaataaactgggcattgacttgccaaacacacaccacagattgaattgaagagcatgagtgatagaggggagggcggccgagagggagctactacgtgtgcgcgtgtggaaaagcagagctcgcagtggtgattttacatctttacagctccctttatgtgtgcacggactttaaccagttttttcccccgctaatgctctctgacttctgacccggcccagcgcctctcgctctcctatctctttctcatcctctatggctagctaccccttctctttccctctctcttttctcctctggaaaagccaagggagtgttctctgaaaagcttcctttgtctggcgagcgaccctccccatctttggagtgtctttttcaccttttccg

SEQ ID NO: 147070 - DNA, 686 bp, Zea Mays
aggagtaagcacctacttttgcaaagctgtttttcaattttttcacgcaatccaaggatttttcgaagcacctttccttggagtcatgtagctcctcaatatttttctctagtctagcttgtgaccattcactgatttctttgctggcttttgcaactgcatagttttcattagcctcggcaagctttttccgaagttcttcgatctcggctttttgggcttcggcctgagcattgtgtctagcttcgtcttctttcactttactcaccaatgaaattaaaatcttgtctttctccaaagcttcgtttcttagctcaattacctctgagcgaaggatgctgagagctattgtgcagctttcgtcttcggcgttcttttgtgccctcaaggcattgctaagaatcaagccctacaagaaaaagaaagaattaagcatgacaatgagatacttcatttccaactttaaagttagcagcttctgtacctttatactgttgtatgcaaggctatccgcaaggtcatccttcgacatggcggcgaggccagtttcaagcttcagaaatcccatacttttggctatctcctggcaaatggatatttctttgttgtgcgagagacagtacaggaaatcatcttcgtcagtgccattgaacactaaggccccctttggatattttagtttctgg

SEQ ID NO: 147071 - DNA, 819 bp, Zea Mays
ttatttatttatctagacaatgtttccgatatgaaatgcacacacatattgttcattttaaatgtgaggtccaatcaaaagtttactttagaactcaataaccattaccctattggttttaataatttctagggtataatctttgttataatatattttaatttaaaacttctagagaaaatttataagtacattattaactaaactcatataaggatctactgatttaaatttttaggaaccacatttatttagatcttgaagaattttgttaacaaatccaaaataagattttgggtattacaaatcctaccccccttaaaataatctcgtccccgagattactaagaaaagggatatagaaggttttgtttgtatttagcttctagttttcaataggtaacaacaatcatgttttagctattggtaaagatagttggggtaagaaagatcaagaccagtataaggaataaagactttggcaagggaagactccctcctgcatagtggatcttgattgaattgaagttctgattctatttacatccttccttgtcgaggttgaccttcttctttcccttagtcttggtgtgatcatccgagtcaggaacatgtggttaagatggtatgagtaggatagactacattaaacatgtcaagatatggtttgatgctgggttggttaaattatgcaacccaacatagatatgtagattatgatatttaggttagaacatgttgggggaagagtctagtcttatttcaccagtattaactaacgtgtttaagtaactcacattagatttgattagattagat

SEQ ID NO: 147072 - DNA, 863 bp, Zea Mays
ccagcaagggtaagcgaatccccgacctcccccccatgtgatagttacattttagtttcctgattggttctgatcggattggcatgatgaacgagttattttgatgcgatggattgctgttagctatatgtgtttaggagatgttggctaggatgcatgtatttgagcgttgcaatttcaatatatttttatgtgaatataagagttaactggcagtacaatttgtgtgatgatagtctcctgatgctttcaactatgtagtttggttggtgttggggctcaatattagtaaactacatatactatagaagttggacaatgttcttttgctgctccagtaaatacaactacaaacccatgttgtgtaagataacactattattgccagttactctgagtgctgattatttaacctggcgcatgtttattggttaggcagaaaacagttggcacttggcaggatgtaccttaatggatagttaggccacacaattgatttctggagaacataagacattttaaccattatatttactaatcccactccttgtttcctgagcaagaggaactcattaattatttgatttatttcattgtgattgtcctgctacatccatatgcttgtacattgctttatgttgctatgtcaaaaattcaaaattacgtttctcccaacattcggctgccgaagtagcttcgaacaggttatagttatggagggtactgatattgagtaatctgtgttgctggtgagaaagggtgttgtctcagtattcaacaatgtctgacgagtaattgacaaagtgctactctattcatgtttgttttcccctacattccaattgttttggggcagaaatttc

SEQ ID NO: 147073 - DNA, 836 bp, Zea Mays
gcgtccagggtcggcgcgttggcggacgccacgcccgaccagcagatggtgcgcctttggtgctggaatgtcatccggtgctaggcgaggtcccaaacattggggcccaaggcgtcgagccaccgggtgccgaggaccacatcatatcccgccaacgacatggcgaagaggtcggcggggaaggcggaactgtcgatggtcagtggcgcatcgcggatgaccccagcgcacgagacgcgctcgccgttggcaaccatcgccgtgaggcgtggacgctgctggagaggaaggcctgagcgttgggcagtcgccttagagatgaagttgtgcgtgctgccagagtcgaggagggtgatgagcgcgatggcgacctgcttggtgttggcagaggggacctcggtgagggcctaaagggagaagacgagggcgtcctcggccgcggcctcctcagactcttcggtggggtcgtcagcgtcgtcctccttgatgccctctaggaggaacagccactgcggggcccgtggcgctggggcggaatactgctcgcgcagctcaaactccaagttgatgctgagcggtggccaaagactgcaagttttggatgcagaagtcaatgatgagcggcgactagagaccaccagtgaagagttggacccgctgcgactcctcgagcagaccggcacgaggaaggagcacctggaaccgatcttgatattcggctaccgttcttgtacgccggcacgcagccagttcggccagtggagcagagcgccgtggcggtccatagcgcaggttgaacagctccttgactcgacgccacgatgggggtgccttca

SEQ ID NO: 147074 - DNA, 388 bp, Zea Mays
ggagttgcgaagtctttttgagggtgaagagctgaggataatgctatttaactattgggagatgggaatcattccgaaggttgaaccaatgtaaggtgtgatgccctcgctgtaccagtgtaactatagtttgtatgatgaggctgtgcgccttcgcgcatccggctatgtccataggggcgttgtgcacttggtctagcacgtttattatgtcggtccggctgcgcctgtagtcggtctttgcgcgaacagtttctcgatgtagacttttgcacggatgtaatgtgccttcgattttgcgcagtcgttgtgctagtccggctgcacccttaggcgacttttgcacggatagtcttttgaagaagacttcgattttgcgcacttgttg

SEQ ID NO: 147075 - DNA, 650 bp, Zea Mays
cggatcctgggggtccgacggtgctacctcagcaccagcgccaccctgcacggtggaggcaaacgcaatgggaacctcttcggccactgccaatggaggacttggcaccgacactgatgctgaagatgcggtagccgctgacagatcaccggcgacgtccttagtgggtatacgctgctgggaaccagacccatcagcgggcacggcgaccgaaggggtacgagcgcccgtggaagcaaaagaaggaggggccctaacaggcaaaggacggttcaagacctgtcaacgtaaaaactatgctcgaaatatggcatttggaagagcttacttggggccatgaacctcccagtggccttggaagcggggtgcccgttgtcgttgctgccactgcccctgcggtgacgatggtcggtctgtcatgggcggcggtggtggtggtgtcaaatccgaaggaggtggcaacgaagggctcacgcccctctgcccatcctggacctgaggttcggcctccttagccccaccagctgttttctgacgcttctgggaggagcccgaatcaaggggtgggtccgagacaaaggacccatcagcgcgacgcagtcgatgtcgcctttcttcccccgatctcccggcggccgagtcaaggggtg

SEQ ID NO: 147076 - DNA, 1090 bp, Zea Mays
atgagccgacttcgaaggacctcatcgacggagaccgcgtcttcgccctacaggctctggacaagtaccaagcccagacaaaagcatggcgcgaccacacagtcacctcgagggagttcagcgaaggagacctcgtacttgtccggacagctcggacagagtcccggggcaagttggagccgaagtgggagggccctttcatcgtcaagacaaaggcgtcccccagttcgtacagactcacaactccatccggcgaagacttagaacattcttggaacattgataatcttcgcaaattttttgtttatctcctcagggctaattcgcccttataatccgcagaacagttttcagccgacccgcactcttttcctcccgtggggtgaggtttttaacgaggcggagccatgtaatatacacgcgaaaaatcccctgcaaaaactacatcaaaaaagaccgactaaacggtcttcgacattcgaccgacagacaagtcaccgcgaggggcagcgacggccacccctcgcgtgcgacaatccgtgcaaaagtcgcctaagggtgcagccggactagcacaacaagtgcgtaaatttgaagtcttctcaaaaaaagactatccgtgcaaaagtcacctaagggtgcagccggactagcacaacaagtgcgtaaattcgaagtcttctcaaaaaagactatccgtgcaaaagtcgcctaagggtgcagccggaccagcacaacaagtgcgtaaattcgaagtcttctcaaaaagactatccgtgcaaaagtcgcctaagggtgcagctggaccagcacaacaagtgtgtaaattcgaaatcttcctcaaaagtctacccatgctaaaccctacaccaaactgcccgcgccaggaccgaccacaggcgcgccggaccggcataataaacatactagaccaagcgcacaacgcctttacaagcacagcgcaggcgcataacctcatcatacaaattacaattacatatgtacagcgagggcatcacaccttacatcggttcaaccttcggaatgatccccatctccctatagttaaatagcattatcctaagctcct

SEQ ID NO: 147077 - DNA, 295 bp, Zea Mays
gtgctcgggggtctctctaacttaggtatcgtttggttcacgaaatgtattaaatagttgcattggcttctacatctataagcttgtgaaaaatccaagattgcctctcttgtttccttgattcttgagctacaagaagaaaagtgaggaagataaggaagggggcaacgaagacgtcgacaaaggacactaacaaataatctaggtaaacgttcagcattttcagttgagaatgggatgcgtttggaactctcgtgttgcacgttcagggtgacgagttgttcataccggtcat

SEQ ID NO: 147078 - DNA, 618 bp, Zea Mays
gagggatagaaactcctttctcttaatcttcatgagcccagcaggaatatggtaattcctgaattgagtggagaattctgcccaggtaattgtgtcgacggcagcatgagcggcgcagtacgcatcccaccaatccgcagcgggactagtaagacgacctgatgcgtagatcactttctctttgtccgagcactgagctacgttgagcatcttctctacagactttagccaatcgtctgcttgtagtgggtccgcggagttagagaaggttggtggtttgtgactcataaactcccggtgcttatccctgggtggaactggtggtggaggtggaggcaggggtgcttgttgctgttgctgttgctgttgcgcccttctctcttgacgtatctcctcccgctcttggcgcatctcccggcgtatatcctctctttcttggtgcatctcttgacgctcctgtcgcatctgagcgtgcatgtctgccatagtgtccgccatttgctgcattatttgcatctgggctgagataactggatcagcaccgactggtggaggatttgggggattcatctccgcttgttgttgttgtctaagcacccttcggttatatggattggc

SEQ ID NO: 147079 - DNA, 1006 bp, Zea Mays
ccgccgcagccccgtggtcccttctccccgccgacccagcgtctccccactcgctgcacgacctccgccttcgcctcgagtccgcgcttgagggcctcgcccgcgccgccgtcctctgcggtgctgtgggctctaaggacgtgctcgccgcgctctcccgcaaccacggcgtcagtaccgcgctctcccgcctcttgatccccccggccacacgctcctcggccacctctgtgccagcccgccgctcttcgtcgacctccgttccggcgctctggtcgagggccgtgctcgccgcggtgcacagggacgacaccgcgttctgcattggcgagggggaggcgactagctgctccatggaggagaaggcatacatgcaggaggcaatggcagccttgcgagtggctaaggaggtgcttgggatgcaggaggggtggaggaaggaggcaattagggagatgaacagaactgggcgattctcgcgctcattggccaattcggctactgactggccgtgcctgttgctggatgttctgtcacgtgcggcagaggaggaattcttccaggtagatctgatgttatttcagttgggtttgtggtggctttgtggcagggttagtgtaacttgacattattgtcttgatgctgctgtcgtttttgtacagccaaagctgatcctgaacaatgtggatgtgttgaggaaggcaatttgtgaggatgagacgatggtgcctgcagcgatgtaccatgatagcttcatttggagggtgattgcacttggcgccaatgaaaagtgcttgccagttattatgtcgacttcagatgggtgagttctcgtactccttttcttgcattgtgcatgttctgttggtcatttctagtgtttctaagagcctataggcaatagaacttgagtttagagcataatcatgttcacatgtgaggtacaagcagaaagcatgactgtttgagaaaagtaatctggtggaaacatagagattggaagggc

SEQ ID NO: 147080 - DNA, 395 bp, Zea Mays
ctaggactaacagatgaacaaattctcaaagtaacatagtgatacttataaaatggtatcaacacaacctggaaacacacactacaaacgaaacatttggatccagttactggtctctgtgaatagcatgactgaattttaacctccaggagcaggggagcacaatagatactcaagattgatatgagcaatctgaaaaaatggaagagcagaagaggaacagagggaagagataagactctaagagaaggattcagaaaccactcatccactgagacagtggggtgtgaaagaaattgagttacgtcacaagacacatcggttggtcgtggatttgcttttccgaataacatagtacatactccctccattctaaattataagttaattttaac

SEQ ID NO: 147081 - DNA, 325 bp, Zea Mays
cccgacgagctccgcacatgctgccacaacggagcacggttcgatttgcctaacgtgaaagtaacatcgctcttccttggtggggaacataccggtacccaggtgcgaacaggttgtctctggatggagcgatggtcgccaggcggttcagtggcgatggcggtgcgccggcccgccgttcttgcgaagcacagggtgaatccccactgggcagaacggcgattcaccaaggaccgcttcggattactgcgcccgcacactctcccttctcaccggcgaggctcttggtcctccctcactctctctctgttagcacggcaatggc

SEQ ID NO: 147082 - DNA, 388 bp, Zea Mays
ctgccgctactcatcagccctccgaagctatagggatcaacagctactttccatccattgttgatgcccctgccaataccatgggccgtcgcttgccattcttcctagctggaactggagctggaagaagcgacatccatgcactccctgtgtgcaggccggtgcgccacccagctcaagtgatggcaacgggtggcgatcctttgactggtcatttcccagctgccatctctgccactggctggtcattacctgcaactaccagcagcggccttccggcatttcccttgcagaatccgccagaacagatagcagcagtggttcctagcaacgccattggcagaagctcctccactcgtcgccctggcgtccctgctactactgagcc

SEQ ID NO: 147083 - DNA, 400 bp, Zea Mays
tacgccggccgattgaggctaagactggtgctaatcttcggctgagaccaaatccgagtccctatgaacgttttccccaacttaattgcactattggtggactagggagctccggccacggtggccgcaagcacaacggcaatgtgatcgtgttcccgacgactcatggcggtctagctcgattcaatggttcggtaagcatcacggagatggaagggtgctcaaacgaaatagcagaggaccggggctgacctgtggagggctgcccacggtgggctcgattcacggcggcggaaaaccgatttgggggcaacgcgaaattcaggcgagctggtgggcgatcgagtatggggacgggtgctagagcttcacaatttcatggcgtaactagccctgccct

SEQ ID NO: 147084 - DNA, 648 bp, Zea Mays
acggaaattaaaacaaatgtatatcttgttgccaaacatgcagctaagggtcttacttaaaaaaaaggaatagtgaagaatatcaagacaaaaagtaagaatgcaggtagtaaagaaaataaaggatacaacacaactgcaggcacagagtaaattaagttagataggaaattttatagaaggatcgctctgaaacacggaaaaaaagttttgtgaaaacaacctgtcgatcagtctccaatccctctcttgcagccttagctgcaaaaatagtaacattaatccactataaaaatatcctggagaaataaaactttctgattttcaatggaatatccaaaaacctatttcctggtttgagccaaattcagcaaaacggttaagtacagtgtcccagacaagcatttctccgtccaatatacatctgcattatcagtaccaattagcatcagaactagagtgagcttcaaggaagtttgcaaaatgaaaagaaaacaaaaaggtccaacagatatccaaaacgaagcttatattgtctaaaaggccagattgcaatatcgaaaaaaattacagtattacttctataggctcataacaagttaatacctcaagctcatcaataactagcttgttagattatgtgtttac

SEQ ID NO: 147085 - DNA, 584 bp, Zea Mays
cgaaggcagtgttcgcctctgtctaccacccgcaatccaacggagtagtcgagcgcgccaatggcaagattttcagcgcaatcaagaaaaggctacttgatgacaaaaaggcaaatgggcggaccaactccttgaagtcatatgggcattaaacacaacataatctagagcgactgggttcacaccttttcgcttgatgtacggatccgaagcaatgacaccacaagagctaaagcacggatccccacgagcaagccccatagccacccatgacgtcgacgaatcaacctctaaagacctcatcgacggagaccgtgtccttgctttagaggcactgagcaaataccaagcgcatactaaggcatggcgcgacaacactgtcatcccaagagagttcaatgaaggagacttagtactcgccagaaccatcagaacagtctcggggcaagcttgaacccaagtgggaggggccctacatcgtcaagaccaaaacatccccgaacgcctacaggctcacctcaccatccggcgaagacttagagcactcgtggaacgtggataacctacgcaaattctttgtctag

SEQ ID NO: 147086 - DNA, 347 bp, Zea Mays
caagaatctttattggcttctctcggtactgaagatctttctgaatctagattgcctcttcttcgatgtgactttttggtacttgcatacatttgcggagctgggacacatgaaacacattgtggatatcagacatggattctggtaattcaagacggtatgctgcgggtcccattctgccaatgatgggataggggccgacgaattgcggtgctagctttccttttacttggaaccttctgacaccacgcatcggggagaccttgaggtagacgaagtctccttcctcaaatctgagttctctctgcctgttgtccgcataacttttctgctgactctgagcttca

SEQ ID NO: 147087 - DNA, 349 bp, Zea Mays
cttgaatcgagttaccatttgtggagctgcaacatcagtaccagatggaatggatacaaaagtttactcttttgccacaactttagggggtgcaggcgcagcagatggtgaagccaagcaatttgttggtgaaatggaatgctgctcagtgtgtggtggtggaacatcgtcagttgcactggagtgttgatcgacagcagcaggtgggtcatctgaacagcgactacctgtagaacctaaaactgtggcaaaaggaggctcgagcgagccattaggtagcaataaatcaagtctgtaatgctgcatatggtcattggaaatagctggttcttcagaaggaaacaaggaa

SEQ ID NO: 147088 - DNA, 338 bp, Zea Mays
cgggcgccgtctacccctacgggatgccgcaggacagcacgacgcacaccaccgcgcccgcaccggcggtgtccctcggcgacgtccccatccaggagatccagttcccccactcgccgtccccgcttccgctgtggctcaccgacgtcgcgcagccagtctactcctctgcgccagcacgcccgtcggtccattcgacccctcacatcacagcgggcttcggccatgggggcgttccggcgtcgggaacgctctatggcggcgttgacggcacaattctccacggctccactttctgctccgcgccggctgcagctccagtgatcggcggggcgccc

SEQ ID NO: 147089 - DNA, 343 bp, Zea Mays
gttgcaatgtgtttactaatgatttcattttcggtaccgagatgcaatgtctatacattagtacactcttggttagactcttaaactttgaccggcaaaatcagaagtaaacccacttaagcctcctctacaccatctcactacctgtttgctactcagttaaaccttctatattcaaaattggtttctgttagtgtttttagatactccctaatgtgcttttccaaagattacaaattatatttttctcacaagtcctacctttatgtatttctatacctacaaattattattttcagttactaactttgtcgtattacaattgtcgccaccaaaattcagg

SEQ ID NO: 147090 - DNA, 398 bp, Zea Mays
aaccgaaggagaaaaacaaggaagcggcgttgactcggtttgtggcattgactcggtttgatgtaaccgaaggagagaaacaaggaagatggttgcggcgcgctagggtttgatgtaaccgaaggagaaaaacaaggaagatggttgcggcgcgctagggtttgatgtaaccgaaggagaaagacacggaagaaagaaggatggtgagaaaaaacacaatgcgaccaacaacaaatgacgcgaaagcacacaaattcaacaatgcagattattgaaagaaggtgcgaggctcaaaagggtgctggtataaggtctaacctgaatttttatgtggtttttgtggactgtaggagaaaaaaacactcgataaactcaccgatcaacctggaaatctgata

SEQ ID NO: 147091 - DNA, 466 bp, Zea Mays
caacgcaccatggctccgcatagcgaccatgatggagagccccgacacagggcccccggcgccttcccaatttaatccaaagggcactaatcgtggcataggtgaactcgaaccgcttaaggagatggttaccgtgattatgggtgatggtgtggacacgagcccaaccgcggccatgcagtcccctctcttttcttctctgcgcttggtggcgaggcgtattatgggtcgaggtagccgtgatgcttgggttaaatagacgagcggagcggattagggaatccatgcatcgtccataaccataccgcgatgaatcccatcggatttcctggaatcacgcgtggtttgttacggtcggctttgggaagaagacgactgacagcacggccccacccatcagcgagacggtgcgcgcgcggaacgggagggactgacggccgggccccatgcgtcatttgcaccaggg

SEQ ID NO: 147092 - DNA, 438 bp, Zea Mays
gcgtcaccttaacccgacgaatagctcgccgcagacttgctcctccggccgaaccgccattcaccgtcgggccactcgcgccgacactctccaccgttggtatgtggcttattgtgttcgtctctccttgctctttgttaatcacgggtgtatgtgggggattcgagatcgaggctcctgttgaccgtaactccggcatggtctccaccgtcggacctgggcgccgccgggtaccgtgaccgggattggggatagtagcccacgccgtagatcatcgcatggacggcctcaattagatctagggataccggttcggctggatggcatcagtgccgttggattgtagacgtgtggccaggattagatctagaagatgagtgtgtgaccctcggatctggacgaatggttcagatttgatccagcgtgaggcattgttcc

SEQ ID NO: 147093 - DNA, 328 bp, Zea Mays
ttttttttaatagtcaatagtgggtgattaggagagcataggtatttagctacctattatgtaggatataagctggacaggttgaggtaagaaagattatggcaaggacaagatttcattcgaaatgtttaagtcttgattcatctcgagattcgctttgactgttatatccttccttgtcgaggtcgtgttctcttccttcttggatcttggtgtcggtgtccaagttagggttatgtagttaaggtagattataggtagcaacagatagtcaataggtaggtagcataggttgagtgtgttatgtcaaattctggtttggtggctt

SEQ ID NO: 147094 - DNA, 557 bp, Zea Mays
agctatccaccttcccaacatgctcaacaaaagattttgttgcattcttccaattacaaaaacccttgcttgtgaatgcatcaataccaaaattttcatgtctttgttgtttgaatagataacagtaaaaacagaaggcagcatctttggtaacactatactctaaccaattatggttcttgaaccatgaatcatgaaaacttctttgtcagtctcccatcttttttaggatatatatggccaattggttgacatggaccctgtaacaaatactctcttctaacagcatccctaatgttaacatcgtattcatcaattggttttctaagcccaggatcaacaactatatcgaatacctgctcagaaggtggaatttcttgctcttgttcatgtgaagttggatttagtactgcctcaatagtagcctcctcggttgaaatttcttgggcttgattgttactggttccggttcccactgttggttgagaattgaggtttgatcttggctgcacattacacacgacgggtgtcagagctggagagaaaaatgattgtaa

SEQ ID NO: 147095 - DNA, 1316 bp, Zea Mays
ttcttttaagaacctggaatatctctctatatctagaatcatggcaataataagataataagtgtaaaacaagccatggatttcttaataatttaaaacatgtagattgccatagtatagaaatgatgaatgtacaatctaccatatgggaggaatttcttcaaggaagggtgacataattttaagaacattttaagtgcttcctttttctatgtgactacacaagacacataagaaatgatattctaaaaatacttgcactttaaaagcataaatgttacaatcctttgactttcctccaagttgtaggccttgacttttcagcataggatgattctttatttcctacaacatcaacactttcctcgagatgatatgagtttaagatataacaattcaaaataaccttgggtcaatcttggatatagatcattaaagattgatagcttgagttaataaaaattgaattgactctctcaagcatcccaaagcttcataccatctccttttcctgcaaagcttgtcaagcatgttttggtacccatcgcttgatggatccattatggttagtcaacaaagatctaggaacccaaatgtcctttgttctagcgcttggcagattcattgcctttctagcacaagtttcaattttgggttgcctagttatatatgaatcaaatgacaagctatgagtggaggagttaccaatgggacaatccttgcattgatgtcccttttcccggcatttgtagcataggcgttttccaagttttgaagatatcttctttccttgtttgttgcttgctacatggttagtaaaaactttcttttctaaccctatgcccttttgttttaaatggggacaagatttaaagtgtcccttctttgaacatttaaaacaaagttcataatccttgttaataatcaagccatttttaatatagggacaagatctaatcaagtgcccctcttcaaagcattcactacacttcttgattctatttgtatgaagtgtaacttgattattaccttggatgttaccttttatggaggcatggttgaggcttttggaagaggtattgattttcttcttttgcttcctcctcttggcaatcctcaagtccttgacattttcttcaaggcatttagtgcatgcctcggttgttcccgtctcaagcttcttcaccatgtgatcacagttatcttgagaaggttgagcaatgcatttcccttttagttgagtcaagctcatttttagcctctcattttcttctttgagcttttgatatgtatcatcgtttgctcctgcagatttt

SEQ ID NO: 147096 - DNA, 986 bp, Zea Mays
ctccacatgcacatgtcttacctctgttgtgttctgctgatccattgttgttttgtgttccttcagacaacaatccattcctttcttattatggtggcccaacgcatgaatgccctttttgcggcgccttcttttggttccaggagcgtgtcaagagtgcttctgctgttactcagcggaggattgtctacaacctttgttgtaagagtgggcggatcaggttggaaccttacaaaaaaacacctgagcctctacgaactcttctgaggtttgatggcgacgctcgctcaaaacggtttttgcgccagatacgatattacaactcgcttttcgctttcacctccttgggtgcttccgtcgacaaggctataaacaacggtactgcaccgtatgtttttcgaattaacggtgtggttcatcatcgaattggaacgttactacctcgtccaggttcacatcccaagtttgctcagctttacatacatgatcctgatgctgagctacaaagtaggctccacgtttttgagagcgatgatgccggtgctgcttgcccagactccgctattacacagtccttgatggagatgcttgatgcgcataacgagcttgtaaaggcctttcgttgtgctcgtgaacgcatagaacaaacacacaatagcgagataacgttacgtttattgggttgcaatactagacacgatgtccaatataatttgccttcgagcggtgagatagctgccataattgttggtgattactcatctgctcagtacacgtacgatgtccttgttcatgctaagaaccatggtctcaaacgtgtttcgcatttgcatccgtgctatatggctctgcagtacccactcctttttccctatggtgaacatggattccatcttggcattaggtatgcggatgatgacgttaacaaacgaacaaaacgtagatacacaacgatgcttgagtttgttagataccacacacactat

SEQ ID NO: 147097 - DNA, 347 bp, Zea Mays
cacgcacagtagcatcttgccaggttgtttcagtgcttgattgagctgtctgtggtacgacgaccccctagacagtggacggggatctcaaggaaatatcttttctttctgttggtcggcatggattcttcattaatttgagggctctgttggattgaaatttgaatatttgatagcctagggagtttcattccattccactccacagacctgtagccatgtggggccaccatctgcatttctatttgctaccaatcatgtgcaaaatgtaaaacctactactcgtttcatattctaatgccagcgcctagagaacggttaagcgttccatcaaaagaagaacaggc

SEQ ID NO: 147098 - DNA, 412 bp, Zea Mays
gacctaggaattacagaggggaggaggaagacgtggtggctggttaggaattaccgaggggaggaggaagacattgtggccgcccctgctccgtagattgatctattgacagggaacagaaggaaatcttgaaggagatctagtgagcttcgattcaggcggggttgttgtagatcgtgtcaattccttttctgtttacgcgcgggttgaggtaggtattcacgccaatcactgtggtcgtcgtgaaggaaaagttggattctatgtttaacgatcacagaggtcagctcgctaaccatgacatgtttttggtcgtcggctgggttggacagagcttgcactgtgccgccgagactcctcacaaccacatattacaggtggtcttcattttctggtcgttgataagcttttc

SEQ ID NO: 147099 - DNA, 278 bp, Zea Mays
cctcagcattaggagaacaaggagctctgattcacagatcatagaattatcatggattactcggtgtaggatctttgtcacacagcgcttagttgtaattttgtttcctggctgttgcagttgagtcgtactgccgtagtcaaagttgcagctggtaccattgtggattgggtgtttatagctctgcactgtttggtgttttgattggtactctggggacagttgtgctcagatgttctcttgtggatatactcaaggttcatcagctaggttcttat

SEQ ID NO: 147100 - DNA, 2364 bp, Zea Mays
tggaggtggccgacgccgacgtcatggagtggacggaggagaatttgacggcccttgcgcgccgctcgcctgaaccgccggtgagtacgtgcgcacctcccgcgccgttgatcgccagctcgcctccgactctttttatttcagcgatcatcatgtcatgtcaacttactatgcacgcacttgaaatttgaaaactggacattaattgatgcaaaatgctccatttgggcaccgaaaatgatcaaatttctgacggagtcatttgatttgtagtttcattgttcccaatttgggatgttcacaattcataagtagtcgcaagtcgaaatcagattcaggcaccccaagtcgaaattgcctataaaaattggtaattacaaaaaacgaggtgccgttttttttttgcaagagatgtgaacatggtagattctaaacacaaagctgaactgattgacaccttgagagaaatggaaaaaaggggagaagtttcttccattctctgaaaaagagtggagcttttggatcaccgctcgtcgcggaatgggatatttatatggggagaaatgattggcgataaggacaacgattccaccagtatttgttgctagcgtgagtcactggaaccaaaagaacacaatacatgacgcgagttccagagtctaggtgcaaggcagctgtttatatctgcttttgtgttttcgtgaaaatggtttccatgttctttgatgtatctcactgcattcacatgcgagatacatcactatatttcttcacatctggtcatttttagctattgaggtccagttgtacctgaaaaagaaatgttcagagcgcattcggttggtgtcatcgacgttgggggtgtttgatttccttgactaaagttcatgtgacattgaatatttgaatatatcaattacaagtattgaatataatctaattgtaaaactatttatacaaataaagactaacgacgagacgaatttattgagtctaattaacccatgatccaaccacgaaacatggaataattagtcttaataaatctgctcgtcgtttagtcctcttctatgtaattacttttataattaaattatatttaatacccgtatttgacattcaaacaatctatgtgacacggtctttagtcacgaataccaaacactccctaattgtcaaactttcaagtaagaaaacaaaggattgaacgaataagtaactaatatgttagccaacaccatttaatttattattttaataaaagaatgattcttaacctttcacaaaaagtttttttttggaatttgctgctttaccatgttaaaccagtatcatggcgtccttaaaaaacaagctttctaataatattggaaaaatcagaatttgcaatagtatacataaagttcaccttggaaagatggattaaggtccaatgaggcccgaaggtgtggctttgctgttttcaagactcatctcgtgaaagtggtgactttaatttggtagtagggacaacaagcttcagttcaggaaagtttgggtaccctggcagagacgcagagtccgccagtaaagcaatctggtgtccatattcagccaaatatttatatgcacgattcataaaaagcaagacattttcgttcagattccatgccatgcgaagcttgacttcactttatgttacaagagctagactagatgtggttgactgatttttactgaagttcccttccaaacacggacagatacctgggatatggatgaaaccagacagtgagggttacagccagtgcattgaacggccgaagaatcaccgcagtaatttacccccgctcatcgtttgatttgcttcctttcatgttcagattcagctgcattttcttaatcaggacacgcttgcttcagggaaaaacaatgcatctgtcggttacctggtcgttgatgcaaacggtggcctaaaccagatgagaatgggagtacgtatacacttgtgctagtgtcgtggcaacgtctttcagctaactgtcattaattccttggcaactattcttacagataagtgatatggttgcagtggcgaagatcatgaacgcatcgctggtgatccctactctggatcatcagtcattctggactgacccaaggtcagtgactctatatctagctgtgctgaaccagcctgaagaagaaactgcgagcagactgacgactagtgtttttttttggtatgtagcgatttcaaagatatattcgacgtcgatcacttcaaggagtcgttgaaggaagacattgtgatcgtggattccctcccaccacattacagaagggtgaaaccgtacgtgagagcgcccacctcctggtccaggg

SEQ ID NO: 147101 - DNA, 1358 bp, Zea Mays
ttttggtccccggaggacggtaaggctattttggcctcccgcgacacatgtttttgtcgttgaacaacaatttgatgccacccgttcgccacccttgttttggccactaagacaggtaaggctgtttttggcctcgcgtgagctacaacacatgttttcatggccgaacaaccaatttagtgtccaaccatagtacactagtgttaaaaccatagtacacatttttgtccccggaggcctgtaaggctatttttggcgtcccgcgacacatgttttcttcgtcgaacaacaatttcatgcctcccgcccgccaaacatgttttggctactggcatgggaaaggttgtttttagcatctattgagctacatcacacaaaacacttaaatcctaaaccccgagccccaaaccctaaaccatgaacccgtaaccgcgaacccttagactaaaacccgacccccaaaacacaaaatcacaaatcccaaactccaaaccctaaacattaaaccccaaacgctaaccctcaaatcgaaacccgaaatctcgaatcccaaaagcctaagctctaaacctcgagccccaaacgctaaggcctgaacattgaaccccaaaccctaatttgtgaaccctatacctcgaaccctaaatcaaagacccgaccaccaaaacacaaaactccaaaccccaaacttcaaaccctaaaacacaaccctaaaaagtaatgtaaggctgtttttggcctcgcgtgagctacaacacacgttttcatggccgaacaaccaatttagtgtccaaaccatagtacactagtgtccgaaccattgtacacgcatttggccccggaggccggtaaggctatttttggcctcccgcgacacatgttttcgtcgtcgaacaacgatttcatgcctcccgcccaaactctaaacacagagccccaaaccctaaagcccgaaccctgaaccctgaaccctaaattgtgaaccctataccccaaaccctaaaacgaaaacccgaacaccaaaacacaactccaaacccaaaaacacaacactaaacagtaaagtaaggctgtttttggcctcgcttgagctacaacacacgttttcatggccgaacaaccaatttagtgtccaaaccatagtacactagtgtcactgtaaaccctaaactccaaaccccaaactccaaaccctaaaacacaaccctaaaaagtaaagtaaggctgttttgggcctcgcgtgagctacaacacaagttttcatggccgaacaaccaatttagtgtccaaaccatagtacactagtgtccgaaccattgtacacatttttggccttggaggccggtaaggctattttt

SEQ ID NO: 147102 - DNA, 506 bp, Zea Mays
gtctgcatttcagtgtgattgcctcaacttgaagcccttgtaactttcaaattatggggtttgtgccctaggtcaccacatcaaaattgtagcccaatcataggagaacaactttgcttaagggtgtgagctcagttgttaagaaaaatttggagataatcatgctcaaactttggctgtcaggctggattcattctgaaattcagcttttcagtgtaacagggtcaactttgagtatgaattcaaccttgatccagtgctcaaataagtttaatccctatagtcgagttgtagctggtatgtagcactacaactttgatgcagagacttggacctgttgtcacatgaaattggaagaaaactcccttgcaaatcgttctgtcagttgtctaatggagcactcgccatggtacagtgtcgtgtatggatcagatcggtcgcggcagaaaaatctcaccgccggcgacctcttcgccgggattcgtgctacggccgtatgggttttg

SEQ ID NO: 147103 - DNA, 321 bp, Zea Mays
ggcacggcacaccacctctggctcactctcgagaaccagtttcttatgaattgtgacctgcatcctctaactcaacgccaccttccacacctttgtccaggatgacctctttgttggtgattactgctacaagctgaaggggatgtccgactccttggctgacatgggcacgtcggggccatcattcgacgccccccttcctatccttccttaagattcaatacgatcttgttctggaggatctcaacatgaccaccactggtcttgctgttgctctaatggccttcatcgccactcccccgtcgatcgcccccacatcgg

SEQ ID NO: 147104 - DNA, 839 bp, Zea Mays
ggggcaaaagccaaaccaaacacaccctcatattcattcatctcttatgcttttgatatagaattacagactgctgtgttttaatgacatcccttggttatctttggctgtttcttcaaagaaaaacatactatattggataataatgaagtctatggttgtactttattttatttcaccagatggttatatgttgtctaccagaatactgcattgaaaataattttgcggtgtgttatgactggcatggcaccagcaccatgcgtttattctttgaactatgttttagaacaaggtccctaaagcccatggttttcaaatcatccgattaatcgcgatttattgcgattaatcggccttgtcggtcacctgcaggcgattaggtccaacgacctgattaggtgacctgctggtcatggattttttagagcccaacccagctcacctgctgctctaaaaatgcgttggtttggctgcaaaaaactgagccatgtcggccctggtcatccctgccccttcatatcccaaggaaaatccgagagtttttaaaaatggccatgtattctgagatcggaaatggggcctctaccctcttctcgatggctgggagggcaacgagtagtggatattgctcctcgccttttagagaccattcataagaagctgattaacaaaaggacagttcaggaggtgatcagagataatttatggattaatgatattaatgggagtttatctgttggagctcttgcagactttctgcgcctttgggatatggtggcccaagttgatctttgccttgataaagaggacacgcatatttttcggctggctgctaa

SEQ ID NO: 147105 - DNA, 535 bp, Zea Mays
gtcatcaaggctggccagggacatctcctcggtgtcggacaggttccttggagggttttcttccttctgctcagtctgacatccttggcttttggtcttcttgcgggggcgagcttcttcagtttcttgtcatagtccatttttagggtgcggtaagcttcacgggtattggtctcttcgccctcagctattgagaggctctcttgaagggacgccttttcttctgaaagttccctgactttctgctccaggctttccacccgggaggttagggaggtgcagtggagggcgaggtcatcatattggttatcaagggtgtgaaggtatccggccatgtagacaatggtgggatcattctcgataggatctcctcctgatagggcctgaagtcttttcctctaggtgggggtattcttgttgctgggtggaaagtagcgaaggggggtttcaaagattactttgttttagttctgacacagttgtcggagggcttttcgggcaacattttggcaagtatctgggaaacggtatccgg

SEQ ID NO: 147106 - DNA, 469 bp, Zea Mays
tcccagatctcacgcacgacataaacaaaaagcaattacctttctcttccatggctgtaactccacgacgtccttctcagtcttccttgcgcataccagggatgaggggccggtctccagacagccagcggactcgccgacgaccatggctagcagcgatggctgctcgccatagccaggactagacgatagtggcgcagatgggaggtcgctcgatggagcctaagctggcgagcggcttgtcggaactgaggctcggccagcagcaggcgggcgggcggctacaccggcggacgatgctccaggtggttcgatctccaagtggcatgcggggttctaggcgaggagaatggggaggggaaaagcaggactgcgacgtgggtggttttgctggtgagatgggcgtgggcggctggagagcgcagggtgggcgctggccgctgggctgcgcagatcgagcgcggcgtag

SEQ ID NO: 147107 - DNA, 314 bp, Zea Mays
tgatattgcattcgcggtaaatctactagctagatacagtgtagacccaaccagaagacattgggtaggtgttaagactatacttagatacctcaaaggcactcaagatcttggcctgttttttccgaagaatcaggaccagactatggtgggctatgctgatgctggatatcagtcagatccccataatggtatatctcagactggctttgtatttttatgtggtggcactaatgtatcctagagatcatgcaaacagacattagtaacgacgtctactaaccactcagaaataatctcgctatatgaagccg

SEQ ID NO: 147108 - DNA, 586 bp, Zea Mays
ggataacatgttttctttgaatataaaactaaagagtggtttctgatcggatagtgtgtttctaattagtctgttggattgtgacccatgcagaacaccgttccaccaaacaggaaggcagaatgtctagtaactgtgaggtcccatagtctttactacctacgaaggacgaaattccggagcaggatcatcattctccaccagagatcaacttccaactgtgcattcctgatactactcagaaatggcttgcgagttgtgcagattccataactggccttctttgactaattttacatcgataccggacatcacatcactatagctgttcatagttgtaaagttcttattaagtttctgaccacatcgctaaaaaggtgtttctgatcactgtcaccccaggacctatccaagtcgctttccaatgcagttagacagagaaggcatggctgtgatgttataatgctgaaggaccccaagaagagattattgcgtgccattcacatccggacagagtacaccggctcaccatcatatggccccttaacaagcccgcagatgtccccagcccaaaggtcgtttactg

SEQ ID NO: 147109 - DNA, 786 bp, Zea Mays
agattttatttatccatttattatgaactctggcctgggcgcactaaatctgagaaaggcaggggcctcggggtaaaattcctaaggctcagggaacagcgcataggacggcgggttgatattctgaaatttcaggggctctttaataaaactccagggctgaaggggtatcaagcgatctgagccacccgatctgaaacctggggtccagattagatctccataagcgaaacggtacgcgatcattcaccgcacgatcagctatctacggtggagatcttaaaatacgtgacaacccatttcctccacccatctacggatctgcggttcagattgtttcaaagtgaaacgctatccatctcctaatcggggccgcgcaaagtgcatccaatggtccacggtaacctccccaatcactctgccagcgacggcggtgccgcccgaaatcacggcgatctctcgccggagaggggcaatccgacgccgtgtcacacgatcctaaccccggataggtgctacatcgagctggcaaccaatagaagctatctggaggtcgtaccagtgaatcggtcggcggtagggggttccccaccacgaatggcggcccggcggcgaagttttggccgcgacgatcgaatccccacttcctttccgcaatacgccaattccttcgtctcacagggtcgcccgatgaatcccagagatgctccgtgccaagtcgtcgtggcaacactcttcttcaacagctacggtcccgaccaacttggtagcgacggtgacgctttt

SEQ ID NO: 147110 - DNA, 403 bp, Zea Mays
ttgaattcatagttagattggtcatttcaggcgatcaaataccagatgtagagaagtccttgctttaaccacctcaaatttctttgttttagattgcaattactgtagcacatgagctggctcatcagtggtttggcaatcttgtaaccatggagtggtggacccacttgtggctaaatgaaggttttgctacatgggtaatcaattttagaacctaacatttcgatgtttcagttcgtaggctgccactatatattgagtaaatagaattttcttttaacagatgagtaatctagctgtaaattctttctttccgcaatggaatatctggacacaatttcttgatgacacaaccgctggtctcaaattggattcacttgaagagtctcaccctattgaggta

SEQ ID NO: 147111 - DNA, 1010 bp, Zea Mays
acagatctgtcattgtcactgggtaaaccactgtaattgtcacactagcagtcatctgattcagttcaaccctctgatgcatgtagctgttcatcatgataatagaaacaattcatgtccaaggtggcaatatttatattgtaccgggataaccatcacaataggaattcaaaacttggtcgtaagttcttgttagtagttaacagacatgatgtaactgatccatggtaagatataattctgttgaagtgggtcctgttactcctgtatgaatgcatgtggaataacttcttgaaaagtcacatgtaacacgtgacatttggtaattgaaacaaaaatatgatgacatcaaaccctaaacaacaaaattgatgttccttagaaacaacaagagaaactaaattcatgtgatcaattcattatctaggattatgcttgatgtaaataatcgtatcatacaacacatcggttaagatacattgaatcatgcacacaatgagcatagtacaacactacaactcaacgttaaagtacctgcatatacaccacaatcacacagtcctattttagatgtatctgcaacatattgggtttaagcttagaacagtttcttttttctaatcatatgcaccacaatacattatccacaaaccaagttgaggtaaatttttcacaaggaactgttgcacataactctttcaaaacaagttcagcagattttctaagcaaggacagtacgaaggagtaatcataaaaaggttttagcaaatagtaacaacaggaagcaacaaaaaaaagacaaaaatagttcatacaagaaagccttctttacctcaaagtgatgactaagtagaagaacatgttagagaaactatttggtcctcccttaaaaaatcactttcgtttctttctgcatccaggtgtcctgcaaaattacaaagtatggcaactaatacaaatttaaagaattggctgtatacttgtgataactaagcaaactttcctgcttt

SEQ ID NO: 147112 - DNA, 387 bp, Zea Mays
cacacccaaatcgtcggcaagtgtgtcggcctccgcgtcgtcgtccagctcgatgaagaataccccgcgggcattgcacttgtggtcagcagtgtacttttcggcgcagtggtagcactcgccgttggcgcgcttggctgccatctcctcagcagtcaggcgcttgaagcgcggtctggtgaccatcgtcggccgctgttgggctggcgatgcgccagtcttggttgttggtgcgcgatacataccccgcaacgccttggtggcctccgtgtcgcgccgcttgtaggcccgggccaggttcatggctgtttgtagatgggatggggcctgcagctccacgtccgtgcgtaaaggctcgcacagacctgctgtgaataaattaccttg

SEQ ID NO: 147113 - DNA, 754 bp, Zea Mays
ccaaaaggtgacgttgcggttgttaggctgtaacacacgtcatgacgcacaatacaacttaccagccaatggtgagctcgctgctataatagtgggtgattgcttatcttcacaatacaagtatgatgtcctcgtgcacgctagagacggtggcctcaaacatgtttcgtgcttgcacccgtcgtacatggccttgcagtacccgctgcttttcccttacggtgatcgtggatatcatcttggaataaaatacgctgacgtgggagaaggtgatgtcgcatgccgcaagtatgttacgatgcttgaatttgttagacatcgttcacactataggctcaacgaaccgaacccattcacttgctatggtaggctaagcaaccagctagctgtcgatgcgtattctacgatcgaggcgtctcgattgcagttcatagcggaccaccaaaaagaattgcgttgtgaatccgtacagggaataaccgatgccattggcaagggtctcaccagtgctgactcggttggggcaagagttattgtgcctgcatcttttacgggcggccgaaggtaccatgtgatgaactaccaggacgcgatggccatctgcagagtatacggcccaccagatctcttcgtcaccttcacatgcaaccctaaatggaaggagatagtcgatgcccttcgcttcgagcctggtcagcagccatgcgatcgttccgatatcgttgtaagggtgttccatatgaaggtcgatgaa

SEQ ID NO: 147114 - DNA, 522 bp, Zea Mays
aacacattctccacgataatcacccaacaatttacattttaaattagtcattacatgagcactactactttttacccgcgaccgtaaccatacacatttagaccacaacaagcaattcaccgtgattacgagcttaaccaagtcatctaacaattcggctaactagagcaacaatataggccgctatacatcacacacgtcggctagtctattattatcgaaatccgagacacaacattgtatataacaatcacttaacgcaatcgactcctgcttaacacgagttggctaatgacgtgactatttcccaattaccaacatacaccacctttcgccatttttggataacctgcgcgacacacagctattgtaatacatctcaacttcattcaaccccatcagtagagcactagcacatttcagaaaatttcctgagacttacgatgacaaggcatcgatcttatcatgcacatcaaagcatcacaagcgtgtttacggaaccaatcggttaacttgatcgac

SEQ ID NO: 147115 - DNA, 587 bp, Zea Mays
gcttcggaaaacccatgcttctagccatcacccggcagacggataattctttgttgtctgggaggcaatacaagaagtcatcttcatctgtaacattaaacactagggcccctttcgggtacttcaactctcgggcatagcgtttagcttcaaaaatttcttcctcagataatctttttcccgaagcatgttgaatgatataatcaggatattcggaaggtgcttcgggagcaagggattcggtttctttggccacatttctctcaaaagctatatcagtatttggaggtacttttttggccccttgctcggctgtggcaagcttcgtctcaataggcactgtgggttcggcctcggttccagcctcaattgttgcagttttaccttttatctgcctagtatcagcttcagcctgcgcctcggcactttcggcaaccttctttatggaagaggggcgtttggagtctgttgttttcaaaatgtctaatacatttaccatccttttccttctaggggttatcgcagaactttttctatattcagcactgttgcttctgctgaaggacttagaaccttgggcatctttg

SEQ ID NO: 147116 - DNA, 403 bp, Zea Mays
ctctggatgccggcaccaaccaagaaccctgaaggaggataagttcagacgagcagcagtgtcgggatgaagctccaatgtcgtgcagtgcgctcgcaacaaacttctagcagtttccacactccatgcgtgcaacgggactccctcgaagctcacagacacgaaggaaggcagggaaaccgcttcagcgtgtgcaagccttgaccacttgacgaacttgaaagacccagaaggtgagttgagaacagctccgttgttgaagagacgcaacgatgcttgctcattttgcatgataataacgaaatcttcaggcgccgaacggtggactgaaaaacttgcaggatcaagctcatactccgctgcaatttctgccgccaaaagctcagctgtcaccggcggccgc

SEQ ID NO: 147117 - DNA, 514 bp, Zea Mays
aaaaaggtctagaaaagacccagtacaaaggtgccaagaaagcaccctaggaaataaaaccaaaaatcaaactacagccaaacctgcctaagagcaacagccccaccaagaccccataacaaggcctcatcatggatggacagcaaaattgcgtgaatatttggggaagcattgtcaaacacacacgcatttctatgcttccaaatctgccaagctactaaaattacaatagagttgaaaccttttttcttatgcttagacaccaatctttctgcctcactccaccaatcttgaaaccctgtagcatcagacgtaggagcaagatgttgcaaacccagcctgcttagcgttctaaaccatacttccctcgtaaagacacaagccaccagcatgtgatgcactgtctcgtcctgctgatcacacaagggacaactatctggatgatccattccatgacgtgccagtcgatcagccgtccaacatcggttgagagatgcaagccaaatgaaatact

SEQ ID NO: 147118 - DNA, 543 bp, Zea Mays
cggggacatttcctcctcatgggaatgtaaaaagagaaaaattcctcctcatgggaatgtaaaaattcctcctcatgggaaaccattttcgattccccgcagggaattcttctattaaaaaatggggacggagacatttcctcctcatgggaatgtaaaaagagaaaaattcttctccagagacggagatgggtcccccgttctcatccccgttttccatggggacacattaaacttgcatgtgacgacgtttcatgtaatagttaatgacgaaaataaataattacattgctaaaagatcacttattatataaatgaatttattttgatgtacacatgatgatttcttacatctgagtatgtgtatatgttttatgatctatctactagtactagcatgcatatgttcatcagaaccgaagtagatgctttacatgttgttccaagtacaggatcctcaggaggactgaacagcagcagaatctgagaaggaccacatcatacaaactcaatacagacataaaacaaatgaactcatcaaac

SEQ ID NO: 147119 - DNA, 298 bp, Zea Mays
cttatcaccgttggttgtctgccctcggggttgggttgtggaggagcgtctacacccgtagttgccgtccgtggcatctgtgagtggaatcgatcaccaggcaaccgagaattgctcgccgcacttcatcctccgtcgcggaaccgcaccaccgcgtgggcagagaagtctccgccccaatccgaggtaaaattacccccatcctccttggtcccctctccgctatgtgtagcaccgtggagttcagtgtttgtggcgctagtgtgcgggtttggagctccccagccatggcgccgcc

SEQ ID NO: 147120 - DNA, 586 bp, Zea Mays
gtgcgacagtgcagtacatatgaggttttctcgggccaggcgccacttccaaaacgttggcatgccatgtcatcacccggccgttatttctaaaacgcgggcatgccatgtcatcacccgaccgttatttctaaaacgcgggcgtgccacatcatcactcggccgttatttccaaaacggccgacgcgacccattttaactcagcggttatttctaaaaacgctgacgttaccagacttcacccggccattgtttccagagcggctggcgtggcccgttatcactcggctgttacctctaaaacgccaacgtcgccatcgatcactcggctgttacctctaaaacgccaacgtcgccatcgatcactcggctgtcacctctaaaacgccgatgtcaccatcagtcactcggttgttattcctaaagcggtggcatggctccgaaggattcggatgttacctctaaatcgtcgacatcaccagtaaccgctcggtcgttacttctaaaacaccgacgtggcccgctatcactcagccattacttcaaaaagcgccaacatcgccaataataactcggccgctaccac

SEQ ID NO: 147121 - DNA, 457 bp, Zea Mays
caacaacagaatgaaggtaaccccgctaaccaccaacggcaattagatttgacctcaaataaaatcagttcacaacatagttggatctgtcaacccacatcatctagttctcaagaatcactaactccacaaaacaaaacgaactaagtatcacattaagcagcacaaaaataaggagacaaaagaaagcacacatgttaaataaaggctcagataaacaatgggtagaaagtttgcttgtcggcccaaagagagaaaatccctcattcagagtggtgcatgactttgcatcatcattgcccttacaacctagctttccgctgctttcctctgcatcccagaaagaaaaaggaacaacataagagataacagataaaaaatcaagcagtgacacacgatggcaatcaaaatataggacacaaaagagaaaacagatccaaataaaacaatagaaaca

SEQ ID NO: 147122 - DNA, 675 bp, Zea Mays
ggagcgttgtagagcgccgtggcgggagcggcggtcgcagtggcggagaggcgaagctcctcgagaagcagatcattcttggtctccgcaaaagttggaaaaggcttcatgcgggtaagaatgggcgtcacacgatcgaagcgagggctcaaaccgcggaggaggttgagcacgaggcactcgttggtgacggcggccccgagggtgcggagagtgtccgccatcgtcttcatctgacggcagtactcgtccacagagagatcgccctgagcaagctgacgaaaggcggtctcgaggtacaggatccgagtctggcggtggccgaggaactgagcctcaagggcaccccagatccggtgagcagtatcgtccggcacgcggacgatgtcctgaagttcggccgtgagggtgccatggatccaggaaagcaccacctcgtccatcagaagccaatcctctgatgggtcagggaccgtgagagggcgtggtcggcgagggcgtagcggcgaagggtctgcaggacttggtcacgccaccaggggtactgagtggagtccggcgcaagaacgttggtgacggtcgcccgaatgctggtgagggccaccgcctgagcgtgaagagaagcgcgaagggttgaggccggggctggcgtgggctcgaaggtgtcggcgttgt

SEQ ID NO: 147123 - DNA, 366 bp, Zea Mays
ccgtcttcaacaacagatagtactcctctcatacgaagaaatcatcaggggtagagaggatacaacaggtctctacaagatcttcatatttccatcacgaattatcatcactagtagtctagtggtcaagacatatggctcttctggctccgaggaccaaggacatgttaatgtctaatttagcttcaagctctgtggtgatgtgggatttcatagttatttgtctactcttctcacttctggtagatcggaggtagataatggtaagcatgccaaagggtggaattcagtgtagttcggctacataaaccccatgtatgtgtccatttaggaccgacctttaccatttagcttatagtgtatacc

SEQ ID NO: 147124 - DNA, 981 bp, Zea Mays
ccctggcggctttacgcagagaccctcgcgtctttgtctaacagcgaacgagccctttcactattttgaggagtcactgacacttcacaaaaagaccctccggtttctatctattcacgatttgaagtccacgacgccgttcatgcgtggccgtgctctggcgagcatctacgtcggccgattagggcaacggcagggttctccgagcaccggacacaaaattaacactaccccgaccattttccccaacccaattgcacaaatagtgagctatcaagctctgtccgcgtgaaccgaatgggtggcggacagttgatcgtgttcccggtgattggtgagctcgcagttcaaattggtggttcagcgagcatcgtaggcatgtgagaaagcttaaacgaggaagcaggggacggggactgaccgggaaagggctggcgacgtgagcttggtttcacggtggcggaagcttgaattgggggaaactccgaattcgagcagatgagtggatgattgtggccgattagcggtggttagctagctgactacctcacggagctagacacgggctcaatttataggaggcttcgacggtggcgcttaatttggccggacagagctggcggccggaggggaggaagaagcctggcgcgcgcagttacgtggccaacggcgtggcaacctttccgacgatgatgggatggcccaagggagtcacatcgacacggcagaaaagctaggccacgcggtggaggaccgacaaccggagttggagaagaaacgcgagctgcggatgcgctggcaagcttccgcgcggcagttcccggtgagggcacggggtcgccgcttaaccagaggtcgccacctcggtaactctttgccacggtgccaagaaactttaccgcgaccaccgacgaccggttacgccgcggtggcgttcttatcgccggcgaggtccaagaccttatcctctgcgcgatattt

SEQ ID NO: 147125 - DNA, 897 bp, Zea Mays
agatgaggttacgaacaagagcggaataaggaaaacaccactctcgaactgagataagggattggagagtttagagaacagacataatgtagttaccaaggtaggatcaagagatgagaaaggtaaaggtagtacccaacaggagcacaacaaaggatggagttgaaaactcgcaagcgacaaggaagatgatacgaccaagggaaaataggtaaaatacaactataaaattgagatggaagagagaaggttttaaaggacaggtataacataagcatcaaggtaagatatagaggtgacaagggtaaagaagataatcatggaaagcataaccaaggatagagttaaggcaagactcgtgaagtggcaaagtggagagagtaatcaagggtaagataggtatggttccatcagaagggttgaagtaaaaattcattacccaaggaagttacaaggaaataaaatgagatcaccaaggatgtgcaaaataaaatgaccactcatggatcattaagaaacaagtgtggtaaagggtatgataactaaaatgtcttaaacagacactggggtatgaagataagcatacataaaagcatgagagtatgcaagactccaaggacacgagcatattaagaccaagggaatagaaattgttgaaaaataatgacttaacgacggaataggaagagatctcaaaagacaagaaggtctgggatatataaactaaaatatttaaataggcaacatagttttcagaggtaagtatttgaaacaagagtattgaagaatctagggatacaagcatgtcaataccaagggaatagagatggctaaacggtggcaaattaatgatagaaaaggaaagaattccaaaggcaataaggttatggtcagggg

SEQ ID NO: 147126 - DNA, 731 bp, Zea Mays
ctatgatatacatcgaaatattataaaagaacataaaatagtaacgttttctagctatttggatcacaatttcctttgtaccggcctccttcccttatctgtcgcgcggcccatcaggcccatccgattttagcttggattgctctctgtcccctcctctctggcttacgtctgaagcctagccctaatcccaacagaaagacggcggcaacgcgaccacaaggatcggggaagggagcggctgcacgtggcctacgacaacctgcagctagcgctggacgacgtcgcgacctgcaactagccagctagtgccacgacccacggcgagtcgacaacatgcaagttgtagccaacgtcttaacaacaaccatggatccataccaagattgttgatccccgctgcagcctacaggtcataagaattcaggtgtatgtgtatcagtgtctactattagcatttgtttacatttagatattttatgtgattgcatttttaccatctttttctcatgtgtactgttagcataataacatgtatcaatcactttaatacttacgtctccatatgtaccgttacaaaataaatatttgagtcaacagtcattttgttccgtaactctggtgtacaatatgctagtttaattgctagtttaatttgttttagactaggcattgaattgagtgtattgtgatttatttgcagatttgaaaatgaagagcagtgctaccac

SEQ ID NO: 147127 - DNA, 507 bp, Zea Mays
aattaaacagcattatcctcaattcctcaccctcaaaaagcttccgaagatccccctcgcctatgctcgccccagtcggcgaggacaacaactctcgtttaccaacccggtctactcggagacggccacgctccatccccatacgacggcgcctgccacttcgcgaaaattcacccacactatgttttcccaccacccttcactgcctacacccagtactcgcaccaggaagatccccagcaccctccacatgcggcgaagtctccaccgtagccacatccaacgcaacaaaataatccaagccttcatccgaggactccttcgtccaaggaaacaagttcccagattcaccatcagactcaaaacattcagacacagaaccaaacaaactatcatcagcaggcactacggtttgaagtctccgccacaaaattagtattgtcagtagcggttgcttgtgcaggcccaaacgtcggaacctgcacagcaaccgaggttcagtatcac

SEQ ID NO: 147128 - DNA, 302 bp, Zea Mays
gtcgtaaccatggtcacttttggtgactcctatcaagtcaaactcgtgtggtttcccccacggagtcgatcttttgattgtttcctcagatcaacccaacaagattttgaggctttcggatggtttggggtctgaaatgagagcagaccatggttgttaaggtggtaaggcgaactacggtggtctaggacctttttaccttttaagcgcctaaggcgcaaggcgaggcgacttcatagacatataagtaaggcgactaagtcatttaagaaaataaataagtaaatagatagaacatagat

SEQ ID NO: 147129 - DNA, 644 bp, Zea Mays
cacctccccacggaactgccgccaccgtgccgcgtgttcgccgctcgcagtgtcgcgccctggcctcactggagcagtccccgaagcctcgccgcgtccgtgctccgccctcgctatccaaggtgagttccttccctcatctactctctccctctcgacatacgccgtctacccctgcacggtgagccacctactcgcgctcctagctccttggcacggcgagctctcccatccccggtgcctagaccaaagtagacctcgtcggccctgtgttgcgttgtgcaccagcaacctagccatgtgtcacgtcctcctctccctgcgcactcatgctccacgcgcgacaacctcctacgtgctttgccccgccttgcctcaccgtagcgccgccccgggcgagctaccaccgctggtgtgtagccccgcctcgcagccctcctcttctccgcgccacaccgcactgcagcctctaaagagcatctgcgctgcctgctcgctccttctctggcgagccaccagcgagccccgctcgcagcccctgcggcccaaccatgcccatggctgctgcgttgccgcagccaccccagccatgcacgccgctctggtgctgctgcccggccttgccgagccgcgcgtccgcctcg

SEQ ID NO: 147130 - DNA, 332 bp, Zea Mays
acttctcaagaaaagcttaaaaaatgacaggcacaatgcaggcatatctgatatgagaagtggaggacgtcctgggctcctaaggatttctgagtgcttgtttatgaagccttcatatattgttgcataatacacctacttctgtagatgactaatatctttttttccgagtggcaaagagcttaactttaacattatgctaggataacttactaatttgttctttacaagttgttttgttctgactgatgttataatgatccattcaacttatgttaagctacaagcactgaagcaccaccatatagtttcatgaaaaaaacttcatttga

SEQ ID NO: 147131 - DNA, 364 bp, Zea Mays
cggtctctattaaagttttttttttgctccgtccctgtactactatggagatttagttggttgtcagcacatctgaacatcatcacattgttcttgttcagcagcagttagccagcatcagcagaaactgctgaagctctaattggttcgtttgccgaagcagttcgatgaccatgcttgctgcccccggagacggagagtttctaaatgaggtcggatcaaacggcctgcaaccaacaaagattctgaatcctgcaatgacgtagcttagccgcgtttattgtgcgtgcacactgagagtactgacaacctcatcatgctgatgagtcgttttattgagagtaaaatgcataagcggtttttg

SEQ ID NO: 147132 - DNA, 751 bp, Zea Mays
ctccactgctgcatcctctggccgagcactgacgacatgcagcatgtgggctgcaacgatgctgatggaggcagtggcagtcagggagagcatgccttggcgcttgaagacagagcatgtggccctagacgaaaagcggtcccgcatgggcgagagagagaacaaatcgacgaagggaggtcgacagctgcatgaaggatcaaggattttggaatcaaggcggcggctgcacaactagcattactggactccatgatcatagatatgacccacatgcacttgctcctaattcagcacaacaaatagttttcttatggttcaatccacctaacccacctagaatcaacccatgaatcagtgagctcagtggtggaggttgacgaaccaaaagcataagaactaagcctgatgcaagtcaccggcttttccaatccaatatggtgatcattcaatagagccccaatgcataaaggccgtttaggattgcatctttttcggccgtgaccatttgatcaatgaatcaaaaggaatagaatggaggtgcccccagcctgaatagacaaagggagtacacatgtaccatgggttcatcgtcgtaccattccatatttgaacaggacaacacatcgacgatgagtaggtgggtggaaagcatcctggcatgacaggacgaataggcgatgcttgttgcatcgtctttcgggccattttactcggtcgttttgttttagtgggtgaccggggtttcttt

SEQ ID NO: 147133 - DNA, 772 bp, Zea Mays
caactcttctgacctttgtggggttgtttcggaaagcccatgatgagaacctcaagcaaattgaggctgagaagaagaaagcccagaaagaagctgaaaaggaggcaactcaggacaaaactcctgtaaagtcaaaaaatgggaatgcagataaatcaccaagatcaccatcaaccttcaaatgatatacggcaaaagttcacatgatcatcatttcttcctcaaagaatgtctgccttttctggcctcggcacaatttcacaagcatcaatagtaatgcaaatccataataccatgtggacaactcatgcagtcatgcttacaagacaaggtaacaaatgatctatttcatatatgtgtaatgttctgttgtaacaggcgaaatatgtatacttgccagtaccactcttaacatatattcactgccctttttccagatgcttttggttcaacatccatgcatgtatctcatgacactgtacaaagctcaccccacacaaacttaggttcttctgtacaaaatccacactagatctttctttttccccccttctgtttatactagcaccaggagtagctcattgtttgtaaactagaaataggagtgtaggcagtgatcagtagtaggtcagaagcaatagaaaaggattagtgctaccacaggcaggttctaaccaggtaaaggtgagtatatagccatgtgcccatgatctttgaattcttgactagagcaaagtgtttgtgcgtgacgtcctgccacaagtatctcgag

SEQ ID NO: 147134 - DNA, 506 bp, Zea Mays
ggagggctcaatgacagaggagcagatcactagtgagctgagaaggttggttgctacggagtgggattggagtgtgaagggctttggaaataatgtgttctcgataggttttccttcaatgggtgaactgcagcgaatgattgaatggggaacatttcatactaaatttggtgctaaaatgcaagtcaaggatgagggatctggagaagaaataaaatatgtgatgcaaaaggtatgggtgcaattcactggattaccaaaggaattgagagaatacccggtaatttgggcggttggctccatgctaggcatctcaaaagaggtagatatggtatttactcggaagtttgacagggcaagactgcaggtggcagtgcttgacccatatctaatcccacaatatgttgatgttgtaattggagattatatttatgagctgaaattcaaggttgaattggtagtcgatggcgatcagcctttgccgatggatatggatgactcggggg

SEQ ID NO: 147135 - DNA, 672 bp, Zea Mays
tacctaagtgtatgtatgctaatgacgagacacacatgcatgaactagacccacaatgcatggcctgagtttagcatacagatatacaaacagacgccagctaacttatctgtgatgcaagggctgatttcgaatacatgtatataccgacccatgatggctaactgatttacaatgcatcatggcattagatgtggcagttgctagctttgtgcagaagacgctaactagctatcaaaacccacgacgaatatgcatggactggataagcagcatgcaaatttatatttagacataagaatgacacgggcatagcatttggcataggatttggagttcctcctgtgcatctcacggcaggtgcccttgttgatttgaacacaggcgtggagtacagcgaggaatatttccggcatgttgatcttagctctcgttcttgggaacaagactcttccctatccggcttgtatgacaagtccggcgtggggccttgagacatctcacagcgacttcctcgagggagcgaagccacaaatgaggccttgatcatggaggtgatggtggacatagctcttgttcataagaacaatgctcttccctgtctggtttgcaaggcaaatccggcgtggggccttgatcatggagatgttgataaagatttgcttgctgccg

SEQ ID NO: 147136 - DNA, 396 bp, Zea Mays
gattcccttactgacgcccactgccgaggaagtaatgtctgtcatgagtggacaaccttccaagatttgctgcctccagtattctcagaatctacagacttgccaccacttctatttcagatgaaggaattgtgtctgcagctgtattaaataatatatctacaaagcctgatcctcggtacccagcacccttgatgctgacgacaattcgcctgtttcataaaaatatgcaatttgtagctcgaagaccagacccattatgatgcagtctgtagctccaaccgtcttgccatattaaaataagtgatgagtatggctcagttagcagttgccgtagtggaaggtcagcaatgaactgattactgatatagagcaaaagccgcaacccgactttgt

SEQ ID NO: 147137 - DNA, 895 bp, Zea Mays
catcacacccccattggatcaccttgcaccgaagagcaagttccaacactgggctttttacccttgtccttttgaccaacagaaacatgacgctttcctttagtagttgcaggggaaacctcttcacattcttcatagtcttcatccttgtcatcattggcctcatagtctccatccttgtcattagtgttctcagtggtttcaccctccagaatttgtggtgtagtaccacttgacggatagcagagcgactgggacttaggtttcctctcaagcaaaataaaccatgtttaaatgctccactgggggtaatggatagtttggccgcagatttggttttcctacacgaaataagcaactattcattgacaccaaaatatataaaaacttagctgctctgaccaaaataaaattgcttgagagccctcgtcctgcggatttggtttagatggggtctcgtatcgctagcgagcagagcggctgcgcggctagcgagcggctgggacgagcagagcagaacgccgggacgagcagagcagggagcagagcagaacgtcgggatctgcagagcagagcagacgagcaggaatcacgtcgtccccgcggccgtgatccgcgcccggaaagccagccgtgatctgcagacgaacaggaatcgcgcccggccgcgctcgccaagcacaagcacacaagcacacgaccatgatctgcagacgagcaggaagccagccagacgaacacacaagcacacggtaagaagaagcacgtacctgggaaccgcaggatagcagacacggttggagctctcgctggaggacggcgaaactgctagagatggtcgaaaccctagccaccgctcccttcagcgacaggcaggggtcacgggcatagagga

SEQ ID NO: 147138 - DNA, 705 bp, Zea Mays
attaaattgatacatgcaaaggtgtgcggaaagccggaaactcaaaaacaagatacgaaggttaaaaacttgctttcttgaaaaaggcatatcacagattctccacacatattgcacaataattcaaacccattctactgccacaaaaaaggtgaattggtgtgtgccagttttgccttcgaaaaccaatccaatccgattctatcaaacttgcatagttgcatagagttaaaatttatgggaaaaaaatccttcagtgtgttccgtcaatatattacaaactgaaaaagaaatcaactaattacctctcacaccacatcagtgttattaaaactacgtttaaacggtgtttatacatcaaaacgctaattagagattgaaactctgaaatgttaaacaatatggtctaaaacgatgttttacaacgtttaaactcaatggcttggcatttaagtgttctaaactgtaaaacacgacgttttatgtgttttaatcattagctactttggtcccagtccattagttacttttgggcccagtccagtctagtctctacgtgcttgccctactcccctgacttgaagtccgatggctagcagcacgcgtgctctcctctatgctctctgctgctgtcaccagaaggtgctgatgctgtcaaccgctgcaccatgtgcgccctctccctccttgtcgagtgcgccctct

SEQ ID NO: 147139 - DNA, 811 bp, Zea Mays
gaaaaagaaacatgggtttaaaaaagacgaatagattcaagatttgaattaaaagaactgggtattaaatggatttgaaagtaacagtaagaatgtttttttctttggttcccttcctttttctttttctgtaccataaactctaaacacaaatctgtaaaagttccagtgagacatatgacgggaaggggggagaagaggagtgaaaaaaaacagcagattctagatttggaagaggagagggtagtaaagcgaacaacataaaggacaatttccttcctatgtccttttctgttgagaaagcataccttggtttaccgacaccaaggaataagtagcaaagatcactaataactgtattttaaaaaggggggaaagggtcaaaatctggaagcgcagtgagtaactgtccatgccgtagacaggggacaatgaagacgaaaatgtggctgcaatataaaacgaccaatgtatcccaaattctaaggtgcgaatggcatgaagcaatcgactaatcttggagaggaaaaatggatctggtagaagcatgaaacattgggggaaaaggaatacaaaccttgcaattgacgaatcttgcgaaggaaaatggatctagtaaaagcatgaaacgttggggaaaaaagaatacaaaccttttcctaacctgatgaatatgttggacgacggaactagctgtagatgaagaatacggaggatgtaaggacaaagaagagcgtgctagaaatggagagagtgaggaggaagatgggcgaagccagcgacgcaggcaacagataggtggagtgaggag

SEQ ID NO: 147140 - DNA, 300 bp, Zea Mays
tgcactcttaggcgactttggcacggagacttcgatttttcgcacttgttgtgctaatccggctgcacccttaggcgacttttgcacggagacttcgatttttcgcacttgttgtgctagtccggctgcacccttaggcgacttttgctcggagacttcgattttttgcacttgttgtgctaatccggctgcacccttaggcgacttttgcgcggagtgtcgcacgtgagggtagctagcgctgggcctcacggtgactttgtattggtcgaatgtcgaagaccgtcggtgcggtctttt

SEQ ID NO: 147141 - DNA, 785 bp, Zea Mays
ctaggtgctgtaaatgagactcccaggttggactataaaccaatatgtcatcgaaaaataccaacacacatgttcttagtaaagacgcaagtgtcttattcattgctccttggaaggttgcaggtgccccagtgagcccaaaggacatgacgcgaaattcaaattggccatgatgcgtctgaaacgcagtcttatgctgatcttgtggtgccatgcgtatttggtgaaatccagcacgtaaatccaacgtagagaaccaagctgaaccattcaattcatctagtaactcgtcaatgactggcacaggaaaacgagtcttaacagtgagggcattgaggtgcctataatcaacacaaaatctgtacgtgctgtcctttttcttgactaggatgaccggagaagaaaattcactttggctcctttgtatgatgcctgaggacaacatttcctccacctgttgttctatttcggtcttgagtgctggcgcataccgataaggcctgatgtggaacgggtgggctccaggcaacaactgaatgtgatgatcacaatcacgctgtggaggcaagccagtgggcaaggcaaataccgactgaaatttctggactagtgactgcagctcgactgacaatccagcaattatcgactggtccttctccggcaggtcctgtaactgacacagctcaataacagaacactgacccttcgatgactgtaatccatacagcttgagacaggttttctcataaggaataacaagccacttgtcagcccagtgtaccaac

SEQ ID NO: 147142 - DNA, 672 bp, Zea Mays
tgtacactaagctgatcctctttctcaccgcactgcacacatggacgcgagccagggcgtcctcctgtccagctccctggtcggcggcgccaagggctccgcgtcatggccggagctgctcggctccgcgcactgggagggcctcctcgatcctctcgatctcacgctccgccgcctcatcctgctctgcggcgacctctgccaggtcacctacgattccttcaactccgacacccactccaagtactgtggcagctgccgctactccaggtccacgctcttcgcccgcacgctgttcccggccgccgccgacatcttcccggcggcgtacctctacgcaacctcccagtcgtcgttcccgggcggtatcatggtgttctcgctctcccgcgaggcgtggaacaaggagtccaactggatcggctacgtctccgtgtccacagacgccgccgcggccgccacgggccagcgcgtcatctacgtcgcgtggcgcggcaccatccggacgctggagtgggtcgacgtgctcaagccggagctcgtctcgcccgacgccatcctgccggaaggggacccggcccgcggccacgctcgcgtgatggaggggtggtacctcatctacacctccagcgacgagcggtcgcccttctccaagtacagcgcgcgggagca

SEQ ID NO: 147143 - DNA, 465 bp, Zea Mays
gcgaaacattggatctcgcgtggccggagcttgccctggcattaaccactgcaccgctgtccagcgatagccatggcagcctgcacgacagcgcggcgtagaaaacaccaccagcgccccctgtccatgaggtccgatagcggcgtgactgaatggcttgtttgcgtcgaggttatccctaggtcgtgctgcccgactgcggaattttccaggatctgttctaagctgccacctgtgaatttgcacttcaatgtcttatatgccaaattcaacatctacaataccagctcaaacgaatatatgcagtgtcaagtacattaaatcttattatggaaattgggtatttgttgtcctcattttcttaggtagtccacgacctctattcacgaactctccaaaacagaagcacaatatttctcagcttagttctgtatcattggacccctgaaataaataagaaaacag

SEQ ID NO: 147144 - DNA, 327 bp, Zea Mays
ctgaatggcaatgcttgtggcggagatgatgggtcagaaagaggatgaggagcaacaggtgaagtttgaggaggtgatgatggttgtacaataagaactatgggttatgactcttgcgttatgggttgggcatgcgatgatgatggtggtggtggatcaaccaattggacatcctgtcgaggacatagaatgaaattcttgatagcttgtccaagtgtcttaatacctttgggcccatggatgtctagcatgtcatcctctaatccttggacaaccattgtcacttctaccctgcaataatcttctagaatgtcgttttcatggaac

SEQ ID NO: 147145 - DNA, 421 bp, Zea Mays
caaggagcgaggggtcccaatgtgcgaaggctacgtgacaacaaaggctttaggaaagaagacatgtctgagttaccaagccactatgggggctacccggagagcccatgtgtaagtgtaaccatagggtaaaattgtgagtgcatgtgtccactaggcacgacggtgttgtaattactcgctacatagaatattgtaggaatgtagttggtaaccgggggtacggatgcactttaggccacctaccctagattgccctatcttattgctggacaggacacgtataatgagacgctacagttctctatctaacgttttgttttgcgttgttcttctcttctatccatgagtatgtgggtccacctatcaggacccaacatttggcgtccaccgtttgtgcgacgtagaccaatcccacgat

SEQ ID NO: 147146 - DNA, 531 bp, Zea Mays
caaggttgcttcagctgaaggatccttcgtatcatccacggaaaaggcagcttcgacctgggctatggttttaatatgatcgcatttggccttctccaagatggatgaaatcccccgcgcaccggaaaacgcgcagacatccccgcgatcgctcaaaatttcttcgaaggtttccgcttctccacttaaccattcaataacgccttcggggtcgcctcgcacgaagttttctttggcagagtaggcacccactttggtgaagctagtcttcaatttcttcacacaatccaaggatttctcaaagcacctgtctttggattggcgaagttcttcaacatttttctctagataatttttccagtactcgctgatctctcggttgacctgtgcgagtgcgcaattctctttagcttcggccagctgtttgcgaagatcttcaatttctgctttctgggcttcggcctgagctttatagttagcttcatcctcttttactttatttaccaaagaaatcaaaattttatccttttt

SEQ ID NO: 147147 - DNA, 658 bp, Zea Mays
gggggatagaatcccggtacagaacacacacacacaccacttataaactaactaaggatcaccgactatcatggaggaaacacgacccacaacactgatctaagctagcaactcatcaacttggaggaaggacagagccttggctccagtcaaggaccatagcaccgcctcttccctggccactctaagggcagtgaccaggctgggattacaaccatcaaaaacgcatctattcctatgtttccaaatggtccaagcacctaggatcactagagaattaaaaccttttctcaaaaaatcagatgcccgagagctgctagacttccaccacgactcaaaggaatcctcatgagttggacatagaacctgcagccccactaaactaaggaactgaaaccagaactgcttggcaaaaacacatttgaccagcaaatgattcatggtttcagcctcttggtcgcacagggggcactgctcaggtcggtctagtcctctttttataagcctgtcagcagtccagcacctattatgttccacaagccatataaagaacttgcacttgccaggagcccaagatttccacacacgttctgctggttcgaactgaaccgaaccaaggaagagagctttataagcagaactagttgtatactcccct

SEQ ID NO: 147148 - DNA, 503 bp, Zea Mays
gagtgaaagagagttgtgtccaccaccaatcgcctcctgcttctatatttggtggaagttgaatgccagtggctggtgggcatgtgatgcatggaccagaaggagatgaatagtgaagcctgcgtcgctttcgtggcggtcctcgctgcacatgattggaaccggtcccccttggcatgcttccttggagccatcacagcggccagcgcagcgcatgcatgattccatcaaccaaaggggcgggcaggggacggggggaaagccaaccccggattggaaaatatgcgtggcatctatctatctatgctgatggcggatcgtcccacatttagacatcacttgttcactgagtccaccgccacgacttctcttcgatgctatcacgagaggggttggtttcgcaagataaactgcttcggatccgacaaaatttatcaattggtgcgttcgataaaaaaacaattcgctgccataaatggcatgcattttctattaacctagtc

SEQ ID NO: 147149 - DNA, 341 bp, Zea Mays
ggtggatgggagtggagtaacgaactagttgtgggggtagtgtggaaggaggccccggagtcaaccacccaatcggtggtgagagggggaggtggtggtggcgaaggtacggtgtgagcggagagggctaaagaaggtgccccgatagaggcgctagggagggagggagatgacacgggctcaaccgctagggaggcaatcgcagcacatgggaaaacaagcggtccaggcacgtgacggcccgcctgagggtggatctcgacgcagtcccggagaatagggttccagactggatcgaaggacacgaacatgccccgaatgagctggccgttgtggaggag

SEQ ID NO: 147150 - DNA, 398 bp, Zea Mays
ccaccaggacccttctcgttcggtgtgacagcctcgggcccctctacacgccctgcctgcttcccctacatcgaccactgctccgcctgtccttgcagcgaccgcatcctttgtgacttggcatcatcgtctcggccaccccgggcgtgatgtgatgtccaagctctctagtagtacctctgtttctggttgtaggggatcttttgagcacctctgtcatgcttgtcagttaggtcgccatgttaggctcacgttccccctcctcctcctctagggtagcaggcacttttgatctaatacactgtgatgtatggacatcccctgtaatcagcatttctggctataagtattactatttgtgtacttttcccttacatcagaagttggacacctttccc

SEQ ID NO: 147151 - DNA, 827 bp, Zea Mays
ggataatctatgaagggatagaggaaggcccagatatttgcaggggaaggaggcaatatcacaaggtaacatatgctggacgtccaagatagtctcctcagagcaccttatagggtaaatattggatttatgagtattgttatgaagcccagaggcatctccaaagagttcaagaatatccagagtaatggagatatccgactgaatggggtgcaggaacaagactacatcatctgcataaattgaaattctgtgaagatttttccccaaataaagttgttgaagtaaaccagcctcctcagccctggagaaaaggacccctagaacatcctgcttcgacgaggagcagccaaccctaaggatgtcactttcctccgactgggctttggaattgggagaatttcagatggccttttactgattttgttgaagaagtccacccttcttgcttcgtcttgtgcctggtcacttagggacatatcatctgaagcaaggaccataggtccaagaccaggttcaggcagggccagcattggtggctcagcacctggaactaaattggaaaccagagcatccaccatccaagttgtcgagttcctttggttgtcaggcatctgtcctgtcattgccttcctacgtgagtagacctttagattgtgtgaaacaggaggtgggacgtcgcaaattcctgtctcaggctactcagaagtaggctgaggcgagacaggcacatgcagggtcctctcaagccatccaacttccaaatggggcgagacaggcactaggggcgtcgtctctggcgacccaggtgtatgctggggcgagac

SEQ ID NO: 147152 - DNA, 543 bp, Zea Mays
gtgaaatatgtccctgaaggcccactctgtcgcgggttattattgggcgtgagcagcattatcggtgccctcgtgtcgggtaagaacactcccttggagttcgcgttggtcttctatgtgtgcagtatcatcaggatcataggttaccaaccaatgtcggtggggcgagaaatccggcttggcgccaccgtgtgatgtgggcgccgccgcactccgtctgtatggtgagggttgggagaaaacggtcctgagcctttgacttcggaatatgtggcccaaattccaaacaaaataccccttcactcgattaaatccgatccgttggttgtgggctgagcgatcgagattgggttagggcgtggatgtctcatggccatcagatctttatccaacgacatccattgtgtactggttcggggtttaggaaaatttaaatgcgaccgtcagatcgagatccagcggctagcgtacgccgataaaccttcgccgtggcaaaattcataaagagcccttggagcttttcataaccaacctgcgatccct

SEQ ID NO: 147153 - DNA, 855 bp, Zea Mays
atagatccaaaagctcaacaggtttacttctgtgtgcttttgatattgtgttgtctgcagtaagatagattatgcctatatccttattccattttctttccttattactctacttgtctgccagcttgcagaagcagcaggatcttcattggtgtccattatcgtagatcacatattcctctatattaaagatactggttagtagtagtgccaaacaatttcagatatcaacctttttgtcctgctacggtgacttgtttattaaatcattggtgcaaacagagtttcaacttgaacttctcatgcggtctttgttcttctcacgggtaattttctccaagacttcaactgctgttatactttacagtttgatttgttcactgttagtactgtccgctgatgatatgcttgatttagaatgcatgacctcgtagaggatttaattacaagtttttctttatcttaaaggcaagcatttcagacggcgaatgctcaaagaacttatcttgcatcaaggtcggcgggatgtttctgaggtactatatctgtccttgttactcaagactacacaagtcctgatggttgtgtcattcacttacaaattgaggcattgtgacccctcacgcctaaagtattgaatgacattagaccaatattattttggttaaggcataactgaggttcctgacggttctgaatataggatattgtgactgtccgtgtcaaaagtatcaaatgtcatataactgtcattaacaatgaacttggctgacattgccccctcagtgtctgattcacgttttttttcctggtgggcacgctctatcaagctggtgcccaaaataattcggaagg

SEQ ID NO: 147154 - DNA, 827 bp, Zea Mays
gaacaataatagaaatggacactactacagtgctagcattgcgttgcgtggtccgctgcaaatcacaggacagtcaaacacacacccacatggacatgcgtcgcaagttttcaggcgctcgagaatcaaaccatacttgtcaatatcgttccggccgatgttctggtttgctcactggaatgcaacgtttgggtactggatagtactggcgcaccattccggaaaacaataaatataacaaaaatatatttacaattaacaataacatgtacctgatataagcatgggggctgcgtattgaatgcaacaagcctaaaacaaaaaaaactaatgaaactaataggaggttctggttgtagattgcagaaacacaccctacgtcctgcagtatagagcttggagcagtgacacagggagagaaaaagtaggtccttgctgcctttgctcattggagggagtttgttgcaggagtagaggatggctttcaggagtcactacacattacaagagatgttgtggcagactgccagggcaaaccaagaaccggaagattccacccagaacagctggaacaatcgggaaagtggccagagttctggccggtacaggatactgctttggtcgtgtcagtctcttcactgttacgaagcattccagccatcctggctggtaccggaacaatatttacatgcatggtccaaacaggctcttgtacaccgactgtaacttcttattgcagccttaaccatgcaatgctttgactgactgttgtgttttactttccgagaattgcgaattgctgatgtgatcgtttaggtcagatatct

SEQ ID NO: 147155 - DNA, 505 bp, Zea Mays
actaaaaatcatcctctataatttattatctgatttctctgccctctggactatgcgcagaaatacagagaagaacagggaccactacgtaaaaacacagagactcagaactctatgctatggactgggggtttattttcaaataagctgagggctcatatgtaaacggtttcgggtgaaggggtatgaatggatcccagccgttggattagagactggcggtacagagtacaccgaccccatcccgaatcggtacgcaatcaagtccgttggatcgcgatccgatggatccagattcctctgcctcgtattaaatcctacgcgccagccatgcatcggacggtccagaataaccaatccaagcggtactctaaaaactgatccgaaccgttcatcatagatcgacggttaccgagacatccatgcactaccatgatccagtacgcacatcactggatggacgacgctcaatctacaactaacccgcgatggcacctaaacggac

SEQ ID NO: 147156 - DNA, 615 bp, Zea Mays
gttggctgtgacataatttgttcctgacaatagctcagttgcatcaaaaaacatctttagtctactacaaagctccctagcaaattcccaatcctctgttgttggcttaaatgaagtacaaagtctttctttacttgcaaggcggtcaaatactatttgatactctagtgcagtgctaagcataatataagttgaattccatcttgtcttacaatctagagctatacttttatcatatttaacattcatttgagcagctgtgcgttcaaaacgctcatgtctttttggcgtggcacaccaaaatgcaacactatcacgtaccctttcaatgcctttatccataacagtcattccatctttcacaataagattaatgatgtgtgctgcacaacgcatgtgtaacaatttaccatctagcatgagggagacgaggggcaacttatcttgcatagaactcatcaaactatcattggtcgtgcaattatcaagagtcacagtcgacaccttcttttctattttccaatcttgtagtacctcataaaggacatcacttataacttcaccagtgtgtggggcgggcacatatatgaacctacaataacccaacatatcgat

SEQ ID NO: 147157 - DNA, 358 bp, Zea Mays
gcggtactcctcccctggctcaccgcccgcgggtaaagttgctcaccgtcgtcgtgccatcgctgttgtccaccgcgtgtcctaaccgcgccaccgcatcgccgtgactccctctaaactccccgtcgaccaccggagttactgccacggcggtgaacacgtgttcactgcaccagcattcttccttatctccgaccgccgcgcgtcgccgttaaaattcccggccaccgtcgaagccgcctataaattgagccctcccctagctgcgtaacatcatcacccacccagccaccaacaatcgttagcaaccgtgccttcgagagctcgaattttgatttctccccaatccgggtttccg

SEQ ID NO: 147158 - DNA, 402 bp, Zea Mays
gctattctaccaaatctaagaaatagactcataatgcactgtctgaattgatagctcaaactaaacaccctataactgagcaaccactcaagtaatttaggacctcttttatcaggtcttaaatagcttagctctttttttgggtctccaaatgaactaaagccagtgaaactagtttctggtgataatatagcgataatctaaagacgtttaaagctttgccaaataggacttttcagccatctgatctgctggttataaatgaatcatgacaaagtacagcaatgactaggccgaagtcacccagtcattgctaaaaaaaagacctattctagacaacagtccttgtgcgggccaatgtagcgctcatatgcaggccaggggcttcggtagcccatatag

SEQ ID NO: 147159 - DNA, 639 bp, Zea Mays
ctacaagatgatcaagttaggattgcggaacttgaagtgaagtttgccagaagaaaccttttcgaagctatcgacaacaccctattctctatcttatctccacttcgcaagaagttttgttatggatcccctggatctattactagacttcttggctaggttgataggatagttctttagtgctaagttttcgactagatcggtaaggacgatgttatattgtagttgttttctaatccatattatcgttatataacccttgatttcttctactcttgttttcttgccattgtattgtcatccttggacaatatctaccttgatatattgaaccctttgtctctctacttctctccttgataatgctttctccctattgaattcttatacttttgctttcgtgccattgtattgccacccttgcgcaatatctaccttgatgtatgaaacctttggcttctactccttgataatgctttctccctaaccactttatatccttggttgtatcatttatcctaactttaatagttcatgattatcttatttcactattggccaccgacaaatatgtcttgtctaactccttgataattcttacctgactccttgactttataatatctttcttattccaaa

SEQ ID NO: 147160 - DNA, 783 bp, Zea Mays
aagtgataagcacttcctaactaactttaatttaatctaatggctatctaagatacacgaaccatagggcctatcattctgcataggctaaatagtttccttttgtcaagcccattagccaatatggttgcacccagtcgattaggatttggtgctaaatgttgatgacatcgtgcccactgtcgctttctcggtcctcctacatcagatcatcaccgaccttcatcatgagttcgtcatgaaggatttgggtccccttcaccactttttagagaccgtcattgagcgtcgctccaatgacctgtttctctagcagcaacaatacatgttggatatcctcgaccgcgctagcatgctggttgtatgccctgagtctaagtgaagttggtggacacatccaagctctctgatgacagtgcccctgtcagtggccccactgccttctgtagcctcaccagtgtccttcagaatctcaccttcacctgctcgacattgtgtatgtcgtccaacaggtttgtctttacaggcatgatccccgtgagccgcacttgattgcggtcaagcggattcgtcggtacctttaggggaccgtccttcggcgtacatccacccatgagtcgatcgtctataccgacaccgactgggttgggtccagacacccgtcggtctacatcgtcctcgaagcgtcagtttgtggtctcctgctctagtgccagcttctccaggagcttaacaaccccctgccccactaggatcacgttggtctactgcaataacatcaac

SEQ ID NO: 147161 - DNA, 284 bp, Zea Mays
aaattattatctagcatgtttgaatgtttataactaattttaacaactaactattgtctcaaacatctccttggtcttacacccgaacaagtaatcgctttaatgccccgcacccggtccgactgccggtgagattcctcgagcaccagagacgatcctcgtgaacgcccatgacgttagcgacgacgagcagtagattcatgggtggcggccctctctcggcctggcgatggcggcggactggaattttttcctcactgcgctaatggtggctcgacggatct

SEQ ID NO: 147162 - DNA, 457 bp, Zea Mays
gggcagctacgtcgttcccagccatggctgccgctgcacgggagctgtgcgccgccgttggggaaggcagatgcacaagtgccatcaatcatggatcggacggtcagtacggatctggcgaatatcggttcattgcataaatcaaggtcgctagttaatgaatcaagggcaggaatcaactagggggacgtggcgagtttctgaccgtaaattttagatccggcgattgggtttgtaggtcatcttggagatagggttgtggtcgttcgatctgaatgaccctcatcagcggataccccttcgcgattgcagagtttcatatgagccccctgctttcacagaaataaaacccgccgtcaatcacgagttagtctgagtctgggacaactttgcaagttagcccttgtactattcggtatttgatgcgcagtccagcagccagggaattaagaaaaac

SEQ ID NO: 147163 - DNA, 2166 bp, Zea Mays
gaacttctttattccaactactaattcatcaaaggtacataatagactagttttatctagtattttcacatagtatattacaatatgtgaaattgacactaaagttgtcatccttatattactaactaatctaagttgcaatttatgaattatgtaggaagataagaaaacttttgtgacaactgcggtaaggaaacatgaggtttgtatacttagcatcttatatctacacttgccattgaccattagtgaacatatttatattagagttttctatatcatttcataggcggtagatacatcaatttgcatggaaatttgagccctcccaccaattgagacactaactttttttattgccactgcaagcatatgctagtattacaactaactattgcaatatattagagcgatatgcaggagaatcacaatggcacaaaaaatattgtagtatcatctgaaatgcaagtagtaccttgcagcatgaaagagatagtatcaagtgacatgaaagaagaggtatgcaacctttgaaaacaggcaaatagatgtcattttggtgtttgcaattctaatcagaatatcataaatgtatatacttttgtttctattttcaggatcattcctctccaggttttcttgcagagaacttatttgctgacttgggctttacatgttcatctaatgcagctggtaaaatatgtttcaattcactttatttctaaacgttagtaatgtatttggtagtattctaaattgccttcactttcagataaaacaactgaggaaaatccagccaccgttctccaatcttctccgaagataagcgaccaattgagaaagatatcaaattcactgaagcttcttaattctatggcacctagtatagtaaaacagaaaacagatatagttcgtccacaatcctttgacttagttgaagcagaaccaaaaactcctgaggtcaacttaaaactttggcatgctcaagatgcacaagaatcacttaaggctcgtagcacagggattaaggtaactattttgaactcattacatacactttttattgtatcattagctttggtaataaattgtttactctttttctctacaaatgcagaaatctctagctaaggagtgtttgttgtttctaaacagcgctaataagtaagtattaccaataacatattatattatttattgttgaatagacttcatttatgtttctctaatacatatttccgtatcaaatgcagggagcagttaaaaagtttaaaggtgctcaaaaaccttaaaatattattacttaaccaaacataaatgattgcttatgtcttgctaacatgttggtgatgtgtagggtattggagagaaaagggcaaactatatacttgagcttcgagaggagtcaccattgaaagaggtaaaccttctatattgaatgtttaaaaagttaagtttaaacaatatgaagcggagaatatcaattaaactattttcttcttttagattgatgatcttaaaagcataattgggatgagcaaaagagaggtaggtaactctactataaatatttgttttggaaacaatcaaagtattgtaattcaaaaaatgttgcatcgtcgctggagatggtggtgcatatctgttagtcaagtatgtgttctaggtgatgttagcacgcatggtagaaaagctgagttgctgccttctgctttctgttccgttcagatcgacaagatgatgtcaaagttgatttcggactcggagatgaacgagtaagggttgtattgatctcttcccacttaggaaaggaggagaaggtcatagttctaaatttaaatatcgatgcttgttgttatcagatcgctgtggaatccagatgattttgggtgttgcttgtgagaatattctgatgttttgtttttttaaaaaaaattacaggaatgtcttctctacgtataggttttatacaggaatgtcttgtctacgtaacgtataagttttgtttttaaaaaaagaatataatcgggtggaaggctttcaggtttgctgtattagacaaaaacctatcagttaccctgtcatattgtgagtgtgcatattgtcatattgttagaactgtgagaacaagatatgtttatttggctccgccaatattgcttagcg

SEQ ID NO: 147164 - DNA, 824 bp, Zea Mays
tgtaatggtgtcggtgatgaagcgaagttcgggtgcttctaggactaggtttggttgcacgttggaggtagtcgtggtactagggatgcttaatggagtttaggaagagcagacattgttgccggaagagccaagacaatatgtggtgctatcctagtgtgaactctagtgagagccatgatgcgattgttattcctggaagattcaagcatggcaaagttccaaaaggtggggccaagggaagacaatcatggtgagccactaagaagtcatgaatctagagtgtctcgtcgtcgacgcggagtggtacattgaagcaagctccatggtagcaatacaactgccattgctgatcgagattgctgtgtcgacgtggcgttcaacatgtcttgctagactagtaaagttgacattgataatgtgtgtggcgtcagtggctctagcaaggaacatggttctccaggcatgtatgcttggctcttgatcgttggtgaggatcatcaagcttggctcaatgttctttgggctatagtcattcaccaaagcggtattgaacaaatgcttgcacttgtgcgcttgagcgaactactagtcgtagttgaagcataggcaacccaacattgttacaccatctcctctgttgtgaggtgtttgaagctacggtgcggtgatgtggttggggtttctatagtcattgttggggttgacgctgtaggcgtcgtaacaagtgtcagcttaaagcgcatgtggaggttgtggtaccattcttgttgctctagtggatgttgacttggtgaggctagcgacaacttcagtgtgtcgct

SEQ ID NO: 147165 - DNA, 278 bp, Zea Mays
aggaagggaggaaggagagctagtgcataccgtacccgacgtggtcgtggatgacaggagggagatcctgtcagccgccggtgcttgatccacaccgacgaggcgccgagcgcgatgcggtgaccggcgaacgccgatgtacggtaaggaggaagggaggaaggagatctagtccataccgtacccgacgtggccgtggatgacaggagggagagaagagggagatcccgacgaggcgccgagcgtgatgcagtggccggcggcgccgcggaactggc

SEQ ID NO: 147166 - DNA, 573 bp, Zea Mays
ctaagtccaaaccctaggggcctatgtgcaaaaactgtgcacatttggactaaagtgtaaaaactataatgttaaagcatataaagtcacatggttcacatttgggaagatttacaagccaaaccctaagttttggattcatttgcaaaaaggaccccaattgagatttcactctaagtctgaatttcagatttgtgggctcaacttttgagccttgtaactttcaaactctagggtctttgccctatgtcaccacatcaaagttgtagaccaatcataggagaacaactttgcttaagaatgtgagctcagttgttaagaataaattgaagataattaagctcaaagtcgggctgtcaggcaatccctggactgaattttcagtagcagtgtgatggggtgaactttgagctcgattttgaatgtgattcagtgactatttgatggtaagcattgtggcaaagttgaagatggaatataggtatataactttgatgcagaaagttgacttagccaccacataaaaattggagaaaatcaaccccaaacatggattgacaggctgtctgatgg

SEQ ID NO: 147167 - DNA, 380 bp, Zea Mays
gttttgataatcggccataacataaccagggattaggctgattaggtctatagtgcacatgatatttcaaaaattcatgcaaagttactctatctcttttggagtcatctctgttttgactaatgttttgtccatggtatttaatacctagttttaagcctcgttcgccatatggaaataggagcgagtattgtagaggcatatatgctggatggaaaatagatattctttgaaggctattttggtgtgtgctaacaatgatgtctcgtttgtagttctcaagtgataaatcacctacaatcagcatagctaattcttcctgatgtggcatctcatattgaattctatcagttttgttagcgcctactattctaatgctt

SEQ ID NO: 147168 - DNA, 474 bp, Zea Mays
ttcggatttggacgcgacgatctcgcaacaagctccgctcggccgtagttctcgggtagttgtaaccatgttgccagttgttgatccctatccccgagtataaagctaggctcgcccctcggccaactccatcaagcttcgggttggaagaacgtcgtctctcgcgaggataccgaagactggggtaatggaaaatcgtcgtcaaggttcgaactcgcgaagtgccatcgcctggggctcgaggagttgtgcagtcgcgtcgcgggggcgtgttcaagctgatggggggaattggaaggcagtactaaacctctagatgaccttaatttctcgacggtgtgcgcagatcacggagaacccgcctcgcctcgcaaaccagccacaccaccatctccaaccaccggtaagtcgcttggaacttgctctattggacctccgcctcacatatccgtagtttcagacgccggcgttccg

SEQ ID NO: 147169 - DNA, 313 bp, Zea Mays
tgtctttctctagatgagttatctagagttgatccttctcatttaagagcgattctagaacaagtgaaatgtgatttcctgttttgtgaaatgagcaatgcattattatagtaagctaatacataatgtacttctgctcatgggagacgaccaagtagacatagctgcattggcaacctggttgtaggctatagctgaaatgtcatggcagtagcccattgatggcctgactatgaacaataatccaaagtaagtcgaaagccttgaggtgactggccaatgtcaagtatgaagactcaatttggtagagaaa

SEQ ID NO: 147170 - DNA, 403 bp, Zea Mays
cggcgactttcctccgagttgtcaaataaagcaagagccttcccggaacgaaaggaatcccaagcaatagcggcggcatcccaagccccaacggcaagaataacagagggcagagcaaagcagaagttgagcagagcagccccagaccagcacgctcaagcaaaacactctccctctcaaattccaaaccctgccaccacgaaccattgctctttccccattgcacatttaccccaccaagagtaacccgccgatctagagcgcgcccaaggctagaacagagcaatgcgcaaggcgctcgtcaacgccgtcctcttcccggctctcgccgtggtcgtcgctctggccatctgctacttcgtccgccgccgccgcggtcgcggccgcggtcgctcggtactgc

SEQ ID NO: 147171 - DNA, 627 bp, Zea Mays
ttgatccttaaacaccaaaatccattaatcaaacaggtcaaggtccattttccttacactaccttctacataagccttatgagaatgattgagatcacaaaattcatggattactagatcctaatgagggcaacaaagtctaatcaactcaatgcctagttcacttagagttgtaacatggcagtcatcatcagaatcaatgacacttgcaagcctataagcctcatcattatctatagtttggacatcaacaccattagagatcctattgacatgtccatgagaggtggattgagcatcggaggcaaacactacatctttcacatccaccttctggtcgagtaatggagggccatatggtgcataatttaccagttttggtgaatgtccatgagaggtgagctcgatggataccttatgtgcaaccacgtccagatattagaactattcatcatcattaactacataattctgccaccgatcattaaaagtaatcgagatcattcgccttataattctttttgaacccatatggattacaccttcaactgagatatcatcttcatttgcatgacaatataattcctttctagctctagcaactgagtcactaaacaaccaagtaat

SEQ ID NO: 147172 - DNA, 454 bp, Zea Mays
ctcaagttgtacaagtcatccctggacctcccatgaggcacatgtttagggggaggatgtactacaacttgaccccttgagactaatgagtttgcttgagtgattttgatagtctcaaagatggattgaaagagaaaaggtggacttggacaaagaagaggcttccactgcatttcggtatcaatgtatcttgtcccaagtccctatctatgttctctcgttacctttggttttacttgaaatttttgtcagacaatggggttaagaggccaaatagttcttctgttttggtgcttaatgccaaagggggagaaattaaggccaaagcaactagatcagctaccacttgtggagttcaaaggtttagtgaaagtatacttggtttttgatcaaaaccctctcattgcaaaaattgatctcttacgggggataaatctgattatggaaaaagggg

SEQ ID NO: 147173 - DNA, 298 bp, Zea Mays
aattttttttacttattggtgcttccaaatttcatactcaaatcatggcattgtattgagtgatttaggaatcatgtatttttgtttactttgtcaaactgtggcactttttaaacttttgttccatgtcatctttatgtgcttttattggttacttccactataggtccttgttttgtctgattatatttgctcatggttatgttacaatgatatatgatacttattggttggagatatttaaattggagtttttccatagaacttccgaatagttgtacacaacacttgaacctgt

SEQ ID NO: 147174 - DNA, 849 bp, Zea Mays
cttcctcaacgtgccatgattaacgaaatatttgagcactggggttcgtatcgcacgccgagatcttcccttttgttttttattctccgatcgtgcccgcattagtggatattagggtgcaccgcgctgcttgtattttgtctctatctcgtcgtttgctagtttttgctaccaatcgggatgctgagctcagtgtagaaagactgagaggttcgatcagcctgttcaccccctagggttcgtagatgaccttagtgcgatgttttgtttcccttgtttgtctcggtttgttgattggggaaaggtttcggttatttattactgagtgaggctggttggttcaggtcaaggctacgacttgtctgctactgttattcagcagtatgtattgctgtttgccactataaattttggtttattggtgtgattcagtctcgtaattccatgaatttagggatgggtgattttagcttatgcagtcattgcagcagtggtgcatggtaaattagaatgctccaagactgacaaggtcgagggagacaattttaggttttcagcttttcatgaactgtaggaggtttcctatcaaatcagataaacggatgctgaatcacaaggtgcttgtgtggccttgacattacaatttctccaatggttctagtcaacaactttggttacattgttctcacgttcttgcattctctcactgtataaatgcaaccgaatgttagcactgccaacggcctattttcctacaatttgtgatgtcaatggtttatcttacttattatggatactaaaaggtgtgctaactatagatggacaaacgggcggcacgacctgacccga

SEQ ID NO: 147175 - DNA, 592 bp, Zea Mays
atcgatggaattcgtagcgccggcgttggaggagcttttgccggaactttccctcgaggagcagccacggttgcagaactaatcccgcgagcgtgaccgcatccggaagcgacataccaagcactcttctcctcccggtccgtcgttgatctcggtacggtacgtgatgaagatgggatcgatgggaatggatttcgtggtgccggcgttggaggagctgctgtcggatctttcccgcgaggagcagctacggttgcaaaacaaagcccacgggcatgactgcatcttgaagccacataacaagcacgctcctcgtctccgtccgtcgtcgttctcggaatggtacgtacggtcggcgtctagctcctcatttctcaatttgaattcatctgtgcaatttctctctgccaaaatttcaatctgggtgaggaacaaaaaagagatctagcgttatttcggccgaaccgatacatttagtattttattttatttaccgaaataattatcatataccgtcttattattgcattacataagaactttgtttttatatatattgtgatgtatcatatggtgaattattggcatgaac

SEQ ID NO: 147176 - DNA, 446 bp, Zea Mays
cagcagaaggacaaaattgagagtcaaatccaaaaaatgctaaccagtgacatcatccaacagagttcaagttcgtttgcttcgcctgttctgcttgttaaggagaaagacgacgagtggagattgtgcatggactatcgacgtttgaatgcatatactgtgaagaatcactttcccatgcctatcttcgatgaaatcaccgatgaactaaatgatacccatgtgttttctaagctggaccatagaccgggggtatcaccagattcggatgaaagagggtgatgattatgaaacaacatttctgacgcaccacagacattacgaatataaggtcatgtccttcggcctgacgggagcacctgccacatttcaggaattcatgaacaaaatcttagctccgttgttgcgaaaatgtgtcgtggtttttctggatgatgtcttggttt

SEQ ID NO: 147177 - DNA, 622 bp, Zea Mays
gggcgatatcggcccgcggctgctgggagttagtgcagtgatggcgccagctcgatatatcagtcagtggccggcgaattggctccagtttaatgagccgagagcaagagcaggagcaggactgcaggtgcaggtgcacagtgtggtggctggctgcatcgagaggagagaggggagggaggaatcgaggtggttgaccccgagattaataggccttcaattcacgatccgattccctccacctcacgacgaacatgcatatgcagctgcagttgcattgcattcaactgatcgctgagcgccacccggcccattgaccaggacctcctcccatccgcccagctagcgccatttctttgctagccacgccattccactctccgtctcctttccgctgctgcttcgcactgccgggtgccggcggcgggtgtgtggcacgtcggtcatgggcagctgcgtgagcaagaaagccgcccgcgccggcgccaagggtgaggtggctgccccgctgccggtcgtggagaaggagaacgcccatgccctgccaccggtgctggaggtggaggtcgaggaggaggaggtcaaggaggtggtgctgtcggagacgccggtgccgcggccg

SEQ ID NO: 147178 - DNA, 898 bp, Zea Mays
ggaaaaaccagagtctatcgcgaagactatccgcgcagaagtcgcctaagggtgcagccggactagcacaacaagtgcggaaaaaccaaagtctatcgcgaagactatccgcgcagaagtcgcctaagggtgcagccggactagcacaacaagtgcgaaaaaacgaaagtccatcgcgaagactatccgcgcagaagtcgcctacgggtgcagccggaccttagtgacagggaacgcggaacgacgccgcgtaccgcgttccgggaacttcgtcccgaaacgaggaacgggaacgtcgcggaacacatcaagaaacggtcgcggaacgtagattttcaaggttaggaacgcgtaccgtgaggaagccgcgccgccgcgctgtcgtcgtccaactccggtcgccgcgctgggtgatgcgtcgtgcggtcgtcgcgctgggacgatgccgcgctgggtgatgcgtcgtccggcggccgcgctgccgtcgtccgaccaccgcgttgggaccggccgcgcgatggaaggggaagggaagcgctgggagtctgggaccgaccgcgtgatggaagaggaagggaagcgctgggaccgaccgcgcgatggaagaggaaggtaagaggaagggaagaggaagggggagaggaatcgaaccgcgtggaagaggaaggggaatcggccgcgctgaagtatgccgcccgtggaagaggaccactctgttcgtgcgtcgtcggtggaagaggaagcgtagggttagacgcgttgcagtgggggaagaggaagcgtgggatgccagcagccagccgctcgccgcgttgcagtgggggaagaggaagcgtgggatgccagccgctcgccgcgttgggaatggactgggagtggagtagtggagaactggaga

SEQ ID NO: 147179 - DNA, 838 bp, Zea Mays
aattcaagcagcagtgcgagtgttgacgcagatattcttcgaaggttatctgagaagttgcagcttatcacgatatatgacctaaatcatgaatctctgaccttgcatgagatggctagtggcggtgatcctggtggcattgtggtgctttattattaattagttgggtaaatggtgtccattcctgaatattgcagtatcgaagaataagaaacaaaaaaccactctctaaagtaccaccacgttcgaatccatcatgtattttgcaaggatcaaacacatttctcacacgccaacactcttacaccattttcatatcggtcagatgtacaaaccagcaatgaaaggaagctaagagtccctcaaatcaagacatggcatcaagtcatcctgctactacacgcgagaaaatagacaacaaggtatgcttcccagggatgaaccacaaagtttttttggtcagacaattaaatatatgacgcaacaccatttcagattttcaggaagccctatgacaagaatatccttgtccttgcagagatattagaaccttgggtatttaatttctaaaggaatttcccctagccaagtatatttccaaaagaaggtcccgtccccattgttatgttgagatgaatttatctgctctagggaggaggattaacaaatctggaaggagaacgcatggcataccttggtcgaggcccccggcgaccgcaacaaaattacttcctctccgacagaggggcaagctttcctctccagcgacgggggcgtgggaatgtaggggaaagaggagatggcaggggtatgcataaccttcgatgggatatggttg

SEQ ID NO: 147180 - DNA, 574 bp, Zea Mays
acgctccccagagggccccagacgcaccgccgacgacccccggcgcgggcgcagatcagcgtgcgccgtgacctgcccgccctgcctccgctgctttcgaccctgggagcgcctgcccgcgccgccggggcgcttcgtatcgccgcttctctttttgttccgcggctcttcctcgccggcaggcggccggctgctgccccgcccacgccgcgtctacgtgtcctcaaggggctgggcgctcttgcctgtcaaacctggtgccgcctccggttggaaaccgtgagtcctgagctcatgaatccgtctcgccgcggccggcaatctgggcttccttaacctgacgggcgcgtggttccctctgactccgtgcgtgcgcctctgtgtaggtttcttacgggttaggagcaggaggtcagagactccccagagttggcttcgccgcgcgcatgcgatttgcggcggcggccgaagcctcgtacagccgccgctgggacgacgacgacaacggcgacgtggatgcctccgccgccgccggatcgaagggactatctataccgggagggccgcaggcacg

SEQ ID NO: 147181 - DNA, 420 bp, Zea Mays
gacattaaatacaataccagacttgtgtgtatttggggtattctttgggctgtataaagtttatagcatgcttccggtatatagaggtcgatgctaattcttagataaacaaatgatagttgggaggcttagctggtagcatgctttttgtatgttgcacttgcactcgcccacaattctttctctcaccctcttctcttcatgcttcttttttggatctaccatttagcgcaagcgaacacccttaagggaaagtattgttgcttatatctctttttctaaacttctttagtgctttccttttagtttgagtcctgcttgttcaaccacacaagatgagtaaactatgcgccagctcatgtccaggaaactaatctccatcaacaacttcgtatccatcaacaatttcgtatccatcaa

SEQ ID NO: 147182 - DNA, 404 bp, Zea Mays
gaggaactctcgtacctccgggttagggatacctcactcatcacctgccacgaacaatggcccaactcgagaagccaccctattattgacgagctaggacgaacatgcagatggaaagaaaggagagtacggccccatgcaagaaagacaaaagtgttcaggcctcagcggccgtggtgagacgcacattcaataagaaactattcaaacgagaatcaggcgccgccttgggaaggagtcgcgccttcagctccacccccaccatcggtggggtccatctcggcctccggtgacgtcgcaggaggaaggacctccgcctcaaaggtggtcgccatcaccgcgctcggacccgcggcgaccgcgtcaagccgctgcacctccgccagagcagcatcgtctttgtc

SEQ ID NO: 147183 - DNA, 445 bp, Zea Mays
gtggcgagctcatcggcgatgatgggacggcagtagggaatcacggcggtgccgtggaaaggctcggacacgcggcgggcacagagatggcacgacgacggtgagcggctttatctacggcggtgagcaaaggggggagtattgcggctgaccggggtggcttccagctcgacggtgacgacgatttttttacctcgcagcgttatccggttaccagcgaacgttaatcttaacgcggtggcgcgaatccttgcgcgggggagggtcaccggcggcaagcacgcgatgctggcatcctgatccattttgactactgtaccatcagagctcgtttcagacaacctgacagaacattttgcagaggaatttcccttcaatttcatatggcagctcctcccaagctctgtagcagaattgtagagctacaaaccaaccataattcggc

SEQ ID NO: 147184 - DNA, 434 bp, Zea Mays
gataagtctggccttgtgtttactaggtatctcaagctcccaatcacacttctatactgggttgtatcactctctgttggattgcacctgcccatgttgcactgctctacaatcttggctgcataagacctctggcaaatagtgatttcatttgtcccttgccttacctccatacccaagtagtaactgagcagccccagatcactcatactaaaagtcttcttcatctgttgcttgaaatctgcaatgtcacttgcagagggcccacaaatgataaggtcatccacatatactcctataatcagcatggacttcccaactccccttctgtagacaacatgttctactttgcatctactgaaacctagggaggctagctcagaatccagtttaatgttccaagctctcggagcttgttttaagccatacactgc

SEQ ID NO: 147185 - DNA, 896 bp, Zea Mays
gggcagtggggcacaggtggtaaaaagaagtggagcaaggaggccagcaaatgtgccctacaccggattttaccacagatcttgttcccagcacttgacagcagctgcacataagtaagagccgaccatacctttgaatatggcgcatcccggtaatccttttgtggaacactgggcgccccaccaggttatatctttactcaaagcactcggcatcataataccgacaagtgtatatggccccaagaatgcccatacattgaactgatgccggcatccctttttatcgaaaggctaaaatcatcacagacatattatcaccaccattaacaaactgattcatactaaggcaaaaggaaaaggagtactttagtatagtggctgagctgttcagtcaggaactgggttgttgtggcaaaatttgggttacaaagcctggaaatcaaatggcagtacactaggaaatcaaattaaagtcgcttacctttcactcagtaaaggccccgcacaaaccagagggacaagtcaaaagccagaacataaatcaacagaatactggctctagctggtaaccagaaggtaactgaaaggtactgaccgtctgatggatttcgagtaaaatattacatgtttgagaatggtaagacacagttttcctgctccatttccagctattttcaaaagacacaggcttcaagttgacattactgatcagcgtgttttgtcaactaatggttgttaactggtacaactacgctcctatgtatcgtgcaagtgtagccatgccataagtgctaatttgaaataaggaccaccggtcaaaccctggctgacctagtagcttgtaaattgcactcaatggcaattggactattaaaagttgcatgtctaagtat

SEQ ID NO: 147186 - DNA, 622 bp, Zea Mays
attttattttgagaaaagatgtagcaaattgatgtgtggtgttttacttgagtggacataaacacaatctagttacgccttgaatataagggattataggaaacctggtaacacaaaaagttatttgctagcccaataatgtcttcatcctctagttgtactctaataccctctcgtgcgaatacagtgccctcaatatcataaaaacatcatttgtggtttaaaaggtgatctattgttttgaattcattatattccaactttttagcaaccgtatggtggaaaaatgtgccttacaactttaacctatgtttggatagttctctcactcaatttggctaaattttccatggtctttattttattgagaaacaatgtggcatattaatatgttgtgttttatttgagtagacataaacaccgtctaggtatgccttgaatagaggggattataggaaacctggtatcacaaaaggtcattagctagcccaataacatctttatccactaattgtactctaataccctctcgtgcgaatacaatgcccttgacatctgggaaacatcatttttagtttaaaaggtgatctattgttttgaattctttatattcctgcttttt

SEQ ID NO: 147187 - DNA, 926 bp, Zea Mays
gctgcacatgtggctaagtgtgatgtgtgtcaaagagtcaaggccgaacatcaaagatcagttggactattgcacccgcttaagatacccgagtggaaatgggaagaaattggcatggatttcattgttggactaccccgcactcttgcagggtatgactccatttgggtgattgtggacagactgacgaaagtggctcacttcatacctgtgaggactaattacacgggagccaagcttgcagagttgtatatgactcggatagtatgtttacatggggtgcctaagaagattgtgtctgaccgaggatcacagtttacttctcggttttggaagaagttgcacgagtgcttggacacacaattgaattttagtttggcctaccatcctcaaactgatgggcagaccgagaggactaaccaagtgctggaggacatgttaagagattgtgctcttaaacatggtggtagttgggataagagcttaccatatgcggagttctcctacaataatagctaccaggccagtttgaagatgtccccgtttgaggctctatatggcagaaaatgcaggattccactgtattgggatcaaactggtaaaaggcagttctttgggcctgaaattatacaagaggcagaggaacaagtgcgaatgataagggagaatttgagaactgcacagtcaaggcagaaaagttatgcggataccgggagaaggctactagagttgaaggagggtgatcacgtgtatttgaaggtgtcaccgatccggggtatgcgaagatttaaagttaaagggaaattgtctcctcgctttattggaactttcttgatcttaaagcgagtgggagaagttgcatatcaactagaactacccgatcatcttgcggatgtacatgatgtcttccacgtgtcacaagtgaa

SEQ ID NO: 147188 - DNA, 1108 bp, Zea Mays
agtactagcatagtcttagtaacaatcagcaacgccacactgctaaagcatcgtccatgcaatccttactcttcaccaggccatcaagagcagcagcacctcatcctcactctggacttgtcttggatatccaggtcatgaggagctaaccaaacttgttcatgattctgccatccagtcttgtaataaagatatgaaagctatatgtcacgcgtgtcaactcagtcgtgttgttcatctttcttttagtgtgtcaacatctcatatgtacattgtgacttgtggacatctgttgtaggtgtcttccagttacaaatataatttcgttatttgtgctaattgctcatattttctttgaatttttccaccgcgactcaagttgtacatgttccctactctctatatttctttccttatgtctccacttagttcagcgcctttgttaaggccatctagtgtgacaatggcaggaagcttgatagaactacaatgcccacaccttcttccttacgcatagcactcaactcagcatgccttgcccctacactacgactcgaaaatggcaagcctaaacacatcatccgatctatcaacaataccatctgctccttgtttctgttagagtatattaggcaagtcttgatatggttggtttatgattgattggattgattgtaatcccgagatgatcttcctgtatacattcaccccaaaggctcaatgcaatgcatcccacactatatcccacgtattatacacaatctctccttcctacaatttcaagcaagcatgtcacctaattattaggctgaaatcctactaacagccacccacctcaacatccttcctataggcactgaatcactatatgccaaacatcacctttcttgctgcacagccatatgtggcatcgtcgtcacccgtgatgtcctatgctacagctctccctgctacaccgatctgagactatccagtccgtacaccaccgccaattactaacgggcaaccgtgaattgaaattgtaagttaatttggtcagtcggcttactgttttaatacatcgattatccatggtagtttgcaaatgtttatgaaacactaatttgcc

SEQ ID NO: 147189 - DNA, 271 bp, Zea Mays
cgaagctccatttgacgaactatgtacgcatcgtcatgactcgacttataattatagagaaagcgacgactactttggcatgtcaccacctctctatataagccaaaaccatttctactatcgactaagagttataagtattaaacacaatgttactttccacgcgcaaataaaccttaacttaatactagtgacaccgatggatttttactaaactcatcatgcgcataacctcgtctcgcatacaaccatatggtggcgtgcactcgag

SEQ ID NO: 147190 - DNA, 414 bp, Zea Mays
gttgagcccatttgagctgttaaatccgatctggaccgccctagtgggatcacgattctttaaaatctgagcctttggattttgatcagatgggttgaaatacataccggttcgatgtaaagtcaatctaatctgagtgctcgttttgcaatccaacggcccatagttgctgataccccttcgcctgaatctttttgcataagagcgactctggttatgcataaataacctgtcgtccacctcggttcaaggctgagtctggtagattttgcgaattaaacctcgagcttcttagtaaatgacgtgcaatccagataacaaagaaaaccagataattaatattagaaattcatttttagtacaaaaataattctagaaacttatataattcatagaaaattcatcttacctccc

SEQ ID NO: 147191 - DNA, 277 bp, Zea Mays
ctcatggcactcgaccatcatctcccatggccgccatgccctggtctaagctccctgctcttctctatttcgagctccctccaacagcgccgtcgtacctgcgtccacgaatccaaagccatctttaactccgccgctctacgctacgacatcttcttgaccctgcgcgccgctccttggatgacctcacgctctctcccatttgccggccgtgcaagtgatccctctgcgtcgagcatccgctgtgagctcaccgaaccgccttcccatggccgcg

SEQ ID NO: 147192 - DNA, 749 bp, Zea Mays
gcggtatctgggaaccaggctttgcaacctgtctgaggaggacctgtctgagcagaggctgaaacagaaaaaatcgtctgtgggacctgttgggccgcggaaggttgacaggaaggatctgacagctgagaaaactgatgattcttctgatgaggatcaacaagataatcattaggtggatgctgggggatctgggcttgtgtgtgagccccattaacttttggatgtacttggtccttcttttggttcttgcaggacttttggactatggggtggcacctgggtgtgcctgttttaatactctgttaatttgtagcctgtggactcacttggattttatccactcgtgtggatatgtcccaaaaacttctgatgttatcaatgagtaatccgaattctgttaacttcatggagtggtctgtgctgagccataacgttagaggaattaactctaccgccaaatggaatgctattcgttgttctattaaagaggcgggttgtgaggttgtttgtttgcaggaaacaaagagggaattctttgatttggcctttcttaaaaaacttttgccctgctgcttttgattcttttgcttttgtcccctcgatggggaactcgggcggatctgttatcatttggaagagctctaggcttacaggaaatgttatctttcaaaataattatgcccaatcggtggaattcacttcaaacttgtcggcctgctcctggattatcaccaatgtttatgctc

SEQ ID NO: 147193 - DNA, 507 bp, Zea Mays
gttctttgatttttgcgagcaaagaagcatctagatcaagtatgcatcagtggcacacccaagagctaatggacaggtggaaagagccaacggaatgatacttgaagcactcaggaaaaaggtgttcgataagagcaaaaagctcacaggaaaatggatccgaaaactaccgtatgtggtctggagccaacgaacccaaccaagccaggctttacatggaaacaccccattcctcatggtatatgggttggaggcagtattaccagcggatttgatctttggagcacccaggctaacataacggagcaattggcttaagtcggtgtgacatgctcatgcttacacaactcagggttatcactaaaccctactaacggagcaattggcttaagtcggaaatgccttaagtcggtgcgacatgctcatgcttacacaactcagggtgatcactataccctactaatggagcaatcagcttaagtcggaaacgccttaagtcggtgcgac

SEQ ID NO: 147194 - DNA, 326 bp, Zea Mays
cgacaaattgcgcgagacggtgtaagacggagactgagtcggatgagtggtagacaggattggataaaattagaggaaaacgactaaagctgacccgcgggtccaaggcgatgagatagacgtcggaggggtagacagggatagatggggatagccaacggagcagcatgccgtttgcgaggaaagatattttaatgatcccgcgaaaaggacacgagatctagaacaggctcgacgagaggaacatatatatattatcgagtttccaagattttgttgttttcacaaatactaaattttaggtattaaattaatattaacaaaac

SEQ ID NO: 147195 - DNA, 709 bp, Zea Mays
tttaagaacataatcccctgtacttattacggtgtaatgtagataactcatttacttagaatccaaattcctatccttagctagattgtacttttgtcttgaggttatagtcaaatattcatcaatcggtattagccagaatgataaaaaatgaggcatacgagtttctaataacaagctttgttaaactaatttaataaaatatgcgttggccaaaataaaatgtacaacaactttcgccaaaattagtgaaaacaagtcatactttaattagataaaaaataggctaaaagatagaattatgatctacttatttcttaagtcttatttcctttatattaaagccggtccaaaactcagcctttcagcctatccatgtcggcccgaaaacattcagtcgtccgatcgcgcatctacggttccacacaagacctcgcagccttctcgcgtcgtgccgcgaagcttctaggagccccacccccgcgcggaggtccacttcctctctcgcctgggcgcgccgtcgcgcgcacgccccacccctcgtagcttcaacccccgccgccagctcggtaggtaaccgcccaaccctctcccccggcgccggctcgacaggtcacacccaacgctcagggcctcccaccagctgaccagcatcgcccatgggcggttccaaaccagtggccatcagcgcgccagctgctggggatac

SEQ ID NO: 147196 - DNA, 367 bp, Zea Mays
gttcagttgatgctgccaccatgggtaacaagaacaacatctagagctaaggcataatggtaagccgtaagcacccctatctagatatgtatgcaaacatccataaaaatacatttcagaaataataatttgtttgaggtagctatacacttcgtggaggccctaagatcaatccaacatacacagtaccctccctttcgaagttcccattgtacttaaaccaaaagtcccacccaaaaaattattatttgcccgacttgaaagtgaacacaacatgagtgatccaatgaccattagaccaagtacaaacagtagtagcaacagatcatcgggagccagcggaatcaacgcatgaacaaggagcata

SEQ ID NO: 147197 - DNA, 312 bp, Zea Mays
tgttgatgatatgttgattgctgccaagagcatgaaggaaatcgctgctttaaaggcacagcttagtagcgaatttgatatgaaggatctgggtgctgcaaacaaaattcttggcatagagatagtcagggataggaagtctagactgctgtatttgagccagaagaattatattgagaaggtcctttgtcgtttcaacatgcaaaatgctaaacctgtgagtactccgttggctcctcattttaaactgtctgctaaacagtgtgctgaaactgatgctgagcttgaatatatgtcaaaagttccatactc

SEQ ID NO: 147198 - DNA, 664 bp, Zea Mays
agactcttcaatagattgttgagaaacaatacaatctatctgatgtttttggcgagttaattgatgaggtcctccgcgcttagtcaggggacaatgaagatggttatgatgtgcagaaaataactacaaaatcagatgatagtcttctccagacggcaggttagtcagttttatggtctttacatcaatataaaaaagttatgcaatcatttgtcgatatcattttgatgccattattttaaacaatgtttttttgtttacatgatacataaagaaggatgtacgtgtccgccccccaactgtacccgatatttctactccagcatcacagcaggatacacagtttacagacacacaggtacatgaattactgttaaggcaacaacatattcgtgtactattagaaagtttcccagatgaagctgatattgatccactggttcatacaaatataacgaaacagaacaaaacacctacaaccccagtggtaatgtttttcttattacttgtatttctcatttaagggttgtattcatcgttttctttaaatagcatataaccattacaatttttttcagggtaaacatggtgacggtggccagaacatgccgaccaacacaaacgtcactcctaaagcaacaccacatacggaatcttccgcgcc

SEQ ID NO: 147199 - DNA, 491 bp, Zea Mays
gggtgtgtgcaatttatagcgtgcttgagcggtggccggtgaatttgatggaaacgcgtggcggttggagaggagaaggggcactggcgcaaacgattagtggctttcaccatggtggactcaccggcgatcaccggataagacgcccgagcacgtggttcatggtcggtaagcggccagcgccagcgaggaccaattcggccggccgcaatccaagtgggtgcggcgaactccccgtcgatcgggtccgagtttatctggcgccaagatctttacgcggccatgattatctccataccagagggcacgaatcatagtgacgacgcgaatcacggtgcgacggtcaccagcggcgaggggcgatgtatctgaagatcttcttcagttcactgtaccatgagaactccaattcagagcctctgtccgaccaacttgtaggacccataactccaatttctgcatgagaacttgctaatctctctgtaacaaac

SEQ ID NO: 147200 - DNA, 586 bp, Zea Mays
tcacccccaatatcattcaaaatcttctttccgttcgtcagttcactactgacaattcttgctctatggaatttgatttgtttggtctctctgtgaaggatcttgccaccaggacccttctcgctcggtgtgacagccccgggcccctctacacgctccgcttgcctgcttcccctacatcgacttctgcatcgcctatccttgcagcgaccgcctcctctgtgacttggcatcgtcgtctcggtcaccccgggcatgatgtgatgtccatgctctccaatagtacctctatttcttgttgtaggggatcttttgagcacctctatcatgcttgtcagttaggtcgccatgttaggctcccgttccccacctcctcctctcaggctgcaggcatttttgatctgatacactgtgatgtatggacatctcctgtaatcagcatttctggctataagtactatttactcgttctcgatgacttctcgcactatttgtggaattttcccttacgtcagaagtcggacacctttcccaccctgtctcacttcttcgcttgggtatccactcagttcggtcacaccatccg

SEQ ID NO: 147201 - DNA, 1233 bp, Zea Mays
tgcccatatcatttgcttgcctaatctttctcatctcatgtgcctttgcatcaataatcaacactgcatctagctagtgtgatgacacagctcctctctaatccttttacttaaacaaataggcaagttggttgaggagatctaaaacgctgctggctttgtagtagtagtgttggactttgaccgcaactgcacacacctaatcaagattcttatacttgttacaagcagaacatccattgtgatattattctatctccacatgtgatgtttaactaaggcaaattccagcttagcttactgacaccatgttgctacaatcatatgatagatgacactgattcatctcttgggatctccatgcctgatatgatcccgagcgttggttagtttgatctcaaccgttgatttcctaaccaaacgacctccttgcgcctgtaacagatccttataaagactgcccatatgcaggggatacaatgaaggcctggggttgcagcaacaagcctctgccctgagctgaggatggggcacattgctgagcctaccggcactgttgtgattggctgcaaagtgctgccgatcttcaccgagcatggcattgttgacagtgcaatgaagaagatgatggcgcataggattgacggcaagaaggcagttgctcgggttaaggagcttctgaagcgggctgcccaggccaagcctcacagcgtcactgtcagtggaaagaaatggaaggtatatatgtgtgtgtgatcctttgattttactttcatatgctaatagtaatttgtttaggatctaactaaatcaagattccaagttttttgatgtggcaaatacataaatgttgaaatcaaatgtgttcttgcagaaggttctgagcttccacgcaagggatagcgctgcggccacaaagggagggcggcaacagaagcagcaggaagaggcgataagctgcagctcgggcaagctgagcttcaagtgggacgtgggcagctgctcctcggcatcgtcggttgcgtattcgccgctgtcgttgatgtcggcaccggcaaagtcctcggagcagacgctgctgacgccactgaggaaagactattgcatgtcaaggctgtcgtccataagccagcagagtatgttgaagaacatggaaggagacgaggaggaggaggaagcctgctgctgcaggacggcgcagtggatcaccaccgattcagactgtgagttgtg

SEQ ID NO: 147202 - DNA, 590 bp, Zea Mays
gttgccgcacgactttgtcgtgatagcgtctcagagtctgttgataccgcgccgattgaattactacattcagtcgttcttcctcgagtacatcgatgtcctccatcctagtagcctcagcttctgctatgctctcgaagatcaaccttggggccccgaacttgagatcagcgggtaatactgcctctgacccatagaccatgaagaaaggagtatttccatgtagagcccggcttggctgagttcttaggctccaaacgacgtagggtaattcccttatccatttccctgcgaacttttcattttttcgaagaccctcttcctgagtgcctctagtatcattccgttggctcgttcaacctgcccgttggccctcgggtgtgctaccgaagcgtacttgatctgaatgcctttttgctcgcagaaatcgaagaattccgaacttgtgaaattggatcccaggtcagttataatgttgtttggtattctgaatctgaatattatgtcttgtatgaattcaacggccttggctgaggttaaagaggcaatgggtttgaactctatccatttagtgaacttgtcgattgcta

SEQ ID NO: 147203 - DNA, 518 bp, Zea Mays
atccgggccgtgatgtcgtctgcccacagcttaccgctgatccaaggcgaagcgtccactccgacgagcaatttgtgtgcccccggtgaatattctcatctggaaagaccccaatggcgcgtggttagcaccagcgactctccctgaccacccatcggggactcgacgccacctttcatgaatcaccccatggcggtaccggcgcacaaggatccccaacgcgccgcccctctcgatatttcgaagatggctgctgtggttgagggccctggtatatatgcctagagccacatgacccgcataggaacgccagtacagggattgtcacgagatcggcgcgagcaagcgatagattcggatgtattcggttggtggagacggagctgaccgtttgaccccacatggtggtgggagcaggacacacaagcgctagcggtgaagaggatggcaagtggggcccgattatcggtgagagtacgggggagggttggctgctgggccggtgggagtgggtttag

SEQ ID NO: 147204 - DNA, 498 bp, Zea Mays
agacccgttggactattgcacccattgaagatacccgagtggaagtgggaagagattggtatggattttattactggattgcctcacacccagaaaggatatgatgctatatgggtgattgtggatagattgactaaagtggctcatttcattcctgtcaagactacttataagtgatctgaattggctgagttatatatggcttggattatgtctctacacggtgtaccgaaaaagaccattttggatagaggatcacagtttacctctagattttggaaaagttttcatgagaatatggatacgaagttgaattttagttcggcctaccatcatcagactgatggactgatcgaaaggactaaccaagtattggaagatatgttgagagcttgagcccttcagcatggtagtagttgagacaagagtctaccttatgctgagttctcatataataatagttaccaggccaatctgaagatgtcactgttcgagact

SEQ ID NO: 147205 - DNA, 351 bp, Zea Mays
agttttttttctatttttggctagcatgaaatccaaaatagatgtgggtaatatttgacatctgattaaagaagttgcatgatatttgttaatcaagatctctattcctattaattaggaagtatataaataggctcttatgctctaaggacatataatgtataaggtagaatcaccctaaaggcatgcaaagtgtataacatagaatcatactttaaggtacaatgatgtggctaaggccaaagtgttgtgcataagtgtcatggttttgacccgacgttagtgaatttgtaggttaggatggggttagcgtgcttttgtcctaatggctttgcacttggtgattctaag

SEQ ID NO: 147206 - DNA, 410 bp, Zea Mays
gtgagaagttggggtgagcttcggttttttacctggtcgatatgaggttgttactgtggtggcgcggtaaaagaggtggccatcatgacgccgttcgacgtcggtggcttgatgggacgtgaaacagcccattcatcgtattgggtgcaggtggtgtgaggggtggttagccacctcgcccgttactggtgtacccccggtggtgatgcacttctgaagccgtgatcaagctagaaatcgaccctgaacacaactcaaggtcatcgcttagtattgtaccctcggggctcctactttgttgtgctcaaccttttgaatcatgtagctggagcttgccaagcagagttttaggaaccaacccttaagtttggttgaggtccggacctttagggacccagtccgaggtacta

SEQ ID NO: 147207 - DNA, 566 bp, Zea Mays
aggtcgccgtcggattccgatgcaactgcaaagtcccatccatctgcatcccagtgcaaaggtgcctgtttttcatatgccgctataggatcccactctgggttggttcacggctagaagaatgggagacaaaagaagcagaggaatcactcggtgatgtcgacatgggtaaagctaagcgttgtggcgatgaatggaaatgtggaaatgtgcttgttttttctgagtgatattcccgtagctctactgccggcttgcaccgattgtacaaccgtcccaagctctattgcgtcaacgggaaataaggtctattatccaattgatgacataacaaggccagtgacgtgcacactggttataagatatggtattaacaataatcgcacgaagaaagtaggaacaggcattgcgatcccacgacgtaagtttcatgaaagtgacataccagatgattattgcagggtagaagtgacgatggtcgtccaaggatctgaggacgacatgctagacatccttgggcccgaaggaatcgagacactcggacaagccatcaaaaatttcgtcct

SEQ ID NO: 147208 - DNA, 497 bp, Zea Mays
gccaccgtctaatctccacggctcaccacacatcaacggcgcagggcgcgtcttcaacccttgacccgaaccaggcggccagcagcggcgccagagcgccacccggcggtactgcgatggcgtttcccacggctaaccataattgacgctccaaaccatagggagaaatcgatagagaactacgcagggaggtgtgttttaccgtggctttgcacaagaacgagcagcctcgcaccatcgtcgtccagttcggtcttcaacacacgacgagggagcccagtcctcccgacgacgagtccgcgatggaaaactcccagacgtccagcgcataactctggccgagcaccgccccaccagcccggcgcaagcaacacgacaacggcggactgcgaatctctctctctctctctcaccggtgaggctctcaggtgcagcagcaacacccgaggtcggatcccgtccgcggtgtgccgggaacatgagtaggaacggcggct

SEQ ID NO: 147209 - DNA, 345 bp, Zea Mays
ggctaatataaagtgcaatatctgaagcttaatatttggtatgtgggtcatgtagccactttaattttaaattttattcttgtagggatggaccatcacactggcttatcattgggtcttcgttgtcgtacatacgatgcattgtatcatctatatttgtaccactatataatccatcagtttaaactttgcagaacccacccaactaattcacctctagacccgtaacctccactaaatccaccaaaaaattacaccgagacttaacacacaatcaaaaccaacgatttagatcactagataaccctccctcttactcattaaattcaatagacaatattattt

SEQ ID NO: 147210 - DNA, 635 bp, Zea Mays
ctttttagcaagtaaaaacaatggccaacagatagaaccagaattatgcattggtgtcatgggcattgtcatcaattccatctctctagaaaaataacattttttatttacaaatctggagagacatgagttgcagcagagtaatcaaagtgtacctattacttattaaatcctcagaacggaagctacttattatattgttccaaaccagcgcaaactttcttgggtaatatctttcatctttacctaatttctgaaaagtggaaccatttgggagaaaaaggcacataaggggaaaaggcaccttcgggtagttcaaaaattgacatgaacatttttcaccttgaaaattctcttctccaagaaactaaaaaacattccctttctctgtattggtgttgcaggaggacaaagagacatactgaaggcttctggtaaggaataaaaccgacttctcaccattcccattgtgcgaatctagacgagtatcggagttaacaatttagtacactatagccatctgaaatgagtacccatgttaagtgatgttccatctcacctcaccaagatgatggataataccacacataccaccgaaaatagtacagaataccgaataccatatttgtgtgtcc

SEQ ID NO: 147211 - DNA, 446 bp, Zea Mays
ctaagagtagctctagtgttggtaggaatctaacctcgcggaaggaaactgaactatcaacactgcagcagtcaaccgctcactgtcagtagcagaattcgacatccaaacatggctctgtgcgagggagtaaaatattcagccttcgctgctctgacctctttagtgcagtacaatttcctctttctcttggctgttttggagattgaactcgatgagaaaggagtagattacactattttatttggttgtaggctccaccaaatcgaactcaccagcggaggtggcgaactcagcagtggaggcagaggtcaaagggagggggagacgccatctagcttgaccttctcgacttgttcttcggaggtggcttttgcgaaggaagaaattagaaccattaagtagattgaagggcgaggaaaaacaatgaagcaagaagagacgac

SEQ ID NO: 147212 - DNA, 409 bp, Zea Mays
tccgcagtgccaacaggcgtttgctggtggctggttgcttgcaacggagggtgcctgaagggagctctgactctgttgactatagcgtgatggagtgggtccagatggtttattgaagtttggtcccctgggtggaagcccaaagggtcgagctctctggtgacgttcttgctgttgcgctcggaggacttggaatttcctcttgatgtgccctttttcttcctcttttgccctttctacttggatagctttgttggagaggtgagagaagctgtggaagtcttggctggcgaggatggtcttaagctcgggtcttaatcctttcagaaaacgggccatttttctggcctcggtgctgacatcctcgggcgcgtagcgggccagctctgtgaacttgtgcacatactca

SEQ ID NO: 147213 - DNA, 444 bp, Zea Mays
ctttctacaagcttatgtgtttcccttcattgcatatacatatttatgactcctgttctgatcaggagaatggaactcttataacctacgctcctacagtacttaagttgtagtttgctgctgtattatcgatacttcactaacccaatcaacaatcatactgtatcagacacttcaatacactggtgctttctctatattaccggtgttaattccttgaaattgtgtacggtcgtacccttatcgtgtattactggtaaataggcttgttgactaggatttgggtttagcctattgtttctagcttcaatgtttggtttagacctttttaatttgcttttaagctgctccaatgatgtttttatgtagaagctccctgcctaactgtctttttaatgttcaccatctctatttttcagcgttcacctaaatactaaatagtcg

SEQ ID NO: 147214 - DNA, 313 bp, Zea Mays
cggtcttcgacattcgaccaatacaaagtcaccgcgaggctcagcgatagccaccctcgcgtgcgacaactccgcgcaaaagtcgcctaagggtgcagccggaccagcacaacaagtgtgaagaatcgaagtcttacgcgaagactactcgtgcaaaagtagcctaagggtgcagccggaccagcacaacaagtgcgaaaaatcgaagtcttacgcaaagactatccgtgcagaagtcgcctaagggtgcagccggaccagcacaacaagtgcgaaaaatcgaagtcttacgcaaagactatccatgcagaag

SEQ ID NO: 147215 - DNA, 385 bp, Zea Mays
tgcgcttagcggcacttctctccctctgtgctgccgtcttctccttcgccttgcttctggtaagcaccgccgtcgcccacaatgacctcggcgtgcacaagaactacctcatcatcgtgcgcacgccgtacgagtatgaccggagcatgttcaaggacgtgtcgaactggcacgcgtccctgctcgcgtccgtgtgcgacatggccgaggaggagctcaacgaggatccggccgccatggcgcgcctcatctactcctaccgccacgtcgtgaacggtttctcggcccgcctcaccgttgaggaggtccgcgagatggcagacaaggactggttcgttaaggccatgccagagaagacgtacaggttgatgaccacccacacgcc

SEQ ID NO: 147216 - DNA, 391 bp, Zea Mays
atcaaaggcatgaccactttcgaggcaccgatcctgctaagtgcatcaaccaccacatttgcctttcctgggtgttattgaattgagagatcataatcctttatcaactcaagccaccgacgctgcctcaaattcagctctttctgagtgaaaatgtacttgagactcttatgatcggtgtaaatgtcacaagactcaccataaagataatgcctccacgatttcagggcaaacacaacaacagccaactcgaggtcatgggtaggataattcctcttatgtttcttcaactgcctagagccataagcaatcactctgccttcctgcatcaacacacaaccaaggccaatacgagaagcatctgtataaactgtgaaatgcttaccactct

SEQ ID NO: 147217 - DNA, 968 bp, Zea Mays
cttgatcttgtacattggcctcaagattgacttttggaggaacatcaggtaatgccagaacagtagggacttgaatgacctagtcccctagcatattaatatcctcatccatgacaattattaggtctggtgggtgaaaaggcatgaatatctgaaaaccctaccccacagagctatcagagggcaaaaggtcttctatccctgaaagttagaaatttagtggctcatcagggtcttcctgaccaactagttgctattgtacacatctactgcattttccataatgccatccctaacgggaggggcattgagatcaaatcctacacgagctactggctaaccaagaccaaagaaatcaaaaggcagctcctgctcattcggggcgtaaggtggcacttattcttcatcttcaggttgtgatcctaacatgtcatactaaattatttcacattgcatagtctatgatacaccatgaaaactctcagcaacactaaacacaatgaattaaggcacttcttctaaggatgtcactcttgccctcaaaagaagccttgtaatgttggaccgatcaacatcccacataatgagagccaaaagaagcaatagcatcctaaatatgctcctaggcccaaaaattcaagggggaaccgagaagcatgagccaacattctcagttgaaatttaaagcctgaaagttccaagcttcattgtgccttataacagtgatgaaagtaaagcctagagcctgctgcgggtctagattaaccaagttatctctttcaatcacaaaactgaagtgggttattgcttgacctagatgagagcattgaatcttctgaatgtgcacatgacactgacccacattatattctataatgaagtcggttgtgtcttcaaagtttagatctcgctcgagcaaatgatgaatcgagacaatcctctagtcctcatgaatgggaggttgagaa

SEQ ID NO: 147218 - DNA, 274 bp, Zea Mays
gttctgactggagacttgtggatcctcaaaagaagtatgaggtgtgggaagatatgaaggtatatcattgtcctactttgatgattagtacattattacccacatatacactaattggctacttttgcatgaaaaaatagaaaatttatgatatcgatgatgctgccttcagttggtttatggatagcgccggaaggaaatggaaggattttaagtcaacattaaagcatcaattttttgatgaaaacatatcagatgcagacctaaaggaaag

SEQ ID NO: 147219 - DNA, 706 bp, Zea Mays
cagaaagctatgggcaccaagctagatttcagcaccgcttatcaccctcagacagacgggcacacagaaagagttaacaaagtcctcgaagatctattaagagcatgtgtgctagcattcgatagaagttgggaatccagtctaccctacgcagagttctcatacaataacagctatcaggccagcatcaagatgtcaccattcgaagcgttgtatggacgaaaatgtcagacacctctcatgtggtccaacgtaggggaaaaagcactagaaggacctacctttgtcaaagaggcagaagagaaagttgccctgatccgcaggagattacttgaagctcagagtcggcagaagagttatgcggacaataggcggagagagctcagatttgaagaaggagacttcgtctacctcaaggtctccccgatgcgtggtgtcaggaggttccaagtgaaaggaaaactagcaccgcgattcgtcggtccctatcccatcattggcggagtgggacccgcagcataccgtcttgaactaccagagtccatgtctgacatccacaatgtgtttcacgtatcccagctccgcaaattcctgcaagcaccagaaagtcacatcgaagaagagacagtgcagattcagaaagatcttcagtaccgagagaagccagttaagattcttgattcggttgtccgaaagacccgcacct

SEQ ID NO: 147220 - DNA, 556 bp, Zea Mays
tgcaaggtgctgcagccatggcgtgaggtgcttcaagctacagcgagtcgggtattcgggtataataatacccgatccgatattgtataagacttatacgtatccatatcctccaaatcaatcgggccaggaattgtacttgtacccgtgcccacagtgtacccgccggatatcaggtacccagtggatatgttattgtagactaaataatatcatggaaaacgagtaagcaatatcacatttcataacaactgatgagcaacatcatcgattcagttcacataactacctcactacgcgtagagctggcaggtcgctggagcttggaagcggagctggcggcgcggcacggcgtcgagcccgacgcgaatcttgggtggggccgaggcggcgatcttctggcctgggcgacggctcggcgtagcgctccctgcgaatgcgcggagctctgcggcgacgcagcatcgacctctgagtctccggtgtgaaccataggtgaggacggggtgatgcaacgtggcccacgaggagtgggtggccgtgtgggagctgcggt

SEQ ID NO: 147221 - DNA, 335 bp, Zea Mays
gtaaactgacggacagaaatcaaatccttaatgagggagggggaaactaaaacattgtgaagagaaagattatagggaagacgagtggtgccaatggaggtgacatggatgagatgaccgttgccaacgataatatgggtaggaagatgctgggaagaggagggatgagatattataccagcgtcagatgtcatgtgactggaggcaccaatatcaaaatgccactcttgttgaggcggttgctgaagagtgatagtttggaagttggtagcgagggtgtgttgatcccagacgggtgcgggcgtagaaggatcggcgtaggcagggggcggccc

SEQ ID NO: 147222 - DNA, 370 bp, Zea Mays
ctcgccacacgcgctgcgtacagactgtaaatgacgggtataaaggatgaatataaaggacgctgctggagatagcctaattatgtcattgcacaaatgtaatgatttaaatcatttgttttgatagagttggatcatagccaaacttttgacacaagtacacattatatttcaaatatacacacattaagaaaagtaaattaagctttttctgaagtggattttcagttttttagtgatataaaatgtggaggctcccacataagggaggcaggctgttttgatcttgcgacctggtgagtcccagtggcggaggatgcactaaaattgaggtattgctaatgtaacaacgaaagaaaaattcacaaca

SEQ ID NO: 147223 - DNA, 631 bp, Zea Mays
gctcaacccaaacgatattggatttgctgttttgaaatattactaaagtctgaatttttgcaaaataatttaggacattttaaacagatggagacagacacgatatcaaaatcgtgatagacaaagatgattaaaatttagtgtccattttattcaccgctatcacgtgttaaattccgcactcgtgatcgagcagacgataaacacctagggtgttacaggaactctccgggtacaacatcacctttgagcctagaacagcaatcaaatcgcaggtcttagccgatttcatcgtagactggactggccttcggaaccaccgcaatctcacgtagaaatcgtctggaccatccactgtgatgaggcatggtgtcacgcaggcgccggcagtgcggcaatcattacatcacccgcggactcaaatacagatacgtcgctcgtcccagctttgcactcgagtcagataagtgcataaacaacatcgccgagtacgaagtagtcatcctaggactttgaaaattatgagcccttggagtgaccacctgcattatcaacactgattccaaggtcatcgttgtctagattgaaaaagattactctgccaaagagcccatattaatcagtatctcgc

SEQ ID NO: 147224 - DNA, 276 bp, Zea Mays
agaggaacagacctacacggttcaaacgtgacacacgacacacaaatatgatgctttaaatgaatagagactactacaatcctcatgcattgtgatgacacatcaattatatttgatggtatagtgcaacgtctattcgatacgcgaggacctagtggcaagctagtgtgatggaccatccccacaaaaaataaatttaaaattaaagaggacacgccccacaaaagatacttttaaaattaaagcggacatatgacccacagactagatattaaa

SEQ ID NO: 147225 - DNA, 1817 bp, Zea Mays
ctatgataaaattttgcgtcatgctgatgcaatgatgttccgagatttgatgctgttaagacttcctctaaaactgcatttgctcggtggaagcgggtctatgtgatgcaccataagatgcaacattgaaaagaaccgcttctaagttatgtcttcctgtgggccagtttagatgcatatgcatcaatgcacaccctcttatgcaaatacatgtttctgtgtgattactgctgtctttaccgatcctgattgaaactagtgcgttccaattactatatttgcctttcacagaattattaagatctctgaaagatacccatgctcacgctctgtaaattgtatgtgcaggaaatttatagcctaatgttaggtcctgattgcatatctattggatttggttctgtgacagagtaatttttttatatagtgatggcaaggtatgttgcttaatctgttttgttgaagttgaccacagttcaaaaaatgttttcttccatttctttatcctgtttcctttgtgcattattactgccttatatgcatgtaaaaccaaattgctctaacaactcaaatcacagttcgtatatggctaaattaaggtgttgcatttgaaacaaatttggtcgtgcaatttttctacgaattatcagtgttcttacatattttctgtatatggctagatacattcatgaaaacgtttggtgcctacttgagatcttgtggggtacagaaagtccatgtgtaatagttgttctttagcttgacctgttatgtatgatgtgctaattcattttgttaaatgccctgttgattctctgcacgtgatatggatcatgggagtcataaccttgcatgggtgctcaaatgaggatcgggggagagtactgactctttgatacctcgggaaaaaaactaaaggagtctagaaaactttagctttactttctgttattgtatatgttcaatttattttgagtatttatattcttagaaatgttatgttagcatagggttgaaattatggtgcaaaatgtttatatacacattaggcactcaggtgaggttgggctaattattaggatttaattattgcaagaattcttagagaagccaattcaccctcgtttgcgtactgttgatctgtcagtgtccttgtttgtgttctgttcactggttcgctgcaagaattctgttcactccaaagattgacaccgtaaatttaacccccacaagattgacacattgatttgcttgacattttatccttttaataattttatttctcttttttccactccctgaaatatccttctcgctcactccgctagctctcaaacgcagcacaagtgtgcgtgttcggctgctgctcgagcccctgttgcttccatagctgctcatggaggaaaaggtggctggacgttatggctcactgtttttctttagatgtcctatttggctctggtggacagaccaagaagaaaattattaatccttctagttttctgtttcatccggttcatattttagacagctttatgtttaataaaatcatagcttgaagcgttgatgtatgcaacttcatttgtagaaacactcagatggcttgttctggtgattgtagtagtagcagctatggttgggattcagactatatactatcggcctaaaggtttagaaaaggtgaaatgaacaacttgaggtgagttactaatagcactaaaataactctcttgttctagatagttaaatgaactatgggttacattcgaactgcataaggtaacaataacatgcatgtcctgctatcctcatgcata

SEQ ID NO: 147226 - DNA, 360 bp, Zea Mays
ggtaccatagtcgaagcgaccatagggcggtgaatggtaagggtgctgaatcccgacaggggcgggagaaccaccatccagatagtggcgtgctgcacactcagcacacaattccgcaacctccgcccgaaccttgcccaactcctcaagggcgtggtctagccggtgttgagcacggtggccaggttgaccatgctgttcagcttgggattgccttccccagctggcgagacaatcaccctgctggtactgccggtcgaatggcgagggtagtacttcaggtcaaggccatcagctaccccgctgaacaacgagcaatactgagaaagtgcatgtcgtcctacatcttgcatggctgcc

SEQ ID NO: 147227 - DNA, 846 bp, Zea Mays
catgggagttggaaagtcctgatacatagaaagcaaagtcacacaaagaacatcctcaattcattgacaagtagatacccatatctgcataccgaattttcagtagtagagcttcccagacccttccgtatcttttcgcatgacccactttgagcacagaaaaacccacagttctcactttcactttcattaaaaataaacagtattcccaagtacaagtgtttaacgagcccttgcttaccctgcaaatatatttaatcaaactacaagtgtgctaaatggaataaacagtattcttgaatactccaaaaacacatatgctggaattcaaaagtgtgctacctgttattgcaataacagataagaacaatgtagcactactaatacacgcataatgttaaaactatcattggcaatactcagtgaaagaatccacaccaggttttttaaaagataaaaaatgaaggtttccttgaaataaaagtaaaaaagacacataaattcccatattgcttacaaaatgagaggccaaaagcagatccatgtcagattaatagttcaattttcacctgaaatggcccttccacaacattaacagtgtcattaatggatatcgtctttttatgatgatcaacagctgtaaacattttgtctacacagcctttcttaatatcctgcttcctcactgtcaccgcagatccttcgggaccaccctttagtatctacacagaacccattcttagagaaaattaagaatataaaattgaattgtgcattataagattattaattaccctaaaaccatctttctcaacagcaatgatcacaccaaaatcttttcgcctg

SEQ ID NO: 147228 - DNA, 644 bp, Zea Mays
aagaaggcgatgagagggatcctagatcctcatgaatccgtgctcgacctccacacgcgaaccattctcatccagccgtcccaagctgatgatagcgttcctcaatgcgaggatgtagtagactccggtgagtagcatgtgctcaccagacgcgacagtgaagacgactgagccgatgcccttgatctctatgtcgaaggcgtccccaaacttgacggagcctcggacgctagagtcaagctcggtgaagaactcccgtcggccggtcatgttatgagtggcaccggtgtcgaggcaccatccttcgatcatgtctttgttggagccatcgccgaggaaagcgcgtgctttcgactcatcaaggtggaggagtgccgctgcggtcggtgccactggagatagctcggtgcttgcatgtgctaggagcagagcctcctcctctgcctccgcctgtgcgacattggcctggccatgtcgtggctgtcgacagtaactggcccagtggccaagcttgccatagttgtgacagtcgtcgtctcgtgccagcttcttgttgccgacggtgctgccttgggcatctccatgggcaccaccctcagcatgtcctcggccccggcctgggcgcttccacgcgccttgcgcag

SEQ ID NO: 147229 - DNA, 553 bp, Zea Mays
gggaattatgccaaactcgtctccaacaacacatcagagcgacggctgcatattggaaacagcgagggaaacagaaggcgatcagggaaggggatgcaaacaccgcgttccaccatgctcaggcaactcaaagattgaggcggaatcatattggcaagatcacgcacagggagcaggaactgttcagtcatgagtcaaagatagcagcagtcacagactatttctctgggattatgggggaagcaggaaactccacatggaacttcaacatacatgaactctacaatggaagacagcttgcgtctgaaagtctaacagccccctttacagatagagaagcactacaagcaatccgatcaatgaataagctgagtgcaccagggccggatggttttggacccatcttctactcgtgtgcatggacgactgtcaggacacaggttatggatctgctcaatgcctttcagcagggggaagctgaactggaaagaatcaatcgagcatacatggttttactgccaaagaagccgggatgtacaacagtggactcctt

SEQ ID NO: 147230 - DNA, 538 bp, Zea Mays
ctgcggcgtgctccaggtcgacgatacgagcttcccagttggcgtcgtgggccacgaacttcttatcaagctcggcgaggaacaacttggtttgtgcctccagagctagcttgaactgcggatccatggcaccgactgattttgcgtggcgagtgaagtaatggaactcaagaacgccgatgatcgacgaaatctgataccaatctgttagcacccggttacgtggagcagaattgaggaagggaattgggtttcgtggagaagaagaactggaggcggaggaacagagataggattcgatatgtattttcttctttaatagtctctccctcgatatgtattttcttctttaatagtctctccctcaacgtttcagcagtataagtatttccttattacatgggcagcactggccctcatttcacccactctgggccagacagaaccacattgggcttaagcttcctcttgagcctcgtagccatgccttgggactgcctgtttcttcaacagccttgtcttccactattacatcttc

SEQ ID NO: 147231 - DNA, 328 bp, Zea Mays
taaaaatcaaggtctttctaaacgtgacattatattttagttattaaatcaggaaccaatttagcagggaagtaatcagatggaatatggataatactagtttgggtcggataagaattcattagaagccgacacattagagatcccgcttgagagtatagattcagataaaatatttggatatatagatcgaacatcgagaaattagattcggacacagtttgaagaacagacattgagagtccgagtaaatgagctttagacgagatttataaatcgagaatgattttcgagtttgcgttcgcgtcgagaataaagtttttaacag

SEQ ID NO: 147232 - DNA, 669 bp, Zea Mays
ggcaatttctacctcgtgttgcaatttctatgtttggatgagattctaaaattcgggttatggataaaaataatctctactggttcttggattatgtgcttgtgtgatagaaccctttagaatcatagtgtttggatgaaattccaatggatttgagcaacatttgtttctattgttttatatttgttatacgtactacactgcattaatagcatcgagcagcgatggattccaggattatgtgcttgttttattaggtaatggacccgaccattaggccagcaagccacaaccgcaagtgtacatacacggctgcagtgccaggtttgtgacaatatgcgggtacccgaccgtttagtacccccatccgacccgaggttgccgagtattatcaattttgtatcctaccggcctacccatatccagatgctattaaccgggtagtacctgtatccgtcccgacaacaaaaatacatgtattcgtgtccgaaaatccgggtttttgatactcgtatacgatactcgacccgggtacatgtcccattttcacccctagcagcagaccgtgctgctggcgcgaacatggcagcaggtatcccggcgagtcgaggtcgatgatgagcttgtcctacaacggaggctagccccacattttggaaattgcgtcgg

SEQ ID NO: 147233 - DNA, 1446 bp, Zea Mays
cataaactttttgcaaagtttgaggcaattctaccttgtttttgtggtccggcactgccgcgccccttgttctgcgcttttgactctaatttttggtaggcagttgggttgctctgtttctaggtttttggtgtgttcaaatgacaatgggttgaaatacagagttatctagttccttgggagtcccttgaggttttggggtaactttgggaatcaattcacaaggacagttcgcttagttcgagaatttgtagtggctcccattcacccactctggtcgcctcgccggtccttcagattgatacagtgaaatgaggtagttgtaccaatcactaatattagccaccatgtgaaggatatgcaccatgggataccaataggcacttgggtattcagtaagaggtctacaaaccccaactcagtctcgactgaggactcggactagcacatctagagtctcatatcaagggagagattgggtgacttgaagactattttatgcatataagactcttcataacaaacaacaccgagatataaggggttggtagttagatatagatgcagtaatctagatatacatatgtacatgttttccttgtaaccaaactcttccttctgttataaaaaaggaaggggaaggcacccccaagggggaggacaagtaatagaacatagccactggaaaaatggacataaggtattatctccctagaggtcccgaaccggtataaatcttatgtctcttccgattcaccttcagattattgatcatgtatgcgcccataagaaattcttcaaaaactatcgataattccttgatagttgacgtgctaggtaggggctacaccgatcataaccaatctaatggcatccatgaatcacacgcaagaaagccaaggcgatgatctgagctcgaagatagtggaattaaacccaaggacaatgatctcgattctagcggcatcacacacacaacgtgccatagatccataagagtgaaaatccacccacacaccaacccgtgcttgataatgtcaatgagttgaaccaagaatatgacatcaactttaacataagtttagatcccgactctttttctgatccttctactaccacaacgaagataccaaacccaagtgaagggttcaaagaaggtgagtgtctagccatcacgacaaattaacatctagaaggatatcacaaccctgaacaggctgctagcagccagccataggaaactcgccctaccgagaagctatctgcatcgagtggcagcttcacagctaggagaaatagggaatcctagtgcgtcaaaccgagacccactcaaagcaacaacaaaagcaagaaaccatccaactttagaatagactgaaggtgttgcgcaatcaaaaaaaatatggatgacccggtcctggggtccctgagcgggtagatatgggg

SEQ ID NO: 147234 - DNA, 1002 bp, Zea Mays
ttgcccctaggtttagctaggtctatgttcaaccttgtttactcatattaaattgtttacatgatctaaaaatgccccataaatcatgataaattaattctaggctaaggttgatatataaaacaccaagtaatatttatctaggttataccatgtgttttgttgtcacctttagccacccaccctcctactccctgcaaaccctacgtttccttcctacacctctatcgggaaggaaagtgaaccacctttgttttatgtgagccatgtttgtctactttgtctgtgtcccatgtattctatagaataggttgatcatcctcatcctaaacctccatgcattgcatgcatatagattcgatagtttacgcgatcgtgatcaagggagttcaaggtgatgtcatggagctaccttccgaaggataacaatagtaccaagaggagctcatgacaagtcaagaaactagttgttctgtatctattgccacaactccctgagtaatacgggcaagccccggtgcatcccacccagtttaccctatatgagttcacactagcttgtgcatatatgtttaggaattgaatgaaacccatctgcatagataaccccttcataatcctatccttgtaacctaagtagattaggccgagcccaccgcttagaattattaatcacgttagccaatgagtgactggtaagcactcaataggataaaaaatatgatttctctattcctaaacaagtgagcgaatggtaagccctcactagggaaacatgacatttatcctcccttaatatgacctcttaaatttaaccggaggccgggcagagcatgatttgatgttgttcataacctagtgaagataataaacttgtggctctgcctatgtcatataaggttgtccgttgttagcccttgataaagcttgaacgtaccaatcacatgccatcctaaaatgggctctggtaaagctgagtacctctttaccccaagggttgaa

SEQ ID NO: 147235 - DNA, 367 bp, Zea Mays
cgcgacgacacgtttgatcgccagatatttttcccgtgtgagaaacgctgcgtaatccacctggaatcgacgagtcgacgtagacgtacacccgtttatcggaatatccatctcaaattctgaccagcgaccacctcagctaatctagatgttctggacacgttcctatacatgctcacacgtatcaaattaaccccagcaaaacagaaagtgcaaagcgcaatttggactagctatctagctgacaaggattccactgttgcgttgcatcaccaactagcttcaacaagaacagagaacagttttactccctccttttccccctccgtccaacttcttcgtgaagatgcttcatctcaattttaac

SEQ ID NO: 147236 - DNA, 364 bp, Zea Mays
ggtgagttgtcaagtaaaatttggagaaaatcgaccctcaactctggctgtcaggtgctctgatggggtgttcaccatggtacagtgtacagctgaaacagataagatcgccagcaaacccaccgccgacgaccaattccaccgtgattcgtgtcgttgccggcccgacttgtgctcgggatgggcagataaggacacacggtaaaagatcctcgccgacggtgagctggagatcactccggtgactccccgtggctctctctccctctttgcggctgagcggattaactcgccggtgaccaccgcctcccggccatgcgccgcgtggcttagcctttccaccgcaccgccgtgacaccttaag

SEQ ID NO: 147237 - DNA, 391 bp, Zea Mays
tgggatagtgccactacgagtaagctgcagcaaggcatgacgtccggggtgtccaaggcgacgatgccaggtagtagaagatgtggtggtggcaaaaacagcagcagtgtcaggcgacgaggacgaagaagaggtggcatgcgggagccgaagggtgtagagggggccggtgctgtcacatctgaggagggggcaccgagttgccgagtccttcacagtaagaccagaagagtcaaactcgacagaacaagaattatcagcggtaaaacggcgaatagaaagaagattgtggaccaaagaaggagcgacaagaacatcgggaatgcgaaaagagccgagagggccagcggcacccacagatgtgacaggaagacacgagccattcaccacc

SEQ ID NO: 147238 - DNA, 513 bp, Zea Mays
catgtcaatcacagcgtacctttaattctcttatgcaccgatgggagacaattcagaaatgtgttaacaagttttgtggttgtttatcaaggattgagttaagacgacagagtggtagtacaatgcaagacatggtaataactaatcattatgaagtatcatatttgtagtattttttacttgttcctaacatatgcaaaactctggacaggttgcacaggcatgttcgttgtgcaaaactctggacaggttgcaaaactctggacaggatgcaaaatcactatttgctgtcacggctaccagtttgcatttgtgacttcggttcctgtaatggtgggcgagagaaagtaggtgtcagtaactgtgtggtaattattagtatgaacttatctcagtaatttgtgtggtaattgttagtatgaatgtatatcagtttggttccaattgctacttgtcttagcacatgttctctgtcaaattgttatttgtctcattaattgttctgtcaaatta

SEQ ID NO: 147239 - DNA, 370 bp, Zea Mays
cgacacctcagtttcataatacgatagcccagacacgtgggggcgagtacttttcgacacccctagaaggtcggaaagagatgaccagacatatgaaccaccagggcaagcattaatgccccacagaatccaaacccgtgggcaggaagacgacataatacctaaacacccacacctatgctggaccgaagggcatatggacgaccatcggccgctattgatatagtaagggaagagatagctaagacgttcggagataagcttgtagttagcatgatcctgggggcagtcatatcggaaaccctatgacaactgatttgatttccacatgtaccgccagggaacaaggatacccgaatttgcaaaaaat

SEQ ID NO: 147240 - DNA, 363 bp, Zea Mays
gtcaggcctctaagataataaggggattaatgccctttcttgcctgatcatcaagcccattgtatgtgcttgcccccagtcatcgaagtcgacatctgcaggctgaggagataagtcctgtaagccgaccctacgaggatataaaaccacacggcgagagagaacacaagaaaccagcaagtggttaattgtttcttcagcctgatcacacagcggcatggttcagggtgaggcagcccctttttgccaggcagtctgctgtccaacacctattatgtgcaatcaaccacatgaaaaattttcatttgttaggtgcccaacccttctgaatcctctcccatggtctgaaatgaatagcaccaa

SEQ ID NO: 147241 - DNA, 645 bp, Zea Mays
ccagtcctttcgcctctcctatcatcttggctcgtaagaaaacaggagactggcgattgtgtgtggattatcgccggctgaacgccatgacaattaagaacaaataccccctaccaattattgatgagttattggacgaattacatggatcacaatggttcaccagtttggatctctgttcgggataccaccaaattaggatggaaccagtggatgtgccaaaaacagcattccagacccataatggacattacgagtacagggttatgccttatggagtcacaggcggtccggctacctttcaactcaccatgaactctatcctagctcccctccttcgaaaatgtgtggtggtcttcatagatgacattctcatttacagtcaaacttgggaagatcacatggcacatgtgagggcagtgttctccatattggacaaaaatcaatttaaggtaaaattgtcgaagtgtgcttttgcccaaaacaaactacactatctgggatacgtggtcagcagagagggggtggcaactgacccggacaaggtagcagtgatcaagacatggcctacacccaagaatgtgaaagatattcgcagtttcctcggtcttgctgggtactacagaaaattcgtcaaaaattttg

SEQ ID NO: 147242 - DNA, 415 bp, Zea Mays
gaaaaaattgttttgtttttggtagcttcaacaagtaatcctgctcatgttggatgaatttgcaagcacgccagagtagatctagatacataacacaagtactgagctagtggcctagatataagacaaaatacaccaatagcagcaacactaccattttttgcatcaacagaagaagctggaagaaacattctgttctagttaacatttggcaagaaaggcttagaggtgaaataattttaccaaggaatatgtggtgatggcaattatgagtaggccaacatacctaattttctgaatggagcaacaaatgcaggtagtaactgaattatatccatgcagttttgtgccacacacaatgctttagaaatctgaattgcagatacattatgaagtatatgttcaaagaatgaca

SEQ ID NO: 147243 - DNA, 362 bp, Zea Mays
atgatgtcctgtttgaatatactactacaatacatgtgcgttacgacgacacacaagaaaaaatattacactttaccttagccaaaatgcatagaaatgtattagttgaaaaggagtccgaccctcttttttatatttcgctcggtcgcttgtccttctttagctaacgaggtagtactatgtgggagcgctacattgcatgtgacttcttttcgtgctgggcttggatggtcacgctcatctgtgggggtaacgacccactaataagagtttgagtggttttcacggcctatctatgagataacggtatactgctaggacagtccggtgaacaccggacagcccggtgaataatagtcgca

SEQ ID NO: 147244 - DNA, 715 bp, Zea Mays
gttcagcgggtgagcgagggacagaaggtgatttgccacctaggtgagcgtttgcctatagccctccgtgtatggggtgcgcggtagaccattagcgatctgtgccaggacccctccgacctcgctcgttgtattcagtgcccgagcgaagtcatggaataggttctgggtgagaagcgggttttcgtgagccgggcgtcttgctcggctggttcccgctcgcgttcctgagcatggtggcgatcatggcagtgagaattgtgacgctctcggtgtgttctttcgtcggggttctcccctgcctcagaagcttcatcccgagagacaggttgggctagatcacgctctccagcttcatggtgatgtcatatgttacgacgcttgttctgatgttgtcgcgcatcgtgctggaggggatcctcccctagcatggtgggctcgtcgtctgagatgggtgctatctccactctcccttggatgaagaggacatccgggaagaagggggttggagcagtggtgtgtcctctcccgatctcccttaagagcggagtggtcaggacgatcattgatggtgctcccggagtcttgtatggagcattcatctcccttcatcgagtgatccgtgtccacaccttagtgcgcgaggttgacaacggggctcgtcgtgccggagaagtcctggtcgatcgagctacagtcatcagggtgattccgc

SEQ ID NO: 147245 - DNA, 722 bp, Zea Mays
ccacttctcagcacaacgttgacaaagccctcgagcacgacgataggcacgtagtgcagccaatttatcttcaccagtggaatgtcgatgtaattcagtacgacgaccttcaatggttggaacatttctcttctcagtgacaagtggtcgaggtagaggcaaaggattagacgccaatgaacgctcgggcagaaacaactccaaacgacgtccatccacatgcctatgcgatgtcgacacctcttcctgcaacaatgcgaacacacaggcagaatccagagaagaaggacgctgaacaaacacaacagctctaatatcctcacgaaggccatccacaaatcgttgcacaaaataaattgggtccataggacgaccataggctaccagattatcgaccaaagcggaaaaacgttccacatattcagaaacagtagatgtttgacgaatacgaaacagactacgaataaaagcttcatgctcatctttgccaaaccgatctaacagcgattgacaaaaaacaggccaagtagaagcacgacactgctctgctcgagaagaaaaccaacgagcagcaggtcctttcagatgcatcgttgccaccttgatccacaaactcggatccactgaatacatatcaaaatagccttgactaagccggatccacaattttggattctccccctcaaacactggaaagtttaactgtggcaaccgacctctca

SEQ ID NO: 147246 - DNA, 622 bp, Zea Mays
ggacaagcaggaaggtgaccgaaggtgggcactgaaggccgaagatggacatgaaattgcaacttgttgtcgcaaaggtattagaacccaatgcatttctttgtatcccgtatttagcttcctcttatctttgttcgaaattgcaacatggtgtttggtcattcgattttagggatgggctcatcgcccccttagaatctctctctagatagtgcggtgccgcatgaaaataataggttttgggttggattgtgtgtttctgtagtttatttgcgctgccctcatacttggaccttgagacctttaccttggtgtaaaaggatttatttttacagtgaattgaaagttggtagttgtaattccctgttgcaatagtatgtgtcgcatgcttgaagaacacaagaagttgacagtagatttaaacctgtagcattagaagatgttatatgatgtattttggtccttactttgtatgggtatgcatttcaagtttatcattatacatatagcagagtgaaataacatatttctgtaagtccaacaacatataggatcttactaacatgctctctctgattcacaatatttgtccatggcatatagacaaaaggatgatgcaatg

SEQ ID NO: 147247 - DNA, 450 bp, Zea Mays
aacagagtgaaaggcaatataggcatatagcattatagcagaactgaaatattgaatacaaggctacaagcagtaatgcagtacctactagcaagagcatatcatcatccaagcaaaaagcagcagcaacttctccaacagattcagattcatcggaattcagacaataggaaagataggaaaaggggagaagggggaaccttgagatgagtagctcatctcgtcgctagtgttttggagcagccgccgatgttctggagctgctgctgatgttttagagccgcagcctatgttctagactcggcagaggagaggaaaagtttcaaggggtgataaggggtggcggcgcatcgcctttatactactgtagatgggccgaaaaaatagaagcccaatagcccactagaaaaccctagccgcctggacaattcctggtcgatttaccatcta

SEQ ID NO: 147248 - DNA, 324 bp, Zea Mays
tggagttgtagttcaagaaggcgggggcaacaccggaggtgttggcgaggatgacgacgatgacgagggaactggaggctggggtgtttcctagaaggagatagtctaatttggtgaaggagaaagaggcagttgttaaggctcttgatgctgagaaggctgaagtagcgagattgaggttgacaattgaggagctagagaaatgtagcggtgcgaaggatgatgatattgggaagctgaagccagcctattttgccaactatgcccacatgggggaaggtactcagaaacaggctcttacatactcatgtaggcatcacaaag

SEQ ID NO: 147249 - DNA, 1959 bp, Zea Mays
cttttgattgccgcgccgtgtcactgaagactggacatacggttgtagtttgagatagacacgatcacccacagtgaaaaccctctcagatcggtgcgtgtcagcatacttcttcattcgactttgagctctgaggagatgctgttgtatgagcttggagatcacttctctttcctgcatccactgttccagatctgtcactagaattgccgaattttgatgcagcccaaagtgcttaggaggatgcccatataacacctcaaatggggatcgatccagagatgaatgtgaattggtgttgtaccagaattcagctacaggcagccactgactccatttgcttgggcaggcatgaacgaagcaccgaaggtatgtctcaatgcattgattgacccgttccgtctggctatccgattgtgggtgatacgatgaactcatgcagagttgtgtgctagacagtgcaaacaattgttgccagaaggcgctggtgaaaacacgatcacgatctgagacaatattgtctggcataccatgtagccgatacacttgatccaagaagagcttggcgactttaggtgctgtaaaggggtgagacaaagccagaaagtgtccatacttggaaaaacgatccaccaccaccaggatacagtccgctgcaccagacttcggaagtccctcaatgaagtccatagagatggagtgccaggcatggggaggcactggtagaggtgccagcagtcctggataacgggagcggtctggtttggcctgttgacaagtgctgcatgactaaacatacccacacactgcctgtttcattcccttccaatagaacaattgcttaatgcggctgtaggttactggaaaaccagagtggccgccaataggggaatcatgaagggccgaaatgatttggcgttgaatatctgccgaactccccagccatactcgtcctttatgtcgaatgacaccctgagatagtgtgtacggggcaacagcatccgcggagacagccagttttgtcaaaaggtcctgtgcttgtggatcatccctgtagcttgcaacaatttcttgaatccacagtggagtaccctgagatatgtgcatggcttgcccttctgtcgggacccgagaaagagcatcagcagccatattgtcacaaccctttttataaataatgcggtattgcaaaccagccaacttgacatacaatttctgttgccagacagtatggagccgctgttcatttagttgcaccaggctttgatgatctgtgtaaatatgaaattcagccaattgtaaataggaacgccactgcgtcacatcgatcagaatggccaaatactctttctcatatgtagaaaggccttgattcctgggtcccagagacttgcttaggaatgccagagggtgtccacgctgcatgaggactgcgcctatgccagtgttgcaggcatcagtaaaaatacagaaaggcactgaaaagtctggcaatgcgaggactggtgctgagcttaaggcctgcttaagtaactcaaatgcctgttggtgttccacagtccaaataaacaacacatttttctttaacaaatccgtaagagggcgagatatcatgccaaaatgtctgacgaacttacgataaaaaccagcgagacccagaaaactgcgtaactccttgctattggctggtgtcggccattgttgcacaacagttatcttgtcgggatctgttgatacaccctgtgcactgattatatggccgaggtaagcaatactggtttgagcaaattcacatttggacagcttcactttccagtgatccttccgaagcaagtgcaataccgatgacaaatgagttaagtgagaatcaaaactgggactgtatattagaatgtcatcaaagaaaaccagggcacatttgcgtaagactggagccagggtagtattcatggcctccag

SEQ ID NO: 147250 - DNA, 887 bp, Zea Mays
ccgagtacaccgcaactccgaattatcaattgacaggggcggcggcacatgtccatttcaaggctgtgtcactgcgttctccctcacttctcgttctaatccggagagggatagccatcgttactcgttaggtcgtgacaactccctatcgcagtgtctgcttttggaagttcagagaccgtgtgattggttgtcgcgtcctaactgctcaggctcacggcatgcgtttactagacgcgagaaagtgtttggttgccccacccgacgccctcaaaactgcatgcgcagatgcaatttagtgattttttcggtgtccagcctgcatgtgtggagaagctaaaaattacaatcgctggagaagcaggcccgcacgagccaggcacctgatataccggcaaccaatcagccccagagccacagccgtgtgaatcgtcagagaatttgcatgctgaactgaccttagtggccagctatagtttaatagttttgtaatagaaaaaagcacgttattttgctgctcttttgtgggaggagaacagcaaaaggccgttggtctttgatgatgttccatttaccgagctagcagtagcagctgacttctgcgtgcgtttcactttcacggaaccgagcgccacgtttctatcacggcgcagctttcagttatcgtttccttaactggacaggtgggtgcatttgccaacaggcgcagatggacccacgtgtccccatgcctcttctggtgggccctgagataggcccattaaatttgggccgatgggaggagacagcagctcagcatgggcatcaactctggtggtcctgctactgccaccctctgtttccttctctcttaccctagacagcagaccaccacgggctgtgttgcc

SEQ ID NO: 147251 - DNA, 603 bp, Zea Mays
ctcactgcctcagccattgtatttttccttctgctgtgcgcaaacagggacaggaagagtgctgacagtgtgtctcctcgaacccaactcgatgtccagagacaagctgtggtctatgaggccactgttcagttgggtaaccatagctgcattgaagagaacaatattagtaaagctctacaggcaggggcatgccaatacaagggcactctagtgcaacccattcaaaccacagccaccataagcgttgagctcaagcatagcattcaaggtccagaatgccaaggccacccatttctaatagctgacacattggtgtccatgccaccttgcatttacccacagagagttcctgatccagtgatcccccatctccgtagcttattccattcttgggaagtcattttagctggttgaggacagtgagcagataggttggttgggatcttaaaattgatctgggctaggacagtttgggcaggcctgaacccaaacccctcttttctttgtttgggctctgattcttgttgcgccaaatattttcctcatcatcttgacattaggaacttagtagtgaagtccaataatcttgtcggcacattt

SEQ ID NO: 147252 - DNA, 451 bp, Zea Mays
ccaattctagctggataattaaaagtgcatgtaccaacatgcctaggagaaaatctccatcatatgtttggtgttttgtaaaatgaatctccttgtggttctccagggcacatgttccagctcccagtggtaacatagcagtatgaaaaatggtgagagagcaacaacggttatctgtcagtgactagattgtctgatagtgatgccacagtgccgattctctgctgacacgcgcatggttgctctgtgcacattttctttatggtgatctgttatacatcaactctgttactgacttttgtcatcgtttttattattctaaaaaccaacgtgtgaccatttacttgttgcgctgaactacattcacacacagttgatcctttttccctgtatttctcattagatctcattattttaatcattataacttcattctgggatagttcgggtg

SEQ ID NO: 147253 - DNA, 356 bp, Zea Mays
gtcattttattatgttggatgaaaatgggtaggttagggcaagagtagcctaaggtaagacagtttatggtgagaaaggactccttgttgggtggtaatgcatctgaagatcgagtttgacttctctccttccttgacgaggttgatcttgttcttttctggtcttggtctcattgagtcggggtcagtgtttatcatcggagttaccggagaatggttaagatagatatggatgagatagactacatgatgtaggtcaaaagtttgtttgatgttaggtggagataggcaaattatgcaatccatcatgactctattggttgggttagatcatgatcatggtgggataagtcaag

SEQ ID NO: 147254 - DNA, 764 bp, Zea Mays
gttagcatggatttcattgctgtcagcaatggtgacttgctttaccaggtatgcgttcagtcttgatcaagagatctggagggaaaatattaatttccttgtttttgaagaactaacttttgtgaagtaacaaggaagctcttttagctttaatacacttggtattacagttcatttcttttctgtgcatgttagttatgttctgttttctgatcttagaaggtctctagtaaggaagatccttaaaaaagaacttatgtgtataaattgaacactccagttagtgcacagtggatatccttggttgttggcgcacttgaagttcttcctgacagaaatgacataaatgtctcacacatatgtttatcccctgctttggcaaagcttcagaacactattgcatttttccacaatgcatacaggtgccgatcaatctttttttttctgtgagaagtgcttagattggtgttgattttattagtatctcaataagcttattttttaattgatttctgaaatttgcatttcttttgcagctgttatgatgactatctttctgcaccatttcccttaggtttatacaagcacatttttcttccatctgaaatgacaatattaccagcaagcttaggagcctccacatgcatcctcagttctggtatcttgcatgatgagaaagttatagatcaggtgtgtttgtttctcttattttactaccctgtcccctctgatctagaccaatgatttgacaccatacattggtg

SEQ ID NO: 147255 - DNA, 606 bp, Zea Mays
ggattttgggatgttacaaacctaccccacttaaaggaatctcgccctcgagatttagactggatttgagaaaagataagggtattccctcctcaaggagtcctcactctcccaggtagcttcctcttctccttctctgctccactgaactttacagagctttacttctgaggtgcgggtctttctgactgctgaatcaagaatcttcactggtttttcacggtactgaaggtctttctgaatctgtactgtctcttcttcgaggtgactttctggtgcttgcaggcatttgcggagctgggatacgtgaaacacattgtggatgtcggacatggattctggtaattccagacggtatgctgcgtgtcctaccctgccaatgatgggatagggacctacgaaacgtggggctagcttcccttttacttggaacttcctgacaccacgcattggagaaaccttgaggtagacgaagtctccttcctcaaatcggagttccctccgcctgttgtctgcataactcttctgtcgactctgagcttcgagtaaccttctgcggatcagtgcaactttctctttcgcctctttgacaaaggcaggtccttc

SEQ ID NO: 147256 - DNA, 642 bp, Zea Mays
agcttactccatccacccaggaaccaccaagatgtacctggacctcaaagccagatattggtggaaagggatgaaaaaggaaatagcacagtatgtagcccggtgtgacacctgtcagcgaacgaaggccgaacatcaaaagcccgcaggcctgctgcaacccctcccagtgcctgaatggaagtgggaagaaataggcatggatttcgtgaccggactaccccgaacgcggaaagggaatgattctatctgggtaataatcgatcgtctcaccaaggtggcccacttcgtcccagtaaaaaccacttttggaggagccgcccttgcccgaatataccttaaggagatagtcaggctccatggcattccgcggaagatagtgtcagatagaggaacgcagttcacttcaaaattttggaaaggcctccagcaagcaatgggcaccaaactagatttcagcaccgcttaccacccccagtcagatggtcaaacagaaagagtcaacaagatcctcgaagatttgctaagagcctgtgtgttaactttcaacatggattgggagtccagtttgccgtacgccgaattctcatacaacaacagccatcaggccagcatcaaaatgtcaccgttcgaagcactgta

SEQ ID NO: 147257 - DNA, 317 bp, Zea Mays
agtacatgtatccagctgctagagcttataggagagaagtcttcgaccactattttagcagcatccaagaaatcccaagggtaagtagttggataaatgagcatcatgactgtctttggtaccggagtggcttcaatacggatatcaagtgcgattacgtgactaacaacattggtgaggttttcaacaactggattaaggattggaaggatctgcctgtatgtgatttggctgacaggataagggaggaaattatggagatgtttcacaggaggaggaggattgcacaaaagttgcaaggaaggattttaccgtcg

SEQ ID NO: 147258 - DNA, 458 bp, Zea Mays
caacacaagcactccgactagcaaacacaaactttgattaatgatagtcgtgtgttcccttgctttggtagttccagttggcactagatatgctttggtagttccagttagcactccagcttgcaattcaccgaacaagaaatatgaatatcactagatgttggacgccacaatggcagcagcctcagtagtttcagttggcacgactctgcataataacaatactttggttagttgacagtcgtacattcctgcgagtatgaacgaatacatatgcacaaacacacatgcggtccatcatagtgattccacacatgatcaacgaggtcatgtaatagagagttgtgccccttgtggctgtattttcctatgcatttccattagtgtttggatttcgggcacaactttgtcggtattgtacgaagccgttgaaccgtgctcatagtcctctgctctca

SEQ ID NO: 147259 - DNA, 414 bp, Zea Mays
gggtgacttcattatatagcttgataggctagggttacattagggttacaatgtacatgggccaatgggccaggcgtcccatatgggctgtcatagatacattccaacaccctccctcagtctaatcgggagtgttacgaacgcaaagactggacctaaaatcagtaaataactgtacaggtaaccctttggtcataatatcagcaaactgaagtgacgatggaacacagagcacccggacctgtcctaaagcaaccttctctcgtacgaagtggatgtcaatttcaatatgcttcgtgggacgatgatggacggggttggcagtcatatagacagcactgacgttgtcacagaagatgattgttgccgaagagatgggtgcatgaagctcctggagcagctgacgaagccaac

SEQ ID NO: 147260 - DNA, 351 bp, Zea Mays
attttttgaaatgaaattacaaagggcataattgtgcaaaagaaaccccaaaagggctaaaatgcaaaaaagttggtgattctaactgactagaaactgaagagcctcctttcagttttaaattgtgcatcggaattgtagaattgttatcttagctttcaaggcatcgacacttcaaccttcggtttactcgtttcacgtgtgatccagctaagcactagtgtgaagtcgtagaaacattggccctttcgttcgttctcttgggagagttccagtggcgatgaagcttttcagttttcacagctcggatgtgagcaaatccatcagctcctgcactgcatggtacggtac

SEQ ID NO: 147261 - DNA, 545 bp, Zea Mays
agccggccacagtgcctgagtttatcggtgaaacctcttcggccactgaagccaaagagcctactcatctgcagaatattgaagagctggctacaatgccggagacggaaaaaatggaagaaccgagggctgaagagacaaagacatcggaagttttaagtccttcagcaagagttgaggtgccgatgccaatgccgaaggcacaaaaggaccttacaacaactcccaagagaaagagaatgtttaacgtgctagaaacaataaaatcttcaagctctacttcgaagatagctgtcgaagctcaaaaaatagaaattgaggccgaaactgccaaaagccaagtggaaaccaaaactgggctttcagagcctgccaagagggaattcttggaaattggaaaagaaacagaaaaagaatctgtagaagaaattttatctgagaaaaccgccatccctattcctgaagcatcttccgaagctcccaactatgtcctacgccatgcttcgggtaaaaatctgactgaaaaagaaaagcgagaagctcag

SEQ ID NO: 147262 - DNA, 287 bp, Zea Mays
ggcgtaacccaggcatagggtcagacgaagcgtcagggaaccacttaagtggactctgtgtttgagcgaaggacaactctcgtctacacatgccacattaactaagcctagtgttaagtgtggagtgggagagagtcggtccatctgtaaccaacccccactttggtctacaaaaggtgaggatcgacccaccaagggagggggacccaacgacttaacccgagagccaacactcgatatgtagaaaccttagcaatgtgagccttggagatttgggagcctctccc

SEQ ID NO: 147263 - DNA, 367 bp, Zea Mays
tttttctatttttagctctgtctaaacatgtacattacaaattgtgggctgcattacttattttaagtctgcattacatatattaagtttgctgatatcatatttatttatacattacatctgcaataccttctcatatttctactgaatcttagaccatgcttaagtcaacagtttgtttttttggtacctcaactgatccacatatagccaactaatctgtctgaattgtggcatgaaattggcttttctaaatcaatttactattttcaatttgtaaaaaacaacaaaaatgccttcaccaaattttagaatattttcagtatgaaattgatttccttacacctgaaggacccgtattctatta

SEQ ID NO: 147264 - DNA, 394 bp, Zea Mays
ggacccttctcgctcggtgtgacagccccgggcctctctacacacttcgcctgcctgcttccactacaccgacctctgccccgcctgttcttgcagccgtcgcctcttttgtgacttggcatcgtcgtcttggtcaccccggtcgtgatgtgatgtctaagctctccagcagcacctccgtttccggttgtaggggatcttttgagcacctctgtcatgcttgtcagttaggtcgccatgttaggctcccattccccatctccccttctagagcagcaggcatttttgatctgatacactgtgatgtatggacatcccctgtaatcagcatttctggctataagtattatttacttattcttgatgacttctcgcattatctgtggacttttcc

SEQ ID NO: 147265 - DNA, 622 bp, Zea Mays
tgtattcctgtatttcattccagaatggctgacaacaacacaaacacaccttttcgacctcctgctgctagccccaattcaggtaaccagattttcccccacccatgtgggatcctcagatgtggcaggcccaaggtttcgacccaacgcaggcttctacatttactaatcctacatcccatatgaccaatcctacctggtcccagggacctcatgacccatcttcatatacctttcgtaatccatggaacccattttttggtatgacgaatcctgggggtcctgctacacaaacatcattcggtcaaccacagttggtaccactcattccatgtccacaggtttccacccatgttcccaaccagactgaccctatcaattttgaatccgaagcagaacatagtgtccaggaagttaacagccctagcaaaccttcagatacacctgggacatttaggaggacaaaggaacagaacttcaaaccagatgaagacctgttgctttgcaaaacatggctagagattagtagtgacccagtcattaacacagggcagaggaaggagggtttatgggctagaattgagaaaaggtacaatgaacttagaggtgagtttccattgag

SEQ ID NO: 147266 - DNA, 298 bp, Zea Mays
atatatccctagttcgaatcctggtataggcaacaagtccttcgccccctttattccacgtttgcacatctcaggtgagtgggggtgttgaagtatatgcattgttcagtgttcacctcttcctgagtgtttatgctttggggttgaactggtcggtgcaggcaacttaacatccaccactaaatgactaaatcattagttttagtggccaatgctgctatttctatggaccacttttaagtgggagcctagatggtagaaactttaaagtttacaaacacagaaactttagtaacct

SEQ ID NO: 147267 - DNA, 1023 bp, Zea Mays
gccgcagtagcgagagggaaggaggactcgtcgaaggtgacatgtcgagagattatgatgcggttggtggcaaggtcaaggcaacggtaacctttgtggttgttggagtatccaagaaacacacagagagaagaccggggagcaagtttatgaggcgtggtggcagagagattgggataacatcgacagccaaagacacggaggtgggtgtgtcgggaggagtaccgtgcaaggcctggtaaggggtggaaaaggagagggttttagtggggtgatggttgaaaagataggtggaggtatgaagagcctcaaccaagaagacaggggggagatgtgcatgaaaaaggagggaacgaataatggtgtttacagtccggaggacacgctcagccttgccattctgctgggacgtgtatggacaggacatgcgaaggataacactatgggagagaaagaaggcgcgtgaagatgaattgtcaaattcatgaccattgtcacattgcacactcttaatggtagtacgaaattgcgtggcaacgtaggagaaaaagtgagcaatagtggagaacgtgtcggatttgagacaaagaggaaatgtccacaggtggtgcgagcagtcatcgaggattgcaagataatacttaaaaccagacatactgggaaccggagaggtccagagatcacaatgaataagatcaaaagggtaccaagcacgagactgggaagaggaaaagggaagacggacatggcgacctaactgacatgcatggcagaggtcagcattattgatatttttattacaagtaatggaagcagtgctggctaagcgggagagggcttcagaaccaggatgaccaaggcgttggtgccattgctttggagacgcagtggtgaggaagccagtggcagctgttgaggggcgaagcgggtagagggggccagagctattgcacctggtgatcacgtgttgggtcctgaggtccttcacagaaaaaccaaaggggtcaaattcaacagagcaag

SEQ ID NO: 147268 - DNA, 387 bp, Zea Mays
gtcgtcgcgtcccactcgcccactccacaacagactcccacccgcttctccacccgcaagaaggagggcgcccgcctagataaggttgcatcggcttctcccatagctgccactgctgaatggtgattggatccaataattggtgggagctttcctcactaacctaaccggccaacaactcacgatcgagtattcgagtgtcatcctgacgctcgtccacaagctcgatgacgcctagataaagctgacattaaggtcccgcctcgccgccacccccgtaacaccggcatcggcctcaggtccggatttggacccgcaatagtagcatcagccactgttgttcccgaccacgaggcaccatcactggcgatgacgtcgccgaccagc

SEQ ID NO: 147269 - DNA, 378 bp, Zea Mays
gcaaagtgcaggtacattgatatggtttccatttataagtatagagtataaaacataatgatatatgtgttacgtggatttggagctcacaaccaaagttcaaatcccacttgtacaataattttagatttttatagatatcgacagcgtcagcgtgcatcatcgtcctgtatcatgcatccagaataaatgatacatgtgttatgttggttagttagttgagtataaatgtggatttggagctcacaaccatatagttcaaatctcacttgtacgataattttagatttttttttatttaaatatgtgggaacaccacgaccgttcatagatattgacagcgtcagagtgcatcatcgtcctgtatcatgcatccag

SEQ ID NO: 147270 - DNA, 294 bp, Zea Mays
aacatgttgtaacacatggttctatctgctatcttcctctacccattcctgtccagtaagtgctggtgttctatactcacccctattgcagtacttatcaaggtgcagtgcatggaggtacataccataaatcagagtggtgtcatcatcctcaaaaaattgagactccatttcatcctcacttgattcatcattactgaccaatggaacatggataggtcctgcggcctgccaacagaaaatggaataccaatttccatgttcctgtaccaaatgacatgcgccacaagctca

SEQ ID NO: 147271 - DNA, 528 bp, Zea Mays
cctgccactattccacggccaaaatcgccggacagaagcggcggcactcgtgccgacggcgacgatctcaccggagctccaccacaagccgcaacagtgacccactaccaaccccgagtagcgcatcgcaaagggaataacacaacggattaaatgggcaacgtctcaccggagataggcgcggcaagaacggggattctcggaaatggcggagccacgacagtcctccacccccggtgagcgattcagtgattcttggtcgatctcctgccccaacacttcgtaaaacggcttcacacacccgagttcacctctaggctacctttgggggcattttcccgctgctgtcaccgagttatggcggtggcggatctctccaattctctcacccgagcgctctctctttccgtgttcggggcgacgacgactagatgcagtggagagacaggggacggggctaggttttataaccacgacgcgaggatctcgggtggaagcatatccatgcggtggatccggtcaacgcgg

SEQ ID NO: 147272 - DNA, 410 bp, Zea Mays
tacaatatattaagagatgtacatgtcgaggttatctttggagtgaaatctcttgcttgattaaaattttgtcgcctgccctacacctcttttaagttttattggggactatataatttgttaatgccttaatgacaaaaaatgattctgggctcaagatacgatgctttcctggtttctatatgcttaagagcaagtataataagttgatataggtgggctgtgagcgatgtcacatcggatttgtggtgacatgaaagaaagataaatagagataagagaagtaggttgtccactaatagccagctaaaagtgggttgttcatggacttcaaggcactttgtgagagacagagatagaccaaatattaaatgtacaacttgtatcttcaccacattgtatgagaccaa

SEQ ID NO: 147273 - DNA, 774 bp, Zea Mays
ctcatttgccccgcatagtttcagttatacagaatacaactaagatcctataatataatccagttacagaggaggcaaaaagcagttttgtgttaacatttatgttgcttttaccactagcctactatactcgctcccaaaaagggaagcgtattttatagagcgaaaagccaaaccttacagactttgttcaacaattaatcaaattatataggagtttaggacatgtagaagcctcgagcaatgtctctgcccggtgcccagatagcaaaatgattgtggtgtttactgagacaccataggccagtaaaaaaatcgctggtgcatgaggatttgcaccactgcaataggttggtatgccgcacagccacaaccacacaggcatacagtcaagactatggttgttccaattataatcaagataaagtgaaaatgcagcatgttcctaatgcactgtatttgtcccattagcccaacaatatgtcacgtcccctctgaactatgaaggctatggtttaccagctgaatgttctgattagcttaaccgttgtagcatggagacttgcaaacataattagggacactattcttcgagtgcctctgttaattacagtgaggaattccctattgttttttctcagatgttttgtcgatactcgggattgagttgtgtgcctaggattccatgttttttgatttgagctttacttcccagttatacttctcattctttgggttttgtacctaatgacctgtatcgaaacatctatggtt

SEQ ID NO: 147274 - DNA, 549 bp, Zea Mays
catcagaattttactagtatccatttgaagtagtgcagaaatgattcaggcagtgtggaagaaatggtcgtaaactgtaaactctattgctccttatggaactcccagataatgtgagttttatgactttggatatgctgcgtacagatctgtacgtgagtgtcttacgcatggagaatttgttaggttcttagattacactaaacaccatgagttcacatgatttttcttccactggagctgatttcatgcatctctgcttgcttcatgtaaacttcaccgtgccaaaaaaaatggtttgctggatggcacttagagaacgtttatacaaaagaggataagaaaatgaaggtattagagtatgcatcatgttttcatggctatatatttagtttcagttgagaccacattgctcgaacagctagttaggtagcttgaatgttacacattgtgaatgtaagtatgtaactgctgcactattgatctaaaaaatatactgcattacccgtggtgttacaaaaataaattttgaaaagtaaatgaagcctt

SEQ ID NO: 147275 - DNA, 751 bp, Zea Mays
ttctgttgtacttgagcttctaatttgcatatgctaagcttcttcttagttttctgagttagctccttttggcaggctgagttggaggaaaaggtggcaactgtacatacagacatagttaatcatgtaagtgcacctagcagttcagtgaatgccattggtttgctacttcatgcttgtgtatgttggaagggaaatgtatgcagatagatataaattagaagtttaacaggcaactggttctggttgtttgatcaactgaaaatgagtgctttgtaactcgtactgaggacatagtgcttttcatgtgttagaatatagaagtgtcatggttttgggaaccaggggacaataagatttgtgttcggaggagagaatgctagcgtggactcaatctgaatggtgaatcgtcgggactcgaacggtgggtttgagatagtgggtttatactggtttagcctttacagtggagtctcgcccttgacgagaaaatagagggaaagagagaggcctatctccctaggtcaacgagctaggtcttctttcccgtgcatggccgtacccccgatatggtgttgtccatcatgttggtccctgtagcgagtccgttattgacgccctggtggtagtacgtggcgggtcctgcgagtctgtcctagggcgtgatcatacgcggcgtggtttcgcccgttgtatgccctgcgtcaccttccatcatacgtggtacatacgctcgttatggtgtgttgtc

SEQ ID NO: 147276 - DNA, 523 bp, Zea Mays
gtcgctgcggaaaacggcatgaacgacgttgaggcgctgatgcagctcaagaagtccttcaccaactcctcgtcgctctcgtcgtggctcattaccgataaggacgggaacaggtccccctgcgcgccggactcgcaccactggcacggcgtggtgtgctcccatggagtggtcaccggcctccgcctgaacggcctcaagctcggcggcaccatcgaagtcaactcgctcgccagcttcccgcgcctcaggtccatctccttcgccagtaacaacttctccggcccactccccgccttccaccagatcaaggcgctcaagtcgatgtacctctccaacaaccagttcaccggcagcatccccgacgacttcttcgtcaatctcagccacctcaagaagctctggctcaatgacaaccagctctccggctccattccagcttccatctcacaggccacgtccctcctcgagctccgcctcgatcgcaacgccttcacgggggagctcccctccgtgcctccgc

SEQ ID NO: 147277 - DNA, 354 bp, Zea Mays
aggggtggtacagttgacgatgtcgtcgtgctccctatccatctccagaaatgggtagttctcgcacccgttctgcctgaaatacacacaacaccccaaagagcaatcaaattcaaacatgtgagcatgtgccgcccgccaccataagcaataatgctacaacttgcaataggtattcaatgctacaacacaaaaaaataaaatttggcactgattggaatcgagaggggcgacaagctaaaccctacccgctatcgagaacggacaacaccaggcaccgcacgcaggcatcagccatgacctccacgacgttccacatcccagctataattgactcgatgacctcctcctgcc

SEQ ID NO: 147278 - DNA, 529 bp, Zea Mays
tggtcttgatatgctcgtaccattggaatcttgcatactcttatttttatatatacttacctttatatcccaatatctatttgagacatttcatttaacatgcccttgaccacccttgtttctcaatgatccatgagcggtcattttattttgcacatccttgctgatctcgttgttcccttgtaacatccctcgggaatgaattttaacttcaaccattctgttgcaaccttacatatcttacccttgattgttttctccatttcaccatttcgtgagtcttgccttaactccatactttgcccacttttgtttgctattacctttacctttctcatccctcgatcttaccttggtgattatgttatgtctgttgtctaaaatctccaacgtcatattccaatttgagagcggtgttttacttaccccacccttggctatttcctcttctttatcgcgtgtaagcttggatgtgactccattctttgttgtactcataccgctggctcttcaatggtttcatcttttc

SEQ ID NO: 147279 - DNA, 305 bp, Zea Mays
aagagcacaacaacactctgacactctccagcaaagtgttctagtgacttagtgagattcgagtggcatttttgagttgttcttgcatctttctgactttgtcaactcgtgatcttctttcttgtgtgtgttgctacgatttgctcttttgtgtgtactttgtctccctaccttactccaagttgtaactctgatcttttgtaaggctacaagagaccctaatttatggagattccttgcaagcgggatataagtgataaagaaagactgtgaaactcaagtttatcttcatgattgcttgaaag

SEQ ID NO: 147280 - DNA, 2557 bp, Zea Mays
cagtcgtcccctccgctcctcgcctcctctcccgagtcccgaacggccgatcccgacgccggctgcgtggctcgcctcagagccccagccgtatcctgccacccttgtccatgagcgcccgctatcagcgcagctagtccctccctccgcccgctatcttgagcggtggtgatggagtttactttcgaggatgcagcggaactgtgcgcgctcgtttcgaatcagcaatcccacgtcgacgagaagcggaggtcggtgtggtttcttctaccggcgcacctccgatcagaatgcatttctgtttttgcaccctgcatcacaaaagattcggggccctcttaatttgcaggtggctggagtcaatgatcctcagaccggatggctgcatcaggcgcgcgaagcgacccaagtttttgcatgaagtgtaagcgtgcgccaagttctgggatgcgagtagtgttctaattcaggctttttcttggtctctttaataagttgtccgaagtttagtgttttattgagtcaaccgggctgaattttttttccatatgacattggaattgatttttacagattcagtgctaaacccattttgggtggtaattttctcatgtgtgttattgtatctgatgaatcgttgtgtttcttaagcactcctcgcattctagatgccataacattcatatcaatgcttattcattctgaaaagctgataattgttttgataaggggtaccattatggcattatgtgtaatgacacccctcttcctctgaaatgtttccacatcgaactctgttttcctaatttatattctctctccctccctccctacccctctctctctctctccccaatccacctatccacaaaaaagaacaatcaggatgtatgtagtgagtagtgactatactaagtctaattgttagttctctgcttatgcaggtacttgcctgagtcatatatcaggagtgatgacgtaagtgttagtactttggaaagaactacatatagcttagtgtttattttgcattcttactaacatcagttcatggcttatgtactatgtgcacatatggtttctcccacttattcaaatccctccacctatgtgtttaggtctttaaggtattagcgaaatatgtgaagtaataaatactctattttcactgtataagttttattcaagaataagttaggtgtgtactcaaaggactttatttcaataatcagttaaatacataatgcttaaaacttatggaagacatgttctagcgccaagttaggaactattgcacatggtactctagtgctatgtctgatgttgttttgaacatggttcaatttaattgtatttcttcaaaaatggttttgtcatggctatataaattttccttaccctgcaatgatcttatgatcgttttggaaccatttatcagtttcctggcttatactagttaatataacagcaatttcggttgcattatgtcacttcaaaatataaaatgtgaatttagtggggaccattttttcagagatcttgtgataaagtgagaggtaacattaaaaggatttggagttcagagtgcaatggctatacccatcacttagttctggagggcctccagctttttgacttccagaagaaggaaaatgaaccacttggaccagaatatcttggtgtcatgcaggacacaatcagcaaattgacctatgaaacacttcagtcagtggcttgtgttgtcagtcatgacaaggttacttttgataagactaggtctgtaatggaaaaaattgtaaattctcaccttccaagttacttggccagcttggatcagaatgatattgcatgccagctattcaatatttttagaaatccatgcagctatcgatctggttctgtgaggcttgtcacacctgtgtcaccacaacttttgtcttctattaagcatgcgttggatgagcttgatggaatgccaatgcagggtcttgttgcaatgaataggaagattaaaggaaaatcatgtgccccaaaatttggattaactgctagcttttccaaaagaatgcatataatcaaaatgataagaaaaaggtgcaacaagattttaacagaacttgaggaaggtaattacctgccaaaggaattagcaaaggcaatgtcagtggtgaacttatatcagaagcagaagctgaaaaatgtgagtatttcacaatcagagtttttcccctttgcaaaagaaactatttctttgcagaatgatatcctgaatgccctttggtcacttccaaatctcaagcatgcgaagctgaaattgctgcacaccatactggatcatgattctaaatttgaaaggaagcacttagcaactttgaggaactacttgacagaatgtttgtttggatgtgatgatggtctaccagatgtggccctccaagccatagcctctataaatcagatttctagatgtcagcatgttgtgttaacggaagagagggaggatgctgaggtagatgctgtactgaacttgagcagtcatctcaaagctttagctcat

SEQ ID NO: 147281 - DNA, 305 bp, Zea Mays
gcgcgccctctcccctctacccctgcatccgcatggtcctcgccgcaatcccctcaccgatcaatgcctcagccatggaaggaaaaatcccgtcactgccacagaaggaaacacatcccctcgccgctatccacgcctcgcagcaatccagcacgcaggaatcccatcgccgacgactcgcaggaccagcccgcccaatcgttcttcccatgcaccgcagatgccccgcccatatccttcgcgccccaaatgcaatccacgcctcgccgccatggaaggaatcacaatccaatcccctcgtcgcc

SEQ ID NO: 147282 - DNA, 1060 bp, Zea Mays
gcttgtaggattccctaatgttgagattgttgaagaagataaggttaggatttgttctttcagtctgctttctcacagattctgtgcattatctgtttgctcttaaagtgttctgttttttttctttaagagtttgtatggcatcttgtgccgaccaagtctgttactgatagattgatgtggtctgatttgagtacttgtgacatgggtttttgtctggtggcatagggggcagtgcaattgtgtcactttcactatgcgctttcatgaaaattgttgtgcgcagcagtcagcaatcataaagtgtcgcacttacaggaagtagaggtgcagatatttctagagaagagcagctttcatcatgtttttagcacacattggaattctctattgttcagtagattgatggtgcttggctgcttgcattgctgcttaagaataggagtaccttgctaatctccaattactattggaaacaagaactgccaccttaataaaaaattggggtttaggagtcacgaattgatcacaacaaaggttttttcctccctagaaattcagtttggctgctaaatttctctctacattatagtacatctttgaaacaggtaggatgtgtttttttttgggtaattagttcaaacttgtaacacatgctggtaactttagttcgaatgagcaaccacgattaaggccaggaacagtgttaataaaaagaagtaattggtccttttggtagctagcactttttcattgtctacatttatttctatcacacgatgtgatgttaaatacgtagagctcacaggaacgattactgtgctaatccaatgttcagggaaacaaatgcaacagttggtctataatcaaacagttcatgtgtttgttgttcatgttttatgccgctttgttgttcctttgtttgttgttcatgttgggcacatgcaaattaggcaaacgtccgaataatacatgcagagacggttatgccctgttgtgtagaacataaaacacacccatcggcgtatccattcggagcacagatctgttccattccaag

SEQ ID NO: 147283 - DNA, 404 bp, Zea Mays
gttcgcggaagcggaatcggagtccgcacgacgtcgatcatggcttcaccatgccttgcttctacttctgattctcgttgcttttgctgctgttgctggattgctgcagggagtaggaagaggaggaggaggagcctcagcaccagcggcatcacctgcggatgccatccaaatggacgcgcaggtctcgactcactgcggggtgccatacacagcttcactactcgccttcgatcccgtccagcgcctcctcgctgttgcaactctgtgagccccattccaaaccccgccttcacattagtacatcacaaccaaccctaaaccactgccacacaattcattcagttgtaaactagagctttgctaatttatgttctccatccctccaaatcagttaattgcgt

SEQ ID NO: 147284 - DNA, 516 bp, Zea Mays
aacaactttgcttaagaatgtgagctcagttgttaagaataaattgaagataattaagcctaaagtctggctgtcaggctggttccactctgaaattcagattttcagtgtaacagagccatctttgggtttgtattcaaccttgatctactgctcaaatgagttcaatccctatagtcgaattattgctggtttgtagctctacaattttgctgcagagcttgggatgagttgtcattgggaattgagagtaaatcatgctccaagtcgctctgtcagttcatctgatgagagatcaccatggtacagtgtactctgcagatcagaacgccagtacagaaaaccccctgccggtgactccccgccgtgattcgtgttgccgccgtccgaattcgcgctcggggcagatggataacctcgcggggtgagtgaatcctcgccgtcggtgagctggaggtcactccggtgactcaccgtcatctcccccttctgctttgcggttggtgcggatagcct

SEQ ID NO: 147285 - DNA, 1021 bp, Zea Mays
tccatctctagtgttaggaattgtggtttggtgtagtaactcatattcagtaccaatgggatggattcaactgaggctcatatatccatattgttctgaaccgtatgattgtctattaacaaattcaacattttacaattgatattcatacatagcataaggaccaatgtgatttgtgttgagctattagggtctggaagagtactaataagtattaaggatctcaacctatcatttaacacaagtttttcttcagtggattatgtcgcctctgatgatcaaatcacatattaatgccttataaaaagtgatagattttgatgaaacattgaagctcatcctgtaagaactaaacatcaagaaactggccatatatttgttggagcaaatgagtgagtcagactttggagatttcaaattgttagagtagtcctcgctgatgttagtcttctgttattaagtcaagtcaagaggtcaaggtctctaccttaggctgcaagtttgaatcaagtcaaatctttttcttaggttgtaaaaagcactagggttgttatctgtcctccctttcatcagctatataacaggtgaaggcaccagtcagctgcagcttacagcagcccaagaccagactccctcctcacaactaacatggtgcatcagcaaaacagcagctacaccataccagtccaaccagcaactgcactatgctagtccaacacaaacatcttgaaaactatcatgtttaaacagaatatgtcaacaatgttcttttttctatggaaaggcaacagataagccattctagagaaataattaaagcccaaaagtttatctgagtaaatcagaaggaagctcaaaatgttgtttcttaaatgagagatacttacatggtggaatatgtagcacaagcattcaggcataaaccgaacattagaagcctcaccccagataagaagatacaagccaatgtgaagaagcttcagctgttgcttcttatgttctgtaatatcatgactgattc

SEQ ID NO: 147286 - DNA, 1211 bp, Zea Mays
cttcgagcataccaaccagtcaccgatcctctctattataccatgaaattcatagatggcctgaaacatgacgttaaatcagttgttattattcaacgtccccaagacttggatactgcctatgttttggcttcattgcaggaggaggtgggcaactcggctaagaagtgggacagtcgacgttgggagcctgtccttcaagcaaaaccatatgctaagggacctatgcctttaccaccaccaccaggcaaatcttcgtcagggggttccgcgccatcatatactgagaggcctcaccaggacatgctcaagcatcctccattagacgattgcctggccaatgtgtatgcttacaggaaggcaaaagggttgtgttacaagtgcggcctcacttactccaagggtcacaaatgtgccgacattgtgcaactacactgggtggaagaaatttggaaccaattcaccccatccgagtctgaagaacctgtggatacagtgcctgccgaattgcatgttgtagtcatgtctcaagccgctcatggcgaagtctctgcaactaaaacaatgaagtttctgggttccattcaggggatcgacctgctgattttattagactccgggagttcccatacattcatcagtgcagcagtggcgtctcagttaaccggttgttctcagctttgccagcctttatctgtacagattgccaacgggacgcgtctcatctgctccacagaattccctaatgccacttggtacctcaatgactatcagttcacctccacactgaaagtgttaccactatcctcctatgatatgatagttggtatggattggctacaattacacagccccatgttcgtccactggaccgacaaatggcttactgttccctatcaaggcaccactgttaaacttgtcggtcttcaacccgggggtacccaatgctcagttatggagatccttttggggcagagcaatgaggcagttatggaggtatattcagctgaacacatctcagagaaggatcagtctattattcattccctgctggtgcccctgcaggacctacttcttcggttctctcatgtgtttgttgtcccccagggtcttcctcccgagcgtgactgcgaccatcacattccactaattccaggcgcacgcccagtccaaatgagaccctgtctctatgccccagctctgaaatcaga

SEQ ID NO: 147287 - DNA, 528 bp, Zea Mays
cagtcatatccccgccgcccgcgccgccgaaggccgaaccctcgtcgcctcccctgcccacgcccgccgcctccagcaggaccacaccgccggattcgacttttttgtcctcgccctctccccctcctctcgtctcctttgatggcgtcgaggggaggctcctccggctttatcggtgagccctagcctttttctgattgcgtgctaatttgttgaatcctctttctcgaactaatagcgttcggaacctaaccctacgtcctgcgagggatggatggatactcctatccatctgttttgcattgttggcttgtggaccctgttgatataagaaaccccattctgattcggttctcctgcttgtgcattcgcccgacactgtccggtggcataattaacctaaagtatcattcactactattaatatattatcaccttattctgaattttcagcccgacctgcaactccatgccctgtgttaccccccgccactagagttgggaatgggaattgttaatgccagggcc

SEQ ID NO: 147288 - DNA, 361 bp, Zea Mays
tgatcggcgaagtcctcttgcttcggtaggggtggtggtggtaatggttgatttggatgctgtggtggtggtggaggaggtagagctaggatttcttggttttgctcgtatatattgtggttttgttgatgaggatggaagtggtcattgtggggtttggtgctggttgtactgatggggatggtaggtgtgggtgacaactctttgattggcagtcggttggtttctggccattcgatcttttgttgctttagtttcagggcaatccctaattgggtgtgctaagtcttcgccatggaaaagacaatagaatcttcgctgctgcgggccatggcctctacccctgcctctagttgcgtga

SEQ ID NO: 147289 - DNA, 685 bp, Zea Mays
tacttgtttagttgctgggtgagtatttttagggctttgagctatcaagcttttgcttgcttgcttaggaaagctattttggctccagcaaggcaaggtttgcttgcactggcgaggtcaagcacggccaaaaattctcatcagttgattacttcttgatccgtaccctgcaaatggattttatcattgggttttcatttgggtgtcttccaccattatgttctcccaacgtattgtttgccagtgctatgagttaggtagtacaatcggagtactttcttgaaaataatgggttgtatttgttctctgattaaatagaaggaacaatttcatcccggggaggatgagaatgatgggtgcccagccttgacgagctctttcacgaacagtccaatagtccatgtcatcgacgttggtcagcatgtaaattcttgagctcttccatttttggatatatttagtttttatatttttcttggtctgttaatccctttaatttgcaagtaactgcacagaaacttgttgaagtttttcttcttgtggacaggcgtgtacttcgttttcactagcatactttttattgaacttccactatgctattttccttatctagatgaaatgatgttcagttgttatcataaatgcaagttcttaccaatgaaacaagtattggcacacattttac

SEQ ID NO: 147290 - DNA, 364 bp, Zea Mays
cttgctggtcaatcattaaaaaagatattatggctgctatcttgactgtttggaacaaggattttcggaatttcagatacctcaacacaaccttcatcactctcttacctaagaaagaggatgccatccttgccaaggactttcggcctattagcttgatccatagcttcgcaaagttaatcacgaaggtcatggcaaacagacttagtggttatatggacaagttgatttctaagaaccaaagtgcgtttatcaagggcagattcattcaagacaacttcatgttagttcagcagactgcaagattgctgcacgctcaaaaacagcccagaattcttctcaagctagacatttccaaggcctt

SEQ ID NO: 147291 - DNA, 368 bp, Zea Mays
caagcacctttggtttacttgattgaccatcatcttgatatggtcaatattgtctactgctctatgtacacttacacttgtcaatgttttctgatatgggtgttctcggttataggaacgagttctcggccgcagcccagattgagtaggctagggcggcaccgggagagctcgccggcgacctatggtaatggttggcggaaccaccggccgtttatcgtcggcaacgcctgctgctggatttgtgggaacaagacgtcccttttctctctaccgcccctctctcctttattccaaatccttgttcctaaacatagaaactagggagcagtataatgctcaataaggtaactaatactaccattaca

SEQ ID NO: 147292 - DNA, 1316 bp, Zea Mays
gtctatcttcgtttcagctccatgagcattttatgcttggagatcgatgtgctgagtacgaaatggacattcaaacaatcttgacaggtattttaccttttcacaactaatcaagatgaaatgtacaataacagtgtgaaatcaaatgatcttgtggcaaacaaactgtctttccattccacaacgtaactaaacatagcacgaaggccttgtaatcttaggctgcgatttgtatatgtgaaccttagccccaactcccaaatgatggagttgggcgtcaccaccccatccaaacaaggctgcagaatacaagtgcatgaacattatttatcctcccaaggacaactagcaagataacttaaattcccgtagaataactgtagacctatatatatcatcatatcttttcaactgtgtgattgttgctaatcaacctcaatattttaccttcaagttatatcaaaccagtgtgtaccgttttcaaatcatttgcagaaacagagatgacacctaaagtaatgtcaatcctaaagaaatatgagaatagttggaaggcgatgaaagttgccaatccaattagctctggagaaggatgccaaaccatgaacataaagaggaagaaactgaaagaagccatacttctacgcaacagatgccaggcaagaagcatcatatggtgtaaattattatcatggctgcctctacaatcctctgtctgacagtagtcattgcaggaactggatgatatatgccgtgagagcaactggattcttccaagatacagagtacttccttcagttaccggtggtatgtggatgataatcaccgatttttcaagttcctgcatgtcgcagcatggagtccttggaccatacatagcaggcgacagttatcatatggtgttcgatcttttacagtttgtactcctatattggcagatatgtaccaggccagtgtccaccttatgggcccagacttcaacttgagtgtagatggtgatgtgagggttacccctcacgaggcacgagactcagcagcgtccaacatgctgtctcagcttcagcagaaggcaagggaaggctaggagagcggcatgtctccacagaacccttaatgctgcatccttgtgggtatcgacttgcatgcgacaggaaagaacagccatcacagctcagaaatgaacatgctggttgtcaaaacaaaattctatctatctatttgaacttaagaattctgcaggtgtggttctgcgttttcttgttgggcaatctggattttcacttgctatcttgacttgaccatgttctttttgtttg

SEQ ID NO: 147293 - DNA, 592 bp, Zea Mays
cttatcttgaaggaatcatcttatcctaaccactgtacttatctcatcctagtataacaaccatgatctaatccaaaataatcagatcttaactagtttaatctagtcacaccaacctaatctagattctatctaatctattatgatctaatctagagagagttagttaatactggtacaaaagataaggccatacccctaagcctaaattggtgacttagatcaactcggccatacacaacaacttgacctacataataggttacataacctatcccacccatatggaatcaaacaaccaaaccagattcagactaatctcatttaatctcatagccatctactaaactagctgctctacctacgtgttaacctcttctcccaaacccggaaggagacaccaaggctcaagaaggaaaagatcaacctcgtcaaggaaggagaggaagtcaaactcgatcttccgatgcgttaccactcaacacggaattctttcccatcataaacttgcttaccctaggttatccttgccctaacctaccttttatcctatacaatcaggtgactatacatatatatacccatgctttca

SEQ ID NO: 147294 - DNA, 316 bp, Zea Mays
aaaagttttcatgagaatacggatgcgaagttgaattttagtttggcctacctcagactgatggactgaccgaaaggactaaccaagtactggaagatatgttgagagcatgtgcccttcagcatggaggatagttcagaccagaccaaagagatatgttgataatagaagaagaccatttgaggttgaggaaagaaatcatgtgtacctcaaggtgtcaccgcttcgtggaatgaggagatttaaagtcaagggtaaattgtcccctcgctatattggaccattcagagtttttaggcgagttggagagatggcc

SEQ ID NO: 147295 - DNA, 2394 bp, Zea Mays
ggcctacatgtgggcagttggacttgcaatttggtctgttagggttagaataggagtaccagtgcacccaaaaacgccagcaagcacctgccttaaagctgcgctttcagagttggagccctgcctgccaaacaggctcttattaggctctcttaaggattttggatgcactttattaaagttgcgcgcatgacatgactccatttcactattctgtgctacaacacaaaactattgtttttttcacttgtccagtctcacagtatgcacatcagattggtaaaaggaaaatctaagcaacattattccactagtgaaagcaaagttttgaggatatggtccatgctaggtcttttggtcctctcctcttccacgcatgacactgctatctctaacatcgtggctgcttgtaagtagttgaattctccattcagtctgcagtcaacaaattccatgagccatgatggatctttggctgccaatttctctttaagaatctcagcagagcatcgaatagacatttcctccaccccctcgccttcaattacccaactggaaacccgaacccctttcactaactcgaggagcactacaccatagctgtaaacatcagccttccctgttattggaagatttagagcccactctggtgcaatgtaccctctagtcccatgcacccttgacagcatctgtgctcctgttcctcgacttagtaatttaaccaatccaaaatctgcaatttttggttcaaattctttatctaacagtatgttctctggttcgacatcacagtgcacaatccattcatgatggagatatgccagtccttttgccactccaagtgcgatattgtacctttggctccattggagcacataagttaagtcctgataatcaaccagatatctgtctaatgaaccattttcaacaaactcggaaaccaatagcttgtgagtttgctcagcacaaaacccccaaattcttaccagattcatatgatatattcttccaatgatgctgagctcagatctgaactcttgttctccttgcatcatatcacttagcttcttcactgcgacctcccttccatcatcaaggactcccttgtaaactgctcctgatgtgccacttccgagctcttcttggaaactcttggttgccctctgtaactccttgtagctgaaccttcggaactgactggaaatgatcatgtaaccttcgtccataatttctggtcttctctcccatttgtaaacaatccaactaccaactatgattaagatcacttcaataacgagcaatgtcaatgcagaagatagaaagtatccaaacttgaaactggaattggcacccacgaacatttgtgataaggggtatgcttccttttcagtaactttgcaagcatgtcttaatccaggagccaattctggtgaagaccatactgcctcttgagttttcagatagatatcattgtaaggatctgggaagtccctgccattgaaaagaaaggcctttggataacattcgcctgttcccttccggtaaccaaaagcttggcagtccgtatcgttcaagcacatgttcctgcacatcaaccatggcaccagtttggaatagtttaagtcatagccccataagtctgttccggtaagcttcctaaatgaaaagggtgtggtattagtcttgcgcctgcaccctttgctccagtcacttggttcaaccatctcaaatccttcaaggcaagaacatgactctagctctggtctgtatctgcacaggctgtttgctccacacagtccatgtattttgcacagttgagggaatgccatccaagagactgaccaattgccactggtcatgtttaggctatacaacctaaggttaccgtcatagtctagggtcaatctcctcatcgtctcatcaccaagatcagaagcttcaaacttaagctggtcacttgccacaaaccgtcctgtctggtcaagaaccccatacctggtactattataggtagtcctaccattatcccatggcatgtggaatggatctggccaatatatgctactagtctcaggaccgttgtaaataagagttaggatattgttagtggcgaagtagaaggcatagaaacctgaatagagcaaacccctagcagaagcagataccaacctagtatctctagtcatcggctgccatggtagaagtgtatcagttggtgagtcgaagcttctccagaggtgacgcccatctgtatccatgacaacaaggttgccgctatcgagaagcatcgcacgatcactgccggacgcggttgtgttggtgctccatatgaccatgccattatagtccacaaggatcaaggcccccttcttgtggaagatgagcctggagccc

SEQ ID NO: 147296 - DNA, 595 bp, Zea Mays
agcttcaatcgcgccgacagaggccgagggaacacaccggaggttgcgtagaagcactcaggacgacaactccgaccgtgccagtgtcgcaatcgcgaaaccacggcggcacggaggagagaggatgagcagcgcggctaggtgtgtcttgacggcggcggagagtttgcgaccgggtgaacaggagatgcgaggcgaggtcgaatttatattcagcggtcttgaatcgggagtaggaggaggtcgccgcgcccggtcttaacggcgaactccgcgcgcgagctcagggattctgttacggcctggttggagacgggtctgacgaagctggcccgcgcatcagtgacacaagacgagtggctgacgtaccggtcccacgcggcagcgagtacccgtgtgcgcgcaagcgcggggaaggaactggcacgtgggccccgcgcgtcagagagtgggagcgcgcggtggatgagccgcctgggccgcgcgggcgtgaattcgggttgggccgaattccaggttcgttggcccatcaggtatagtgttccttttcctttttcttttatttttcttttattttctcctttctccattcttt

SEQ ID NO: 147297 - DNA, 379 bp, Zea Mays
aaatacaccaactgagtttgcacaaaatggcacttagatctctcgatataaaactgatgttccctcaaaacagtcaacacctgcctcaaatgactccaatgcaattctaaagaaggactgtatatgaggatatcatctatgaaaaccaatgcaaacttcctcaaaaatggagccaaaatagagttcatagcacattgaaaagttggaggggcactggttaacccaaatggcattaccttaaactggtagtggccattatgggttttaaaggctatcttatactcctctccttccttcatcctcacctgatggtacccaacctttaagtccaaactagagaaaaacttagtgccactgccactcaactcatccaaaattt

SEQ ID NO: 147298 - DNA, 521 bp, Zea Mays
attggaagttttgtcgcgagcttatttactttgttggtgctgtcaggtcaggaaatggacgattgcagattaccgaacactactgcctgttggggaaaaaaaatggtgctcttgcatcggacgcaatggcaagttggcagtatcttatgcctttggcaattctcttgtggtccatagcggagtgctcactgcatctaaaatggtaaaagtgaatgggtgctgtggtgtgtggcatccaggcgaccttaatattctcctgtaattcgtccctttaacgaagaagcctgtcttgagagactgcaaagtgcatttggacagttgagttgccatctctcttccattattcggaccacttgtttcttcccgtctcctggaaatctctgaactgcatggatccatccatctcatcaagtggcacacttacttctcttcgcctatctgagaattaataactcttcgacacccttcaaaacctgtttgttgttccttgtacctgagtttctctacctgctgtttatgtc

SEQ ID NO: 147299 - DNA, 413 bp, Zea Mays
tagcttcaacttctattttcctatcttaggctggcagattacaaatggtcaacgcggtattttcttcccttccaacctattacatgtgcaccctgaagctcccaaaaaatgtgatcaaacagattgacaaacttcgacggcattgtctctggagaggggcagacataaatgcaaaaaatccttctcaagttgcttggaaattagtctgcaggccaaaaacctaggggggacttggagtcatcaaccttgagtggcagaataaagcgctccttatgaaatgcctccataaattctttaatagagtcaacacatcccatgggttaacattatctgggacactcattacaacaactctctgccctcagctaaaccagttggctcgttttggtggaaagatattctcaaaatccaag

SEQ ID NO: 147300 - DNA, 406 bp, Zea Mays
cgatgaccaatcgggcggcatcagcacattaatcagcgctcgattcatcgctaattgaagcagagaaggtctcaagaggaaggagggagttcttacaagcaattagtcggctccgaagccagcacatgcggaagtgcggattcaccacgaacttcaaccccgatgacgaaatccgtgctccactcgccgtcaccagtccggccaagtcaaggtcgtgcctttgcgagggtatgcggatgcccaggtgcttcttcccggtccggtcgcggccacaccacacgcagagctcgcggcgacgcagagcgtggtcacggcggcgcgatctacagaaactatgagctcctcccctcgactctctcctagcttcgtctctcggtagctctcggttctgcttcacattgatcgc

SEQ ID NO: 147301 - DNA, 627 bp, Zea Mays
caataatccaccgatcatcccagaatgtagtattctccccattccccacctctgtaaccacagccatagcaaaaagagcatgtgccatacgaggcacatgaaccggtagcccttcccagggccgagcatgatcagttttctgcaaccataaccagcgagtacgtaatgcccagcccataaattggaggttgaggatcccaagccctccataccgcagcggccgatgtaccttctcccaagagacaagacaattacccccattagcattctgacgaccggtccacaagaaaccacgctgaagcttatcaataactcttattccccgcttaggaatgtccaaagccaccataagatgcataggaatggctgtaaggacaggacacaccaccaccagtcgtccggcacgatttaacaaagaggccttccattttgggagattggctgctatcttatcaatcaaaggtagcaggtcagatctagttggcttcctgagagtgagagatatcccaagatatttacaaggaaaatccttgatttcacattccaataactcagaaagcaacaacagatcatcagaagaacaattgataggacaaattgaacttttagacagattggtgtggagac

SEQ ID NO: 147302 - DNA, 817 bp, Zea Mays
gaggtagagcttgaacgaagggcgtgggaagcttcaacaacttatgagggtctcggtgctcgcgttaagtcgatcggggacaacgtaggttaattggtccacgcggaagctgtccacgacgccaaattgagacgtcgcaaccccgttctatgcaacatgcaacagtagagctagaaattccaactgggtgagcttcactaacctttggagagcacggaacgagaaccacatgagcatgcaacggtctggaacgctttggccacggcgaggtggtggtttcggtggtatggtcaccactcaccaggctgggcgttggctgtgaagaacaagggcaaatcgacctggggattgagaggggaactcaagccgcaacacaaactgcagaggtaccaagggaccagctagagctcacgaacagcagggttctctggatcagcaatcaagtaaaagcaataagaaagttagggcagggttccctgaacttagccaacacttgatgaagagggactccaagggtgccagcactgcatggctgatacacgtggatgcccaacccaaatagcaggccacccacaagctcaacacagaaacaccccccgtcccagactggagacagtgaacaaagtgaataaggactctattgcacagccccacaacagtccaagccttgatattttgcagtatggagagaccccagatcttcagggatgtatctcaactcgagcacatgggtggagtacagcagagagaggatcttgttcagtttctcaaaccaaactctgaagttaactgaaacaggactgctgctccattccac

SEQ ID NO: 147303 - DNA, 380 bp, Zea Mays
gcctggcaaggagatcagacgaaccgccagagagccactcgagtggattccacatctggccctagggctgctctcaccatcaatactacgcacgccacattaactgcgcccagcaccgagccgcggtgtaggaaggagccagtccgcctcccacccacgaccgacgagtcgagtcctaggcctgagtcccactcatgacctacgggacctaaaggccctaggcctgagccccccgacgctccacaaagcacacaagactacgagaggaagccagaggtcaggccccgaagaccaagggcgcactagcgggagcaggcggaatgatagaggccgcaagggcagtaggggtcaatggaggtgccctgatggcctgagcactt

SEQ ID NO: 147304 - DNA, 346 bp, Zea Mays
gattttatggcaccacctgaggaaccggtttgccaggtaagtgtagacagtttcaaacctcagagcatttctaagagtctttcagcttcattaactggacacactccaaagagagaactgttcaagcaagtagaggggaaacagtgcgatcgagctgaggaaaccaaccaaatcgccagggaagtttgcaaagatggtacctctgaagcagcaactcagttgcagatctcggaatcaaatactggtcctccgcaactaagaacagccgaagaaagtagcactgaagcaaatttcatattatccctgtatagtatcaccttgcaccaaccacgcaggagtataagat

SEQ ID NO: 147305 - DNA, 954 bp, Zea Mays
gagattataagagcaattaatcttttgagggttttagtgattgaatgtcaaagagattaaaagtactaacaactttatttgagcatgtgtatagttcttaatatcctgtgaagtgctcatgctcatgccaaagagtcaaaagagcatgaaacgtctatgtgaagttatgcaggacccaaagaagatatatcatgaagagcgaatcacatccaaaaatcttttgagacatattcaagattaaactcaatactcaagaatcgagatcttggttgacttttatttatgtcattgaatataggaatcgtcatactatcaagagggatcaacatatggtattggcgttgttgctaaagctcacactctttatttttgagtgaactattttatttcagctccactgtgattgaagtgggctgttcaaccagtccttggcccacctcaaccttgtttctctttggtctccagtaagtacctttactgcaactgttgtggtgattggtatttaagcatatgggatgggtacaacaatcttgtcgtcattttacaggacaagtggaaacttgtttaacaatgaccccgctccaccacctccaccatcaccactagcaccaaatacccctccctattggcaacctgatgttccagcttacccatccccatacttatatttaaactctactcgcgaacggtgcagtctacgatgcagaacaatgtaaaatagtacatatgggtaaactttgggtaatctgctggagtcggcctaaagtctaagatacccagccgaaaatggtggcagacactccaaacttggtgatggtgcagttgcaggaatcgtaatatgtttgctggatgttggtgcaatagttgcattccttgtaatcaaaaggaaatcttggaggttatcatggggacaagacccggaacaaaatgaacctctcagtcctcttgcttctg

SEQ ID NO: 147306 - DNA, 395 bp, Zea Mays
cttttagccgcgcaatgtttaggtgcgttcggtgtggaattcggtcaccggtaggctgggcggtctcatccgtcgggattcgggggcggagctctgcctcgccgtcgtgcgcagactgccggtggtgagggaggaaagccgggaccattgactcctcgatctacggtggagattggtctggggtaccgcttctggttgcggtgatctttaccgttgatcgaccgatggagggatcagggccgatcgtggtatggcttatcgtgggccatgggatcttgggtgtgtggccaagattgggagtgggcaatgtagatcgtggctgttggatcgcttatgtgcggtgcagatgagatcctagtgtaaccctgcatctcttctaatcggcgccatcggat

SEQ ID NO: 147307 - DNA, 354 bp, Zea Mays
gcgagattctggccgtccgattagagatgtacgcgccagattagatctaggtttaactaactccgcgtgcgctcgcggatcgctggattcagatccgagggccatcgcgcgaccacgctaccgccccatgccagccataggatcagatcgaacggaagaaaacttgccgagagacgcgggtatgctatggtctaatccaagtcatagattgacagattgacgaccccgatccatcctagcgaatcggtatgcccaaaactaatcctagccgtgtgttccctgatcgacggtcagggcgcttctccccaattctctaacgcggagcacggcggcgcttggagccgtaccggcagc

SEQ ID NO: 147308 - DNA, 344 bp, Zea Mays
ataaccctatacctccaaggccactaccacccatccgatcgcaatgaggccaaaaggcttaaacacagaagcagagacttcacaatcatcaatggccagctatacaagaaaggaatcagccaacctatgttgaaaggcataactgaaaccgaaggcttagagcttctccgtggaatccacaacggtacttgcggatcacactcaggaccaagggcccttgcagccaaggtcattcgtcagggattctattggcccgcagtcatatgtacggccaaccgagtaacccgatcgtgcgaagcatgccagaaattctcgccccgaacaggcgcccctttgcaactcac

SEQ ID NO: 147309 - DNA, 503 bp, Zea Mays
agacaccactcaatttctctcgaatccccctggttttggccaatttgacttcgccggcgatggccgtgctggttcgccgcgcccgcgcggtacccggtggttttagctcgacctcgtgcctctgtcttagtctgtagtgttccccttaccctgctgtagctagcccaggccttagctcgcctgaaacctcccctcctcggccggaattccttgccggagttgtccgacccgcctggagcactttccctccgtcgttcttccttctctggtccctttcttgtggccagtagtcgaccagggcgttcgccaggccctctggacccgttccagccctccccagcgaccccagcccacctggtgatcgtgtctacctcgtctccggtgacctcgccgggcggaggagggaacgccggccaccaagtagttaagccccgcgcgccccatcgcgaccgtccgtccctgatccaacgactcagatccacagataacgattcgcgctcgcg

SEQ ID NO: 147310 - DNA, 1730 bp, Zea Mays
tgatttcagagttaagccatatgggtgctctttgggactttttgcaatttactccaatttgttccacaaaacttggaaatctccaaatgtaaaagttgcttaatttttgttactctaccactttgatatatgcactttggtccaaaagtgtatagaaattaatctcatctcatagagcactaattagggtttccagagtccttattagggtttgagtgttcttagggtttaagtggcacttaactttccaaatttagtctctctttaacatctccactaacttttgaggtcatactcaaattattatttcacacacctacatacttctaatccttgggtaagtaccctaccctagggtgaaagatcaagtcaagtcatcacaccacaagcttgtttcgagattttagcctagtggatgcactctaggtgtaacatacataatgaaatgtcaatgcatatgatgccatgcctaagttttagttcttgtaacaccggggtgttacataagccttcgcctggaaaaagcagagccaattaaggcctagatacagagcaacgaggaagccaagaaagtgcctttggacacatcggtacccaaccaaacggtcttaatcagcgaagacctaagcaaagcggaagaaggcaaattgctatcatgcctgaatcgcaataaggatatcttcgcatggtcaaccctaaacctcgttggcgtcagccgcacagtcatcgagcacagtctgaacaccaacacttcgatactccccaaaaaacagagactacaaaatgtcagatgagaagaccgaagcagcaaaagccgaggttcaatggctgttggaggtcaaattcatcgagccaatcgactacccaacctggctcgtcaatgtagtcatgatcaagagtagtaggcaattttgatctagttcagtgtgatgtttgggcatcccccgttctcagcatttctggttataaatattacttgctcattctggatgatttctctgattttatgtggaattttcccttgcgcttgaagtctgacacgttccctacacctctcacttctttgctttgggtttccactcagcttggtcacaccatccaaagtgtttagtgtgacaacgggcgggagttcgataactccgcgtcccgcaacttcttcctttctcacagtgtcccgcaacttcttcctttctcacagtgttcgataactctgttgtttcaggcctgccttcacgcccgctactgggtcgagagactggccactgctacccatctgcgtaaccgccttcctaccaaggcagttcgtcaccccacccccttctttgctctctttggcacctcttcctcctacgaccacctttgagttttcgggtgcgcctgctatcctaatctttctgccactgcccccacaagcttgtgccccacttcatttgtgtcttccttgggtactctcctgatcacaaggggtatcggtgccttgacctctccacccatagagtcattgtctctcttcacgttgtctttgacgagtctgactttcccttctccacctcctcttttgctatctctccggttggacaccatcctcgaggctgactatgtggtgccccctattgctcccctgctacctgccccgatgcccgcacgctgctcacacgcggcactatcgtatccagctaccggagtcctttgtgttgccacgcgcagctccctcttctcccacgctgcca

SEQ ID NO: 147311 - DNA, 715 bp, Zea Mays
ccaggcacctattggagtggtgcctggaccctcccctccaagcacctattacaatggtgcctggaccctcccgaccaagttagttagaagaatattctattttatgacgccaaatattcctcgctagaaaattgaatatttacaccatgtgccaaccgcctacctattttgctctgcttggtgcgaaagcttcggtctcctcctgtccgtgtccccttagtcttctgccattcccgctatcgcggagcgcgcgggggtcatgcttgttgcctcacctactccagaggcgtcaaaggtttccgtctacttctcatccaactcttcgatcactttcttgatttttgccacggtggcggtgctggagctgaggtctaaggtttcgaacatgcggtagaagcaccatataagcctttccataatggaattccaaactagaagatggaatatttacagttagttagaagaataatccattttctgatgccaaatattccttactagaaaattgaatatttacaccgtctgccgcccgcctacctatcttgccctgtcgggtccgaaagcttcgctctcctcctgtccgtgtccccttagtcttccgccattcccgctatcgcggagcgcgcgggggtcatgcttgttgcctcatctgcttcagaggcatcaaaggtgcgttgctactcctggcaacttttggtttctcattttctccatg

SEQ ID NO: 147312 - DNA, 705 bp, Zea Mays
aatttggctgtcaggttcatttaactgaactcctgatggtacagtgcccaccggatcagaccgccagcgcggctgtcttcaccgccgacgaccgatcttcgccgtgattcacgccaccgctgtaggattcgcgtcgccgatgacccgataagaccgccaggtaaaagccaccccctggggataactccggtgactcaccgtgactgcctttctgctttgcggctgtagccgataagctcaccgccgaccgccgcctctcggtcgtgtgccacgtggctcaactcttccaccgtgtcgccgtgacccgctactgctgtcaaatcggcgccggtgagcttgccacggcgttagccacgaattcaccgcgccgccttcttcctcagctccggccgccaacacggctcggccgaattgatcaccaccgcccgtcctccctataaattgagctcgtgactaactccgtgaggtcgtcagctaactagccaccactaatcagccacaatcatctaccagcgagcttgaatttccaatttcccccaacttcgttctccgccaccgtgaaacgagcctcaccgcggccaacccaatttaggtcagttcatgtttctctgttgcttgttctaacattctcatgtgcccttgatgctctccaaaccatccaattgaactagaccgccatgaatcgacgggaacacattcatctgc

SEQ ID NO: 147313 - DNA, 1569 bp, Zea Mays
gtatgataagtagaaagtcattattcgtttattaaggcaatgttccaaaagttaaataaaagcacctgaagccccatcatgcttacagttactgcaggttccatttgattgtgtgcttcaaatagctctaatacaaatacattccagtaatccaaggacacctgtaaagtttcataagaaggcctgtaaattatccaatgttgtaagatggtcttacagcatatttctgtgacaaaaatatttcagcatccctaccttaaaaacctctgtatcgtcaacatatgaaattccaataaggtactcgagacccataagcaaagcagcaatattttcttgagttgtttccagtatacgcatgtgattctgcatttagcatgaaagggaaggggttagaccaattggagactcatttgtttttatggagtatctttgtcatttctctatttgttcttttcctagtgtataaaatgacaagcaacataagatgataaagtacagtctgaaatatggtgtgttgcattttagttacagaacttagagaacactctacaaatccatacaaatattggtctactaccctaaattgatcttctactggagaactagtattcgagggacaaccttaccttaaaaaatgatgtgaagaagagtgcaagattttgtataaacgcctgcacaaacgaacaaagtgtgtttattaatataacatagagtggtatagaagtagggggagcatgaatcatggactctcagaatatactactatgccagataatatggtttcagatgtacctgctcttcagtggaaccattagcatatacgtccgggattttttcaggaggaagaatagcctatatgcaaaaggaacaaaaacttcaatcattaaatatctggaaaaaaatagtttacttgcacagaagaaaaatagtaaatgtcttcaaaattacctgcaactgaataatgaaaaatgtatatgtcttcacatactgcacattataaaaatcaccaaactgaagtgctgcaacctgcaaggtagctagaaatataagagagaattgaacacagaatttctccagttggtcccaaacgtaagtgtcaggttagtgtaatatatatatatatacacacacacacacaacacggagctcccaaatactgtacaaaagaaattgtttccacatttgtcgttgaaattacaaaatatggctaaattagacacagaaagcctaggtgtccttacctctgttaggcattgaagtgtaagattccgataagcagccatagggaagaacttcagtaatgtctccagctaaataaaaaaggaaaaggtaagggccagcattttcgtaggcacagttggtatcagtcactcacaaagttcaatcatcaacataccaacggtgactcaaagatgaatccaacagggatccatgataagaaagcatggagtgtcgccaatgtagcacggatgagctctggcctttgcgttgcagataggacatataaacatagctcgtgaatgagccggaactcactgaacgaagacaataagatatcagctaaaacag

SEQ ID NO: 147314 - DNA, 498 bp, Zea Mays
cttgcctattatcacctttgacccttgacctctctccatatttaccatgatgtttacctatttttcttagcctcacttattcccatttcaatccaagagtgttgttttccctatcctgctcttgttcgtttcctttccctttgtcgctttgcagccttgcctcaccttaacttcatccttggttgagcttttgtttgatatcatccttacctttgtaatctgtagatcttgccttgatacttatcttaggtctgcttgttgaaatcccctcttttcgatctcaatacgagagctatgttttagttatctcacccttggctatatcctcttctttactgcgtaagccttgacatacctccattctttgttgtacttataccactggctcttctgtgctttcgtcttttcccttatgcccttgtctattatcgcctttgaccgttgtgatattgaggccttccacctaaatgttaactttgaacttatcctttaaaagtc

SEQ ID NO: 147315 - DNA, 419 bp, Zea Mays
gcacgtgtctatacgcaattaaacatacatatgaagagggtagctggtaaaatgttcgtctttttctaccttggttcggcgacggggatggatttatagcggcaataaggagggcaacagggaagtcgacgatgtggtcaagttgcagcgaacagcagcacgaagggcgtggtcgttgcgcggtgatgaaatccgttgaacgacgaatggcgatgacgtcgggtgagcagttacaacagtgtcaagcgacaacaaaccaggtggctgacttctcgacgcatgcagcaagagtttcggcgaggtactgcgcagcacggtgacaagcagaggtacgcagcaatggcgggcaacagcttacgcggcgcagagtcacaaacgaggagtcgacgacgacggtggtgctgctgcgcgcgtaggca

SEQ ID NO: 147316 - DNA, 301 bp, Zea Mays
ccttccatctattcttgatctcttcattcttcactaatagttggtttgcttcatccttgatgcatttgacttggttgacatcccttgtcttcctttcacgaatcttggccatcctatagatatccttttctccctgctttgtgtccaaccgttgataaaggttgtcataggcttgaccccaggctttactaaccgctcgctttgcagacttcttcgctatcctgtacttctctatgttgtctacacacttgtcatgatgtaagcgtttgtagcaatctttcttctccttgatagccttttg

SEQ ID NO: 147317 - DNA, 375 bp, Zea Mays
ccctcgtcacagccaaaggatccacgcaatactgcagatgctgtttgcttcttctatgaaggttgatgacttgggggacaatcacaagcttttgctcacacagagtgcactgcgaagttcagaaatattgatggatcagatcctttaggctggttgccttgtcttctgaatatcttttcaccttcatcaacatcatgcctacaacacgaatacacgattaaacattcatgtgtattaactatactcagcatgatgatgattatgcaaccagctacataccctgtgtttagaatgagtgtatctcatatacggtttacagcaatagatacttgtgccttggagtatggaatttttaaaatctgcttcatgatatca

SEQ ID NO: 147318 - DNA, 696 bp, Zea Mays
atgtatgccagtgatagaaaatatgcctttgaatcataccatagatactcctcaccacactttgtacggccaagggatttccttgccccaacatcccctttttttggcaaaaacagtattggaacaagatcatattcagacaaaaaaattacggtgtcttaggagtcaaaatagtttgtcgtacttaccttacatgcatggtttatataaaggtcgacctccacataatcagtattggccgtaggtcgttccactatcatgtactcaatggcagcatcaacatcaccagccatttctcccaaaacctgtatggtggtagcagatttcacactagaagaaaaatggctaataacaaggaatctaaattctctcctgtgcgttctagaaaaacaaggaatctaaattaaagacacaattgaactgcaaaaaaatgtgatcgatcatctcttttattaaaactcggtgggattctcatccgctcggtagctccacgtcgaccaaaaaatcgtcaccgtttgtgcagctcagatcctccgccggcatggctcacgtccgtgtgctggtgttatcccctcatcccaatgtcaccacgccctcccccccacccccacgccagcttcgtcgtccgggtccgtggatacagtctccctctctcggatcctccatcggtggccctgtcgatccctctgctgtcac

SEQ ID NO: 147319 - DNA, 417 bp, Zea Mays
tgaaaattgtgagccagtggtccaataatagacttttagcatggcttcaacataagcctacatattacagatttgattggtttgttgtacctttaagttggtttctttccaagtttattagctaataggttagcaatgaattaattctattaggttgttaggggcatctgttttaaaccttctgatcacctcctgagattaagcgataatagactaaggaacacccatataatttatacctctcatgtttctccctgttcttctgaacctctcagtaagaaaaagcataaaagtgattaagaacactaccatatggacaatgggaatttaaatgtgttattctctacatttattttttgtagggaatatcaatatttgagtagtgttgcaaggcatatttgattattaatttcgctt

SEQ ID NO: 147320 - DNA, 428 bp, Zea Mays
atccagaagaagaccactaaccaaggatgccagacagagaagaagaagaagaaggcccctctagccctacctcccccccagaatagatgactggtccgacgaagaagatgtatccctcgccagcctcgatgatcttctcaaggcatttggggacaccttagacaaggaactcgctagtacctcgaagaacgctctcgtgtagtcccacctgcagtagtcttatgcttgtaatgtgatggtgtaatgaataaataacttggttgaaaacaatttgcatgtgcatgatagtgactctcttccctggcagatgtctttggataaaaccacgcctaccgcctcagggattggagcaggttttccccgaagagctgaaggggaagtcgttagagaagaaagtgaaacccaccttcccgcacctccacccctac

SEQ ID NO: 147321 - DNA, 563 bp, Zea Mays
gattgggcgctaaagagcagccggggcaccggtattgctcgttggagcgtgagctccgtcgtgcatctgatcaccgctgtggccagtccctctaccaacctatcaacaagtaagttctctccgtggacgttcgccatgttccattgttctagtagtagcaatcgggggaccagatcgctagggcgccatatgtcggcgagacaacaccacaggtgaggtgagagagggtcgtggtgcgtcgatcgagacacctgtggtcgagattagaaataggaaactgattcagtctagtgcaatgagaaccctcaattgcgggatgtgagacctagattagaccgagcttcattaaaatctggacgttgatctccgatcctgcggctgtcatttcataccggtttagattgatctatggccgctcgaatctaatccatcgtcggagacaagtgcataccccttcggctcagactttttgctaaagagaccccaaaaaagtggattatcaacccaccatccatagtctgtgtaaagtaattacatcaaggtccctgatatttgcaataaag

SEQ ID NO: 147322 - DNA, 602 bp, Zea Mays
agagcacccatccccactgcgcatcttcgattcgattccgtccccttgcctcttgcctcttgggcgtctccgtggctagatggcgtctccccctcccttcgacctctgcggcgatctcaacgacgacgacatcgatgaacccgtcaccaccgtccctaaggatcgtcgtctccctgccgccacccctacgatgaacggcctcaacgaccacctccttcgcttcacctgcagactccagcgccccgcccaaaaccctaaccctagccccaatccgccaccgtctccgcccccaggtactgtacgaccttctcttcttgcttcattgtttttcctcgcccttcaatctacttaatggttctaatttcttccttcgcaaaagccaccgccgaataacaagtcaagaaggtcaagctagatggtgtctccgtggctagatggcatctccccctcccttcgacctctacctccactgctgagttcgccgcctccactgctgagttcgatttagtggagcctacaaccaaataaaatagtgtaatctactcctttctcatcgagttcaatctccaaaacagccaagagaaagaggaaattgtactgca

SEQ ID NO: 147323 - DNA, 889 bp, Zea Mays
ggcgtgccgaggcagcgtcgtgaacattggcatgtgtgccatgaactatgaccttaccacatgtgttgttggttctactatgtgccgtcatgagtaacccgaacttatgcctccctattgtgtcatggaacgttcgtggtttaggcgattcagataagtgcaccgttcctgctcaccccgttttcgtttccatctaggaatcaaaattgtgtgatctttacactttcgctaattgtgctttccttcccccaaacattcatgattttgaatatgtccctgttgatagctctcgtggtggtattatcactgcttgagactcctctcgcttctccattatctcttgcacccgaaaaacctactcactaaccacaatcctctcctcgtctatctttgacgccttgataaccattacaaatgcctatgcccctgcttaccaccctatccgccccaccttcgttgtcgagctatctgagctcttcatctcaatgcaagggccttggctccttcttggtgatatcaatcttgtttgttccccctctaaaataaacattgatcacatgaacaacagactctgctcatccttcaataccaccctcaataacatgtgtgatgaagctcccctgcttggctactcctttaccaggtccaaccatcgcgctaaccccactcttgctaggttggaccatgccttcctcaacacccagatgttagcctattttccctccatctccttgaacgctctaccacgccccacatcggatcataaacccatcttagtcgtcatctccacattaatccccaaaacaaaaaaataccgcttcaaaaatgcatggctcctcaaccacgccttcctccctactatgatcccaacttggcatccccctgtcca

SEQ ID NO: 147324 - DNA, 311 bp, Zea Mays
cgacggctatgaggacggtgtagttggaagcatgttgccaccatccatttctgcgtttatagcattcacttggaaggaaacactgccataaataattgtgctttcggtgaagctaacattccactcgaaagacttttccagtagatctgtaatttctcttggaatgaaaccgggtggattagtcgagacgagggtgtccacatttttttaatgaggcgctgcgccattcgtccaaagaagataaactcggcagtgtcagtgtcatcttcagcggtgagggatatcttgtacctgcacagagtggttcgatt

SEQ ID NO: 147325 - DNA, 375 bp, Zea Mays
ctgcagacacaaaaaccagggagctcggggtcccaatcataaatattaggacttataattccctatagcactccccggacgacaggtttatttcgaaataaggcagggtctctttaataaaatcgcccgcggcgaaggggtatcgatgatcgcggaccgtagatcgcttgatcagtggtcgtgatcagattacgaaccggtataccacgactgccctcagatctcgatccgacgcccgagacctaatgaaggcgtgatctatttcgaaccgtaggatcacgatctaacgactcccttttttaccaaaacgaattggtatcatctgatctaatctccaccgctcatcacccgctcaacggtccaccagttgtcttc

SEQ ID NO: 147326 - DNA, 621 bp, Zea Mays
ggagaatcggcaggattacaaagaatcctgagcccgccaccagagccggagttgccgaaggtgcctagagctcctgtaataactcccaagaggaggagaatggctagtgtgctggacgttgtcctggagtcaacaagggcgtaaactccttcttctgcaaaggagactgccgaagctgctacagttcacgttgaagccgatgctaggccctcagtgcccattgaaacagagcctgttgaaactggcagagcattgaagaaggaccttcagacgttggtctggttttggagaaagaagacgtgcccaagaaggttcaatcccctactcccgaagcacctactgaagagcttgactttattattcgacatgcttcgggtaaaaaattgacaacagaggaaattgcggaagccaaacactatgcccgggaactgaagtacccgaagggggccttggtgtataatggcaccaacgaagatgattttctatactgccttccgaacaacaaggaaatatttgtttgccgggagatggcaaaaacataggatttccgaagcttgaagttggactttctgctatgtcgaaggatgacctcgcagacagccttgcgtacaatattctgaa

SEQ ID NO: 147327 - DNA, 749 bp, Zea Mays
gttcttcttcaacctccgattatcccgccatgacgtcgtctgcacgccgcgcggcgaacgcacccgcaccacgcaccatccaccacgaactctgtcggtgatgcctagacctcgcgcacacaccccactccgcccccactatgttcatcggcacggggaatcgcatcaacacgagggggcggcctggcggccaggcaccacaccgactggcaatcggccagaacccgcacaacacccaattccgctcaaattgaagcagggaaggtcatgaggaggaatgggggagttcttacaggtgattgatcagctccgagcgcagcacacgcggagcgcggattcccattgacgcagcgcttcttctctctctctcagccttacgacgaatctagggtctccagacttggacgcaacaggaggggggttacgagggggaggccgaccccgcttatatactttccccggagggctgtccaggtcaacaccgaggcccccggatcacggccagcggcgccatttccgcggagttgttgcagcatccgcgcgcccacgatgacgggggaagtcgcgctgacatcgcggtccatacgccagtgaagaagagaaacatcacgcgcccgcggggagttgggccgtgcgatagagtaggcgaggtgggccgtgcggtaaaaacgaaatggcttactgggccaaggagaggagatcagagttgggcccaggcgcaattctctactctattcttttcctttttc

SEQ ID NO: 147328 - DNA, 413 bp, Zea Mays
atcgtcgatcctgggatgtgcggtggagattcgatctggcgtatctgttcgcataatggattcagtgctattggatcggatatcagcggatagaaacgtatcgtgtcgtgttgaaaccttgatcgtagatctctaatccgacggctagatctgtgtactagtttggtttatagagtgctctaatcggggccattgaagcagattgaacggctcctggcgcgtgccgcttcatgaaactcgggatcgaatcgggatcgaatcctaatcgtggaaccttgattagacggtcaggatttcccgatactcgttcggcatggtggttttacataagagcacctacaattttgacttatcaacccgcagtccactcttgttgtagaataattatagccaggtcctatttttgatacttt

SEQ ID NO: 147329 - DNA, 1442 bp, Zea Mays
tgaccagggacaggaaggtcaaagaaagaaacggtggttctcatagcagctggatcaatattgggcttcattgtccttgtcatgctggccatcttcgctgtgcaggcggttcggataaggcgtatgacctctatattcctatccctgccccctccccctccccggctccccctctccatgtttacaagcgaattagcgtgaatatagaagtgtgtaaattacaacttcctatgtccaacactccaacgttatattattgcagtaaacgtatctctagtttgaccaagtttatatgataaaacaatgacatttacggtaccaaataaatataattagagtcataattttagtaagtcaactcgagatgtcttaactcttaaaaaaagttaaaatatcttatactttacaacgaaggggagtatctgatacgaaactctaatgaactaggtcggaacttgataattcaaatgacggaggcagttgaaacagcccaagatccctctgtttcttccattgctctggctactgtcaagagtgcaacaaggaatttctccacaaggaatgtgataggcgaaggcactttcggcatcgtatatgaggttagtcagctgctattttaatcatctttccagctgcaaagcaaaactctccagctagatactgaatcaggctcctagcttgctgcctgacgatgatgttcagtttgcatggcattgatcaaatccccagtctcattatgagttagagcaccagagtgatttacttactgttcaatgttcatgtccctctaaactgaaacgcagggcaagttgcccagagggcatccgctcctacacgtgctagccgggagaaccattgccgtgaagaggctgaaatcgatcggcgatcttccggacataatcgtcaggtatttcacgagagagatgcagctcatgtccgggctcaagcagcaccggaatgtgctccgcctccttgcctactgcgacgaagccagcgaacggatcctggtgtacgagtacatgcacaggaggagcttggactcctacatattcggtactggcaaagcatgataaaaccttgtttttttaaaagaagaagaagaagaagaagaactgctgtctggatgttgcttgtgtttttgtaactgacaggaacacctagagaacgcgcgctgctgaactggcgccggaggctgcagatcattcaggggatcgccgacggcgtgaagcacctccacgagggagaagggtcgtccggcaacgtgatccaccgggatctgaagccggccaatgtgctgctggacggcggatggcaggccaaggtggccgacttcgggacagcaaaattgctcgtcgctggagctaccggaactcggacaaggataggcacagcgtaagaaagatcaccgcagtgggcttgtcttcgaatcagctcgctctttc

SEQ ID NO: 147330 - DNA, 584 bp, Zea Mays
ataaaggaacaacgaacaagcacaaactaagttgtaatcaccttgagcagttctaaccacgaggggggatatgagcaggcatggcgaccacaatcgtaacagcggcagtcagcggacaaggaggcaagcgatagggtgcgctggtagtgtaaagctccgatttgtgacgggcgagcaggtagactcgaacacgagggcacatgaagccttttcactgggcgtaggggaatacagaaatggcaagaggaggaaaatcatgcagttgcgcttgagcttatcacggtaggaaaaagccttgatgcacggtgccagctcctggttttcaaaagacacgcggctgccataggatggtgctcaaccaggttggattatggataggcggtaattttttttttaccaacatcgatcaatctggaaacaacaaagaggctcgaccgacgtacacagcctgagtatgccgcccttattgcccaaacagatcacagctagccagcacattgcaccagaagattcattcattcgggtgatgtccctttttttattaaataggtcaaactgaatggcgtaagtggaccacaacagag

SEQ ID NO: 147331 - DNA, 633 bp, Zea Mays
tagtgtatactagccttcaataaaaatggaacatttgcttaccgatcatttaaaatagagtgcgggaccatacaggcatccatctgaatctgatcacgaaacattagaaacatgagtgcaggatcgtaaacacattctgcggaaatgacaggaaggacaagatatagcttgcagacagacgacgcacctgaatacaagtgcttagatagtgcagatgcctgttgccaaacgttacagacatctgaatatatctcaagttttcagttcttcataaaactactatgtaaaagctaaatcagtatgcccatgtcaaagattcgatgtttacgtgtaatcctaactcgataaatcccccaatcctcaaagatcgttcttttcatggtattctatagttacttgttactcaacttgtttgagattaaaaatgctttgctgctgtgttattctagttattgaaggtagaccagttattcacagacaccattaaccccgttagttaattacttaagtgtacaggtcccttcaatggaaaatcatttatcaagttgcaagaaagttagcatacattactcaaaagagctaagagcggtgttgcaaacaagagttgtctctgccctaacatatactctctcc

SEQ ID NO: 147332 - DNA, 734 bp, Zea Mays
ttgctatcgcctttacccttgtgatcctaccttgatgttatcgtatgtctgccacttaaaacctcccttctcccctctcaattcgagagtggtgttttgcttaccccgcgcttggtcataacctcagctttgccctgtgcaaatcttgtcttaactcaattctttgttgtactcatacccttggttcttttatacctttacctcttctcttacacccttttctgttaccaccttcaacccttgtaatacctatatttttaccacaacacttactttgaacctagcctttggagccttctccttcccattcgagttcaagagcggtgctttactatttcacccttgattgtttccctttcttttccaccttgcaagcttcgtcttaattccatcctttaatgagtttttgtttgctaaccccattacctttgtcatccatcgatctcaccttgatacttatctttatggctgctcttcaaaaccccctctcttccacctctatttgagagttgcagtttacttatctagcccttagtcgtatcctcttctttgccactcgcaggtcttgtcttaactagacccttcgttgtgcttttggtctgttatctgccttacctttgtagtctgtggatcttgccttggtacatattttaaatctactttttgaaaatcttctcttttctatctcaaattgagagcggtgttttgcttatctcacccttggccatatcatc

SEQ ID NO: 147333 - DNA, 936 bp, Zea Mays
catcaccttaacaaaagaaaccatcccaaaaatttggagagagagaaaacaatagcacatgccatagtaactactactcctacaagcagctcaataaccagaccactttaatcctctaaccttggatcccagaatcaaggagagttgcaaacattgtagaaggcgtttctccttcatgtggcacatacatatcgtcctccagtttgactggcttcagcgtctgcctcactgcttgcctgcccgaactgtaagctgcgcctgatgcagaaccgccatcgagagatgtccttttcggcgaaccgaacagtctcaatccatccaagctttctacgttggaataatcggcagcttcctgctttatgtcttcaaggagtaaaccggcattaggctgtcttgggatgctttctccatcatataacagccttggtccagaggtcttggagagtgatcttcccagcagaggagagacatttgaagaagacaacctcttcctgtaaattgcaaagcgaaacacataattagcaacagcagtgactaaggtgacaggacactagtgcagcatatgcctggggtatcgatgaactgacacatcttataaccaatgaacccatggaggctcgaattggcacgcgcaaacccagagcacatctggacgaggccagagaccatcgcaaatcaaccaatccccaaaaccccactccctcccacccacaacacatttgaacctcaaccatcccgaatcaaaactacaccgccacacccgcatcacctactcagcagcgcagcatttgggaacgcaaatggaggaagagaacacccgacctgtagcggcggtactcctcccgacggccggacgactccgggtcgaagtagctcggcatcgccgccagcggcggaggcggcggcctgggcgagcgcgacgacggcgaggggtcc

SEQ ID NO: 147334 - DNA, 477 bp, Zea Mays
ccggcggctataaccagagcgacggcatcgcccttaagggccaccacgtcgcgttccagatcttcgtcatctccaacaccgtcgccatgtgcagctccatcgtcgtcgtcttctgtttcatctgggcctggcaggaccccgtcaggttcaaggtcgaccagctcttgtggggtcacaggctcaccgtcatcgcctgcctcgccatgctcgtctcgctcatgacggccgtctatatcaccgtggcacccgcgtcacggtggccggcctacgttgtcatcgccatcggcaccagcacaccggccgtcgtcgttctcatgctgggcaaggaggtgatcttcgtgccggtgtaatcaagtgcctacacggcttgtgtaatttttcccattctctacaggccatattatgtgttattttgactacttaaacaggagtgcagtagttacgaagatcgtcagtgaaaaaaaaaccttagtaaca

SEQ ID NO: 147335 - DNA, 283 bp, Zea Mays
ggttttggaaattggttagacggctctacaacgctcttgctctaaaccttgtttcttgggtctaacaataaataaactatcagccactgaaattacggatctactttcttgcgacacttcggctatgactcgtaaaaataagagatcattagtcctagagccagcgggttgtagttgacatcaactgcttctacatggtgattcttgctcaccttgaatttagatttacaacccaccacattgagctggtactctctttttctcacccgattggcagcctata

SEQ ID NO: 147336 - DNA, 382 bp, Zea Mays
gaagaagggtccgaggccatggatttcacgatcaccggccacgattagatgaagtgttgcgcgtgtggtagccgtgggatcgtagatgggcggtaaagatttaatcgcgcgtacccccctaggcgattcaatctggaccgtagagttgatcggacggtttgtggtaagtagggcctcaaaaaaatctgaaccctggaattccgatccaatggtggctagcgcataccgattcataagcgacaggatctaatctcagccgcaagacttagatctaacggctcctaatacccgataccccttcaacccagacattttgcttaagagcccccgtagttttacgaaataaacctgcagtacatctcggtgtagcctgagtcttgag

SEQ ID NO: 147337 - DNA, 488 bp, Zea Mays
gtagataacttttatatactacattaaacttatatgtagttggagtgctccatcaatttattgattctaagatgagtgtatggaattatttaacgaaggaggtccaacggtgtagctgatagagttagagatgttcaactttaaaaaaaaaattatgcctaattttggtggatctaatgatagagctttctcaacgtgcgcttagagcatgcaaggctagatgaagcagaggtttgacggcacggaggcaaaacggccttgtcacgtggccagcccatctcgaattcctcgaagcaggcaagtagtagaagagcacgtgcaagcgccagagacggggcaatgtgtatagggatggagccagacagcgcgcaaaggtgcgccgccagtgacaatccgcaacacagccagcgcggttagtagcgagcgtgacagacacgaggacgacacggcctgcgcgcggaaggagacgtggatggaggtagggctgg

SEQ ID NO: 147338 - DNA, 581 bp, Zea Mays
cgcggctataaattcaccccgacctcgccctcccttctcaaatcaaccaagccctgaccttcgtctccaaatcgcgaagcagtagcaacccttcctgacctccactagccgccctggccgaagaattgccaattttccccaaaacagttcgccgcgccacccaaaacagcccgcccgtggccagcttgctctggtaagtcactatccgatccttgtgttgttctagtgcccttacatacttgcgaaactcatggtggcgtccggttgctctagtcggccatggtttggcgggaacgtatgctcccaagctcggtgtcccgccgtagcccaccctcaccgtcgacctgctcttcggctcgtattctgcccaaacccaagagtgtgcataactcctggtgaacccgtgaatccttcctcagcctcaatttggtcgtccccgccgtcgtttggtcggaacgcgttcgttcctataaccatccgcctgtcaccatgaacccgttgttccagagctccaattcaaaaattgagtgaggggaaacctccggttaggtcggaatctggagtcagtcgtcggtaagcac

SEQ ID NO: 147339 - DNA, 893 bp, Zea Mays
atcagatgaatcctcagccaacatgtctagcatagcacttatctttgcatcactcgggtttataggcatctcaaagtgaacttgcctttcatcgttggggagatcaccaaatgaagcaaccggagcctcgacttctttgagagagggttgcactctaagacctaggccactgtcgctagcaggaggattggacacaaaactgaaaaaagtcttggaaggtggcagattccaggaagaatatgcaacaggagcaccaatattcgacactttgcctctaaggatcatctccaaccggcttaccaaatccatagcaggaatcctcctgttggtaacccgggttgaatcagtgacaccactatacaaataagccaggtatgctctgtccttcagtggctgaatgttcttaaaaacaaagtctgcaactaccgcatcggcagtcagacctctctccttcaacaaaccaacttcggcaagcagaaccctggactcaactatctccaagtctgtgggggattcagtccaacttggagcacgaacatctggttgcctccctgaccgaggggcagggacttgccatgattctccacaataaaccactccaagcgccatcctttgatgatgtccttgagtgggatgtcgaggtactctgtcttccttccacggcgcatctccaaactcgcgccacccatgagctggtgctgccccccggccattctagaccgacaatgatataggtacttccacaagccaaaatgtggcagaattccgagataggcttcacacaagtgaacaaaaacagaaacttgcagaatggagttgggattcagatgagttagattcagatggtagaaatcaaggagaccgcgaaagaaaggagaaataggaagaacaag

SEQ ID NO: 147340 - DNA, 363 bp, Zea Mays
accgtttgttgttactttagtttcccatcgtcctttcgtccctatctcgtttatcttcggatttttgaagatacagagagaacctatccactatcctttagctgtgttgccctgtaattatttcttgtaggaactttagtccaacaaataaggatttggagtgtgacgtgatgccatactagattgaaacacatagacgagcatggaaatgaaggtatacaagactgggggagcatatagatagtgttgagagaccatgtgaggtgattttaaatcatgtttggatctagatgacacactatggtaagttcaaggacctaaaattaaaatcttaagttttaaactagatgacatcccaagttg

SEQ ID NO: 147341 - DNA, 368 bp, Zea Mays
gtagattgtagtggaaggaggtcaaagggtgagggacgagtgctcgtaggtgacacatggtgcccgtgcggtgggatgttgggcagtagcgatgatgcaccaccatggctaagaggtggttttgtccacaatgaggtggaggaactagagtagcaatctaagtagaagtgttcttgtggatccactggcattactgaggcgttgatgatagtttatgggataccaacttcaagtagtagcatatatgtagtaggtggaggtcaattgaagttatgtatctacgatcctcatagagaaggatgtagtatggtatcccgcggcatacaagggtggtgcttgcaagtggagttgtagtgaggtcaaacaac
